United States Patent Application Publication US 2005/0228172 A9 - sequence listing, part 59

SEQ ID NO: 250447 - DNA, 568 bp, Homo sapiens
gtatgtcagaatttctttcctttttgtggctcagtaatactcgattgtatatatgaatataccacattttgttatctattcatccatcagtgaactcytgggttgcttctgccttttggctgttatatataatgccgccatgaatgtgagtattcaaatatctgtccgagtccctgctttcaatccttctgagcgtgtacccagaagtggaattgctgggtcatatgataaatctgcttagttttctgaggaactgccatgctgttttccatagcagtggtactattttatattacaccaatggttcacaagggttacgattctccacatcctcaccaacatttattttctcttttttttttttttggtaacagtcatcctagtggatgtgagatgatatcttattgtggttttgctttgcagttccctattagttgaacatgtctttatgtggttattggccatttgtatatcttctttaaagaaatatctgtttaagatctttgtccatttttgaattggattgttgagtttcagtggttctctatgtattctggatatcactcac

SEQ ID NO: 250448 - DNA, 555 bp, Homo sapiens
cacaaactccctcaacttctatttatctgggaatctctttttttcagttgttaaattttaatcaaagcttgtgtataagattactttattcctgcatcttctcaattgtttcttccttgtgtttgaccttttcctttcccatttggtgagatttggctttccattcaaggatctttttgtggtctttgtctgtttttagcctagtgataaccaccttgctggggtgaatgcatatgtggacagtkgcaccattagccttttcctgctgcacccatacagtgtagataacatatttcttttataaacctggactactttgccaatttgctgaccttttatagtgtcctcatacaacctgaacttcatcatcctttcggatgggcagggaccacacgttgtacttctgtctcagctgtttggaaagaggggaagacatctttctgggaatgtgggaaggtgctttgaaatgccttttgcaattcttccttcggttggaagtcacaaagggattgaactttgttttggttgctcccactttggtgatggctgcaaaag

SEQ ID NO: 250449 - DNA, 542 bp, Homo sapiens
tttttttaaatttatttttattttttagttttagtttttttctttttaatctcaagctccamcagaatgaaaggaaggggcttttaaatcccaggtggtattgacagatactgtggtttttctgtgtcctttcagttttaccgatccttgaacatccggattgctctcgtgggcttggaagtgtggacccacgggaacatgtgtgaagtttcagagaatccatattctaccctctggtcctttctcagttggaggcgcaagctgcttgcccagaagtaccatgacaacgcccaattaatcacgtaaatagcctttttccatatgttgtgttgtccttggctgcaaagcctctgcccacccagcacatgctcagagtttgccccatggcgagtgttggttgtacaaggccattctgactccctggtccagagaatcaggcatttcctaaacatgcgctctgtacccagcataccccagaaaatgtttaaaagcctgagtcacattattcctaagaaatgtttacagtctaatgggaaaattag

SEQ ID NO: 250450 - DNA, 542 bp, Homo sapiens
tttttttaaatttatttttattttttagttttagtttttttctttttaatctcaagctccaccagaatgaaaggaaggggcttttaaatcccaggtggtattgacagatactgtggtttttctgtgtcctttcagttttaccgatccttgaacatccggattgctctcgtgggcttggaagtgtggacccacgggaacatgtgtgaagtttcagagaatccatattctaccctctggtcctttctcrgttggaggcgcaagctgcttgcccagaagtaccatgacaacgcccaattaatcacgtaaatagcctttttccatatgttgtgttgtccttggctgcaaagcctctgcccacccagcacatgctcagagtttgccccatggcgagtgttggttgtacaaggccattctgactccctggtccagagaatcaggcatttcctaaacatgcgctctgtacccagcataccccagaaaatgtttaaaagcctgagtcacattattcctaagaaatgtttacagtctaatgggaaaattag

SEQ ID NO: 250451 - DNA, 516 bp, Homo sapiens
tgatagccccctttcgattgtattaatacaaaggaaattaaaaaatagcatgattctctccctttcttctgctcatgcccagctttggattttcataataggagggtaacatttagaggtcttttttacattcgtgcactaacctggtacaaatagaagtaagctgtttgctgttttcttttaggtgctccaaaatatgcatgactttagaccacaaagtcagagaaataccytgttttattgtaaaagtgtaaagaactgagcaagtgaactggcttttggcatgtattttcttgaagcctctatctccaccaactccttttcctactgcacccagattcacttcagttttcccacagttccaagcccacagttccaagcccaactctgagaaggtgctgagaagaggaaatccagtaactgaataacagccactctctggactcttgcccctattctttttgtatcctctagggagctacagtgtcacttactaggtgcatgcccctgaatggg

SEQ ID NO: 250452 - DNA, 373 bp, Homo sapiens
actccaagtacagtttgaaggaggttgttytaaggcaggaggaggaaaggagcctggccttgctggcagtgctgggtgtgaatgggaaggtgtgccactccctttgcccaactcttctgtcctaatccttagaggaatccatcaattcctaccttccagattatctacaaggatacagctattgtctatgcagcctgttagaagcaaagtcataattcaaggcatgcctgtcatcaaaatgttgcattggaaaagctgtgtggaccagtggctaaaccacaagttttacaaacccaacagacgttccttgcattggcaaatcaaaagctggtctgaagccagatgctcagtgtcttccagcaatcctcatcaa

SEQ ID NO: 250453 - DNA, 613 bp, Homo sapiens
gaagaggcaggagactttaagttactctgcataaatccagccccatttatcttcagctttctttctagacagtccagtcagggcaagcaagcagggaagaggctgaagggcwcttcggggaccaaattacagtttcaaaatggttcttgtgttccaggtgtaggacaatgttatctgagaaatcttacaaagatttggtgttctttaaagagctctgttaaaacatttaaaatgatcaaagattacatcattaaaaaaggagggaagtgaggttgagaagctttatttaaaatatgttttaagcagttctggcccaaatactaaaactcctgcaaatgaatgaaggaaaaaaaggtcactaaaataaaaaattaacatatcctttaaaatgtcacttccaagttcccagcaaacatggcagagtccacagagtattgattgcatcatgaaataatcattaaatttctctatgcatttctgataccaaaatttaataatgggacaatattattctttgaatcaaatctattttggatcttttttcaagcttgagttagggaagaggccattgaattttttttctttggttcttaaaaatcctctctatgcacaa

SEQ ID NO: 250454 - DNA, 613 bp, Homo sapiens
gaagaggcaggagactttaagttactctgcataaatccagccccatttatcttcagctttctttctagacagtccagtcagggcaagcaagcagggaagaggctgaagggctsttcggggaccaaattacagtttcaaaatggttcttgtgttccaggtgtaggacaatgttatctgagaaatcttacaaagatttggtgttctttaaagagctctgttaaaacatttaaaatgatcaaagattacatcattaaaaaaggagggaagtgaggttgagaagctttatttaaaatatgttttaagcagttctggcccaaatactaaaactcctgcaaatgaatgaaggaaaaaaaggtcactaaaataaaaaattaacatatcctttaaaatgtcacttccaagttcccagcaaacatggcagagtccacagagtattgattgcatcatgaaataatcattaaatttctctatgcatttctgataccaaaatttaataatgggacaatattattctttgaatcaaatctattttggatcttttttcaagcttgagttagggaagaggccattgaattttttttctttggttcttaaaaatcctctctatgcacaa

SEQ ID NO: 250455 - DNA, 613 bp, Homo sapiens
gaagaggcaggagactttaagttactctgcataaatccagccccatttatcttcagctttctttctagacagtccagtcagggcaagcaagcagggaagaggctgaagggctcttcggggaccaaattacagtttcaaaatggttcttgtgttccaggtgtaggacaatgttatctgagaaatcttacaaagatttggtgttctttaaagagctctgttaaaacatttaaaatgatcaaagattacatcattaaaaaaggagggaagtgaggttgagaagctttatttaaaatatgttttaagcagttctggcccaaatactaaaactcctgcaaatgaatgaaggaaaaaaaggtsactaaaataaaaaattaacatatcctttaaaatgtcacttccaagttcccagcaaacatggcagagtccacagagtattgattgcatcatgaaataatcattaaatttctctatgcatttctgataccaaaatttaataatgggacaatattattctttgaatcaaatctattttggatcttttttcaagcttgagttagggaagaggccattgaattttttttctttggttcttaaaaatcctctctatgcacaa

SEQ ID NO: 250456 - DNA, 550 bp, Homo sapiens
aaatttttaccttaaaaagtacaatccaatgtcttatctctctgatcctaatttctgccaccactctctctactccagccccactgtctccttaatgttcctcatcctttgtacttcccattctttctgcctgaaaactctcttctcctagatagccacacagcttctgcttcctcatttgtctgtgcacaaataggtatctcaaatcaaaaaggtccacctttactgccttatataaaatatcactataatctcactctatgcctatttcctgcctcctttttcttctctttcttaatgcttattaccgtttgtatacattatgaaagcagagacttgtttattttgttctcaactgtgtcacaactcctagaacactgcctgacactataaatatttgttgaagagytgttacaccaaatatatcttcaggatactacattgaaaaatcaaaggtatattcagtcaaacgtgatatttttaggtgagttgtctatattgtaaaatactcctgattgatattattcagtcagaggtgatatttttaggt

SEQ ID NO: 250457 - DNA, 584 bp, Homo sapiens
gttaagggaatcaagtccctgctcagtcaaaaccctgtgtttaactttttgacttctccaaattttaactactaattacctactggtgaccagaagccttactgatagataacataaacaggaaattatatgtattatataattataatatgtattatatactgtattatatgtattatatactgtattcttamaataaagtaagagaaaagaaaatgttactaagaaattcataagaaagagaaaatccttttacattactatatttattgatagcttaagtttacattgtctgtttccaagatgaattatctgtctggaatggtgggcaaccgcagctgcaacctcaatctacaatacatatcatgcaatttgactttttcttgtgtaggtcatggcttttctctgcttcttgggagccctttcagcatcgctagtggtactctgtgtgggtcccatggtgtcattcaaggtttatgatattgcactaaacaggatgaaaaatacaggagatccactagagattactttttactgtgatatgcaatttactgaagccataaatggctcacagggaggtgact

SEQ ID NO: 250458 - DNA, 470 bp, Homo sapiens
gaatccagtaaatttctgaccttaaaaatttgctgccaccagaagtaagtgaaaaaataattcatattggagaattccccagacagagtgtgccaagatagaagtcaaatgacaagaggtttctcctttaaaggcagtcctcctargttatggaatttccccactttctcatctttggcaggactccttgtttcatcgtgtactttatcatcttatacatacacaatcagtttaagtgcagggcttttagagtaatatgagaaaagtatgctgtacaaactgtatgcagttgagatattttctgaactaatggattcttaatcaatctatcaaaataatgccatgtttgagttggaaataagcagtacccaaacctttctaaatattcccttttttttttttttttttttttaacttttaaacacagacacttctaaaacagcttgctagactcctgtactctcaataac

SEQ ID NO: 250459 - DNA, 627 bp, Homo sapiens
cacagatatagaaaatgcaatataaataaaacttgtaacctttgtcatataagcatctttatacaataaaggatatttagacacagagaagttatccaaggttacaaaatttgttaagtggcagaatatagaatggaacttagttcccccagccataatcttacattatatttgagacaaatatttttattaagattgattccaacatattccatgatgaattttaagtaagaattgtgttacagcttgaatggtatgagttttattctcatgttctacaattttaaaattaacaacaaattttcatcttgcaattaaatatttttcataatttataatatattctaaatattttatgtgttttatcattatggacttactcttccactttccaaasaaaataggagcaaaattaatttaaatgttaaggctttaactcagaaaaagttttatttcactgaaggttgtcacaaagtttaaaatgtgaaagcttttctcatatttgatttgttttaatctattcagtttttgtaatggaaaccataaaacatataaagtgtttaaaactattttattaaataaatttctcatgtgtcattcacttgtcccatacttttttgtattcat

SEQ ID NO: 250460 - DNA, 631 bp, Homo sapiens
atgatgacatttgctattatcagaaatacagtaggctgaaatcctgagatctttcaatctttaagaaatgaattgaaaaagaggggtaaaggcctttgagataaaacagagaactggaagaaagttattgtcgagaagtcaattagagtttcaagaaaaataagtgctcaaaatgtcaaataaagcctgcaaatctaaacagaaaatactgaaaagccattggatttaacaatgtgtttatcattaagaacttctagagagcaattttaacatcactatggcatcaaaatataagatttcagtgagttaagatgcaaaggaagtaaggaaatggaagtaacaagggcataaaagactttggtagctataaaaggatgcaatgtcaagggagggctatttttttttccccagaaggagctaaatttggagatgaaggtagacctaggggactgttargataaacataatggaaaaagcttataattgatagaaaaaataccaagtgagaaagaggactcttgatagaaagcaatgagaagtggttggccataaaaccgtaggatattttaacaacagaagataggcaaaagttgtttaatgcaggtacacataaatatgtacagaaggttag

SEQ ID NO: 250461 - DNA, 631 bp, Homo sapiens
atgatgacatttgctattatcagaaatacagtaggctgaaatcctgagatctttcaatctttaagaaatgaattgaaaaagaggggtaaaggcctttgagataaaacagagaactggaagaaagttattgtcgagaagtcaattagagtttcaagaaaaataagtgctcaaaatgtcaaataaagcctgcaaatctaaacagaaaatactgaaaagccattggatttaacaatgtgtttatcattaagaacttctagagagcaattttaacatcactatggcatcaaaatataagatttcagtgagttaagatgcaaaggaagtaaggaaatggaagtaacaagggcataaaagactttggtagctataaaaggatgcaatgtcaagggagggctatttttttttccccagaaggagctaaatttggagatgaaggtagacctaggggactgttaagataaacataatggaaaaagcttataattgatagaaaaaataccaagtgagaaagaggactcttgatagaaagcaatgagaagtggttggccataaaacygtaggatattttaacaacagaagataggcaaaagttgtttaatgcaggtacacataaatatgtacagaaggttag

SEQ ID NO: 250462 - DNA, 610 bp, Homo sapiens
attttaacttatatccactgacagaggcactgaatggggtaggaaagacagtcttcaattgttgatgccacccctccgccatgtggcagtggccacatagggcagagagagaatctgtgcatttagggaagggagagcacagtgattgtgagactttgcattggaactcagttccgccatcacagcagaaagcaacaccaggcagaattcagccagcaccggtggaggaagttatttacgctagccctaggcagagtrgaatcgcccatcccagcagtcggaacctgagttccggcaagcctcactaccatgggctaaagtgctctgggaccctgaataaacttgaaaggcaatctaggccacagggactgcaattcctggccaggtccaggtggggtgctgggcttggagctagtgaacatggggggcatgtgacctaatgagatgtcagctggggcagtcgagagagtgcttgcaccactgttccctcaaccccaggcagcacagcttgcaactttgcaactccaggagagactccttccctatgcttgaggagaagagaggcaagagtaaagaggactttttcttgtaacttggataccagctcagc

SEQ ID NO: 250463 - DNA, 618 bp, Homo sapiens
tctaacacatactggtttttggttaattatcattactttctatgtaagtcaaataaaattaacagtaactgtaaatgtcagttaagcatttttaacttacctctcatgcttggtaggacatagtggtttgaatagccactccatgtactatgaaaaactttgtaaattagatacttatacccataagatattgatgttctttattgtctcttttaaccctctaatgtaaaatctgtacactatgacaacctggtcaaattatcctatattttgagactaactgacaagagattaaaaaaaagaagaagaaaaattagcgggcatcttgatttaaaagtacatgtagccaggcatgatgatgctacctgtagtcccatctagttgggaggctgaggctagaggatcacgtgagcccargcacttgagacttgagtccagtctgggcaacacagggagcctccttcactaaaaaaaaaaaaaaaaagaagaagaaaaaagtacatgatataattaatcaaaagtttttgtacttaagtgtaaaaaaattatgaaaatgcaatgagaaaaacatgatttcacagaaatattgtcaaaagtaaagtgttgtgggtttttttg

SEQ ID NO: 250464 - DNA, 608 bp, Homo sapiens
tgttagaaattacattggatctgtagatcactttgggtagtatggatattttaacaatattatttattcaaagctatgaacatatgttttatttatgttcttctgattggataatttaatctatttacaccaaattcataggaaaacactgactactgtcattttgttaattattttctgttttttagatcctttattcctgttttgccgtcctcctttgtgattagaagattttctctaatggtatgatttgattccttaccttttatcttttgggtatctatccgtttttgctttgtgattaccatagattacataaaacatctatagttgtrataggctactttaagctgataacaactttgatcacatacaaaaattctacactttctttctacccacttgtggtttttgtttgatgtcacaatgtacatcttttcatattgtttatttcttaaaaattattgtagctgttatttttagctttgtcatttaatcttcatactaaagatttatacaccaccatcactatattagtgtgttctgaatttgtatatttttactagtgagttttatactttcagctgtttttgtatgactaattagta

SEQ ID NO: 250465 - DNA, 600 bp, Homo sapiens
tctccacattctctccagcaactgttgtttcctgactttttaatgattgccattctaactggtgtgagatggtatctcattgtggttttgatttgtatttctctgatggccagtgatgatgarcattttttcatgtgtcttttggctgcataaatatcttcttttgagaagtgtctgttcatatcctttgcccactttttgatggggttgtttgtttttttcttgtaaatttgtttgagttcattgtagattctggattttagaataggaaagaaagtaaagtgtgcttggaagagacccaagcaggtgacttgaaggacaggcgtgatgtttaatcatgatcctaggactttataagctggcccctttcccatgtttcttcccttaggctggactgcctgcatgcacagtgtcctccttacccttggcaggtgagcatgcacagtgtgtttaggaagttgtgcacatgtctatctgaggctttcttcctttttccggtcatatgcctctggaaggtcatactccgccattttgtctcttaatgcacatgcctgggaagttgcttctctttggcatctgcattcaattaacactttagtg

SEQ ID NO: 250466 - DNA, 590 bp, Homo sapiens
ggttagaacattgagattttcagccccatccctgacctctaggcagaggagagggaatgaaggttaagttaattgccttcatcaagatagctgagcacatggagatttctggaggtggtgtgcccagaaaagccatggaagctctacactcctcattcaataccttgccctatgcattttcatccatatcctttgtaacattctttatgattaactggtaattgtaagwgttccagagtttcgtgagccactctagaaaattaagcccagaaagggttctagggatcccatcttgaagctagttggtcaggagttccagagttccagatacctgggcttgtgactgacatctagaaggggtggtcttgtggaactgagtcctcaaccaataagacctgatgctatctccaggtagaccattttttaattgaattgagaatatcaagctggtgtctgctgcagagttgattgcttgcttggtgtatcggaagaaattcccacatatttggtcacagaactcttctgtgttggttggcaatggttaatgagtgagaaactagaaaatgcacttcgtatgaatttgtttattc

SEQ ID NO: 250467 - DNA, 566 bp, Homo sapiens
tagggtgtcattaaagtacctagttgaaacacctatctcagtctactaggggaatttcttaggagaataaagaatgagtagggattagcaaggaagaagttggggtggtggcttgggggacagtgttcaggaaaagaaatagacatttgcaaacctaaatggaaggaagcatcatggtaaattggatagatgagagttgctaagagaggcaacaggaaaggtaagtgggggctagtttgtgaaggtctttgtcagccatgtaagggaattgggaatttggattttaccctaatgtagtggttctttgactttaatgtgcattcaaactcactaggaatatttttacaatgcagattagattctaattcaggaggtttggaatgaagcttaatattctgctttttttttctgtttgctgttttaaaactkctagttcagaaagttttacatgtcctatttcctaatttgttcattggtatataccagagttttgttagctcaaatgaaaaatcttctttcccatcatgacatatgcatgaatcaagtcttccttgtaggtggaactc

SEQ ID NO: 250468 - DNA, 629 bp, Homo sapiens
ttttacaatgcagattagattctaattcaggaggtttggaatgaagcttaatattctgctttttttttctgtttgctgttttaaaacttctagttcagaaagttttacatgtcctatttcctaatttgttcattggtatataccagagttttgttagctcaaatgaaaaatcttctttcccatcatgacatatgcatgaatcaagtcttccttgtaggtggaactcagcaatttgtctcctgtmtatctactgggtatttcttaaatttcctcagtgtctaggccaaatctttgcttatttattagctttccaggcaccttgcttttagacctctcacaattacattgcagtgatttgggagagactgtctcagactgcaagccctcctgtttggccatggtgagttccttctggaggctgccatgagtgatttcacagcagtccttcaccagttcatctcttaaaccatatagatactctcatatgcactattattcaacttgctcttctttctggcatgcctgatgatgtatcagggagggagagagttcttgggacactttagtttatcaccctgctaatctctggataaagactaccctagtgaagaatcacagaactctgtgca

SEQ ID NO: 250469 - DNA, 557 bp, Homo sapiens
ataaatgaacaaaataaatatttctgccattttgtagtttacattctagaagaacaaaaaataaacaaacattgaatttaagcaaataatatgctaatattrgaagatgataatgatgtatccttcttaggccatagatgttgcagttcatcattattgctaggcacagaagaaccaagagatgccccagtgaatctcttagcttccagacaaatgcttcccagcacccattgtgtagcatcatccatgactcatcatggcaaccagagtcaatcatcctggccagtatgctaacccctttcttagtctgatggtccactggcatgatgacttgaaagtgtctaggtgtggtattcatacctgcaagttcagtagatcctttactgtgttctctgttagaaacaagcttttggaaatatagaaatgactatggtttcaggcacagaaatagcatctctacacaggggccactgtgggtggcattaagagaaggtaatcttctattcctttggttcccaaagtaatatattccagttattgggaaaacactaacgtat

SEQ ID NO: 250470 - DNA, 564 bp, Homo sapiens
cttctggtagtagtgtcagttcagaaatcatatacaagaaccctcgaatagtctgaatagtccacttacttcagtaaayagttaacctggtaaatgactgtactttcctttgagaaaggatgagaaatgtttatcatatatacttttgtggcctttacaagatcctttcaaaaggatcttccaccaatccattctggaagagtgacctggatatcacctgaaaacttgatgaagaatgaattttttccattgcagtggctgatattggacttctgcaggcaaattctaatacgcatttgtcacacaagccaaatcacacccaaattagtcatttatctatctcatgattggaacactagaatttattacccatctgcagatacctgtgggtcaaggaatcttaattattctcaccttgtattggatagttaagtgccacactaagttaagtctctgcaattcctgaagaatatcattccattgatacaaacgcgggaatcaatatatcttctggagtcaattttatacttcagagaaaaccatcaggcttctcagagatgctga

SEQ ID NO: 250471 - DNA, 552 bp, Homo sapiens
tatcatttagagcaattataatgtcttcttaaacataagacattttatatttattttcatttttaccattttaagagactttcacaatttgcatagacagaagtttttgtctggattgtgttcatttttcttgaagagcttacttatatatataatgttatgtgcagtctgcggctaaggggtccttttttattgtttctctagaagtactgtatcttttttggatggcctaccaggttttccttttatgtctgaatttcagcagtttgaatataatttgggggaaagaatattttttaaccataaggctgagttttctggatctgtgattgatagccttttaagacaaaattctcagcctttttctcttcaaatgttccttctgtttttcttcctttcagtttctgattacctgcatattagaccatttgatcatttmtcacaatttttagatgctcttgttctgtattttcccaccttttttgtgtgtgtttcagtttgggtaatttatattgatttatcattaatttactaactctactcaagtatgtc

SEQ ID NO: 250472 - DNA, 628 bp, Homo sapiens
tttcactattggaaagttgaagccaaaattattattttttatttttaaaaaatgccattttattcctagaaaacaccaaatagtccagtggagaaaaattagaaataaaaacaaattgagagtcatttgcctgattataaaattaatagcttccttatgtattataactggtgaaataatgtgatggataaaatctccttttcacaaaagcaataaaatagtaaaataccgaggtatacatttaataayataatttatatgacttgtgcaataaacgatttcaaccatagaatgaggtttgtaaatagaatgagttcattgtttttaggcaacaaatcggtattctagagattgcaactctctaaattatgtaagttcaatattgtgacaaaaataggaaagtaatttttgcagcaaacgaattagatgcttttttggagaaataagcactgaagtataacgtagaaaacttaaaaaggggtattgaaagttcattaggcttgaaaaatttttaaatgtttcaaaatatttcactaagacaattttcttgcacttcataaaaatatagatcagtgtataaaaagatacattataaaataagctcacacatatgtagaaatttagtata

SEQ ID NO: 250473 - DNA, 628 bp, Homo sapiens
tttcactattggaaagttgaagccaaaattattattttttatttttaaaaaatgccattttattcctagaaaacaccaaatagtccagtggagaaaaattagaaataaaaacaaattgagagtcatttgcctgattataaaattaatagcttccttatgtattataactggtgaaataatgtgatggataaaatctccttttcacaaaagcaataaaatagtaaaataccgaggtatacatttaataacataatttatatgacttgtgcaataaacgatttcaaccatagaatgaggtttgtaaatagaatgagttcattgtttttaggcaacaaatcggtattctagagattgcaactctctaaattatgtaagttcaatattgtgacaaaaataggaaagtaatttttgcagcaaacgaattagatgcttttttggagaaataagcactgaagtataaygtagaaaacttaaaaaggggtattgaaagttcattaggcttgaaaaatttttaaatgtttcaaaatatttcactaagacaattttcttgcacttcataaaaatatagatcagtgtataaaaagatacattataaaataagctcacacatatgtagaaatttagtata

SEQ ID NO: 250474 - DNA, 540 bp, Homo sapiens
aaatcctattttggctatcagatttatcaaaactcaaatacagtgtgggtgagggtaattgtaaacagacattctcatacagttttagtgatggattaaactcactgactctcctgaaagggcaattaaataatgattatcataattaagaacaaaaatagagtttaaataataattcaatatgtgtaaatttatcctacagatattcatacacatgtacaactatatctctgcaaagaagatcactgcattatytttaatagtgaaaaacaaaaacaattttagtgttaatagctaattgagtaaattatgagatatccaacaaatatgataatttcttataaacaaggcagatgtttatatgctaacatagaaatgtcttcagaatatattttcagcaaaaagagaacaggttcagaatagtatctacgtgtgtatatacagtagacattcattcacttgttgaagaagtaaaagaactatatatttctaagattgtgtttgtatgtatgtatgcacacatatataaaattttaaagt

SEQ ID NO: 250475 - DNA, 265 bp, Homo sapiens
tgacatttgcccatttaggtaagtagcctcagacagcttttgtatgtgcacacagtgactgatatctatctgattaacctgacctctagttatttaccttgaacctgtttgacgagttttggtttcttggtgsgtttacatcaggtgaggagcagtcctgtcccaccccctatgcccttgcaattcttttgtttggttcagccaaagttgactgttatgctcagtgctcttattgctttataggtatttcagagatctcactgta

SEQ ID NO: 250476 - DNA, 265 bp, Homo sapiens
tgacatttgcccatttaggtaagtagcctcagacagcttttgtatgtgcacacagtgactgatatctatctgattaacctgacctctagttatttaccttgaacctgtttgacgagttttggtttcttggtgggtttacrtcaggtgaggagcagtcctgtcccaccccctatgcccttgcaattcttttgtttggttcagccaaagttgactgttatgctcagtgctcttattgctttataggtatttcagagatctcactgta

SEQ ID NO: 250477 - DNA, 265 bp, Homo sapiens
tgacatttgcccatttaggtaagtagcctcagacagcttttgtatgtgcacacagtgactgatatctatctgattaacctgacctctagttatttaccttgaacctgtttgacgagttttggtttcttggtgggtttacatcaggtgaggagcagtsctgtcccaccccctatgcccttgcaattcttttgtttggttcagccaaagttgactgttatgctcagtgctcttattgctttataggtatttcagagatctcactgta

SEQ ID NO: 250478 - DNA, 265 bp, Homo sapiens
tgacatttgcccatttaggtaagtagcctcagacagcttttgtatgtgcacacagtgactgatatctatctgattaacctgacctctagttatttaccttgaacctgtttgacgagttttggtttcttggtgggtttacatcaggtgaggagcagtcctgtcycaccccctatgcccttgcaattcttttgtttggttcagccaaagttgactgttatgctcagtgctcttattgctttataggtatttcagagatctcactgta

SEQ ID NO: 250479 - DNA, 653 bp, Homo sapiens
actttacatgtattaactcatttaatcctcactatagacctgtgataggttgaaattttaatagtcatttaatagaagaagaaactgtagtagagataatttatccatgactagaaagtagttgggctaggtgtcaaattcagtctgactccagagtcttcctcctaaccactgtactgttctggtctaaaaagacataaaactggaggtaatttctgaaatgactcttagtaaccaggcagatgaagattagggcagggaaaggagatgattaagaaaggaattacaggtaccagaaatggcatgggcaaaggcagagggactggaaaatgtggagcaagtagaaagaggggagtatttggatttactagagcrtatgttaataggagaattgaaagaatggaccaaataacttgtattttctaagattttatgaatatgattttatcagtcatggagagtagttttaggacttcttagattctcactgatggtgttctttagaaaagacaacctcactgaaaaagaccataaaacctcagcaattggcatatctttaggagaaatgtgttccctaaggatatgaaagacctgcattgttctaagttagatttgggtgaaatgtgtgttgttttcctttccagaactgaaga

SEQ ID NO: 250480 - DNA, 494 bp, Homo sapiens
cttgtttttatgaaggtgattttctttgttggtatgttttaatttcttgctttttgtgtatctgtataggtttgttgatttgaggttaccataaggcttgcatataacctattattttcaactgatgacaactagacactgacagcataaacaataaaaaaaactagtaaaagctctaccctttaactccatacccttgctttttaactttttgttatttctatttatactttattatactaagtcttgaaaagttattgtatttattattagattggttcatcttttagtcttcctattcaagaaatgagtagcttatacatcataattacgtgctataatattctgcgtttttctgtgtacttactattaccagtgagttttgtaccctcagatgatttcttcctgttcattagtgttcttctgtttcagattgaastacactgtttagctttcttatggaacaggtctgatgtcgataaaatcctttagct

SEQ ID NO: 250481 - DNA, 583 bp, Homo sapiens
ccccacagttccctttccatgtcagcccccagaatacctgcttayctactcatcttggataagtgcatctgctcagcctgctcggtagtgacttgaaagggtgacaaaagtggaagaaagagtggctcagacaggagataagatggctgcttgcctgttaactgtgtcttttaatttgtcctttggcaacatggaaggtaagcgtatcaatgtttcaaaaatgaagctgaggttaaaaagttctctaccagggaagttggataaaagtaacttcaaagcaatggtctctacatttgggaattgcaatttccctttcagataaaaaccctccgctcctttatgttcctttgagtcaagtatttctcacttattttattttttggaaaaagtttcagactgcaacaaaaggaggatgcgttcaatgcttagattttgttcaaatagatactaattaacatgaccagtctttatgaacaaaaaggcaattgtgaggatttctttacatttaaaaaacgattatgaatcttcccaaatttgccagcagtggttattagcctcattttttaaaatgagaaataaattg

SEQ ID NO: 250482 - DNA, 688 bp, Homo sapiens
ggtggcaggaaggaattagatgtctaatccatgtatttttgtttcaccagactaatttctggggaccaatccaaaggtacagtcagccactgtagcaaagatgcatgtattaatatccctccaagcattggctttgggattcttttccccattgctcctgagaggccttctcacatcatctaattcaagaccattcctaatattctcactcatattaaaacagcacatatcacaatttgtaattatatggttactgatttattcatgaaattctttttcatcttccctattagactacaggctccagaaggataggggccatattggcctaattctagtaatctcagtgactagcataatgcctggcacacacacccaacaaatatttaagaagttaatgaagaatgaatgagtgaacaaatggacaagttaatgagtgagtgatgctctctatcctttcaactgttgcatttggcaataaaagcagtataattggtccctctgtagtgaagttctgctcctgggtrtgtttgggatgcagtttccactcatgcttccaactcaaagaatcagtccccacccatggctcctgctagaggagtagcaagccatgtgaccccacctcatagtcacagagaattagacctgccaggggcagcaccctcaccagagtgaggcccattattag

SEQ ID NO: 250483 - DNA, 507 bp, Homo sapiens
gtaatcacatttaactgaagtcactagggtgggccctaatctaatatgactggatgtcctttttaaaaggagaaatgcggagacagacacgcacacaatgagaatrccacgtgaagttggaggcagcgatcaaggcaacgcttttgtaagccaaggaatgccgaggattgccagcaaaccactggcagctgggggagacacctggaacagattttccctcagccctcagaagaaaccaacaaatattcctcaacaccacacatgggtgtaaaaccatagctagagagaagctgcatacagaacaggtttctgatcaaaatatgccacttccatagggcatattgattattttgagctggatgcaaataagaatcaacaggtacagcaagaagctttcctggatatttatctgaagaaactcctaagaaataaggactgtcataaatcccctctcccagggaattttatggcaatgaagaagacagaaagttggctccaagatgaacc

SEQ ID NO: 250484 - DNA, 504 bp, Homo sapiens
tcagaaggtactcctatttggagataagtgcatattcggagataaaggaattattaagttaaaatgagtcctttagggtgggatgctaatccaatatgaccggtgttctcatgacaggaggaagagacagcaagggtgtgcctgcacagaaagcaatgaagaggcagcaagacagccatctgcaaaccatggagataggccatgagacaagccaaccctggtggtgctttgatcttagacttccagcctcgagaactgtgagaaaatacatttctgttgtttaagccacccagttggtggtattttgctacagcagccygagcaaactaatatatcatcctcaatattcttcctcctctccttacttatgaagagaactcctaatttttagctgggtacatggctgcctacattacagactacatttcctagcttcccttgcagctatagtcagtcatgtgattacatttttgccaataggatgtaatgtaagaagaaatgtca

SEQ ID NO: 250485 - DNA, 580 bp, Homo sapiens
acattttctgtaaagtcacagatagtattttagtctttgcagtccagaaagcaaaatcaagtatatatgtaggatgcaggtacttatgtaaagaaagaaaaaaggttctaaattttttttattaataaaattcaaaatatcatgtgaatgagtattttttgtaatactagcttagtaaggcaaaaaaaaatacattttgggaatgatatcacatttcaccttattggagttcaaagttaatgtgccttatcgaaattgattcaaatattcatatgttaatgctgatctgacaggatatttaytttctatttctgaaaaaaatgtttaccaaatgggcaatggttaaaagtccagaaaagctaataaaattaacctttgataccactgattcaataacatcacagatttagatattttccacaaagtacctgatggtgaatattacaattaataatcataagctttaaatatcttatattttcacccaccttctaaatttgctccaaaagccttcttctgctccacagatattttttttaccatgaacactagcaacacatcttagcagattccacttcag

SEQ ID NO: 250486 - DNA, 494 bp, Homo sapiens
tggaaaaccaaacattgtatgttctcactcataaatgggagctaagctrtaggatgcaacggcataagaatgacagaatggactcaaggggaaatggtgggaagagggtgagggatgaaagactacaaatagggtgcagtgtatactgctcaggtgataggtgcaccaaaatttcacaaatcaccactaaagaacttatttatgtaaccaaacaccacctgtttcccaataacctatggaaataaagtatatatatatgtatatatatttaaaaatgttaatagcctcaagcccactgctagttaatgctgtaggcatctgccggtgggatctacctcaactgtgagactaagacgtcaaggcccagattaatatctttcagtgcatccttcaaatacttttgcacactatttaaaagtcttaagaatattatgcagggccatcattccccccgacagcttcatttcctgcctcctctgccccttcttacacca

SEQ ID NO: 250487 - DNA, 573 bp, Homo sapiens
atattctcagcagctcagacagtcgagagcaaaagcttgtacttacctaaattttactcaccaaagaggagtccacattccgatcaggaccataaaagactctcggtaagaaggatatacgctcccaaaatcaattagttacagtaaaggaaggaggcccaccaacaaagatggcatgtagataagtaggcattcaaataattctgccttcagtaacagacaaaactctacaagtgactgtgggagtgagggttggcgatagggagaatcaagagctttcctgcttacctagagtttgctctatcagatgaatgttaatagcctcatccaggtcactgcgaatgtcactaattcattcatttttatggctgagtattattctatcataagtatattctaagtgaagtaactcaggaatggaaaaccaaacattgtatgttctcactcataaatgggagctaagctataggatgcaacggcataagaatgacagaatggactcaaggggaaatggtgggaagagggtgagggatgaaagactacaaatagrgtgcagtgtatactgctcaggtg

SEQ ID NO: 250488 - DNA, 576 bp, Homo sapiens
atgtcgtacatatacaccatggaatactatgcagacataaaaaagaatgagttcatatcctttgcaggkacatagatgaagctggaagccatcattctcagctaactaacgcaggaacagaaaaccaaacaccacatgttctcactcataaatgagagttgaacaatgggaacacatggccacagggaagggaacatcacacactggggcctgtcttagggtggagggcaaggggagggagagcattaggacaaatagctaatgcatacagggcttaaaacctagatgacaggttgataggtgcagcaaaccaccacggcacatgtatacctatgtaacaaacctgcaccttctgcatatgtatcccagaatttaagtaaaaatatttttttaaaaagtgacccttgggaaaaacatgttcctgggagaggcaaacacatttgtatagatcccaatgggagaacaagcttactgtatttaagaaaccaaaaatggcctgtgtcatgggtgtgcagtgaccatgtggtaaaatttaggttggaagttagataggaaccaaattacataaaaccttga

SEQ ID NO: 250489 - DNA, 576 bp, Homo sapiens
atgtcgtacatatacaccatggaatactatgcagacataaaaaagaatgagttcatatcctttgcagggacatagatgaagctggaagccatcattctcagctaactaacgcaggaacagaaaaccaaacaccacatgttctcactcataaatgagagttgaacaatgggaacacatggccacagggaagggaacatcacacactggggcctgtcttagggtggagggcaaggggagggagagcattaggacaaatagctaatgcatacagggcttaaaacctagatgacaggttgataggtgcagcaaaccaccacggcacatgtatacctatgtaacaaacctgcaccttctgcatatgtatcccrgaatttaagtaaaaatatttttttaaaaagtgacccttgggaaaaacatgttcctgggagaggcaaacacatttgtatagatcccaatgggagaacaagcttactgtatttaagaaaccaaaaatggcctgtgtcatgggtgtgcagtgaccatgtggtaaaatttaggttggaagttagataggaaccaaattacataaaaccttga

SEQ ID NO: 250490 - DNA, 487 bp, Homo sapiens
cttttttttactgcaggtgcattgctggtggtctttaggtggaaggcattgacaatgtcactagaggattttaagcaggaggtaatataatctttttaaaaaattatttcaattagaaaacaaattctataggtcaagaatgaaagtaacaaggccagtaagtggttcagcatccagggaaagatgatggtggattggaccaaatggtaggggcwcagcagtcaaatgcaaaatatatttcagagatggtatccataggacttgcctaccaaggaaatgaatatgtagatcaagtaggcagccaaagccaaagacccaaaaataaagtagccaaaataagatagaagtccaattcttttctgcatagttggtattgcagttctatgacattgtgaagggtgaaggctccttctttcttgctattccattatcccccaggttcacaatcattatgtgcatgatccacaatgactcaccaccatatttc

SEQ ID NO: 250491 - DNA, 504 bp, Homo sapiens
agaaataaaatagggggcatctgaatgactgagtttggaaaacagagtccgataccatttaatcatcagaatggctggtgctgctggcaagggaatgttattgctcctacatggaggaccaggaaggggattgttccagggtcacagggcctgagcttggaccagaggagttgaagaccatttccaccaaggccatttccattccaagatgtaggctaagattattgcagcaaagatagcatctcccctaggtttagaaacgagaactagatgggaggtagtcccatgcttctgaaggagaaactgatgcagggagaagggytgaggcacagcctctgaccaggggaaggtgtttgcctccatctcctctgtggcccttgaatctgcttgccccttgctgttggtgcctcgttctgttcctttgtgtctggaataatcatcgtgataatgaatgtaataagcacaatcatttgtggaattttatagtcctggatattgaatgtt

SEQ ID NO: 250492 - DNA, 663 bp, Homo sapiens
aaccctcttgcagctcaattcttcccacaccctcaccccacagaaaaggcttggaagctgtgggcccttcatgtggggctgaagtcttaagacctggagagcagccccaagggtggagaagcggctgctgaagggatcagcatgcgctggcacaggaagtctgttttccatgtgtctggaacccagccgaagcttcctggggtaattttaaccagtatccactctagaacaataccaaaaaaggtaagttacttaccatcccaggcaggcacatacctaatcactggcctttcatgaattagacccttaagacattcagagctaaagctgctttaagcactaaagtyagagcagccaagccacatattcctgtcctgggcggttggcccttttattaaagttaactctaaagtgctagctattcttaccctcagaatatagtcttagcccctcagctgtcttgtgggagggaaggtatttttagaccctagaacagctgatttgggatttgctgcaggggttagagggcccagggggaggattgaattgctaggggacaaaatgggaagtggggagttgcatccaggggactcttgcatcaagagtcagcatgggctttaggatatattagtccacactgctgtttttggctttttttttttt

SEQ ID NO: 250493 - DNA, 626 bp, Homo sapiens
tatgttttttccaagttttgcatggcttgatagctcactgctttttagtgttgaataatattgtattgtctacatgtaccacagtttatttatccatttacctgcaaaggacatcttgattacttccaagttttggcaatgataaataaagccgctataaacatccatgcgtaggtttttgtatggatatgagttttcatctcatttgggtaaataccaagtaggatgattgttggatcatatggtaagagtatgtttagttttgtaagaaactgtcaaactgtcttccaaagtggctgcaccattttgcattcttaacagcagcaaatgcttacattatccatttgttcttgcattgttgcatactttttccattaaaagcgttagcatattaattaggttwtttaaaatttcctggtctgataattccaacattccttacatatttgactctggctctggtccttcaaactgtatttttccttttcaaatgccttgtaattttttactgaaaggtgggcatgatgtactgggtgaagaaaatgtaataaataaacctttagtaaagtagtagtaaggtgtagggggaggggaagcattctatagtcctggtgtttattagtctc

SEQ ID NO: 250494 - DNA, 610 bp, Homo sapiens
ggtacttgattttccccaaacattagaggttttcactcctctgtcttcgcccatgctgttccttcttggaatgcccttaactatctgctcaacttaattctcactcattctttaaggatcaactgtcactttcttttagaagagctccctggctaaccttgtcattcttcttctttgctcctgtaacaccctgaaacatcccaagagtagctgatgtgttcttcgtcagagtagtaacacacaccacaccgctcatctctccactagctaccagactccttaatgtcagaatggtacactgttcatctctacatgttctyggtattcttgaatgaatgtatggcccacaggaaaaataaagctcagaatatgcaaatcacttgttctggaaccctgaaatcattattcttaatatttaaaaggcagaaatggaaggtcaagattatcatttaattgctaatatacaactgcagtggaaaatcctagagttgaaacaaaatgattgcaataccagtgattacaaatatgaaaaaacactgaaagttttgtttgggggatatttgttttaattagagataaaaaatatgtagtctctgaaaagaacgtatgg

SEQ ID NO: 250495 - DNA, 614 bp, Homo sapiens
ttccttaatctcttctgttyttgtcctcatcaaatgtcatttccctgttgcctttattataaattctctccctcagctccttttttttaagattcaaagtctttaatagcagtatcttcattttactgcaaatattggaaacaacagcagccaaaagcacttaaaattaagtgcaccccatcacaatgaatacattcatttccttcttataaatacagtttccataaactatattactgtcatttgttcaagattttaaacttcctaatcatttaacttaaacaggaaaataaaatctaatgaatgtaaaccatacatgaagaatatctcaattgaagaatctatgaagggtagaaatagttcctgcctggaatatatttttcatatcccgctaatttgaaagagcctatgattcattcctaaaattcccttagtccaacatgtaagcctccctaattgtttgaaattcaaaccattacataagctttctgtcaacttacttctctctttgcaataatttattttctcatccaagatctacttaacagtgtgttcaggacataagtaaaaattctctagtcttttcactagaaactgcatagaaatctctaacg

SEQ ID NO: 250496 - DNA, 614 bp, Homo sapiens
ttccttaatctcttctgttcttgtcctcatcaaatgtcatttccctgttgcctttattataaattctctccctcagctccttttttttaagattcaaagtctttaatagcagtatcttcattttactgcaaatattggaaacaacagcagccaaaagcacttaaaattaagtgcaccccatcacaatgaatacattcatttccttcttataaakacagtttccataaactatattactgtcatttgttcaagattttaaacttcctaatcatttaacttaaacaggaaaataaaatctaatgaatgtaaaccatacatgaagaatatctcaattgaagaatctatgaagggtagaaatagttcctgcctggaatatatttttcatatcccgctaatttgaaagagcctatgattcattcctaaaattcccttagtccaacatgtaagcctccctaattgtttgaaattcaaaccattacataagctttctgtcaacttacttctctctttgcaataatttattttctcatccaagatctacttaacagtgtgttcaggacataagtaaaaattctctagtcttttcactagaaactgcatagaaatctctaacg

SEQ ID NO: 250497 - DNA, 570 bp, Homo sapiens
atgatggtacactcctagaaaacaagaagccattcacattatctctaattgcataccatgtactttgaaaaccacccacaaaaatattgcactggaattacaaaggaacagtcctcattatccttatgatcttcctcttatggaattaaagaaataacagtgtgcgcagtaatttacaatttttcttggctttataaacacatcaaaaacaagctgtgttaactcaaggcaagttcaagaaacaaaggcaatgtagataaattctcaggtacttatattttaactctgcctcactgtcatgtgtggttaaaagtggaggctctggactcagaatggacatttgaaattgtgtgatgttgrgcaggtgtatcagccttctaagcctcagatattcactataaaaattgcataataccagtacagatgtcaaggaattgttgttggaattatgggatggagggtggataaagtcaacatatactaagcacgtgataagcaatagaaatcaactgtttgtaatgtttttctcattgaacagaacagcactcaaggacatccttgttgaactgg

SEQ ID NO: 250498 - DNA, 570 bp, Homo sapiens
atgatggtacactcctagaaaacaagaagccattcacattatctctaattgcataccatgtactttgaaaaccacccacaaaaatattgcactggaattacaaaggaacagtcctcattatccttatgatcttcctcttatggaattaaagaaataacagtgtgcgcagtaatttacaatttttcttggctttataaacacatcaaaaacaagctgtgttaactcaaggcaagttcaagaaacaaaggcaatgtagataaattctcaggtacttatattttaactctgcctcactgtcatgtgtggttaaaagtggaggctctggactcagaatggacatttgaaattgtgtgatgttgggcaggtgtatcagccttctaagcctcagatattcactataaaaattgcataataccagtacagatgtcaaggaattgttgttggaattatgkgatggagggtggataaagtcaacatatactaagcacgtgataagcaatagaaatcaactgtttgtaatgtttttctcattgaacagaacagcactcaaggacatccttgttgaactgg

SEQ ID NO: 250499 - DNA, 560 bp, Homo sapiens
ctaagtcacaaaggccggggggaaaaagtgaaaggtcactttcacaatgggttttccaggattatttggatgtaatgaataaaattgcaaattctattgaggcttttagaactaatgaaaattatcaatgtgttacacagctgcatttcagttttgtttgtctgagcctggaacagaatagattttataaatagaacttaaatgtgaccacagagcacgcatactaatcagttcattttaagatattgttttgcaatacttttaagatgcacacatgctgggaaaaattacttctcagaggaamaatgtggagcaatttcttaccaaagttgctaatggaacgacttttttcttctttctttttttcttttcttcctttttttttttttttgacgcaaagtatctatcattatccatcttttattttaagtaaatgttaaaatggaaaaggtttagagagaaggaaggctttgctccaggaattctgtaggaaatgtgacttgttcgtgggaaagtgtccattaatttgagaaggttaaaataaaattaatcaaaatatc

SEQ ID NO: 250500 - DNA, 550 bp, Homo sapiens
attgcttcagcccccagaagcaggatatcttgaagcagagggcttacakgttatgggtgggttcagaaactctttaatttgcaattggttgaaggagtaaggctctgtctaaaacttggagtcagcagaaaggaatgtttaagttaagataggcatgcgatgtcagtgtcagccacaacatactgggttagaaagaccttttaagccatactgctgtcctgcaggcatggtttaacccttgcctggcaaggccttaggtcttgttcataatttggtatcttattgtcacaaagagtctgctttatcagtcttgggatctctatttaacatgaaagctggccagtgttttgtctaaactctaaaagggagagaatataaggaggcaggtctggcctcccttcctgtcatggccaggaactcagtttttagggtttctctggaatccacttggtcactggggtgaggtgggcagcaggggggtgaggatcaggggttggtccattcactcagtggagggcttaggattttattcttggtttacatttcacag

SEQ ID NO: 250501 - DNA, 469 bp, Homo sapiens
tcacctgcactccagcccgggcaacagagcaatactttgtctcaaaaaaataaaataaaataaaataaaggaagaaagaaagaacacacacaagaaaatggagaagcaatctacttttgttcaatctgagggagatgaaaggaagtaggtattaatgaaataaaccttagaaaatgaatctcgtgtgtgggcacagtggctgatgcctgtaatcacagcactttaggaggccgaggcaggcagaccatttgaggtcaggagttggagaccmgcctggccaacatggtgaaaccccctctctactaaaaatacaaaaaaatagctgggcgttgtggtgcatgcctgtaatctcagctactcgggaggctgaggcaggagaattgctttagcccgggaggtagaggttgcagtaagctgagattgcgccatgcactccagcctgggcaacagagcaagactgtttccaaaa

SEQ ID NO: 250502 - DNA, 568 bp, Homo sapiens
cattattcacaatggctaaaatagagaagcaacgcgcatccagtgacgaataaatggataaggaaaatgtgtcatatgcatacagtgtcgtagtactctggggaggggtagatcagaagttattgtttcatggatgcagagtttcagtttcacaagacgaaaagagctctggagatagatagtggtggtcatcgtacaacatcattaatgtatttaatacgactgaactgtatacttaaaaattattaaggtggtaaatgttatgtgaattttgccaaaaattttttttttaaaaaagaacttggtggataaaagtaatcagttttatgtgaaggacattaaggcaagggctgtttctgtgagttggatatgcaacgccataccctgagactcacagtttttattttcatttttttcataatccatttttgggaatttctttcacaagttagagagatcagataagcccatttttttcagatataaaacattagtgtatccagyaaataacttactctgaataacaaagctagtaagtagataagactagtaaagtccttgctcttaa

SEQ ID NO: 250503 - DNA, 559 bp, Homo sapiens
aatgccttggactctttagaaattaaaatgtcagcttaatcattccatgttccaaaatacactggtatcctattgcatgtctgtaggaggcatctatatttaccagcaataaatcggggttacaaaactgtggaatgctggagctggaagcattttatcatcataaactattccaatttctctttctcaaayggcaaaataggcacagagtgcataagtcattttccaagcttattaaactattaatagtaatgatgaacatttattaatgataacttttttttttttcgctgagacggagatgctcaggctggagtgcaatggcgtgatctcagctcactgcaacctctgcctcctgagttcaagcaattctcctgtctcagcctcctgagtagctgggattacaggtgcccaccactacgcctggctagtttttagtatttttagtagagatgaggtttcaccatgttggccaggctggtcttgaactcctgacctcagatgatctgcccgcctcagcctcccaaagtgctgggattacaggcgtgagccaccatgc

SEQ ID NO: 250504 - DNA, 519 bp, Homo sapiens
gagctctgcctgtcagcagccatacatctatttagatatcctcttaatgtcgacatttgtgctcgtggagttttcccattggtaagagcactctcctttgccaccaaatggtaaatgctctctgaaatatctgtaacattttcacatctaatggatgcatctgaggacattggttaataatatacattgaatccacagacaatggctatttcctgtgatttagatgggcacttacttgtgtggtgtatgacactcaaagtgttctgtcagcccccaaacagagctttttgatttcacatgtcaaagataactgttgattctggctcagcagtgttccattttctgtccagtgtttatgtggaagcagttgaagacttcarggaatttatgtagcatgccagcattttagttcatatgagcgaaaatgttgttgcccatctttgctgcatggactatgtgttttattaaatttgcaatgatggttgaacatgctgtgttgcacagaagacagagtttccc

SEQ ID NO: 250505 - DNA, 495 bp, Homo sapiens
ttgagagggcagcccatttttgtcatgctgcttgtagagaaaagcaaaaagcagctcccatcagcgggattataataaacagattttaaatcactctgaaaggtcttgatcactacaaacctttctaaagtaaaacagccaactcttcagttttgttagaaagcaatgaaatctcaatrtctatttgggtgttcatttctcattgctccatctagctaggaagtctgtgctgaaacagaggattttgattaagcacttaatatgcaaggagacatttacctattgtcgagcctgcaatctgggtgagaacagaagttatagctctagagcttttgtggtaaacagtcaagtcattttcttataccttcatcaatgtaaaatcttcaacaagtaaaacatttcagagaaagatcagctataaaatgtcctcacagccaaactgaaagcacaggagagccatactgactaacaggaaacaagatttcaacatcataa

SEQ ID NO: 250506 - DNA, 565 bp, Homo sapiens
ctctttgtatatcaggtaattttggattaagttatggacatttgaatattaggtatgaagactctgagccttgttaaatattacagggaatatttatatttttgtttaagtgcattaggttcaagctgcaagttacaatgtggcttctgtgggctatggcaccaatgccacttcagggttcaaaccctttgcagtgctattctgatctgctccacctatttgccacgtaatggccatcctagggtccgaacagyggtctatccgttagttaagctatcaaattattgaatgcacttactagaatcagttccatggatgcacagctatgaggcgagtccagcagttcataaagatatttatgagattactttctcaaacttcttctccacaatctcccccaatactttctaattccctgaagtgcccctttttagttccccatccagattctggggctttgataatctcactgttgtgtacttctataattttgtctgtatccaggactaagtggtgtgaggacagaaagagaggaaaaaaacatgacaaaatgatgttcaaccca

SEQ ID NO: 250507 - DNA, 617 bp, Homo sapiens
  misc_feature (1)...(617): n = A,T,C or G
gagcagggagggaagggctgagcatgagaaggactttgggatgttgataacaccattaaactctttcttgatctgggttctgcataggtggataggttgcacctattttgtgaaaaatatatgataagtacccttttcaatacatatacatatttcaatagaaacttcaaaaatacataaaggtggctgggcacggtggctcactcctgtaatcccagaattttgggagggcgaggagggtgcatcacctgacgtcaggagtttgagaccagcctagccaacatggtgaaatcccatctctagtaaaaaaaaaaaaagaaaatacaaaaattagccaggtgtggtgggagggacttgtaatcccagctactcaggaggctgaagcagaagaatcatttgaacctgggaggcagaggttgcagtgagctgagatcacaccactgcacygcagcctgggcaacagagcgagattctgtctgaaaaaaaaaaatgcataaaggtgtatgtttgcatatatacataccatatatttctttatatctatcaacaaataatatacatctataataaattaaagtacatatcttagttgnnnnnnnnnnnnnnnnnnnnnnnnn

SEQ ID NO: 250508 - DNA, 616 bp, Homo sapiens
aaaatggctattacctgcataataagacattctaggagggagcaggggttagctctccagctggtccagaaatggcttgaaagagtagggaaatgcttggttttaatggtggttagttgcttagrttgggtcgtgttttccaatgcacagtctagagattccatggcttgaacattctgatgttgtcaaagaagaaaatacccagcctttcttgtgagctttctcaggcattgcacagaaaggaagcggaatggtggggcttaacggctgtcaacaatcaacataaaaaatggcctaagactcttcattccacaaggaattctatacatttggcagagcacaatctacaaggtttgttccacgacactctgctcaataggtaagggttaatcctaaggtcaaaaggcctaaaaataagaataaatagaccacagaaaatggtgttcacatatatgttatctcaggctgtggatgttcagaattcccttcctatctcttcctgagtccttactcccaggccccataaattcagaggagtcacatgttgctgaatgtaggactatgaagcaagatataagatataattcttagtcaagaaactttttttttttttttt

SEQ ID NO: 250509 - DNA, 616 bp, Homo sapiens
aaaatggctattacctgcataataagacattctaggagggagcaggggttagctctccagctggtccagaaatggcttgaaagagtagggaaatgcttggttttaatggtggttagttgcttagattgggtcgtgttttccaatgcacagtctagagattccatggcttgaacattctgatgttgtcaaagaagaaaatacccagcctttcttgtgagctttctcaggcattgcacagaaaggaagyggaatggtggggcttaacggctgtcaacaatcaacataaaaaatggcctaagactcttcattccacaaggaattctatacatttggcagagcacaatctacaaggtttgttccacgacactctgctcaataggtaagggttaatcctaaggtcaaaaggcctaaaaataagaataaatagaccacagaaaatggtgttcacatatatgttatctcaggctgtggatgttcagaattcccttcctatctcttcctgagtccttactcccaggccccataaattcagaggagtcacatgttgctgaatgtaggactatgaagcaagatataagatataattcttagtcaagaaactttttttttttttttt

SEQ ID NO: 250510 - DNA, 547 bp, Homo sapiens
ttatattattttattaagacacattctgctgcaaatatgaaaaacgctattgtttaaacacaggtttaaacaataaggaaattgattactgcaaacatcaggatagctaaaggtagaacagatttctagcctggttcattcaactacctggttttgccttcaagaaccaagacctctatcttatctctctgccattcttaatcttggttttattcttgaactgttcgtcataggaagcagaagatctgtatttcctatcctgatgcatcaacattaagagcaaggtttctcaacctgagaactatcaatattctgcataattctttgtcatggggcctgtcctgtacrtggtagtatacgtagcagcatccctgatgtctattcagtagaattcgttagcccctttccaaattatcccctggttatgaagctcaaaatgtctctagacagtgataaatggcctttggtgggaagacgggtcaaaattgccatcagttgagaaccacctttattcccagagaaagaggaaaaggaagagaagacagca

SEQ ID NO: 250511 - DNA, 612 bp, Homo sapiens
tgactgtaaaagtgctgtatcaatttggggattacatatcaattttggagagtaggtgaattcataaatacagaattcaagaataatattgatgaactatgtgcattctgcccatccccatagcctggtacaaataatgttctggagagcagaaaaggggagaaggatgacaagaaaaccggaaagagaggctcaatagaaaggaagatctatgttgctgacatccttggttttagtagctcagtttttgcaggatttcttctcttgagggtcctgtgttgtaagtaactgacaggcttatttcctgaagcagaaaccctgcattccttggtcccctcttgtgttttccagatctttcagaaatgaggacttgacttgtccygtctctaattccttggcaaatccaggagtgctgtttctcaacacagtcattattgtgttgatactgttttcagtctttcccatatctcattacccttattcagaaatgatctgatcacctaatgctgcattttagaaactcatctacacaaatgaacaaaatgcattacttaaactgatttatctactgaggttaaagaaacccaggggtaggtgtggcatttaagcaat

SEQ ID NO: 250512 - DNA, 507 bp, Homo sapiens
caaatctgaaaagctctagagaaaatttgcaacagaaatggattctgttcttctaaaaattcctcttcagacaaagcaagtcgctggtggccactgtgttggtctctggtagctgttttcctctcacggctacctttgtcttattcagagtaatattcaggcccaaccctgggcctaacatgtatcaagaatccccactgcttctccagctgtgggcctcctcttcatctcagttacagcccagacatttgtctctgttatagccacaggcccacttcaaacctatctcccaattctactaacatcctctccaacatgtaagagtctgtggaggattgcttgctagaatccagaaagaagcacgtctcttatgatgattactattggaaaagaaaaatgatgctcatggtggaagcaactggaaaggttcaggaktttaccctaagaggtccagagatctcagaaagccttagtcttccagctcacagccttccccaggatggcctg

SEQ ID NO: 250513 - DNA, 583 bp, Homo sapiens
cagtataaggtaggatttcagactggcatttctttaaagccctccacttaatattaacatacagccagggataagagtgactagcctatgtcttattttgaaaactcagtatatgccgcaccttgcatatttgtaatatgttagtcatcatataaatgaagaaatacaaagtatttcctacttgatacatttcttgatggtaaataattacgtccttctcttttatggtttgcatatcttctctggttaaaattggtcttggattttcatagaacatggcaagaaatgcagtcmatgtgtgtttctggagtgaaggagaggaagccttctttattacactgactttgtcaccatgttatcattatagtccaataacaagtatagtgtataagttctaccatttgataaaaaaaaaatgctgcatgagactaacgtaattatgaacccacttcaggttactgcctttaaaacttccatgttagtgtgtagtgtgcaagacaagctgtcccagttttcccaaggtcatgcaggttatgaggccgtcaatattgtatgtagtgatatttcacaaatttgcattgtt

SEQ ID NO: 250514 - DNA, 565 bp, Homo sapiens
attaaatgttaagtatttttatgagaattaaatgggaccatatatataattaatttgtgtaaatatgctatgctgttgaaattcaacaatcggtgtttacttgccaagtgctacttactacaaaataggatatagtactcaactacttattagaacattgatagtttggttcaaatcagaaatgtttctcagataaaatagtgtgtcagatgtaataataaatrtaattctgttcttatgtaacactttctacccaaatgtgaaatacaaaactagactggagtccaaaatatgatataatagagaatgtaaaatagagtagagcagaatggagtacaacataacataaggtaatatagtattctatattatacaatattatatatgatatagtaaaactataagtttaaaatcatgtttaccaagctagcaataaagatgctctgctaagtgagagattgatgtgccaatcgaggtgatatatcatcacctgcatactccaagctaataagtttgcttgtttagtcattaaacaaattctaacttctttataaccataattctc

SEQ ID NO: 250515 - DNA, 591 bp, Homo sapiens
atccatgaaaggtcaattgcttcttttacattttttgtctgccagttgtacatattggacagaataaaaatctgattatagattttaaaagtatgtttgtagaaatgtaatttctcaaccagggagtccaccaagtcatagtaatcacagtttgaaaaacgttgatgatcagagaagtaatcacctgtttatcacttcatcaataccagaggaaaccagaggaaaaatatcactggacatcatatttacctagaaaaattctcattataaaacttatttcatgttttcctgaatccaagaatgaaatatatttaattataaagttaaagcttccctgtgctttagagagataagccttcctttcttttaatactccaattgggactacttctttcttgcgtcagctaaaattcaagaactgttgatttctctgccatcaggtggccagttgaaaatgrtcctctgaacccaaacacaatttaatattactcattgctatcagaataattcagtcaccagcacattctctgcctcatatcatcatttttgttgttgttgttgttgttttgttttgttttgttttggacaggg

SEQ ID NO: 250516 - DNA, 629 bp, Homo sapiens
tagcaccatgtaccaatgatatactttcatcattacatctattgttcattgctaagtggtgaagagttatgtagtatcaaagacaatgtgtaattcacaaactgtgtaacggttccttgttaaagaggtaatgcaatcatggacaccaattgtaatcgcctactgatcacatttccttatgggtggtttcttgttaccagtattagtgactaagagtgaagtagaattggtataaaaataaaattttagggctaaatcttaaagaccaagcccagttgtaatttcacttacagggaaattactccaaagaggtaaagtcagagcttctgaattttgacagcccattatttgactcctgcctawagcagggtctttaggatggacagagttaaatttcattttatttctcaactaataataaacaactgataattttcatgggaaatttaaaagattcttatatcctaaacatctgagaaagccctcattcccatgtaaaaataattatgtagagctgaattatcacctgtctcaacatgtgggtaatacaatctccagtttaccaaagtctctactactccctgtcctatttcctatttttggagttatgttttcttcttgagttactg

SEQ ID NO: 250517 - DNA, 371 bp, Homo sapiens
tttctatcacaaaatgacactctaaaaaatgaatgctaaaactatgacttaaccaaagtttgcctgaaaataaagattaggtgaattgcaaagaagtgccagaattttgtcaatctagatctcaccttttgacattctgcaactggkcttatgtatcataaatatctaacataagcaatgttaagttcattcagtttatctctactgtccactttcatggaagatggattttgaataaaaataaaattgcaaagttctatatatggacatctgtgcctgtagtcttcaccgtcttttagtttcttttccaactcacatgtaagcagctaaaagctttgttgctgtttttggtttgttgccgttttgctttg

SEQ ID NO: 250518 - DNA, 589 bp, Homo sapiens
ctagactattatatctgcttcttattggcacctctcttctgaagtgctgaaactatttccattgaaccatgagagctaagaatggaatatgaattcacattttaaaatttctcctgaaatgggacttctgcaaaaggtaaattagatctgttagtgtcacaaccatactctatacaaacattaagtacatataaaagaatattttgttaccttctgacaaaacctgttggtatgtaattagtctgttcctcagaaattgagttgaacaaaacagcataattttactaatgcaaatatgtgagctctaataatgtattactggctctaacagtgggtgtctgtaatagtgtattactggctttcatggatgcattaatattagtagaaacaagcataagattggctactttactattactcctgaagcctgaaggtagccttttaacaaaggaaaaaaaaatcactcaacaggaatatcacctaccaatgtcacagaagttattcttcaaatcgactgtcctcaaaaagctctatgtaccactttttctatactctgtgttygaaagatgacaaaacactttgcctacta

SEQ ID NO: 250519 - DNA, 604 bp, Homo sapiens
gtggacttttacaataaaaatgctgcattctaatccatggtggcatctcagtagtctggtgggactgtttgtcttagagattgtgacctctctttcctgcctcatttccccaaatcccctctcagtgagctttatctgtgagctgtgtgactgtgttttgcatggyggtactcttcacctcaaaaaaattaagagaggcatgtgggttgtagagtgaagaagaaaggcagacatgtaataaagtaagtaaaaattcaagtcttctctacctcaagaatttcagtgtggttaacattaattccagtgccagacaaagttgggatcccagctttactatttaccagttgttagacaattgtcaattcagactttagaatcctccattaaaaataatttatgtatttgtttatttgtttagagatggggtgtccctctgtcactcagtctgaagtatagtggcacagtcatagctcactgaagcctcaaacttctgagctaaagcattcctcctgcctcagcctcctgaatagctggaactacagatgcatgccaccatgcccagctagaagtctccattttagcagctataaattagatataccaa

SEQ ID NO: 250520 - DNA, 608 bp, Homo sapiens
ggactgtttgtcttagagattgtgacctctctttcctgcctcatttccccaaatcccctctcagtgagctttatctgtgagctgtgtgactgtgttttgcatggtggtactcttcacctcaaaaaaattaagagaggcatgtgggttgtagagtgaagaagaaaggcagacatgtaataaagtaagtaaaaattcaagtcttctctacctcaagaatttcrgtgtggttaacattaattccagtgccagacaaagttgggatcccagctttactatttaccagttgttagacaattgtcaattcagactttagaatcctccattaaaaataatttatgtatttgtttatttgtttagagatggggtgtccctctgtcactcagtctgaagtatagtggcacagtcatagctcactgaagcctcaaacttctgagctaaagcattcctcctgcctcagcctcctgaatagctggaactacagatgcatgccaccatgcccagctagaagtctccattttagcagctataaattagatataccaatgctaacctatgtagtgacactcaacaaatggtcaaaagctctctccctcacttccgatgccttc

SEQ ID NO: 250521 - DNA, 510 bp, Homo sapiens
atataaaatgaaagaaataggtcatctttacatgtttaragtgggtgagagtaagagcaagacccaggccaagagcaagatgagataatgaggaataaataacacagtggggaaaggatataggaatttacacttctctgaccattaattcattactattagaaataatttaactagaattccaaatgtaataatttcttcatattgggatatgacattcttatttgcaaaagttacattagtcttcatattatcaccagtaacactttgagcacttatatttatatttgtatattgagtagaaaatactatttataattttccaaatgttctgttgtttatgacaaagtttaatcacaacatgctgctcatcactggtactcaataaatatctgctttaattacaataatggcaaaattatatgctaagaaagatgtggcggggggaccaagatgactgattagaagcagctacagtgcatggcactcatggaggggaaagaaagggcc

SEQ ID NO: 250522 - DNA, 510 bp, Homo sapiens
atataaaatgaaagaaataggtcatctttacatgtttagagtgggtgagagtaagagcaagacccaggccaagagcaagatgagataatgaggaataaataacacagtggggaaaggatataggaatttacacttctctgaccattaattcattactattagaaataatttaactagaattccaaatgtaataatttcttcatattgggatatgacattcttatttgcaaaagttacattagtcttcatattatcaccagtaacactttgagcacttatatttatatttgtatattgartagaaaatactatttataattttccaaatgttctgttgtttatgacaaagtttaatcacaacatgctgctcatcactggtactcaataaatatctgctttaattacaataatggcaaaattatatgctaagaaagatgtggcggggggaccaagatgactgattagaagcagctacagtgcatggcactcatggaggggaaagaaagggcc

SEQ ID NO: 250523 - DNA, 554 bp, Homo sapiens
ttgaatatacctggcttccaggtatcccttttctattgccacagctgctagcatttacctatgcaagattttggcttgcttatccatgcttgcagcctgatttttcaggcagcttcttgttagaaaagaaatgatttgggggctgtttttattaaaaagaaaccttgctgaggactctcttacccttgctatctgcctaaataatttctaggtcttgtatcacctgtacgtactcctaggaagggggctgaatccagggcctgggcaggattggtctgcaggccccayttccatggcatcacacaagataagacccattatcttgaaattaaagccagccactggcaacagggtagatcatgcctgagacctgagatgggacagagcccccaaggggaggggtgggccaccgtctttgctgtttgcacgactcagccattccagtctgcaagctttggagagtccaaatgatcctgacaaggaaggaactccccagtgtagcacagcctctttaccaaaatgtcgacagactgctcctttaagcaggaccctga

SEQ ID NO: 250524 - DNA, 583 bp, Homo sapiens
tggcacagacctctcctgattgcattgcccacgtggtcccagagtcagtcttcatccagtttattccatttagtcacctatgctctccaagccctttaatggaaatgttcagatcttagtctaattggaaaagaagagacaaaaaaatagagtcgaaaggaggctgaggggtgtggtgacgcatgcctgtaatcccagctactcaggatgctgaagcaggaraataacttgaacccaggagacagaggctgcagtgagccaagatcgtgccactgcactccagcctggatgacagagtgagactctgtctcaaaaaaaaaacaaacaaaaaaaaaaaacaaggaaccaaggaggctgaggctgaggtcccaaagcccagcaaagatggtgggtgtcctcgggtggcaccacagctattgactgctactctgagagaagtgcttcatcttctaagggtggagagaaaaagaacaatgagtgtgctggcagcaaacgaaggaaaaacacagaaaaggcaaaaggaaaataagagatgggaaaaagataagaccctaacccataactgtgacatttgaccacagaa

SEQ ID NO: 250525 - DNA, 576 bp, Homo sapiens
tactagtataaggtcagatttttaaatgcatagttagattttgtatatataaatatatgtattccttttgtacattgagaaagtctaaaagtaattaatattctaatatcaatgtgcacacattgcttccaggtcttgactccatttttcactaaaacgaatcaaaactccttggagagatgaccgattgctgggaaaagacagggaatgtacaagatggacctggaacgtcttttgtgccacaaagcaagaaggtgctcaaagagtagtgagagtacatcaagtcagcttgaacaagcttccactggccaaattggggacaatttgaacatcaaaataaacaatgacaaaagtatagtayaggctattggataaaatagaaaaccatttgacatttacatacttccaaagtaccttcccacaaaatacttattaattacaaaggggaaaatagtaaatttatagtgaaggagcttggcaaaatagcaccttaatcaagtgatcaaagagatcattactgataatgggacaaactgaaattgtgcagcatctgataggattcattaagaatccagc

SEQ ID NO: 250526 - DNA, 603 bp, Homo sapiens
tgggcatgcttagttttgatatatcaacttgaggagtattaatatcttaccaawatttagtctttcaatctatgaacatggtgtatttctctgtgtagctgttctttcaataatattttatgtctatctggacagcggatttgtacttcagttagatttatgcctgaatatataactttttcatacaattttaaatagtatatttctttattttacttcctatttttttgttgctgactgatagaaatgcaattgatttttggctgtcaactttgtatctgaaaaccttgccaaattatttaatatacctaataaatcacctgcacattcttttatattttcttcttacccaatcatatcacctacaaataagagtatctaaactttacgcttttgttatttttcatgctatatttagctggctagtttcttcaatatatttttaataaatttaaaggatatccctactgactcccatctcagaaggaaagggttcaacatagtaccattaagtatgatgtttattgtattctctttatcaatagagactgttcccttaatccatttctagtttgctaaaatttgctcatgaatagatgttga

SEQ ID NO: 250527 - DNA, 603 bp, Homo sapiens
tgggcatgcttagttttgatatatcaacttgaggagtattaatatcttaccaatatttagtctttcaatctatgaacatggtgtatttctctgtgtagctgttctttcaataatattttatgtctatctggacagcggatttgtacttcagttagatttatgcctgaatatataactttttcatacaattttaaatagtatatttctttattttacttcctatttttttgttgctgactgatagaaatgcaattgatttttggctgtcaactttgtatctgaaaaccttgccaaattatttaatatacctaataaatcacctgcacattcttttatattttcttcwtacccaatcatatcacctacaaataagagtatctaaactttacgcttttgttatttttcatgctatatttagctggctagtttcttcaatatatttttaataaatttaaaggatatccctactgactcccatctcagaaggaaagggttcaacatagtaccattaagtatgatgtttattgtattctctttatcaatagagactgttcccttaatccatttctagtttgctaaaatttgctcatgaatagatgttga

SEQ ID NO: 250528 - DNA, 647 bp, Homo sapiens
ggataactggcaagccacgtgtagaagagtaaaaccggatcctcatctctcaccttatataaaaatcaactcaagatagatcaaagagccaaatctaagacctgaaaccataaaaattccagaagacaacattggtaaaactcttctagacattggcttagccaaagagttcatgaccaagaactcaaaagcaaatgcaactacaacaaaaaaattgatgggacctaattaaagtraaaagcttctgcacagcaaaagaaataatcagcagagtaaacggacaacccacagagtgggagaaaatattcacaaactatgcatccaacaaagaactaatatcaaaaactcaagtcagcaagaaaaaaaacaaagaatcccatcagaaggtgacctaagaacatgaatagacaattcccaaaagaagacacacaagtggccagcaaacatatgaaaaaatgcttaacatcattaattatcaggtaaatgcaaattaagatcacaatgagataccaccttactcctgcaagaatggcaataatttaaaaatcaaaaaataatagatgttgatatggatgtggtgagaaaagaacacttttacactgctggtgggaatgtaaactagtacaaccactatggaaaacagtata

SEQ ID NO: 250529 - DNA, 571 bp, Homo sapiens
ggtctcatctgcaattggtacacttatttgataccaggaagagcagcctaggtaacaagatccagcaacagaagttcagggcctgaattctcccccagcagcttgccttgmccaaattagtgtggcatataggacatttggcagaagagtttcccatcagctctcatgccaagaagtcaaggccatgctgagcagaacatccctcagcttccgtctacagaagttaggtttcctttaagtactggctaacaacccagggtggttagagcccagactcaaataaagctggttagaattctagcaatcactgccttggagaagttaaagtcttgctggctataagtggagctcccagacagttcaagaattcctgtttctgggaagccctaggaaatatgggccagagatatgtgcacatgaagcattcagaatgtgtgtaagcatacaattgttcttccaagtagcaacagttactgtatatcacattggaggggaaaagtctaccaaatgcaaagatttctctgtgaactgaaagcagatttagaataaatactgagcagcctagctagga

SEQ ID NO: 250530 - DNA, 530 bp, Homo sapiens
tccgttttatagatacagaaactgaggttgaatcatttgactagggaaactaaaaagttgtagagcttgacttacatatgggtcttctgcaaattagcccaatgctcttcctactacatcatctgcatttgaaaaaaaaatgaaagaatgataataatatacccatataataataatgaatgacatttctcaaaatataatttcaagaagttaaaaacacgactttcatacaaatatagaattgaacatgaggaaactagcagagcagcacaactgattcaaagagtatttgagggaaagagaattacagaaacaggaaagatatgccaaaaataaatttgctaagattgttaggttagactcttaagggactcttctgcagtggacagagaccatttgcatctctactagacacaaatgtacaagttaacacgttacttcatggagtctcagtctaatcaacmataaataacaagacaaagttacatgtcctagaatgaactaatccttggtagccagctagaccatgc

SEQ ID NO: 250531 - DNA, 492 bp, Homo sapiens
ggctggcccttaagaggaaataggataggattctgagtctcttttatctttttttttttaatttttgaggttaaactagataaatctaattttcaggatatgctcaygcaaaactgattgaaataacaaaagtgtgtggaaatgtgtaaagcccaactgatttttgttattttcacatcaaactggggttttcaaatcggtctatctacctactgtgtgtgtatggtagagggaaagggtctttgtttcaggttccatacttttatgcaaattaaataccaaaacaccgtctagtccataggctggcaaagtacacctgtttttgtaacgaagttttattgcagcagccatgctcattcatatacgtgttgtctatggctgcttttgcactacagcagcagaactgagtagtgtgacaaagatagtatgatccgcagagccttaaatattcactacctgggcctttacagaaaaacattgttgacccctgat

SEQ ID NO: 250532 - DNA, 492 bp, Homo sapiens
ggctggcccttaagaggaaataggataggattctgagtctcttttatctttttttttttaatttttgaggttaaactagataaatctaattttcaggatatgctcatgcaaaactgattgaaataacaaaagtgtgtggaaatgtgtaaagcccaactgatttttgttattttcacatcaaactggggttttcaaatcggtctatctacctactgtgtgtgtatggtagagggaaagggtctttgtttcaggttccatacttttatgcaaattaaataccaaaacaccgtctagtcyataggctggcaaagtacacctgtttttgtaacgaagttttattgcagcagccatgctcattcatatacgtgttgtctatggctgcttttgcactacagcagcagaactgagtagtgtgacaaagatagtatgatccgcagagccttaaatattcactacctgggcctttacagaaaaacattgttgacccctgat

SEQ ID NO: 250533 - DNA, 480 bp, Homo sapiens
ctatgatccctggattatctgcattaagattacttagggtgcttgtttaaaatgcagattagaagaccccaccttcaattattgaatcagaagctctgtgtggggattaaactgtagtttactaaatggtggggggtatctttgaactccgcagagatgaggacacaccattttggggggaatatgtctttaccattatgtttggtattcaccagaataggtcagccaaatcaaaggcaatataatctcagtccttcatggtggagtgagagagagaaatgaaggaagsacaaagaagaatcaagaaactctgtccctgctcttattcttcccctctgtacctaattggagccactgacttcataatagcaaatcaagagtgaggcgagtttagcaacttggcttacagaatattataaataattatcgctttgcttcctttatagtatgctttagaactccaaagaaataagcagtctt

SEQ ID NO: 250534 - DNA, 587 bp, Homo sapiens
tgcaggcaacggttaagtcatgcctgcaggccatcaatctcttaatcatctaaacctatcatattttggctgactgacatggcatccttatcttttcataaaccttcctttctgctaacttcaagtttttagacaaagttgtgttcttttaaccaattgaagattaaagaatctctgaatccattgatgacttaccatctcctgcttcaagacatcctgccttttcgggccaaaccaatgtatacctttcatatattgacttatgtctttgtgtctgtaacttctgcctccccaaaatatataaaaccaaactgtaaagccaggcatagtggctcacacctataatttcagcactttgggaaacygaagcaggtgaattgcttgagcctaggagtttgagagcagggtgagatacatggcaaaaccccgtctctacaaaaaaaaaaaacacaaaaattagccaggcatgctggtgtgcacctgtagtcccagccactcaggaggctgaggtgagaggatctcttgagcccaggaggtggagattgcagtgagctgagatagcaccacagcactccaggccgggcaat

SEQ ID NO: 250535 - DNA, 608 bp, Homo sapiens
aagttttaatcataaagcaatgctggattttgtcaaaagctttttctgcatctattgaaatgatcatgtgatttttgtttttaattctgtttatgtggtgtatcacatttattgacttgcatatgtgaaaccatccctgcatccctagtatgaaagccacttcatcatggtaaattatctttttgatatgttgttggattcagttagatagtgttttgttaaggattttagtatctatgttcatcaaggatattagtctgtagttttcttttttggtaatgtcctttcctggtttgggtattagggtgatgctggtttcatagaatgaattagggagggctccttctttctctatcttgtggaayagtgtcaaaaggattggtaccaattcttctttgaatgtctggtagaattctgatgtgactccatctagtcctggacttttttttgctggtaatttttaaattaccatttcagtctcgctgcttgtcattggtctgttcagggtgtctaattcttcctgatttaaggtaggagggttgtatttttccaagaatttatccatctcttttagattttctagtttatgtgcataaaggtgttcatag

SEQ ID NO: 250536 - DNA, 602 bp, Homo sapiens
cctgctgcactgtgggctcatgaaggtcagagacccttgtttctgatcttcatttctccagcatcgagcccactgttaagtactaggatggcaagtgatcaatgctcttggatgattgggatggatgaatccccatgaggacagcctgtcctaatatcaggtacaaatcttactatgtaaaggctggaaagacccacaagactcatagtgttcaaygccctcttttcaaagatgaggctgagagaagtgatttaattaaggtcacacagtgagtagctggcatgggctatctgtagattcacagcctagtcctccttccactggaaaaaatactttttcattcattcatggggaaaagaaaaaaaagatgtactgagcacatccaatgcgacaggccccgcagataccatggtgaaaaagttagaggtggtttcttcctcctgcggcttacagtggggtggtggaggtcggggcgggggcggcatgggatacaggaagtatttagataagcagacaggaccgggaattgggttaagatgggtcatgctagccagggtcaaattctgactttatttgaaatgttgatattttgtccaccaagg

SEQ ID NO: 250537 - DNA, 307 bp, Homo sapiens
ctataaaaatacccatgctacaaacttcagggaaatcagtcaaaacccaaaacaatacaagttagttagttagatgccatttggggttttccaaatgccaagtctaacagtcaggctacmcaggatggactctcaaacttcccttcccctagcagagaataacagagtacatactatcccaacaccattacaatcattcattttgcttttagtgttgtcaatagaagggaatggatttgtgaaacagaaaatactaataagctaaaacaggtttgttttatttctctgatgtaggttcactggtcag

SEQ ID NO: 250538 - DNA, 496 bp, Homo sapiens
ttttccgtggtctttctagtcctggaagggaaaacagcatgaagctctggagtttccaattccctcttctaatgtgtagctaacaggcaggatgactttgataaaacatgattattctttcatgtcataataaaattgttaagtctttcaaaaatccttacactagggccttttctgctgcctaataatataagagcagataaataaagaaattaaacaagtttcctctttgtgacctgaaagttgaaaaagctacgaggaaggggaggaatgattcagacttttccaagactgctggatttttttttttttttttttttttttttttttttgagacagggtcttgctttgtcacccaggctggagtgcagtagtgtgatctcagctcactgcwttctctgcctcctgggctcaagcaatcttcccaactcagccttccaagtagctgggactacaggcccagctaattttttgtagcaacgtgactttgctatat

SEQ ID NO: 250539 - DNA, 630 bp, Homo sapiens
cagtcttcaagctctgagattctttcctcagcttgttctattccgttgttaacattttcaactgtagtataaatttttgtagtgagtttttcagctctatcacatcagttttcttcyttcttaaaatggtcatttcatctttcatctcttgtatcatttcactggattccttagattccttggattggatttcaactttctcctgaatcttgatgatcttcattgtcatccagattctgaattctaagtctgtcatttcaactacatcagcctggttaagaaccattgctgaggaactaatgcagtcatctggtggttagaaaacattctggctttttgagttgtcagagttcttgcactggttctgtctcatttgtgtgggctgatgttcttttactctttgaagttgctgtcttttgggtggggctttttgccttcacatttgatgcccttgagggtttgactgtggtataagttgggttcagtcaactggctttgtttctgaatgatttccgggggctctggctcacctcagcactgcatgctgtaaccctagggggctggacccaagcccactgctttattctgtggccccttgagattaaagcacctgctgtgctggaagagcca

SEQ ID NO: 250540 - DNA, 573 bp, Homo sapiens
aagaggaaataggaacagttatgtctggaaagtgctggtgtaggccttacaataacaagctttaaaggattcctaagattgaaaccaactttgcaaaattatgacagtaagagaaatctgacatagttggttccatattgtttctgacctccaaactgtccttggtcattcctggtcataagccaagctaactktgggaggaatttcatttatagtttaacttgaaagcaagaatgacaagctacaggagaatccacaaatatttatgaaagtataaatccatgcatgtgcaactgagtttcatgcctcttcgtgggacccatgcccaaaaaatggaagtgttaatatgatccagggtagagttttcagccctctaatgtcaaatggtgaagcactaattagacataaaactaatcccctccctatttgggtgctgaaaccacctttgtgagactaatgagaggtcgcaagataggtgtagtttctataatctcttattgctcaggggttgtatgctcctatagataacatcactcttctagaacctaagactggtttcttttgagatgtttt

SEQ ID NO: 250541 - DNA, 519 bp, Homo sapiens
gactgaggggccacaggacctccacctgtgcaccttacacagcctcctcacacacagaaagcactcaataatcacttgtgggaaataaatgcaaattgatatccccacttttaacaacttcatttggaagcctagtaaaaattactggagagaggagaggaaaagatgcttacatctgctcactgacctgtttggcatttttctatctctccccctgatttccaggcattaaattaatcatgccctttcttcctacctttactcctgggtcaatagacaaggcctttctggtctaattagactctyaaatgagctctagatgcttaaggaagagcctaggctgaggaatccaaaccaccctcctttcttctatctagtcctatttagttgatgccacaaaaaaataggctggttttgcatctggttatttctgcctgggccctttgtgatctctctcagagggtgaccgctcatcactcagatgacacagaggagatccacaccagcaacagtccaagt

SEQ ID NO: 250542 - DNA, 611 bp, Homo sapiens
agtataagcatgccagggcaaatatttaggctaaactgtgggagctaagaacataaagtacatggatttctttattatggctagcagatatttaagaatgttagcacaggtctttgaataaattttgcttctaagagaagttactatttattcctaattagacggagaggagagtctctttgaagaggaacctctactttactttttacatggattattcatcctatttcactagtttatttgtctatccttgcccaaacatcatagtgtcttaattatacgtctttatattcagtaaagtctagaacttttttcatcttcawgatcattttcaccattcccattctgttgcatttccatacatgttttattatctatttgataatccccatcactgaaaaaacaaacacacagaaaactcttctgtgctttcttcttctccttttccttcccttcccaaacaatttaatcttaaatcattaggtaaagaagaacaagagaggtatccacagtgggtgaagcaggctagctttggtggcttagagaagaatgtcagagcccaagaaaggggataggaagcccatgcagaagatggagggcgagggcagtat

SEQ ID NO: 250543 - DNA, 611 bp, Homo sapiens
agtataagcatgccagggcaaatatttaggctaaactgtgggagctaagaacataaagtacatggatttctttattatggctagcagatatttaagaatgttagcacaggtctttgaataaattttgcttctaagagaagttactatttattcctaattagacggagaggagagtctctttgaagaggaacctctactttactttttacatggattattcatcctatttcactagtttatttgtctatccttgcccaaacatcatagtgtcttaattatacgtctttatattcagtaaagtctagaacttttttcatcttcatgatcattttcaccattcccattctgttgcatttccatrcatgttttattatctatttgataatccccatcactgaaaaaacaaacacacagaaaactcttctgtgctttcttcttctccttttccttcccttcccaaacaatttaatcttaaatcattaggtaaagaagaacaagagaggtatccacagtgggtgaagcaggctagctttggtggcttagagaagaatgtcagagcccaagaaaggggataggaagcccatgcagaagatggagggcgagggcagtat

SEQ ID NO: 250544 - DNA, 469 bp, Homo sapiens
tttccaggctgaagccaagaaccctcccaggctaagccccartattggggctcaactgcccagcatcctggctatgggctaagaccctctctggaatggaggtcttatgacctacagtcaaacagggtgggtcagataatttctttatggccagtttttacacaaaaaggcagagaaaaagagtcatatttttaggtcttatggctggctttgggaaaaaaggggttgtggttctatgacccaccttggggaagagggattctagtttctatggctagcctcaggggagcatgggactgagagacaggtggtcaggagaagatcagagaaaaacttttgctctggggccctcattttggggcattgtttgtgagtccttacttgctcactgccttacttgctgtatcagttagttattgccacaaaaatgctgtgtaacaaaccatcccaaaactcaggggcttaaaac

SEQ ID NO: 250545 - DNA, 623 bp, Homo sapiens
gagcatgcatattggagtatgcacgcctgactcacaaatccaaaaataagtcataagacgctatatggagagattaactataaatatagcaatattagctgtgagtgacaagcccaattagaggacatagagatgatttagaaggtctccatgcagtgcatcttgaagagctataaaaatacttgatgtttacagcttaagaaagagatgaaaattaaggggagatcgtttatgatctgattatgtatccactctataggaggaatggtcggcacctggccttcccctacctcatccttggtcagcacactctggcctaatttccagtggccagcacctgcattcatttgtttgaggactgtctctggtctttggggtacacrttatgatctacacagttgggccagaaatgctagagatttaatgtcctccatgagtggctgtcaatcagtgactggtaggaaggtggaggataaatatcccagctccctcactcctctgctgggcaattctgagatctgtattctatgttgtctcctagaggtcaccagtagattgagcgtcagttgcccacagtggtaacttgcttgatgcttgttgttttccttccctgtgtcacttta

SEQ ID NO: 250546 - DNA, 590 bp, Homo sapiens
tttttgtcctcttagtaatgtwccatatttccctaaagttatccttttcattccttttatttttagctcctctgattggatggtttctaatgacccatcttcaagttcagtgattctttcttttgcttgatctaatctactgatgaaatgctctatttaatttttcagtttagttgatactatttagttctatagtttttgtttggcacttttaatattttctatcactttgttaaaaatttcacttattcactgctctcctgaacttaataagcatttttatgaccattattttgaattctctgttgggtacatcaaatatccccatttcattctaatttgttttggaagatttttctattattttatttggaacatattttcatgtttctttcttttctttgactctctgtgttggtttctgtgcattagatgaaacatccacttctcccaacattcacatgcttttttgatataggaaatgatgcttgccaatcagtctcatgagagattctggtgcctttcaaacctttgtgcttgtccagctgccatttttcttcctagtggcctctaagaaactagagtatgcc

SEQ ID NO: 250547 - DNA, 525 bp, Homo sapiens
tgattcaatttttctctctttagggagaagctggaagctggaacttatcacccactatctcttaactgagccaggaggtaagctatggcaaatgcttgtacagtcattcagactttttgctctttcaaactgttgctttgttctctgtcaccctcaagaggtctggagaatgccaggcctcattacctttcagatacaaatgggttagaggccagttcctcaggtagcaagcagaaaagttgtggagctaaagggataatcaaactccttctgtggaaatgctgtagaaatgattttttttcactgaaaggagccaggaggaggagcaatgggaagtacccaygtgggcataaactcccagggaactagtgattgctttctccatcagctccaagaaataggcaagatagaagttggatcttcaggtagcagctggaaaagtcaaggctccaaatatgtagtctaacctctcccaactgggagctgagttttataactggtgtaagccagacaggagttgcagaa

SEQ ID NO: 250548 - DNA, 525 bp, Homo sapiens
tgattcaatttttctctctttagggagaagctggaagctggaacttatcacccactatctcttaactgagccaggaggtaagctatggcaaatgcttgtacagtcattcagactttttgctctttcaaactgttgctttgttctctgtcaccctcaagaggtctggagaatgccaggcctcattacctttcagatacaaatgggttagaggccagttcctcaggtagcaagcagaaaagttgtggagctaaagggataatcaaactccttctgtggaaatgctgtagaaatgattttttttcactgaaaggagccaggaggaggagcaatgggaagtacccacgtggscataaactcccagggaactagtgattgctttctccatcagctccaagaaataggcaagatagaagttggatcttcaggtagcagctggaaaagtcaaggctccaaatatgtagtctaacctctcccaactgggagctgagttttataactggtgtaagccagacaggagttgcagaa

SEQ ID NO: 250549 - DNA, 605 bp, Homo sapiens
atgttcaactactgacttcattctcaataagatgtaattattatggttacactcttaacttagagcttctgattattcatatcagttgaagtttccttttgctcccatgttgtataaagcagtttctaagtagcttaatagcccgaataaaaaggaggagtataatctaatttaaatttatctttrgcatctttgaccacttagtatcatcatttacacttcaacaatataaattatcaattccagactattctcttctctcctttttctatattcattttaatttaattatatgttgttttccagattgactttctccatttgtctcaaatttgttaaatctggaacttaaaaaagaaagctgcagatcttaccaaggttataaatgttataaatagaattactctattacgtgttagttatacatatcttatacttcatgagagatatacacctatgatgcaaatacctcccattaggtctcacctctaacactggggatcaaatttcagcctgagatttggaggggataaacatccaaactatagcaagcacagggtaccatcctctagttaaataacattcttatacatctcaacaatgct

SEQ ID NO: 250550 - DNA, 624 bp, Homo sapiens
aggatattttatacctaaaaagaactcttatctggaacaggggtcatcaaactatgatccaatggctacatctgcttttgtatggacctcaagctaagaagggattttacattttaaaagtgttttgaaaattatcaaagaagaacatgtgacagaaactgtatgtgaaccacaaagccaaaaatatttactatctggctttttgtttggaaaaatgttgctgacccatgccctaaaatgtttggttatgacctttctgctttatcactgtccaattcagcagtgactggtctattacaattctgccagcagagcctctgctgccaaatttgtttgtttaaggaaagcaactcaacatggttattaatgggttccatctattgtcagaccgaattatgcttccagaggtgtggaggtgctaggcttggtctcctctggataggagtatggaaagcacacagagatggatcttttctaaggaaatgtcctgtcacactgtcctgtcaaacacaacacctgtagaaaaactggaactagggcccatgaatttattatstacatgtgccagaaatttcataatagcctaagcataaaatactggaaaaggcagatgaggtagaggta

SEQ ID NO: 250551 - DNA, 567 bp, Homo sapiens
caaaggtcttaataggaaacacttgtcatctatcgtgtctaagggcagctactacaagacttcaaaagaaccttggtctccacaatcttttatcttaacctgaacatttccttcctattgattacaggtctttagaaaaactcaaccaattgccaatcagaaaatgtttaaatttatctatagtcaggaagttcctcccctatttgagttatccctcctttctgaaccaaaccaatgtatttcttcaatgtatttgattgatgtctcacgcctccctaaaatgtgtaataccaagctgcaccccgaccacctttggcacatgttctcagaacctcctgagggctgtgtcatggtcactcatattcggctcagaataaatctcctgaaatattttacagagtttggctcttttcctcaatgcctcttaggtaatgctggcccaaggaggataagcacatatgaagcagacctggaatcaagctacagcttggagccaagtccaggtgaagtcaactgagwtcagccaaaccccagccaacctacttatgcagattcttaagcaagaaa

SEQ ID NO: 250552 - DNA, 590 bp, Homo sapiens
tatactgaatcttcactaggcactaggcactgtaagggctttacagatattatctcactttgttcttaccattcactccccccactgaaaagaaaaaaaaaaaccgtgcagttagcaatattataatttcagcttgacaataaggatgctgaagctcagaaagaggatgttacctaccccagttcatacagctgcagagctacaattcaaacctagtctttctaatgcttaagcataattgtaaaaactactcaaaargtgaaacagtgaaattaaagctgcttgttaaaaacttcacctagtgtacaaattctgcacacttaacatttatacagacagacatgcatagacacacaacatgtccttacccccttaaattcttaaaacttacaaaatgtcttactttgtaaattttcttgtatatagtacaattcaaaaaaagtaaaagcatattttgggtcatgattcagtaaaataatatttattaggcacctattttactatttgctgttggagggaacatatacttatatgcacagaccaaagtctattacaaccatgatgatgacttactcatccttacagcctta

SEQ ID NO: 250553 - DNA, 605 bp, Homo sapiens
acttctctgaatgtgtggaaagtgataagaatcagataaaaaataatgaattaaaataaaaacatagtgtatcaaaatgtgtgggtttatgttaaagcagaaatcactgttagaaaaaactgataaaactaatgatctaagcatttatcttaaggatattgaaaaagataagaaaattaaacacaaattaatagaagaaaaaagcwtaagaatcagagcaaaaaccattgaaaaaggaaaccaacaaaatagagattatgagaacctaaaactaattcactaaaaagagtaataatattgtcagacctctatctaagtcgatcaagcaaaaataaagaaagcagaaattaaccatatcagtaataaatgaagggacagctttagatcctccagccattaaatgtttaacaaggatatataataaacaactttatgaggataaatttgtcaatataattttgtcacacaaaatcatataactaaacaattgcaatattggtataagaagaactttaaaatatgggcagttctataaatgatttttaaaaccacttaatttgtattaagtgaattgtcttggcgtctatgttgaaaattgattttca

SEQ ID NO: 250554 - DNA, 602 bp, Homo sapiens
tggttcacattcatgttaatcttcttatcaaacaattacttggccacacccttagtgttctcttctgaacatgctttcttactttttacaatactgataggctgagaattttccaaatgtttaagttctggttcctttttgctgamcaatttcattttcaaattatttccctctttttacattttactataagcaggtaggaggaaccgaggtgcttcttcagcacttcacttagaaagctcctcagcttaatatccaatgttatttcttatgagtcctacgttccacaaaacactagaacacaaacaattcagccatattccttgtcactttataacaagaatcatattttcttcatcattcaataacttgctcctcattttcatctgaagcatcatcagaatggcctttactatccatatttgtagcagtgttctgttcataattactcaggtattctctagaagagtaaggtgaaagctttctctacagctctcttattttctttctgagatcttaccagaattgcctttaaaggtccattcatagcaatatagacttttttaaagcatgcacctcaaaactttttcagccttcaccca

SEQ ID NO: 250555 - DNA, 602 bp, Homo sapiens
tggttcacattcatgttaatcttcttatcaaacaattacttggccacacccttagtgttctcttctgaacatgctttcttactttttacaatactgataggctgagaattttccaaatgtttaagttctggttcctttttgctgaacaatttcattttcaaattatttccctctttttacattttactataagcaggtaggaggaaccgaggtgcttcttcagcacttcacttagaaagctcctcagcttaatatccaatgttatttcttatgagtcctacgttccacaaaacactagaacacaaacaattcagccatattccttgtcactttataacaagaatcatattttcttyatcattcaataacttgctcctcattttcatctgaagcatcatcagaatggcctttactatccatatttgtagcagtgttctgttcataattactcaggtattctctagaagagtaaggtgaaagctttctctacagctctcttattttctttctgagatcttaccagaattgcctttaaaggtccattcatagcaatatagacttttttaaagcatgcacctcaaaactttttcagccttcaccca

SEQ ID NO: 250556 - DNA, 533 bp, Homo sapiens
atttaactagagaagtcatatgtctggtgaaatgtgagagagaatgaagtggtccataggcactgcattggtttcctagggctgttataacaaagaaccacaaactgggtggcttagaacaacagcaatttattgtctcatagtactagaggctagaagtcccaaatcaagttgtcagcagggccacgctycctctaaaatacatagaggaagccttccttatatcttcctattttctatgtgatctgctagtaatctttgctttccttggcctataattttctatgtgatctgctagtaatctttggctttccttggcctataaatgcaccactcccatcgtgttttcatatggcattcaccctgtgtgtctccacatagccttccttctatatgtatccatccctgtgtccaaatttctccttttgtaaggacaccaggcatgttggattagggcccaccctaatggcctcatgttaatttgattacctctgtaaagattctgtttccaatcatcacattctgagttaagg

SEQ ID NO: 250557 - DNA, 485 bp, Homo sapiens
cctttctgtattttataaattttctgtaatatgtagcacttttggttgaaagtatgttttaatttttaaagaaataaaagagattgcaattggatgatgtgagtatagctggaaaacttgaggtgtgacctttgagaagaggtatgtgtgcacacatgtagtgtacagacatgggcgtgggagtataaaaaagagttcatgtatgtattcagaacacatgtaagcattcagaattacatgtttgagagcttcacctggacaattacgcatttagctgtgcaaagtgtttttgtaaaatctgaaatttacttatttctacaggtaaaagtttgccttgatgcacaaaagttcttttaaccctatgctggcttgattaataaaaacrtaactatttctctttatgatcttagcgtttaaccaagtaaacattaaggcaactaaaggttgatgaatttgccagggctaagtctccaactaaagatttt

SEQ ID NO: 250558 - DNA, 485 bp, Homo sapiens
cctttctgtattttataaattttctgtaatatgtagcacttttggttgaaagtatgttttaatttttaaagaaataaaagagattgcaattggatgatgtgagtatagctggaaaacttgaggtgtgacctttgagaagaggtatgtgtgcacacatgtagtgtacagacatgggcgtgggagtataaaaaagagttcatgtatgtattcagaacacatgtaagcattcagaattacatgtttgagagcttcacctggacaattacgcatttagctgtgcaaagtgtttttgtaaaatctgaaatttacttatttctacaggtaaaagtttgccttgatgcacaaaagttcttttaaccctatgctggcttgattaataaaaacgtaactatttctctttatgatcttagcrtttaaccaagtaaacattaaggcaactaaaggttgatgaatttgccagggctaagtctccaactaaagatttt

SEQ ID NO: 250559 - DNA, 485 bp, Homo sapiens
cctttctgtattttataaattttctgtaatatgtagcacttttggttgaaagtatgttttaatttttaaagaaataaaagagattgcaattggatgatgtgagtatagctggaaaacttgaggtgtgacctttgagaagaggtatgtgtgcacacatgtagtgtacagacatgggcgtgggagtataaaaaagagttcatgtatgtattcagaacacatgtaagcattcagaattacatgtttgagagcttcacctggacaattacgcatttagctgtgcaaagtgtttttgtaaaatctgaaatttacttatttctacaggtaaaagtttgccttgatgcacaaaagttcttttaaccctatgctggcttgattaataaaaacgtaactatttctctttatgatcttagcgtttaacmaagtaaacattaaggcaactaaaggttgatgaatttgccagggctaagtctccaactaaagatttt

SEQ ID NO: 250560 - DNA, 597 bp, Homo sapiens
tgagataatgcctcttcagagactgtgcttagagtaatcaaatggcgaagctgcaagcattttaaaagttctgcaatgcaccctgacaagtcaacagcatccagacttgtttgcttcttccaggactcatcaggctttgcaactgttctttcccaaatgtgcttagacagtaagagaataattaatttaccctgagcaccgaagacaggttcagaaagcaacaacagaaaggccgaggtcagggttcacgggctggtagatcctctcattctgccccaacaacccctttcaaagctctgcagatctgatggmcagactgcaactgggaaaaatgcaagtgatgctgctgtgcaagctcagagagtctgtgaaaaaagttccattcaattgctattaaaccactagttcatattcacatggttcttaatacagccttcccccagaggacagaataagaaatctgtaatcatttcattgaataacaaactatttactcaatgtctactaaacgccaagtactatatgaggcattgggaatgtagcaataaacaaatacacaaagttcttgcctttgataaccttaaagtttagtgaaat

SEQ ID NO: 250561 - DNA, 606 bp, Homo sapiens
ttattcatttgtagctctaactatgtttctactctctttatccacaccccccccacmcacaccacacacctgtcccatgctctaatatctatcattctattctctgtcttcatgagatcaggtttttttgttttgttttgtttttttgagacggagtctcgctctgttgcccaggctggagtgcaatagcacgatctcggctcactgccatctctgcctcccgggttcaagcgattctcctgcctcagcctcctgagtagctgggattacaggtatgaaccaccaagcccagctaattttgtatttttagtagagacagagtttcaccatgttggtcaggctggtctcaaactcctgacctcagaagatccacctgcctcagtctcccaaagtgttgggattacaggtgtgagccaccacgctcagctgagatcaggtttttgttgtttttgtttgtttttttggttcccacatgttagtgagaacatgtggcatctgtctttctgttcctgtcttatttcacttaacataataacccacagttccatctatgttgctgcaaatgacagggtttcattctttttatggccaaatagtattccattg

SEQ ID NO: 250562 - DNA, 556 bp, Homo sapiens
ttgacagaactcccatcatttaactaggagaatgaacaagaattagaggagaatccttttcactggaaagcctgaatatgccttttgcattgctttggattctgtgtcaggagccttgtgccctgtttaccaggaacagccccatcttttaaagcagggcctcactctgtcatgcaggctggagtgtaatggcataatctcgcctcactgcagcctcgacccacgggctcaagtgatcctcccaccttagcctcccaagtaggtgggattacaggtacccaccaccgtacctggcaaatttttgtatttttgtagagatggggctttgccatgttgcccaggctggtctcaaactcctgagctcaagcaatccacccgcttcggcctcccaaagtgctgagattacacgcatgagccaccatgccccrccctcccatcatttattgaggaatgagggatgatgtggtcctccactgggaagacgggggctttattttccagcaatgctgatcttcttagttaccagtgctgccttggctctatgatgcttggtgtt

SEQ ID NO: 250563 - DNA, 533 bp, Homo sapiens
ggaaagatctctataataaacttactatataaaagcacttatagaatcagtaaaagacaatcctaccacagaaaaacaaacatgattagtccagtcaaaaaggataaaccagtaactaaaaaaaaaaaaaggtggktttttttttttaacctattgaattgacagattctttcatgcatagtgaaactggtaaggggacaaggaaatgaaccctctaatagcctctagtgaggttatggtggtggagggaacaagcaaaaagcctagagttcataatctttaacctaagttgcacttctaggaaaccaagtgttgtgtaaaaagacatgtaacacatctatataagtattcactacaagcatcgataccagcaaaaaaaagaggaaaaactgaaaatactgattacatagctatggtacacagaatactacagttaacagttagcaagtaaacatgtggaacaaacacatagaaaaacaatcagtgtgaagtcaaaaaagcaggtgatgaaacagcatgtgtcatttcattag

SEQ ID NO: 250564 - DNA, 533 bp, Homo sapiens
ggaaagatctctataataaacttactatataaaagcacttatagaatcagtaaaagacaatcctaccacagaaaaacaaacatgattagtccagtcaaaaaggataaaccagtaactaaaaaaaaaaaaaggtggttttttttttttaacctattraattgacagattctttcatgcatagtgaaactggtaaggggacaaggaaatgaaccctctaatagcctctagtgaggttatggtggtggagggaacaagcaaaaagcctagagttcataatctttaacctaagttgcacttctaggaaaccaagtgttgtgtaaaaagacatgtaacacatctatataagtattcactacaagcatcgataccagcaaaaaaaagaggaaaaactgaaaatactgattacatagctatggtacacagaatactacagttaacagttagcaagtaaacatgtggaacaaacacatagaaaaacaatcagtgtgaagtcaaaaaagcaggtgatgaaacagcatgtgtcatttcattag

SEQ ID NO: 250565 - DNA, 533 bp, Homo sapiens
ggaaagatctctataataaacttactatataaaagcacttatagaatcagtaaaagacaatcctaccacagaaaaacaaacatgattagtccagtcaaaaaggataaaccagtaactaaaaaaaaaaaaaggtggttttttttttttaacctattgaattgacagattctttcatgcatagtgaaactggtaaggggacaaggaaatgaaccctctaatagcctctagtgaggttatggtggtggagggaacaagcaaaaagcctagagttcataatctttaacctaagttgcacttctaggaaaccaagtgttgtgtaaaaagacatgtaacacatctatataagtattcactacaagcatcgataccagcaaaaaaaagaggaaaaactgaaaatactgattacatagctatggtacacagaatactacagttarcagttagcaagtaaacatgtggaacaaacacatagaaaaacaatcagtgtgaagtcaaaaaagcaggtgatgaaacagcatgtgtcatttcattag

SEQ ID NO: 250566 - DNA, 588 bp, Homo sapiens
gctcctatgtgctcatttctcccagactaacatctttcctgagctctagacctgctttcagaaaccaaactcagtagcttcttcccccttcctccatgatatggtttagttgtgtcctcacccaaatctcaccaggaattgtrgctcccataatccccacgtgtcatgggagggtcccagtgggaggtaattcaatcacaggggcagggttttcccatgctgttctggtgatagtgaatacatctcatgagatctgatggttttataaacggcagttcctctgcatgatctcttgccagccgccacgttagatgtgcctttgctcctccttggccttccatcatgattgtgaggcctcacaagccacatgaaactgtgaatccataaacctctttttctttataaattacccagtcttgggtatgtctttattagcagcatgaaaacagactaatacaccccaccacttggtctttccctttcattctcgatttaagctaattgtccaggtcatgcctacttcaacttcaattcttccctgtccttcccactccatactgaatggggcactaaatgtcacccattcta

SEQ ID NO: 250567 - DNA, 458 bp, Homo sapiens
agtgaagcaatattaaaaatgggtacttaactatgttctttattttccatgtattatgttgtcaagaagcaagaattctttagaaaaggaacaggggcttgggtttcctgtggtggttgcctgaatccaagactagagtaggtaggcagtgtttgcaggagtgagcggaaactgtaaattacactcgatttcctttagaggcatctactgcatgacaatagttattcatttttcccaagcctgttcctgtgaatggtaaaagagaggaactaattacgctgaaaggaactttctgggtcatttagaaagtccaagcaaagcaggttttgggccaaaggcaaacagcagaaaagcaaaaatcccyttaattcccaaacattcttctatttcccacattttcaatagccccctgctaagggtataacagaggaaggccacatatcagattttgcaagttg

SEQ ID NO: 250568 - DNA, 550 bp, Homo sapiens
tactgggcacaaacaggtctcaatatttcctgttgaaggagagaagttagtaatagattttagtaggtgcatttggaggtgtctacctacctcatagcctcccattctcgagttctaccacacattacattggwgggtcctagcagccatgtctatactacacaactctatttctttgttctagtcgttgaaacagaggtggacactgatcctcacctcagtccattatattttctccacagtgaatttagaattaatactcagaggcactagtctccagtggctgagggctatagaacagcatctttggcatagtgagtgataaaatctggtaaattccaattgtctgcacctgcaaataggtgtagacatgtgagaattattagattgatgcaaaagtaattgtggttttaccatcactgtcaatggcaaaaaccgtaattacttttgcacaaaactaatagcatgctacaaatagtaaccttggttttcacagtggctttccactgaaaagccattgctggttccacggagcccatgtgttccccct

SEQ ID NO: 250569 - DNA, 615 bp, Homo sapiens
gattagagatgatgataaatcctacgaaggaagcaggatcatcagataaatgtgaggctctctaaggtgttgccctaggagctgagactggaaagactaggaatcagtcctgcaaagaaccagaaaagagcattccagggaaaggaacgagtaatgcaaaggactcgagtcaggaggaagcctaatatgttgaaggaaaagaaacaagaccattgcagctggaggaataaaggggagggtgacagaagaaaggctgggaaagcagacrggagccagatcagtcatggtatagagtttgagttttattctaagggcaatgggaaaccattggaaggttttaggcagaaacgtggggacagtgacacgagagatactgtgggaagcaggattcagatgtttaaaatcaaaattttcaacactgacctctaccctcagttaagactccacataaatttttataggttcttgaccctgttttctaaacatccttctccctaatgtaagttgatctatttctccagtccaccatcacagccagatgtacatctgacttcttccttttgaatctcccaccttaacgctgtttataggctcctctctactcccaggaaaaga

SEQ ID NO: 250570 - DNA, 588 bp, Homo sapiens
aaagtggtttatatgtatttaaamatgaaatttgaagaatatttttaaggatccctcagatgtcctttagatcttttgggtcctcaggatgtggttgaaaaactattgatagaacaaaacaggaagcagtctaaaagaatattctaggtctctaatacatgtcttttatcaccagaacaaaacatgacatacacagtgactcttggacacattatagggacctaattagcatcctcagatgagatccatcagattattcttttctcctggaaaaggatggaaagggaggggccgagagagagagaagctaacatcttctcctttcttcctcctccaacatcagagttctaaaaagtcttgaatatttttccaaaagataactggtgagaggtgttcagcaaaatcctaaaactccttgttgtatttaagttttatttttttataaatgggaaaactcattgacaagccattaatgcttatgatcatataagaattttccttcttgtgccaaatattatttcatggttccttaaaagtatgagtaaaacaaatataaaaactggcaatttatactgttgagtcagacca

SEQ ID NO: 250571 - DNA, 588 bp, Homo sapiens
aaagtggtttatatgtatttaaacatgaaatttgaagaatatttttaaggatccctcagatgtcctttagatcttttgggtcctcaggatgtggttgaaaaactattgatagaacaaaacaggaagcagtctaaaagaatattctaggtctctaatacatgtcttttatcacyagaacaaaacatgacatacacagtgactcttggacacattatagggacctaattagcatcctcagatgagatccatcagattattcttttctcctggaaaaggatggaaagggaggggccgagagagagagaagctaacatcttctcctttcttcctcctccaacatcagagttctaaaaagtcttgaatatttttccaaaagataactggtgagaggtgttcagcaaaatcctaaaactccttgttgtatttaagttttatttttttataaatgggaaaactcattgacaagccattaatgcttatgatcatataagaattttccttcttgtgccaaatattatttcatggttccttaaaagtatgagtaaaacaaatataaaaactggcaatttatactgttgagtcagacca

SEQ ID NO: 250572 - DNA, 588 bp, Homo sapiens
aaagtggtttatatgtatttaaacatgaaatttgaagaatatttttaaggatccctcagatgtcctttagatcttttgggtcctcaggatgtggttgaaaaactattgatagaacaaaacaggaagcagtctaaaagaatattctaggtctctaatacatgtcttttatcaccagaacaaaacatgacatacacagtgactcttggacacattatagggacctaattagcatcctcagatgagatccatcagattattcttttctcctggaaaaggatggaaagggaggggccgagagagagagaagctaacatcttctcctttcttcctcctccaacatcagagttctaaaaagtyttgaatatttttccaaaagataactggtgagaggtgttcagcaaaatcctaaaactccttgttgtatttaagttttatttttttataaatgggaaaactcattgacaagccattaatgcttatgatcatataagaattttccttcttgtgccaaatattatttcatggttccttaaaagtatgagtaaaacaaatataaaaactggcaatttatactgttgagtcagacca

SEQ ID NO: 250573 - DNA, 588 bp, Homo sapiens
aaagtggtttatatgtatttaaacatgaaatttgaagaatatttttaaggatccctcagatgtcctttagatcttttgggtcctcaggatgtggttgaaaaactattgatagaacaaaacaggaagcagtctaaaagaatattctaggtctctaatacatgtcttttatcaccagaacaaaacatgacatacacagtgactcttggacacattatagggacctaattagcatcctcagatgagatccatcagattattcttttctcctggaaaaggatggaaagggaggggccgagagagagagaagctaacatcttctcctttcttcctcctccaacatcagagttctaaaaagtcttgaatatttttccaaaagataactggtgagaggtgttcagcaaaatcctaaaactccttgttgtatttaagttttatttttttataaatgggaaaactcattgacaagccattaatgcttatgatcatataagaattttccttcttgtgccaaatattatttcatrgttccttaaaagtatgagtaaaacaaatataaaaactggcaatttatactgttgagtcagacca

SEQ ID NO: 250574 - DNA, 525 bp, Homo sapiens
agcaagaaaaaaccgggtgactactacaygttttatgaatatacacacttttggaaacagcagggtcccaccattgacttagagcaaaaaatgcagtatctccactggcaccctcccattccttgcccatagctaacactgctaatcattcatagccctcttgtccatggagttcagaaaatacttcagaatcctccttcttcatgttttcttgtttatttttttattttacatttgtctttaggcttctaatccacaagcacaagctagtttattttgtaagttcagcacatgctgtttatacttcttacactttatctagtctcatttggtctgttgtcctggtctgttgagatcttaggtgagcactcatagtacccggttttaacttcatattgctgacagagccagtgaagagactgaaaaacagtcctgaatctctaatgccaccccgagcagctgtggtggcatggcatggagagcatatctggttgctggtggagaaagaacacaacaattgtgagg

SEQ ID NO: 250575 - DNA, 572 bp, Homo sapiens
tatctccactggcaccctcccattccttgcccatagctaacactgctaatcattcatagccctcttgtccatggagttcagaaaatacttcagaatcctccttcttcatgttttcttgtttatttttttattttacatttgtctttaggcttctaatccacaagcacaarctagtttattttgtaagttcagcacatgctgtttatacttcttacactttatctagtctcatttggtctgttgtcctggtctgttgagatcttaggtgagcactcatagtacccggttttaacttcatattgctgacagagccagtgaagagactgaaaaacagtcctgaatctctaatgccaccccgagcagctgtggtggcatggcatggagagcatatctggttgctggtggagaaagaacacaacaattgtgaggcattgaaatcaccgccgtcctgttggagcacgaaggaaaactggaccaaactcagctgacacttgtccatggagggagcatttaaaaccagccttacccaaaggggaatctccaatcctagtggtccaaacttgagttcccac

SEQ ID NO: 250576 - DNA, 572 bp, Homo sapiens
tatctccactggcaccctcccattccttgcccatagctaacactgctaatcattcatagccctcttgtccatggagttcagaaaatacttcagaatcctccttcttcatgttttcttgtttatttttttattttacatttgtctttaggcttctaatccacaagcacaagctagtttattttgtaagttcagcacatgctgtttatacttcttacactttatctagtctcatttggtctgttgtcctggtctgttgagatcttaggtgagcactcatagtacccggttttaacttcatattgctgacagagccagtgaagagactgaaaaacagtcctgaatctctaatgccaccccgagcagctgtggtggcatggcatggagagcatatctgrttgctggtggagaaagaacacaacaattgtgaggcattgaaatcaccgccgtcctgttggagcacgaaggaaaactggaccaaactcagctgacacttgtccatggagggagcatttaaaaccagccttacccaaaggggaatctccaatcctagtggtccaaacttgagttcccac

SEQ ID NO: 250577 - DNA, 572 bp, Homo sapiens
tatctccactggcaccctcccattccttgcccatagctaacactgctaatcattcatagccctcttgtccatggagttcagaaaatacttcagaatcctccttcttcatgttttcttgtttatttttttattttacatttgtctttaggcttctaatccacaagcacaagctagtttattttgtaagttcagcacatgctgtttatacttcttacactttatctagtctcatttggtctgttgtcctggtctgttgagatcttaggtgagcactcatagtacccggttttaacttcatattgctgacagagccagtgaagagactgaaaaacagtcctgaatctctaatgccaccccgagcagctgtggtggcatggcatggagagcatatctggttgctggtggagraagaacacaacaattgtgaggcattgaaatcaccgccgtcctgttggagcacgaaggaaaactggaccaaactcagctgacacttgtccatggagggagcatttaaaaccagccttacccaaaggggaatctccaatcctagtggtccaaacttgagttcccac

SEQ ID NO: 250578 - DNA, 572 bp, Homo sapiens
tatctccactggcaccctcccattccttgcccatagctaacactgctaatcattcatagccctcttgtccatggagttcagaaaatacttcagaatcctccttcttcatgttttcttgtttatttttttattttacatttgtctttaggcttctaatccacaagcacaagctagtttattttgtaagttcagcacatgctgtttatacttcttacactttatctagtctcatttggtctgttgtcctggtctgttgagatcttaggtgagcactcatagtacccggttttaacttcatattgctgacagagccagtgaagagactgaaaaacagtcctgaatctctaatgccaccccgagcagctgtggtggcatggcatggagagcatatctggttgctggtggagaaagaacacaacaattgtgaggcattgaaatcaccgccgtcctgttggagcaygaaggaaaactggaccaaactcagctgacacttgtccatggagggagcatttaaaaccagccttacccaaaggggaatctccaatcctagtggtccaaacttgagttcccac

SEQ ID NO: 250579 - DNA, 534 bp, Homo sapiens
ccctctggcaattatggtaaattgttggatttttttgttttgttttgtgtttcttttcctcttttctgcaatacattttagatttaatggccatttttctctaccttcataaataatacagtatcctccagggtcctcaaatatttagtgaacatattaaacaaaatcatttataagttgcactacgtagtaaagaaaaaatagcaaactggaatcacaggcaaaagtagatacctaaatggatgtgtataaaaccctgacattaayagtcacttcatggtcctggagctcgccccaaggaatcttctgccatcaaagtattagtgagcaatgttgaatttactgaggatctcatgggggagatgacggagggtttatcatatgttatggtttggatgtctcctccaagtctcacgttaaaatgtaaaccctgatgttgaaggtggggcctggtgggaggtatttgggttatggaggcagatctctcatgaatgacttggcgccctcctcatagtaatgagtgagttctcacac

SEQ ID NO: 250580 - DNA, 534 bp, Homo sapiens
ccctctggcaattatggtaaattgttggatttttttgttttgttttgtgtttcttttcctcttttctgcaatacattttagatttaatggccatttttctctaccttcataaataatacagtatcctccagggtcctcaaatatttagtgaacatattaaacaaaatcatttataagttgcactacgtagtaaagaaaaaatagcaaactggaatcacaggcaaaagtagatacctaaatggatgtgtataaaaccctgacattaacagtcacttcatggtcctggagctygccccaaggaatcttctgccatcaaagtattagtgagcaatgttgaatttactgaggatctcatgggggagatgacggagggtttatcatatgttatggtttggatgtctcctccaagtctcacgttaaaatgtaaaccctgatgttgaaggtggggcctggtgggaggtatttgggttatggaggcagatctctcatgaatgacttggcgccctcctcatagtaatgagtgagttctcacac

SEQ ID NO: 250581 - DNA, 333 bp, Homo sapiens
ggaagtgaggatgagactcacagcacagccctctccaaagaaatcctctccatgaatcctctctcccagtccttttataccctcamtctggacgaacggttctcaaaggaaatgtctgcctttcggtctgccacaacccaccttagcatttgatacctattgtgtcttggtcctcagttaacacttctaatttaacaccttgttacataaacccattcccaagggtacgatggtaactgtgatgcatctttttggagcatgaattttttactcaccgatttgtggtgagaaggacaggtgatgaagggagtgtttgcagggcagggagtttga

SEQ ID NO: 250582 - DNA, 570 bp, Homo sapiens
acaccaccacactgctgtatgttttctggcagaatataaggagtaggtgtagrgtagaaagaacctcttagggccaagaatggtgtttcaagcttgtaattccagcactttgggaggccaaggcaggcagatcgcctgaggtcaggaatttgagaccagcctggccaacatggtgaaaccctgtctctactaaaaacacaaaaaattagctgggcgtggtggctaattttccttgtttccaggctataggcatggtggcaggcatctgtagtcccagctacttgggaggctgaggcagaagaattgcttgaacccaggaggcagaggttgcagtgagccgagattgcgccactgcgctccagcctaggtaacagagcaagactccatctcaaaaaaaaaaaaaaaaaaaaaaaaaaaagaacctcttagaattgtgctgtccaggatggtaactcctccagccacatgtggatactgaatccttaaaatatgatgagttcaactcagatgtgctgatatgtaaaggacagtctggatttcagagacctagaattaaaaaaggaggggaaa

SEQ ID NO: 250583 - DNA, 570 bp, Homo sapiens
acaccaccacactgctgtatgttttctggcagaatataaggagtaggtgtagggtagaaagaacctcttagggccaagaatggtgtttcaagcttgtaattccagcactttgggaggccaaggcaggcagatcgcctgaggtcaggaatttgagaccagcctggccaacatggtgaaaccctgtctctactaaaaayacaaaaaattagctgggcgtggtggctaattttccttgtttccaggctataggcatggtggcaggcatctgtagtcccagctacttgggaggctgaggcagaagaattgcttgaacccaggaggcagaggttgcagtgagccgagattgcgccactgcgctccagcctaggtaacagagcaagactccatctcaaaaaaaaaaaaaaaaaaaaaaaaaaaagaacctcttagaattgtgctgtccaggatggtaactcctccagccacatgtggatactgaatccttaaaatatgatgagttcaactcagatgtgctgatatgtaaaggacagtctggatttcagagacctagaattaaaaaaggaggggaaa

SEQ ID NO: 250584 - DNA, 570 bp, Homo sapiens
acaccaccacactgctgtatgttttctggcagaatataaggagtaggtgtagggtagaaagaacctcttagggccaagaatggtgtttcaagcttgtaattccagcactttgggaggccaaggcaggcagatcgcctgaggtcaggaatttgagaccagcctggccaacatggtgaaaccctgtctctactaaaaacacaaaaaattagctgggcgtggtggctaattttccttgtttccaggctataggcatggtggcaggcatctgtagtcccagctacttgggaggctgaggcagaagaattgcttgaacccaggaggcagaggttgcagtgagccgagattgcgccactgcrctccagcctaggtaacagagcaagactccatctcaaaaaaaaaaaaaaaaaaaaaaaaaaaagaacctcttagaattgtgctgtccaggatggtaactcctccagccacatgtggatactgaatccttaaaatatgatgagttcaactcagatgtgctgatatgtaaaggacagtctggatttcagagacctagaattaaaaaaggaggggaaa

SEQ ID NO: 250585 - DNA, 512 bp, Homo sapiens
atattttctctcattctgtggcttgttttttcatttgcttaaccatgtaattcaaagagcaaaagtctttaatttcaatgtaatacaattaatcaattttttctttcatgaattgtgcttctggtgttgcatctaaaaaattctttgcttaatctagggtcataaaaatttcctcctatgttttcctctaggagttttacagttttaggtttttcatttaggactatgactcattttgagtgaacttttgtatatggttcaagagatggatgcagttctgtctttgtttcttccatacagatactcaactgttccaccacratttgttaaaaagactatcctttcttcaccgaattgcctttgcacctttaccaaaaatcagttgcccatatatctgttaagtctatttctggactcttttctgtttcatttacctgtcttgacactaacatcacattgacttgattactgtatctttataagtgttcaaatcagatagtgttaaccttcca

SEQ ID NO: 250586 - DNA, 567 bp, Homo sapiens
ctgtggttttcccatggtattttccataaccacaaccttcctcccctccgtgccacatttggacaggtgggtgccagctctcattgctttggaagaatgcacaaatcaggtcttggttttgaggctamcaagtaaagctgaagaggtcttatgatgggaaaacaggacaaagcagtgacctgtgtaggcaaatagccagaggttgatgaggacagggccctctcagtgcatgtctcctgagtgccaggctatggcaccaagatcagccctcctcagctcactctagcttgtacagggccactaaagctctgacacaatccagggagatggaggtgagagagagacataggcttgactgatattgcttctactattggcagaatgggatgtgtatgggaggacagtgtgagaagagggacagagaatacaaatgaagttcagtatagagagccaaaagtggcatttttttttaactctccaaggttgagcatggagatatgtacctgctgcaagaatgtgatttttttctttccctcgaggggaaataagctcaaacatgacttgcat

SEQ ID NO: 250587 - DNA, 620 bp, Homo sapiens
tttgatcactgcttaactgttggaagaaatttgcctagaagttctgagcattcctctcttctgtgagctatttgcagggtttgtcaaagagtcagttcctattaataagacgatgcaaaatgccacagattgaaagctacgcaacaatatcctttttcctgatacttccatgttagttggtttgttaagtgaatgcaccaagacaagcaaacatttgaagccactagtgttatcatgagactatttaaaaaaaagtctgcattagaaatgatgacaagtgtcaatatattccaactacctagagcactcgaatttaaaaaccaaaatatgattgttgttagggccrtgtgcccaaccctgaagacgtactgctgctatgtgcaggatgaaaggattttattgtccctaagaaagaagcccttaggttttctaggtatcttcatccttgacaataaacacaccagcaaacaaacaaatccacccaggattttatgacaattaagcatttcttttgctctaaacaaaatgatctttctacttggtgaaggggaaaaaaatacaggttttttttttttcactttctttaacaactttgggtaatcaacgttagctcatgtggc

SEQ ID NO: 250588 - DNA, 502 bp, Homo sapiens
taaaataacaaaatttcttttcttcaccattactacctcccattattgtaatccatatatacaaaaacaaaaacaaccttcccccttcaccaccctaattttcgtcctttttggggggatagggttgaaggaattttctaatattattctgacctgggagggaggcagataattttattacagtaagatacaggaaaaagtctagcatattgttaactttcataataacaaaaatygaattgtgtccagattccccaccatgatgacctctgagcctcctcttcttcactctaaagaatcaaaggctctatttcatcatactcaaaatgtcatttttatgcctcagcatttatgttacctatgctatgccatcaggcagcatctaataaattggtaacaatgcagtcattctgtgggcacaaacatgtcctgattttctaagatatctgtattgagatccttacttcttgtattagaatattctggttctaatgaaaggtca

SEQ ID NO: 250589 - DNA, 682 bp, Homo sapiens
cttgacactttaaggttttaggaaaaggagatattacctattaaaacattaagggggagccgggcacagtggctcacgcctgtaatcccagcactttgggaggccgaggagggcggatcacaacgtcaggaaatcgagaccatcctagctaacacggtgaaaccctgtctctactaaaaayacaaaaaattagccgggcgtggtggtgggcgcctgtagttccagctactccggaagctgaggcaggagaatggcgtgaaccggaaggcagagcttgcagtgagccgagatcgcgccactgcactccagcctgggtgacagagggagtttccatctcaaaacaaaacaaaacaaaacaaaattaagggagaatagatataataaatttaaagaaaaaaccctcatgaggaaaatttctgttgatgctacaaaatgtcagttattcctcaacagttttattttgctagcacattacagaatggtaagtgcccagtagaattattattcttgttataggtaaaaggattaaatatatatatatatataatgtaatggaacattcaatgggagggactatcttgtggaaacatttttaataatatttgtaatgaaaatggttcttttgtttttattgttctatattgtagctttaaaaggtataggcggatttgaatctaaaata

SEQ ID NO: 250590 - DNA, 682 bp, Homo sapiens
cttgacactttaaggttttaggaaaaggagatattacctattaaaacattaagggggagccgggcacagtggctcacgcctgtaatcccagcactttgggaggccgaggagggcggatcacaacgtcaggaaatcgagaccatcctagctaacacggtgaaaccctgtctctactaaaaacacaaaaaattagccgggcgtggtggtgggcgcctgtagttccagctactccggaagctgaggcaggagaatggcgtgaascggaaggcagagcttgcagtgagccgagatcgcgccactgcactccagcctgggtgacagagggagtttccatctcaaaacaaaacaaaacaaaacaaaattaagggagaatagatataataaatttaaagaaaaaaccctcatgaggaaaatttctgttgatgctacaaaatgtcagttattcctcaacagttttattttgctagcacattacagaatggtaagtgcccagtagaattattattcttgttataggtaaaaggattaaatatatatatatatataatgtaatggaacattcaatgggagggactatcttgtggaaacatttttaataatatttgtaatgaaaatggttcttttgtttttattgttctatattgtagctttaaaaggtataggcggatttgaatctaaaata

SEQ ID NO: 250591 - DNA, 682 bp, Homo sapiens
cttgacactttaaggttttaggaaaaggagatattacctattaaaacattaagggggagccgggcacagtggctcacgcctgtaatcccagcactttgggaggccgaggagggcggatcacaacgtcaggaaatcgagaccatcctagctaacacggtgaaaccctgtctctactaaaaacacaaaaaattagccgggcgtggtggtgggcgcctgtagttccagctactccggaagctgaggcaggagaatggcgtgaaccggaaggcagagcttgcagtgagccgagatcgcgccactgcactccagcctgggtgacagagggagwttccatctcaaaacaaaacaaaacaaaacaaaattaagggagaatagatataataaatttaaagaaaaaaccctcatgaggaaaatttctgttgatgctacaaaatgtcagttattcctcaacagttttattttgctagcacattacagaatggtaagtgcccagtagaattattattcttgttataggtaaaaggattaaatatatatatatatataatgtaatggaacattcaatgggagggactatcttgtggaaacatttttaataatatttgtaatgaaaatggttcttttgtttttattgttctatattgtagctttaaaaggtataggcggatttgaatctaaaata

SEQ ID NO: 250592 - DNA, 586 bp, Homo sapiens
ctgtcctacatgtgaacttttgaagcaagttaatttccatgaaacttagtttcctcaactatgaattamgaatgatagaaccacaagagcaaaatcatagcaataatagctctattgaggtagaactgtacctatatgccaggcactttgaacaagtattatgattacagctctgggagatagcagtttttcctattttaccaagaagaaaatgcggatgataacaagatgcattaaattattttatgtatacattactgtctgtatattttcatcaacataatataatgctttaaatcataatgtactatgtcatcagaataatacttacacacacacacacacatacattcatacatagcataatcataacagtgcattaaattgaatgtataaagcaacttgcaaggcagaaagttgaggaagctcaaggaagagtggccattattatggtaaattataaatttatttactgaatgttattttaatataaataaaaaaatttaaaatattttctttggattaatttatttgttatctttttcactattccatcaatgtggaaagaagcagtaaaagagaagtc

SEQ ID NO: 250593 - DNA, 586 bp, Homo sapiens
ctgtcctacatgtgaacttttgaagcaagttaatttccatgaaacttagtttcctcaactatgaattaagaatgatagaaccacaagagcaaaatcatarcaataatagctctattgaggtagaactgtacctatatgccaggcactttgaacaagtattatgattacagctctgggagatagcagtttttcctattttaccaagaagaaaatgcggatgataacaagatgcattaaattattttatgtatacattactgtctgtatattttcatcaacataatataatgctttaaatcataatgtactatgtcatcagaataatacttacacacacacacacacatacattcatacatagcataatcataacagtgcattaaattgaatgtataaagcaacttgcaaggcagaaagttgaggaagctcaaggaagagtggccattattatggtaaattataaatttatttactgaatgttattttaatataaataaaaaaatttaaaatattttctttggattaatttatttgttatctttttcactattccatcaatgtggaaagaagcagtaaaagagaagtc

SEQ ID NO: 250594 - DNA, 582 bp, Homo sapiens
tgaatccgttaatacttaggaaaagggcacattgctgggcacagtggctcacgcctgtaatcccagcactttggaaggccgaggtgggcggattgcctgagctcaggagttcgggaccagcctgaccaacacggtgaaaccccgtctctactaaaatacgaaaaattagcctggggtagyggcatgcacttgtagtcccagctactcaggaggctgaggcaggagaattgcttgaacctgggaggtggaggttgcagtgagcccagatcgcaccactgcactccagcatgagcgacagagcaagactccattgccaaaaaaagggtacatcatcagggcgttaggtacaaagggccaggggagaggaaattggaggccatggattttcataataatacaaatgaaatgctaagaagcttagcgtggcaggaggagctgtcacactcataaagccaaactgcccactcctgcccatggccagtctgggtttcagggacagagctgggaaacagacctaggagttaagatacctgagctagacaactgtctttgttggaaccaacaggagtttgtgagtcgaca

SEQ ID NO: 250595 - DNA, 632 bp, Homo sapiens
aagaatttattttaacaattcttgtggtgcagctttcttgagacaaattctcccatcttttgtctgaaacgttttattcctgcttcatttctgaaggataattttgcygaattggggattctaaattgacagttcccccctccccattcagctttttaatgatactgattcactgtcttcattgtttctgataagaaggtcggcatcatgtgtcacttttccaagtgttgtccctgatgaaacgcatcacccacccccacctctgctttatagatgcttctttggaaatcacttctttgtctttagtttttagccgtttgacagtgacatgtctgggtggacttatccagcttggggattctctgaactcggatgttgatgttgatgttgatgtaatttagatacccctccaaatctcatgttgagatgtaatctacagtgttggaagtgagacctggtgggaggtgtttggattgtgagggaagatttctcataaacagtttagtgcaatctgtgtggtgctgtcctcccaagagtgagtgagttctcattgagatctgtttgttcagcagtatgtgacacccccacccgacctccactcctgtcctcaccccatgtgatgcacctgctcc

SEQ ID NO: 250596 - DNA, 539 bp, Homo sapiens
aaagatgaccatttgactggacatgagacatctacaaactaaagaattctaaggattgccagcaaataccagaagctacagggtcaaggaagaattcgcccctggagccatcagagagagcatggctctgccaacaccttgcctttgtacctctagccttcagaaccgtagacaaatttctattgtttcaagccacccagtttttgtattttgctacagcatccctagaaaactaatacaaaaggctggctgggcacggtgtggttcatgcctgtaattccagcattttgggaggcccaggcggctagaccacttgaggccaggagttcaagaccatcctggctaacatggtgaaaccccgcctctactaaaaacacaacaatwagcttatcatagtggtgtgtgcctgtagtaccacctacttgggaggctgagacatgaagatcgcctgaacccaggaggtggaggttgcagtgagccaagatcacgccactgccctccagcctgggcaacagagcgagagtaaaggcaaaccaaga

SEQ ID NO: 250597 - DNA, 620 bp, Homo sapiens
tttgatcactgcttaactgttggaagaaatttgcctagaagttctgagcattcctctcttctgtgagctatttgcagggtttgtcaaagagtcagttcctattaataagacgatgcaaaatgccacagattgaaagctacgcaacaatatcctttttcctgatacttccatgttagttggtttgttaagtgaatgcaccaagacaagcaaacatttgaagccactagtgttatcatgagactatttaaaaaaaagtctgcrttagaaatgatgacaagtgtcaatatattccaactacctagagcactcgaatttaaaaaccaaaatatgattgttgttagggccgtgtgcccaaccctgaagacgtactgctgctatgtgcaggatgaaaggattttattgtccctaagaaagaagcccttaggttttctaggtatcttcatccttgacaataaacacaccagcaaacaaacaaatccacccaggattttatgacaattaagcatttcttttgctctaaacaaaatgatctttctacttggtgaaggggaaaaaaatacaggttttttttttttcactttctttaacaactttgggtaatcaacgttagctcatgtggc

SEQ ID NO: 250598 - DNA, 502 bp, Homo sapiens
aatgctcagtttatggaaagaccatataatacccttttgaatttaatgtttacacatttttggcaagattaatttttacaatctttccacaactttttagcttcatcatatcaaatttaagataatccttcatccctgggcaaaatttacatttccatgctttcttatattcttttactataagacacattttactgtttttatatgccttgcatataacactgtttagtgatctcaaatacatgttgcactgtaactcttagcaacttttacttttggtgaaaaacctggttagtaaatgattttaaatacgtagcargtatgaagcttaggacccagacagaagtacaagtaaggtctgacccgctccagtgtctagctccacatgtcccaggccttacctacctttaaagaagacagtatacaaccttggaatctttagcaaacctagtatctaagttgtatgatttagatcacctatttgcattttgatgacacttgc

SEQ ID NO: 250599 - DNA, 578 bp, Homo sapiens
tgctaattttgaaatgtctttttctgcattggcaataatgatgtgtataagcaggggtgagcagtatgtttgggttacagggtttcttagtgtgtggaggatgccctcttctatttgyatattgaattataatttttaaaaattaatagtgcttggttttgatgggtgaaggtattttatgtcttccgatttggggaattcatctatttctgcaaaccccttaagttacaagacttgcttccttcttcctctttaccaccaaacctcccaagcagcccttccctttccaagtcacccccctgttcccagaagcggtgcctttttgagatttctaccccttatccagcacattcttaagtctcttcctatggattcctcagcagccagggctctgaaccaccaagtctcaggactgctgtaaggtaggatttagggtattagtctctctttctaggggatgacttttatgttttctgttgtattaggattctcttctcttctttgtttccatatagtttctgtcacctttcctttctggggcactctgaagcttcctctgctgctctcaggtgttgatt

SEQ ID NO: 250600 - DNA, 574 bp, Homo sapiens
  misc_feature (1)...(574): n = A,T,C or G
cagtactatatttgtagactatgttttagaaactttaaaaacttctttctatacgtgtctaatttgaggctgcncgggtgatttggttcagctaggatgtgagttttactcagttctcatttcaaaagcagaacgttcgggccactatttgtcaggtgattatgctctgcttatgttcattcaggtggtcactgaattgcctgcaatctgcaccattaatcaagttgcctacttggttgttaagggaactgaaacccccgctcagctattttttccaatctggtgtttttcatgggtttcaccactttatcatgttagttactgaatttccctattttgcattcacttgttcactcacattagaaaaatacatcagtgtatgtattttagtctgcatagaaatctggcaatgccttttaagtcgaccctgataaaaagaatactaagaaaattttyatagcaagagatgtagctggtctccaaaagatagatttaatttactagcatgggaaataataacagaatcattttctatttaccaatcaaatctatgtccatgtatttccactgtcat

SEQ ID NO: 250601 - DNA, 574 bp, Homo sapiens
  misc_feature (1)...(574): n = A,T,C or G
cagtactatatttgtagactatgttttagaaactttaaaaacttctttctatacgtgtctaatttgaggctgcncgggtgatttggttcagctaggatgtgagttttactcagttctcatttcaaaagcagaacgttcgggccactatttgtcaggtgattatgctctgcttatgttcattcaggtggtcactgaattgcctgcaatctgcaccattaatcaagttgcctacttggttgttaagggaactgaaacccccgctcagctattttttccaatctggtgtttttcatgggtttcaccactttatcatgttagttactgaatttccctattttgcattcacttgttcactcacattagaaaaatacatcagtgtatgtattttagtctgcatagaaatctggcaatgccttttaagtcgaccctgataaaaagaatactaagaaaattttcatagcaagagatgtagctggtctccaaaagatagatttaatttactagcatgggaaataataacagaatcattttctatttaccaatcaaawctatgtccatgtatttccactgtcat

SEQ ID NO: 250602 - DNA, 538 bp, Homo sapiens
tttttcctttgcctttttaaaactttgctttttgtttagaattttgttcagctttagaagagaaagacgtttgtaaacccacttttacattgcttttttttcccaagaagcttttgatttctttaagaaaaaaaaaaaaaaaagttgcaataaaaactttggcttattttccctggcatcatttcatctttttaaactgaaaaatgataagtgggtgcaaagtgaaagagcattggcatgaaagtcaactgcaaaaacctagaagtaggcagcttctaagagatactgtctgcatgaacctgatgggctttttagtttagtttgttctcctttgataatagtgtctgcattctattgtaatcagagtrcacataattatagttcagaaagatatactctggagtttgtgcttatttactgtccaccccaaatattacataaaccaggtgaattcagatgtgtactctgactcagttcattgaacctttataaattttatgtgtgcatgtgtttaaattaacttgcttctttgactcac

SEQ ID NO: 250603 - DNA, 511 bp, Homo sapiens
agaaatttatagacaaaagagaagtgatgtacaaaaatcagaagtgagatacagaaacagctggattggttacaggtttgcatttgccttatttgaacacagtttgaacactcagcagtgttctatcagtctatgagtggttgaagtatgaatgctggaattggccaagactyagctgttgttacaggtgcatactactaagctagattttcaatcttgtctgcctgttaagctaggttacggttcgtccacaaagactcaaatatagatgtacggagtccttctcaggccatatttagttcactttaacatatataaagaacaattattttggtcattttgagcaataaaacacacaaaatgtatttactaaacacctattgtatgcccagtacagtaggagtttataagtgcaagatgctcaagtgtacaaacaatctaaggagacaaatcaaaaacaaaataatttgaaagctcactaaaggagtaaaggaaaagatagatttcaatg

SEQ ID NO: 250604 - DNA, 511 bp, Homo sapiens
agaaatttatagacaaaagagaagtgatgtacaaaaatcagaagtgagatacagaaacagctggattggttacaggtttgcatttgccttatttgaacacagtttgaacactcagcagtgttctatcagtctatgagtggttgaagtatgaatgctggaattggccaagactcagctgttgttacaggtgcatactactaagctagattttcaatcttgtctgcctgttaagctaggttacggttcgtccacaaagactcaaatayagatgtacggagtccttctcaggccatatttagttcactttaacatatataaagaacaattattttggtcattttgagcaataaaacacacaaaatgtatttactaaacacctattgtatgcccagtacagtaggagtttataagtgcaagatgctcaagtgtacaaacaatctaaggagacaaatcaaaaacaaaataatttgaaagctcactaaaggagtaaaggaaaagatagatttcaatg

SEQ ID NO: 250605 - DNA, 571 bp, Homo sapiens
atgtgctaccatttgcattaagctggcaaatgtaatgctgacctctgtgagactgcagactggtgatacactgtggaagtaatctggcaggggatgatagtggcttggacaacagctagtggtggcataaagggacagaaagtgaatggatctggacacgttttggagttagattctagaggacttatagctgggtggatggatgatcgtgctgtttactgagatggagaacactagggaagyaacatgttggggaatggggagagggtgggagcaagaattttatcttaaacatatgtatctgaaagtattcttagacgtctaagtggagatgacaagcaagcatgtatgtaaatctggagtttgggagctaggtcagggtaaaagtatatatatgagtcactggcataaatctggactaaatgagatccttttgaagttttcttttactaattctttatcttctttgttttttttactatatgctgatcttcctgcatttgtactcaggatcctcttgaaaacccattttacctataaagcttttcctagttaaatgggaagaaagtgc

SEQ ID NO: 250606 - DNA, 407 bp, Homo sapiens
agactttgctaagagagttactttaagggcagctgtttgaaaatgacttctgtgaccctagctatcttaaagtggactgggacacagctcagctcattcataaaaactcacaatgacacatctcctttatctatacactatctgagtagataatccctccargataagggtttctattttagcctcaccagattattatgggaaaatcatgatctctgtaaccaaacatatacatatatgtctattgcagattgtattttcaacatatgactacaaaaggatatcccatctacatgccttctaaaatcttaccatttcctcataaagacatagagtctagttcctcttcccttcaaactcatgaagctatggatttcttacaaccaatagaatggaagggacaccaa

SEQ ID NO: 250607 - DNA, 407 bp, Homo sapiens
agactttgctaagagagttactttaagggcagctgtttgaaaatgacttctgtgaccctagctatcttaaagtggactgggacacagctcagctcattcataaaaactcacaatgacacatctcctttatctatacactatctgagtagataatccctccaagataagggtttctattttagcctcaccagattattatgggaaaatcatgatctctgtaaccaaacatatacatatatgtctattgcagattgtattttcaacatatgactacaaaaggatatcccatctacatgccttctaaaatcttaccatttcctcataaagacatagagtctagttcctcttcccttcaaactcatgaagctatggatttcttayaaccaatagaatggaagggacaccaa

SEQ ID NO: 250608 - DNA, 599 bp, Homo sapiens
attctccaatgaccactggcactaagtgttactatagggcctgattagttttctcccatcctcctactttctttttaaaaaatcttgacaccaaagaacctttttctttatttttgaagttcaattatatsatgcagcgtctgggcatttatcgtgaattgtattattcctaatgatccctgaacctgtaagaggagtgtattttcccaaccgggtatcatgcttggccacgtgacttgcattgaccaatagaatgtaaggagaaatgacacggtagcagttctcaaccagaagcttttatagtcattgtgtttttgctaacttgcttactcttttctttgtcaagagaattgcatatcctagatcacggctttgcctctaaccctggtccaagaatgagaagacgtggagtagagccaaactcaacctggagccatgtagcataggcagagaaataaactctgttttttaagtcactgagattttgaggcaactcataattgcagcagagttaaccaatgctgtgttgctgattctacgttagtcctgatatggtttggatttgtgtccccacccaaatctcatgttcaattgtaatc

SEQ ID NO: 250609 - DNA, 547 bp, Homo sapiens
attttgaggaaacacagtttagtccataacaaacaggaaaacatttttattccacttacctcttacttaatgttttccaaagacttgaagcaatacattttgacactgattaactctgscatgtggtgccacttcaaatattttttcaagtgcaagatgtaaaatattttccagtttccaatccatgatatctcagaggtcacatcatgatcccaagcacagccagaatcctatcagtcttcccctatcaattaaccctacaattgtttccatttaattgccaggtgttttttctcagattagcaggccaacaactagactgctgcctcccaaaaatattttcagacatgaatgacacacgtacacacaaatattctatggcatgcaacatgatgagatcctaagcatatactgatgttatagccaagcctgatttatggatgtaatctctaagtattatggtgcttgattatttgaatttctttccacttaagctgacatcaatatatagaaaaaagaccatctgaaaacatgtgatacctattaa

SEQ ID NO: 250610 - DNA, 617 bp, Homo sapiens
ttctcaccttgcacaccctattcactcgctccacatgctctgccttctttcctgcagaaatgaaagaagaagggggaagatttctttgaagttgtttcagctcccacgagagtgcacacactatctcgttatcaaaaaatcacttttagtgcaactgtagacatagcgaagtatgttaaccacaactccgagggctttcagacttatctttgttctttaaaattgggtttgatttgattaatagatgacaccgcagggtatatgccaataatcctgatatttaacattaaatataattttaaattgctgtagctgctacctaagattatttctgtgggccttttttctttacagcacactttgcagttgtatggaaccaagtgtcgggcctctgcttagacttccagactttattcaacaagtccrttgcaatatcacaaagtcatctcaagtttcaacatattcaagaatgaatcacaatgtcctcaccacattttgccctcattcagtgaccctgtcccaatgaatcacactgccttccattcatttgcacaaaccccaaaaccagaagttatatttgggaacaccgtaatgcttatcccaagtcaaatccattg

SEQ ID NO: 250611 - DNA, 402 bp, Homo sapiens
cccctggctactttccccaaaaacattggcgactctgycctatccatccttgattatgtaaacccaacttctctatcttgctcgaactagttcaagttcagtttatgttacctgcaactgagaggatcttaatagatcctattttacaaatgagaaagcagagtctggaggaagtgtaattcacacagggtcacacaaagctggcttgcccatctatttccactacaccacacccatggaagtgtagcagaaagagaaatgcccgggtccctactcttcttttggtgtttgtgaccttcaagaggatctggcaccatctcttaaggatctccaattgtttttaatgttagaattttgtgggccatccagacttgaccctggaacatggaaggaagctcaaaa

SEQ ID NO: 250612 - DNA, 625 bp, Homo sapiens
tcttctcatgtccagtggagaagtgaggttatatggcaagctgctgcccacaaaattggagaaacagatagatacagagtatcataacatcagagcagaaacccaccagcaggaacctcctgggaggtgctgggggaagaaaactggaactgtaattgacaaactgctaaagactccgctaatttttgttatttttagcagagacagggctttaccatgttggccaggctggtcttaactcytgaccttagatgatccatctgccttggcctcccaaagtgctgggattacaggcatgagccaccatgcccaaccaactgaaaaacattttaaatatgattaatatgctgagggctttaatggaaaaagagacaacatgcaagaacagatagataatgtaaacagagaggagggaattctaagaattaaaaagaaatgttagagattaaaatcactgttacagaaatgaagaatctatgatgggctcatgagtagactgaacatggctaagaaaaaaacctctgagcctgaggatgtgagaatagaaatttgcaaaactgaataacaaagagaagaaaagactgaaaaaataaaacagaatacccagtaattgtgagacaagtac

SEQ ID NO: 250613 - DNA, 625 bp, Homo sapiens
tcttctcatgtccagtggagaagtgaggttatatggcaagctgctgcccacaaaattggagaaacagatagatacagagtatcataacatcagagcagaaacccaccagcaggaacctcctgggaggtgctgggggaagaaaactggaactgtaattgacaaactgctaaagactccgctaatttttgttatttttagcagagacagggctttaccatgttggccaggctggtcttaactcctgaccttagatgatccatctgccttggcctcccaaagtgctgggattacaggcatgagccaccatgcccaaccaactgaaaaacattttaaatatgattaatatgctgagggctttaatggaaaaagagacaacatgcaagaacagatagataatgtaaacagagaggagggaattctaagaattaaaaagaaatgttagagattaaaatcactgttacagaaatgaagaatctatgatgggctcatgagtagactgaacatggctaagaaaaaaacctytgagcctgaggatgtgagaatagaaatttgcaaaactgaataacaaagagaagaaaagactgaaaaaataaaacagaatacccagtaattgtgagacaagtac

SEQ ID NO: 250614 - DNA, 497 bp, Homo sapiens
tgcagactcagtggacccactgtgagccacacttttgccatgactctctttattacctacattcagcaggttctggctgagtggttggtgcttttacccmgtagagcctcaattgggatcattcttttagttccattcaattggtagctctaagctgctctaggaaggcataacttacatatctagtaccttggtgttattccatgtggcctttctgcctccctaaggctagctggagcttcctcacaacattagtggtctcagggtgcttgaatcttttatacaacctcacttctatcgtattcttttggtcagaacaagtcacagagccaacccacatctgtggggagggcacatagattccaggttttgatgggtaactggcaagactgcattgcaaaagagcatatgggataagaaatacctctgtggccatctttggaaatacagtttaccatatcagtgcttcatctgctatctgctaaaatttggtagac

SEQ ID NO: 250615 - DNA, 497 bp, Homo sapiens
tgcagactcagtggacccactgtgagccacacttttgccatgactctctttattacctacattcagcaggttctggctgagtggttggtgcttttaccccgtagagcctcaattgggatcattcttttagttccattcaattggtagctctaagctgctctaggaaggcataacttacatatctagtaccttggtgttattccatgtggcctttctgcctccctaaggctagctggagcttcytcacaacattagtggtctcagggtgcttgaatcttttatacaacctcacttctatcgtattcttttggtcagaacaagtcacagagccaacccacatctgtggggagggcacatagattccaggttttgatgggtaactggcaagactgcattgcaaaagagcatatgggataagaaatacctctgtggccatctttggaaatacagtttaccatatcagtgcttcatctgctatctgctaaaatttggtagac

SEQ ID NO: 250616 - DNA, 574 bp, Homo sapiens
cttaaatgatcagcatatttatttatttatttatacattgtttcttttaatcaaaaagtatatgcacatgattaagaaacaaaaatttctgaaaggtccaataattaaaaataaatgaatcctatcctactcaccccattcttcccagacacattctctttttaactattatttcttgttatttacttccatattattaaaaagtatacgaaatgttgctatttcctcatttatcagttttagatcatatttattttctgccatgatatatgggtttatacctgtttcttggtcctttatggtctcagtattgttatagcaccatcatgttcttcggctctggtaatttttctgctttcttttacaatttattctgttttctctctggaatccgttttttttttttttttaraaattggcactcctggattgttctgtgttccttttttttcatattttccttctctttttgtgaatgttttgtttttctatcccttctatgcttttttcatttcagcaaatctttgatgctttcttatttttggataatccttttctttgaaaattagattct

SEQ ID NO: 250617 - DNA, 607 bp, Homo sapiens
agtgtgggattttgtcatatgctttttctcaatgtctattgagattgtattgtcgtgtcatttttcatctttaaactattaatgtcatggatttcattaattaatttttagatgttaaaccaaccattgtattcctaggaagcaatycccactctgtcatggtatataattttttttatgtgttgctggatttgatttaccaatattttattatggacattggagtctatattcatgagaaatattgctttttagttttcttgtgatgtctttgtctagctctgatatcaggataatattggcacatcctctattttctggaagagtttccagaagattagtactactttttttctctaaacgtttggtagaactcactagtgaaaccatctgcatccaggcttttaagaataagaatattttaaattgctaatttaatttcttcaccttttatacatttagattttctatttgtttctgagtccattttggtaatttttgtcttttaggaatttattagttgcatttaagtggcctaatttactagaatcaagttgtttatattatacacttacaatccttttagtttttataaggttgctagtga

SEQ ID NO: 250618 - DNA, 496 bp, Homo sapiens
catatgcatgcaaataaaatcctaaaagagaagggagagaatggagcagagaaagtacttgaagaattaatgaccaataaataacaaatttgatgaaagactaaaatgtacaggtacattatgataaatgaaaaccaagcagaataaacataaagaagccctcaccacagatcatcatactcacattgttgaaatccaaagataaaaagcaaatcttgaaagcaggaagagaaaaatgacaatcctatacaatcctatacaaaatgacaagccctatacaaggaaacagtgatctgattaatggtcagtttctaagcagaaactatgaaggctgaaagagaatggagtaatagttccaaagtrctgagagacaataaaaaaattgtcaaaccagaatttattacccagcaaatatatcccgcaaaatgaagactaaataatgacatttttgcatggaacaaaactaaagtgagttttcaccagcagacctgaacta

SEQ ID NO: 250619 - DNA, 496 bp, Homo sapiens
catatgcatgcaaataaaatcctaaaagagaagggagagaatggagcagagaaagtacttgaagaattaatgaccaataaataacaaatttgatgaaagactaaaatgtacaggtacattatgataaatgaaaaccaagcagaataaacataaagaagccctcaccacagatcatcatactcacattgttgaaatccaaagataaaaagcaaatcttgaaagcaggaagagaaaaatgacaatcctatacaatcctatacaaaatgacaagccctatacaaggaaacagtgatctgattaatggtcagtttctaagcagaaactatgaaggctgaaagagaatggagtaatagttccaaagtactgagagacaataaaaaaattgtcaaaccagaatttattacccagcaaatatatcccgcaraatgaagactaaataatgacatttttgcatggaacaaaactaaagtgagttttcaccagcagacctgaacta

SEQ ID NO: 250620 - DNA, 586 bp, Homo sapiens
ggtagcaatgagttatgattgggatcataatattgggaacactgttcccaagacaccttctccttcctttaaatctctggaaagccagctcacttcagctgtgtgaggcaaacatctgttcaccatattgcattggtcatagtggagtctgttcatctgtctctttgggagaagaaatggtgggygtgattccacacagatatcttggcaggctgataaagaccaccttccaagctccccaagctggagccttccctaaaactagccatgcacagctcagtcttgctgtagtttgcatgcctgcagcagattcccttctttaagaagtctctgcaaatcaggcccagacagactccatcgcctattcacctaaagttcactaggcaatgtgcctggtgtcatttgagcaagctgcttggcagccaatttttttttaatgatatgattgcccaggctttcaaatcccattatgaaactgtttatcctttaatcagagctttaaaaaaaaattgacattttagtttgatggaaagagatgttgaggagaaatatttggaaaattgctctatggggccagatgatgcag

SEQ ID NO: 250621 - DNA, 590 bp, Homo sapiens
gcaatgtctgtgttagttaagaatatgaacttggggatgggcgcggtggctcacgcctttgggaagctggggcaggtggatcacgaggtcaggagttcgagaccagcctgatcaacatggtgaaagcctgtctctactaaaaatacaaaaattagccgggcatggtggcatgcacctgtaatcccagctactcaagaggctgagacaggagaatcacttgaactcggggggcggaggttccagtgagctgagattgcaccactgcactccagcctgggtaacagagcaaaacttcatctcaaaaaaaaagaatatgaacttgggagtcaggtaaacttaaatttaacttttatcctttgccacttgttagttgaatgaccttaaacaaattacttactagtccaagcttattttctcatttagaaagtgggtctaataatagtacctacctcatatacttgtgataaggattagagataatgcmtgaaagtacttggcacgctacttcagactttagtattcaataagtgttagctgcttttgttatctttccatatgctcattaatactatgtgggaatcaacccaact

SEQ ID NO: 250622 - DNA, 621 bp, Homo sapiens
tgttctcaccaaagtgtttcaagcagagccagctcccaacaggcaggtattagagactatagaggtgcattttggatgggaaagaggtactatatgtatatatgtgtatggcagatgttgagtagcctgtgttaactctcttcttttcatttgtttcagcccttgaatgttttattataattaatgtgttcattttctgtactcatgcccagagcatgttgcaataggcataattttaaaaattggagaaatccattaaataaataattagtttaaggtgataaaatacattaaatgattgagaacaactagtaccagctctgaataaagcaattttttaagaaaaaagrcacacttttagaattccaacttcagagtactactctatttgtctaaaaatacaaggttggcaccaagcccagaaaggtggcaagtggagctttgatagaccaggacagacaggagattccagagccgaaagatccctggtcaacatgccctgccttcagttgtccaagatctaaatggaggatctattagcagagacccagagtgcatttcagctgtcaccatttgtgtatacagagacagcttaattttagcaaggaggatgacttagta

SEQ ID NO: 250623 - DNA, 608 bp, Homo sapiens
atttatagattcaatactattcctaactaccaatattagttttcacagaattagaaaaaactattttaaaattcatgtggaaccaataaagagcccaaatgtccaaagcaaccctaagcaaaaaaaaacaaaggtggaggcatcacattacctgacttcaaactatactacagtaaccaaactaacaaggtacaggtataaaaacasacatgtagaccaatgggacagaatagagaacccagaaataaagctacagacctacaaacacctgatcttcaaagatggcaaaaacaagaaatgaggaaaggactccctattcaataagtggttctgaagtaactggcttgacatatgcataagaatgaaaccagacccctgcctttcaccctacacaaaattaattaagatggattaaagatttaaatgttagacctcaaactacaaaaatcctagaagaaaacctaggaaatacccttctcgacattggctttggcagagaattcttggctaagtccccaaaagcaattacagcagaagcaaacattgacaagtgggacctaattaaattaagagcttctgcccagcaaaagaaactgttaacaaagtaa

SEQ ID NO: 250624 - DNA, 550 bp, Homo sapiens
gcttttattgttcatatccagaatgcagaaattcccatgctgataggtgggttcagacagccatgtctatcaactcatcattttcttggagcagtcagtcttggatggctttaaaataaggctgagagatcaatcataagaccacgaagaacagtcacggttttcttttggcaagagcagcagttcccaaactttggtcattttaatatgatggccatgatttttgtcacattgrcacaccaactcatctttatgtttttatcatagttgcttaatacttccttaatattcttttaagtcacctcctctttttacccaaaattatttaaaatgaaagtttatattattattttcaatgttaaaaaatcaccataaaaagaaaattttaaaaagtataaattctaactagaaggttgtctaagattctgagcttctgacctgctttttttaaagatggagtttatgaagtgtaaaagatatgtgttaaagatttgtagctcctaacttagactttctgcttgatgaaatcagcactgagaaggaattgaaa

SEQ ID NO: 250625 - DNA, 648 bp, Homo sapiens
gctagaggtcacttgaacagatttcacgtctgcatcaattaggttgccctgggcttagttttctaaggagctctgcagttccaggcatcaatccactaaggactgataacacctgggataagaaaagactatcttgtcctgttgatgtctcttaggagcaaataatttgccctacaagctccatagccttttcatgaagtctcacttatcacctgtataccactccctgacaaggagaatgggcttattacaaggaaagtgatagacaaggcaggtttgccctactagatggaaagtggtaggccattgagagtcatgaaaccaccctcacagggttgacaagaattgcatgctgggttctggacaggaatatagttataattaagcattgattaggttgcacgttggcccacttccttgttgctcaaagtcaygtagcactagatcctgaccatttgcatctgcattattcctgtagataggatttctgacattagggtcataagattgtgtaggaattgatttgtatccctattgttcctttagatgggatctctgacattacaatcagaacgcttttgtttaagaatcacttaagttgtttttcaggtccccaattctaccatatttcagtttgaaaacccccac

SEQ ID NO: 250626 - DNA, 595 bp, Homo sapiens
ttagcatacaagctgaatagcctgtgttgcagtccctgctagtcagggtcttctggataatgcattgcmtgtgtgaggactggcctggtcctctgcaggctgaattctgcatttagcagctcagtgtcccttccacgggccccagtttcttcatcaggaaggtgaggggcttggactagtgtaggatcaggtataaatgcaaatacctccaataccaaggaagtaactcaggtgtgaggctctgctaagggaacagggagtggtcaggcttacagcaaagtagagagcgcagtcccacaataaagatactcagattcaagttttgaaaaccagggggttgttaaacaacagtttggcaaggtgacagttagtgattactggatgtgatggtttctaagattcatttctaaaaataattttataatagtaaaataaatccaaggtgtctactggggtttttttatatcactgctgtactcaatggtacccagaggcttctctgataataagaactaacacttagaataaaagctaacatccaaatgctaagttctttaaaaccatttaatcctcaccataactgtgtgaagccagt

SEQ ID NO: 250627 - DNA, 520 bp, Homo sapiens
ttcaccctctcttgactattttccaaatgtcctccccagagctgcccctgttggtgtaactggcgtgactgagagaagcaaggatgtgcttggggtagggctgggagggggagtttcctcygtgtcgcaaccactgtttccaaaagctgtgacctctgttagctgtgagattttgtcttcctgttgtggcaacatctgtagaaccacatccatggtttacctgcagcctaaaacgccctggcctcggaggaagctaacacctctttctccttagtttgcattacctcaacaagcagtaggctgccccaccacacccaccacaccccaaagcttcttgatgccttgtttttccaaagcctcagagacacagaaaagttattcctttgctgtaaactccttttatcagaacagaaatgattagagcaatgaatttggtacacacctttttcccatctttgaattattttctgagttgaaatggtttctattctttttcattattttgatcctaaaacatcag

SEQ ID NO: 250628 - DNA, 520 bp, Homo sapiens
ttcaccctctcttgactattttccaaatgtcctccccagagctgcccctgttggtgtaactggcgtgactgagagaagcaaggatgtgcttggggtagggctgggagggggagtttcctctgtgtcgcaaccactgtttccaaaagctgtgacctctgttagctgtgagattttgtcttcctgttgtggcaacatctgtagaaccacatccatggtttacctgcagcctaaaacgccctggcctcggaggaagctaacacctctttctccttagtttgcattacctcaacaagcagtaggctgccccaccacacccaccacaccccaaagcttcttgatgccttgtttttccaaagcctcagagacacagaaaagttattyctttgctgtaaactccttttatcagaacagaaatgattagagcaatgaatttggtacacacctttttcccatctttgaattattttctgagttgaaatggtttctattctttttcattattttgatcctaaaacatcag

SEQ ID NO: 250629 - DNA, 520 bp, Homo sapiens
ttcaccctctcttgactattttccaaatgtcctccccagagctgcccctgttggtgtaactggcgtgactgagagaagcaaggatgtgcttggggtagggctgggagggggagtttcctctgtgtcgcaaccactgtttccaaaagctgtgacctctgttagctgtgagattttgtcttcctgttgtggcaacatctgtagaaccacatccatggtttacctgcagcctaaaacgccctggcctcggaggaagctaacacctctttctccttagtttgcattacctcaacaagcagtaggctgccccaccacacccaccacaccccaaagcttcttgatgccttgtttttccaaagcctcagagacacagaaaagttattcctttgctgtaaactccttttatcagaacagaaatrattagagcaatgaatttggtacacacctttttcccatctttgaattattttctgagttgaaatggtttctattctttttcattattttgatcctaaaacatcag

SEQ ID NO: 250630 - DNA, 605 bp, Homo sapiens
acttagcccataatggcagttggagctatgtcaccaaacccacccaaaacttgggcagtggaggtgcatggtcttgataccactcatcttggtaattaattccacacaaatgagctaacagagaccagtcatcacacatatgccaacagcttgcttactggtttttttccctgctttttcttttggcaaacgaaacattccttcagcccgattattggcctctagcttgtcccttggatctgacagctgttggttcatggactccaacctggyctgtcattttagcaacctagctaaaacttcagtcaatgggggtaaaatgatcatttgatggcataaaaagccaccatccaggggcgggccacggtgtggccttgtgagctgggtgccctaaaagactgtccagtttcagtgagctgcagaactcctgtgtcctgaccccatctgttgttggccaacattaacctgactttaaatgactaagtaatcacatcaaaatagaaaccagggtggctggctcccgttgaaatcttggcattttggtctctagtaagcagtgaccttccatctgggcccgcctctttcttctcttctctcctcatgat

SEQ ID NO: 250631 - DNA, 605 bp, Homo sapiens
acttagcccataatggcagttggagctatgtcaccaaacccacccaaaacttgggcagtggaggtgcatggtcttgataccactcatcttggtaattaattccacacaaatgagctaacagagaccagtcatcacacatatgccaacagcttgcttactggtttttttccctgctttttcttttggcaaacgaaacattccttcagcccgattattggcctctagcttgtcccttggatctgacagctgttggttcatggactccaacctggtctgtcattttagcaacctagctaaaacttcagtcaatgggggtaaaatgatcatttgatggcataaaaagccaccatccaggggcgggccacggtgtggccttgtgagctgggtgccctaaaagactgtccagttycagtgagctgcagaactcctgtgtcctgaccccatctgttgttggccaacattaacctgactttaaatgactaagtaatcacatcaaaatagaaaccagggtggctggctcccgttgaaatcttggcattttggtctctagtaagcagtgaccttccatctgggcccgcctctttcttctcttctctcctcatgat

SEQ ID NO: 250632 - DNA, 605 bp, Homo sapiens
acttagcccataatggcagttggagctatgtcaccaaacccacccaaaacttgggcagtggaggtgcatggtcttgataccactcatcttggtaattaattccacacaaatgagctaacagagaccagtcatcacacatatgccaacagcttgcttactggtttttttccctgctttttcttttggcaaacgaaacattccttcagcccgattattggcctctagcttgtcccttggatctgacagctgttggttcatggactccaacctggtctgtcattttagcaacctagctaaaacttcagtcaatgggggtaaaatgatcatttgatggcataaaaagccaccatccaggggcgggccacggtgtggccttgtgagctgggtgccctaaaagactgtccagtttcagtgagctgcagaactcctgtgtcctgaccccatctgttgttggcsaacattaacctgactttaaatgactaagtaatcacatcaaaatagaaaccagggtggctggctcccgttgaaatcttggcattttggtctctagtaagcagtgaccttccatctgggcccgcctctttcttctcttctctcctcatgat

SEQ ID NO: 250633 - DNA, 605 bp, Homo sapiens
acttagcccataatggcagttggagctatgtcaccaaacccacccaaaacttgggcagtggaggtgcatggtcttgataccactcatcttggtaattaattccacacaaatgagctaacagagaccagtcatcacacatatgccaacagcttgcttactggtttttttccctgctttttcttttggcaaacgaaacattccttcagcccgattattggcctctagcttgtcccttggatctgacagctgttggttcatggactccaacctggtctgtcattttagcaacctagctaaaacttcagtcaatgggggtaaaatgatcatttgatggcataaaaagccaccatccaggggcgggccacggtgtggccttgtgagctgggtgccctaaaagactgtccagtttcagtgagctgcagaactcctgtgtcctgaccccatctgttgttggccaacattaacctgactttaaatgactaagtaatcacatcaaaatagaaaccagggtggctggcycccgttgaaatcttggcattttggtctctagtaagcagtgaccttccatctgggcccgcctctttcttctcttctctcctcatgat

SEQ ID NO: 250634 - DNA, 557 bp, Homo sapiens
taccatagcaagttttaaatacctgattcatttgaaatgtgctttatatagtgtttgcatgatttatactacgtttctgagtacaacaactttggccctgactgatttcatrtcaccacattttgattctgacaatgtcaataaatgaaatgacttcaagcatccacttagaatatacaaagaaaaaaaaaaggaagctgaggccacccaaactaaatatatatagagagatatatagatatatagattagatatagatataaaaatacagttcacccatgaagggtgaggggtttagtaatgttgaccccaccatgcagttgaaaatttatgtatcacttttgactcagccagaacttaactaataacagccttctattgactggaagccttatgaatagtatagccaattaacagatattttctgtattatatgtattatatactgtattcttacaataaagtagctagagaaaaaaatgttattaagaaaatcataaaaagagaaacatatttactatttattaagtggaagtggatcatcataaaggtcttta

SEQ ID NO: 250635 - DNA, 557 bp, Homo sapiens
taccatagcaagttttaaatacctgattcatttgaaatgtgctttatatagtgtttgcatgatttatactacgtttctgagtacaacaactttggccctgactgatttcatatcaccacattttgattctgacaatgtcaataaatgaaatgacttcaagcatccacttagaatatacaaagaaaaaaaaaaggaagctgaggccacccaaactaaatatatatagagagatatatagatatatagattagatatagatataaaaatacagttcacccatgaagggtgaggggtttagtaatgttgaccccaccatgcagttgaaaatttatgtatcactyttgactcagccagaacttaactaataacagccttctattgactggaagccttatgaatagtatagccaattaacagatattttctgtattatatgtattatatactgtattcttacaataaagtagctagagaaaaaaatgttattaagaaaatcataaaaagagaaacatatttactatttattaagtggaagtggatcatcataaaggtcttta

SEQ ID NO: 250636 - DNA, 607 bp, Homo sapiens
aatagagccacataaatatagatcaactaatgtttgacaaaggagcaaaggtgaagaatgtctttttaacaaatgatattagaataactgaacatcaactagacacagaccttacagttttcacaaaaactaattcacagacctaaatataaaatgtgaacctataaaactcytagatcataacatagaataaaatctagatgatctagcgtttggtgatgactttttagatataacaccaaagacacaatccatgaaatgaagaattgataagatggactttattaaaattaaacttttctgttctgcaaaagctctgtcaagagaattcaaagacaatccacaaactgggagaatatacctgcaaaggtcatatttgataaaggactgttatctaaaatattaaaataacccttaaaactcaaaaataaggaaacaacccaactacaaaatgggctgaagccctcaacagacacaagatatacagatcgcaaataagaaaacatacaaatggcaaataagcatatgaaaagatgcttcatatcatatatcatctgggaaatgcaaacaaaaacaatgagggtagtgtgatcaagacgactgacta

SEQ ID NO: 250637 - DNA, 551 bp, Homo sapiens
aactgttttgtcttacctggactacttcagttgcctcctaactggtctctctgcatccrtctttgctctcctacattctatttttcacacagtagtcagagatacaggtgttcaatttgtacacttaaagagtctgacctgggtccgaatcttgcctcagccatggggcaacccactttgccacttggtttccccatctctcaaccaggggtaatgaaatctgtgatagcattgtttgagcactaagtgaggtggtgtgtatatcatgcttaatgtagttcctggcttgtaatgagtgctcaaatatgttattactacacactgctcagatttcctcaaaggcagccttgctagatgagcatcagctgaaggtgatgctgatcagaaaatgaagcaacgcctaattcattatatgtcagcctcccagttcctatctgacctatggtggccatggagcatcacttcccgccccatccctggatgcctgttgacaatcacggatgtgcacacacactggcctatgagcagagttttgaaatgtgaagtgagat

SEQ ID NO: 250638 - DNA, 658 bp, Homo sapiens
ttctcaggcaatggatagggctataaagctcccaaaagtttatgtctttgtgttaagttaccagggcaggtagagaaataccatcaggtagggtcaggattaggcaggtctgagctcagactctccttgtccggggcctgcctcagccactgtggggaacagagggtggttcccaggccaccaggataatgttccagaagaaagtataactgtctctactgtgcagaagagttcacaaagggagtgaggattagctgacagcagtaggtcccacccagctcccacacagttggtgaggctggtctcactcccacagtgtcccgctaacagcaccaggtttagatccaggcagtctgcacacagaactcagacctgacccaagccataagctcccccagagagacagcaataacagctttaaggccattcccttccccatctgcccggaaggcaggcacccagcttctgtgtttgygtctgcagcatacttcctgctcactcctggattctgttcaagagagtttgttcccactcaaaattatatcacaaaattcagttgggagcttctttcactctgtgacccctccctgggttcattggctaacttccgcaagggtacctgtgggaaataatcaggaatagcttccctgggctcatg

SEQ ID NO: 250639 - DNA, 658 bp, Homo sapiens
ttctcaggcaatggatagggctataaagctcccaaaagtttatgtctttgtgttaagttaccagggcaggtagagaaataccatcaggtagggtcaggattaggcaggtctgagctcagactctccttgtccggggcctgcctcagccactgtggggaacagagggtggttcccaggccaccaggataatgttccagaagaaagtataactgtctctactgtgcagaagagttcacaaagggagtgaggattagctgacagcagtaggtcccacccagctcccacacagttggtgaggctggtctcactcccacagtgtcccgctaacagcaccaggtttagatccaggcagtctgcacacagaactcagacctgacccaagccataagctcccccagagagacagcaataacagctttaaggccattcccttccccatctgcccggaaggcaggcacccagcttctgtgtttgcgtctgcagcatacttcctgctcactcctggattctgttcaagagagtttgttcccactcaaaattatatcacaaaattcagttgggagcttctttcactctgtgacccctccctgggttcaytggctaacttccgcaagggtacctgtgggaaataatcaggaatagcttccctgggctcatg

SEQ ID NO: 250640 - DNA, 526 bp, Homo sapiens
tgctgtctacaagaaagtcatcttatccataaagacacacatagactgataaaagtaaaggtatggaaaaagatattccacacaaacagaaaccaaaagtgaacagaagtagctatacttatatcaaataaaacaagttataaataaaaaatggtaataaaagacaaagaaggtaattatataaagataaagggatcaaatcagcaggaggatataacaaacctaaatatataggcacccaacatcagagcacccaaattcacaaaacaaatgttactagatctaaagaaatagacaacactataataayagtgggagattttagcactccactcatagcactagataggtaattgagacataaaattaacaaagaaacattgaacttaaattggactttagacaaaatggacttatcaattatttatatgacatgctacccaacaactataaaatgtaccttctttttatcagcaaatggaatattcttcaagatagaccatgtttaggccacaaagcaagtctt

SEQ ID NO: 250641 - DNA, 551 bp, Homo sapiens
aactgttttgtcttacctggactacttcagttgcctcctaactggtctctctgcatccgtctttgctctcctacattctatttttcacacagtagtcagagatacaggtgttcaatttgtacacttaaagagtctgacctgggtccgaatcttgcctcagccatggggcaacccactttgccacttggtttccccatctctcaaccaggggtaatgaaatctgtgatagcattgtttgagcactaagtgaggtggtgtgtatatcatgcttaatgtagttcctggcttgtaatgagtgctcaaatatgttattactacacactgctcagatttcctcaaaggcagccttgctagatgagcatcagctgaaggtgatgctgatcagaaaatgaagcaacgcctaattcattatatgtcagcctcccagttcctatctgacctatggtggccatggagcatcacttcccgccccatccctggatgcctgttgacaatcayggatgtgcacacacactggcctatgagcagagttttgaaatgtgaagtgagat

SEQ ID NO: 250642 - DNA, 426 bp, Homo sapiens
ttagcatcaactaaactttcagctgtcacttcccactgttgggaaaccatataacatgatgttagaacatagtgacagaaggagctttggagtcaaatagctgatgtaaatcttgtttcttccattttctgcctttgtgacctaggayagattgcttaatcctgctgagcctatggttttatacttttaaattgaaattatagtgtaaagtttaaatcagataattaaataaagccttgagcataatccatgatgtactgaaagtaatgattaaataatagtctattagactatacagcctactcactatctctcattcttatctagtatttactagctagttaggcactatttctattgcttagaacaacttctttcgcatctatccaaaatgtataaccctttggtcaccagatcaatatcttc

SEQ ID NO: 250643 - DNA, 493 bp, Homo sapiens
tagggactaatgggaaagcagaagggatgcagygtggttaaatccaaaaaaagagcagcagctcaagagacagtaggaaatacgatggacaagggtcaggagaccaggatttgagccccagcttaggtgattggtcctggaaatgtcatttctataaattagcacaactgataaagatgctctctaaagcaccttcggttctgatagcctaaaaatgcatgagttatttttaagcagaaacttaactacagctattcttagtctctcaactagaagctacatgtgattctgcatttcttattaactgagaggtacaattttccactgcatgttgctcttatctttcttagtggccagataatgttatttataaaacaataacaatatagcctcagataactgcagcaacagaaacaatagtagtcatttacagggccaggaactgtgcaaaaacacgttttacatgcatttgattctcagagcagcaccattg

SEQ ID NO: 250644 - DNA, 561 bp, Homo sapiens
tgagaagaaggcaggtgggaaacgtctgtgatgagcgacattgtagagagttaacaaaaactgggagactttcagggtttccttctcctgctcccctgaaaccaaggattataaatactttcaatcttacaggacaactctagctgtgcagtggtgactaggttgaagaggatttggaagcggtacttgggctccgtgtacacacacttgggaacacatgcacacacgcatttatgcatttgcactatgtagtaggcatttctgccttggacttttaaaaacatgcttgccctttaggatcctcatcttggaaatctgccctcttctccctctttaagggattgcccttccctctgaatgtgcagaacatgctgttcttctactgcagaatttatttcattttctcatgcaatttttattagtggctcataagtgtgtctttcatcgcattggaatgaccctcttagaggcaagggtcttgactgttgttttccccatactataccacatacactatgttgaatygataaatttacttattcagtgaatgttttggtatta

SEQ ID NO: 250645 - DNA, 582 bp, Homo sapiens
gaaatagtccactctcttgtttactcttttacttgacattgattgaacctctcaatggcaaagactgtgttgtgcaytagatagatatgctgagaaatgagaaagaggctgtgccctcaaaaatttgtcctaaaaggggaacatctagataatcaatgagctaataaatgattagatacagtgttgtcccttcaaccatctctttggattcaccacattctccacactctctctaaagactcccactcatgcccctggtgagtcaaaagctcctggccagtagcctcttctctgatcaactcatatatttctgctcatatcacctttgctggtggcataccagaatcaagaatcaattctgtttgttttcaaacctgtttatatttctgtgtttttattatacttggacaatttaattaaaatgatgtgaactagtgaaatatgagtgcaaaagaaagtcttttttctgaaactaaatacttttgaaaggctatcggatgaatcactaaaatcattgtaatattaggtatcagagagacgactctaaggttggggaaaagcatggaagaaaatctaaactta

SEQ ID NO: 250646 - DNA, 582 bp, Homo sapiens
gaaatagtccactctcttgtttactcttttacttgacattgattgaacctctcaatggcaaagactgtgttgtgcattagatagatatgctgagaaatgagaaagaggctgtgccctcaaaaatttgtcctaaaaggggaacatctagataatcaatgagctaataaatgattagatacagtgttgtcccttcaaccatctctttggattcaccacattctccacactctctctaaagactcccactcatgcccctggtgagtcaaaagctcctggccagtagcctcttctctgatcaactcatatatttctgctcatatcamctttgctggtggcataccagaatcaagaatcaattctgtttgttttcaaacctgtttatatttctgtgtttttattatacttggacaatttaattaaaatgatgtgaactagtgaaatatgagtgcaaaagaaagtcttttttctgaaactaaatacttttgaaaggctatcggatgaatcactaaaatcattgtaatattaggtatcagagagacgactctaaggttggggaaaagcatggaagaaaatctaaactta

SEQ ID NO: 250647 - DNA, 582 bp, Homo sapiens
gaaatagtccactctcttgtttactcttttacttgacattgattgaacctctcaatggcaaagactgtgttgtgcattagatagatatgctgagaaatgagaaagaggctgtgccctcaaaaatttgtcctaaaaggggaacatctagataatcaatgagctaataaatgattagatacagtgttgtcccttcaaccatctctttggattcaccacattctccacactctctctaaagactcccactcatgcccctggtgagtcaaaagctcctggccagtagcctcttctctgatcaactcatatatttctgctcatatcacctttgctggtggcataccagaatcaagaatcaattctgtttgttttcaaacctgtttatrtttctgtgtttttattatacttggacaatttaattaaaatgatgtgaactagtgaaatatgagtgcaaaagaaagtcttttttctgaaactaaatacttttgaaaggctatcggatgaatcactaaaatcattgtaatattaggtatcagagagacgactctaaggttggggaaaagcatggaagaaaatctaaactta

SEQ ID NO: 250648 - DNA, 582 bp, Homo sapiens
gaaatagtccactctcttgtttactcttttacttgacattgattgaacctctcaatggcaaagactgtgttgtgcattagatagatatgctgagaaatgagaaagaggctgtgccctcaaaaatttgtcctaaaaggggaacatctagataatcaatgagctaataaatgattagatacagtgttgtcccttcaaccatctctttggattcaccacattctccacactctctctaaagactcccactcatgcccctggtgagtcaaaagctcctggccagtagcctcttctctgatcaactcatatatttctgctcatatcacctttgctggtggcataccagaatcaagaatcaattctgtttgttttcaaacctgtttatatttctgtgtttttattatacttggacaatttaattaaaatgatgtgaactagtgaaatrtgagtgcaaaagaaagtcttttttctgaaactaaatacttttgaaaggctatcggatgaatcactaaaatcattgtaatattaggtatcagagagacgactctaaggttggggaaaagcatggaagaaaatctaaactta

SEQ ID NO: 250649 - DNA, 506 bp, Homo sapiens
ggatggagtagcatggtttatggcacaggccatggagtaggacagaacattatttatatcccagctctgccactcaccacawgaatgactcggagaagattaattaatctccctgaacttcagcttcctcatgcatgaaataggaaaaagaaattaaagagttattgtgaagagtaagtgataaaatgcatgtgaagtgccaagaatagaatttggaacatagtaaacactcaataggtgatataaatacaataataaataagaagaagaatggtacttttctaagtagtactagcttctcagaacaaatagacagttggtagtgactactatgcaaacatcatgtgaggtaggaggttctacttatcattaataatgctctggacaccaggttttgcatattccaggcacatgtaaattaaatacactttaaaatggagttgtttagacagctgtctaggcttttatctaggccaatagtccttcaagaccaggtacctttctgt

SEQ ID NO: 250650 - DNA, 643 bp, Homo sapiens
gtaacagcaccatgcaattttcgttattccctacctagctctttatgagttattgttcattatattagcagaaaaatgaggatttggagagcctcttccttcaagkgagcttacatctcaattgcaggtgaaaaggcataaatacacaaaaagttacttgataatataaaataaaataatcaattcattcagtgcaagacatgtcatgaaagaaagatgggtcaacttagtatccagagattaaaataggtaaatgacttgcattcattcatttattctcatattcattcatgtccaaaaatattgtgtagtcattatgggaacccttcaaagggatatgaataataatataagctttatgagggcaaaggcatcatctgtcttatttaccactctattccacagtgtctagcccatagaggaaagacaaggactgagttagacatagatccttatttaatactcagtgtttagatgtatgtagttcctaacacatttgtggacatttatggagctcctaacatgattttgggctctaatttatgaaatactgcaatcagacatttagtagacatctgttggtttgatatgcccagcatgcatctcctctctgttcacagcaccttaattttcctctggctgg

SEQ ID NO: 250651 - DNA, 643 bp, Homo sapiens
gtaacagcaccatgcaattttcgttattccctacctagctctttatgagttattgttcattatattagcagaaaaatgaggatttggagagcctcttccttcaagggrgcttacatctcaattgcaggtgaaaaggcataaatacacaaaaagttacttgataatataaaataaaataatcaattcattcagtgcaagacatgtcatgaaagaaagatgggtcaacttagtatccagagattaaaataggtaaatgacttgcattcattcatttattctcatattcattcatgtccaaaaatattgtgtagtcattatgggaacccttcaaagggatatgaataataatataagctttatgagggcaaaggcatcatctgtcttatttaccactctattccacagtgtctagcccatagaggaaagacaaggactgagttagacatagatccttatttaatactcagtgtttagatgtatgtagttcctaacacatttgtggacatttatggagctcctaacatgattttgggctctaatttatgaaatactgcaatcagacatttagtagacatctgttggtttgatatgcccagcatgcatctcctctctgttcacagcaccttaattttcctctggctgg

SEQ ID NO: 250652 - DNA, 643 bp, Homo sapiens
gtaacagcaccatgcaattttcgttattccctacctagctctttatgagttattgttcattatattagcagaaaaatgaggatttggagagcctcttccttcaagggagcttamatctcaattgcaggtgaaaaggcataaatacacaaaaagttacttgataatataaaataaaataatcaattcattcagtgcaagacatgtcatgaaagaaagatgggtcaacttagtatccagagattaaaataggtaaatgacttgcattcattcatttattctcatattcattcatgtccaaaaatattgtgtagtcattatgggaacccttcaaagggatatgaataataatataagctttatgagggcaaaggcatcatctgtcttatttaccactctattccacagtgtctagcccatagaggaaagacaaggactgagttagacatagatccttatttaatactcagtgtttagatgtatgtagttcctaacacatttgtggacatttatggagctcctaacatgattttgggctctaatttatgaaatactgcaatcagacatttagtagacatctgttggtttgatatgcccagcatgcatctcctctctgttcacagcaccttaattttcctctggctgg

SEQ ID NO: 250653 - DNA, 614 bp, Homo sapiens
tccctttattactctctcaaatcaccctttattttccttaatgtaaaactcactgaacacttgcttaagctctgtgaaggtagaaaacatgtctgtcttgtgtaattgtggtaccccaattttctggcaatattagtttctggtgccaataaatatctgttgaatttactaaataaatgataacattgtatctagtaaatgacagacaccctggatgtgtctcagaatcctaagtaaatgtgatattgtttaagggctttgggatgatttatatctattatggtaattctttgcatgtcagcattatatctacgatacaagagaatataaaaagggatggacaggcactcttattgtcctctgagtgatggaamtgaagcacatcctttgatgttacaacgttagagtaagatgatgaagaatgtgattcccaccaataaggatagaattattccaggaggggaatgagtgcctgaaagtccccccattcacacatacttttgatctccctcccctaaaatgaagctgtcctgtcacctcattatctgctatttacaatgaggctgccacattcccagggacaggagccaaggagaaatgtcggtgtgagaggc

SEQ ID NO: 250654 - DNA, 614 bp, Homo sapiens
tccctttattactctctcaaatcaccctttattttccttaatgtaaaactcactgaacacttgcttaagctctgtgaaggtagaaaacatgtctgtcttgtgtaattgtggtaccccaattttctggcaatattagtttctggtgccaataaatatctgttgaatttactaaataaatgataacattgtatctagtaaatgacagacaccctggatgtgtctcagaatcctaagtaaatgtgatattgtttaagggctttgggatgatttatatctattatggtaattctttgcatgtcagcattatatctacgatacaagagaatataaaaagggatggacaggcactcttattgtcctctgagtgatggaactgaagcacatccyttgatgttacaacgttagagtaagatgatgaagaatgtgattcccaccaataaggatagaattattccaggaggggaatgagtgcctgaaagtccccccattcacacatacttttgatctccctcccctaaaatgaagctgtcctgtcacctcattatctgctatttacaatgaggctgccacattcccagggacaggagccaaggagaaatgtcggtgtgagaggc

SEQ ID NO: 250655 - DNA, 537 bp, Homo sapiens
cattacaggccagtcacagtggctcacacctgtaatcccagcactttaagaggctgaggtgggaggatcgcttgagaccagcagttcaagaccagcttgcgcaacataatgagatcccaactctacagtttggagctgcagtgagccatgatggcaccactgcactccagcccaggtgacggagccagaccctgtttcagaaaaaaaaaaaaacaaagaagaagaagaggaagaaagagaacaccatattcaagtgctttctaaatggcaaatactgygtttcatcccagcaacatgatggaagtctgtgcattaacccagtacacacagagttctgattctgaaaaatgccccatctcttctctcctacttgtcatatctgacaatgtagtctccatctctggctccctttctagtctgcctcctttcatctctctactgggtaacttattcacatagcaggttaaaagttgtgtcttaacacttaagactccaaatgcatctattcagaagtcacaaaggtaaatctgttcagga

SEQ ID NO: 250656 - DNA, 537 bp, Homo sapiens
cattacaggccagtcacagtggctcacacctgtaatcccagcactttaagaggctgaggtgggaggatcgcttgagaccagcagttcaagaccagcttgcgcaacataatgagatcccaactctacagtttggagctgcagtgagccatgatggcaccactgcactccagcccaggtgacggagccagaccctgtttcagaaaaaaaaaaaaacaaagaagaagaagaggaagaaagagaacaccatattcaagtgctttctaaatggcaaatactgcgtttcatcccagcaacaygatggaagtctgtgcattaacccagtacacacagagttctgattctgaaaaatgccccatctcttctctcctacttgtcatatctgacaatgtagtctccatctctggctccctttctagtctgcctcctttcatctctctactgggtaacttattcacatagcaggttaaaagttgtgtcttaacacttaagactccaaatgcatctattcagaagtcacaaaggtaaatctgttcagga

SEQ ID NO: 250657 - DNA, 513 bp, Homo sapiens
ctgtagagagtatattataatattttaatgaggtttatgtgctccccatatacacttcaccctggatgatggattgtgcattttgacaaatctatatttaacattgggagaataatatgtgatgtatgcttcctggtagagaaatcatatttatggaaatctttattctagttattataatagacatttaaagacagtgcctattgtgggctgtggatagatagagtgtmctcattagggtggaggagaaaatagtgtgagtggcagaggataaatggctaccttagaagacagcaacccaggcaggggagcaactagttcagggtgacccaacagtcacatctctgtttgggttcagctcctcctcagcccctgctgcaggtcatatgccctcatcaagcactcatcattcatttatttatcaaatatttattaagcatctaccatgtcccagacactctgctggcttttgggcacaaagaagcatgtcctaattttcagggaattcacatt

SEQ ID NO: 250658 - DNA, 537 bp, Homo sapiens
tcatcataatcttcatccttctctgggctttctaattcttcctcctttgaatttaacatcacattttccaaatgttttctatactttttcttctctatgtctttactcatgttattccagttttctggaatgcacttcccttctccaatttacatctgtaaatccttctcctcttttgcaggatgtccctattccccaattctgtggatgggagcactctctccaactcccrtgatgtttgtcttgtactgtcctaccttctcattgtatattaaatagtcttgtaataatttattcactactggtgtaaacaaataaatgggtcacgcaagacctgaaaggtgagacagaggagtacagtactgatgtggttgcctgcagggagtcttagaaaacttttgagttggagagaggtttgtgaaagtgatttttcaggcagttaggcaggcgtcgttcagatgggaaggagccaacagaagaaaccaggaacaccctattttctttgattttctcttcactgtccccactttgatgact

SEQ ID NO: 250659 - DNA, 537 bp, Homo sapiens
tcatcataatcttcatccttctctgggctttctaattcttcctcctttgaatttaacatcacattttccaaatgttttctatactttttcttctctatgtctttactcatgttattccagttttctggaatgcacttcccttctccaatttacatctgtaaatccttctcctcttttgcaggatgtccctattccccaattctgtggatgggagcactctctccaactcccatgatgtttgtcttgtactgtcctaccttctcattgtataytaaatagtcttgtaataatttattcactactggtgtaaacaaataaatgggtcacgcaagacctgaaaggtgagacagaggagtacagtactgatgtggttgcctgcagggagtcttagaaaacttttgagttggagagaggtttgtgaaagtgatttttcaggcagttaggcaggcgtcgttcagatgggaaggagccaacagaagaaaccaggaacaccctattttctttgattttctcttcactgtccccactttgatgact

SEQ ID NO: 250660 - DNA, 566 bp, Homo sapiens
ccaattctgtggatgggagcactctctccaactcccatgatgtttgtcttgtactgtcctaccttctcattgtatattaaatagtcttgtaataatttattcactactggtgtaaacaaataaatgggtcacgcaagacctgaaaggtgagacagaggagtacagtactgatgtggttgcctgcagggagtcttagaaaacttttgagttggagagaggtttgtgaaagtgatttttcaggcagttaggcaggcgtcgttcagatgggaaggagccaacagaagaaaccaggaacaccctattttctttgattttctcttcactgtccccactttgatgacttcccttctcagactgygactattgcaggggtcacctggaagtctatttcaggacagctttgcagcataatgtagctggaggcctggaagtaataaagccagaaaaatgtacctttgcttgtgggagatcatctctggggtcagcagaagcacccacactctcaaaagagctccacctacctcagaactcagagctcagagccctgccgtttgtcagctgtgtga

SEQ ID NO: 250661 - DNA, 580 bp, Homo sapiens
acctattgtatattgttctatggtacagacagtagctattactactatttttttagtgtgtatggtataccagatactatgccaagaccttcccatgcataatcctacttcattcccacatcaactttgtaaaacagcttttttcaattcccctattttatagatgaagaaaagagagattatacttgcccaacatctcacagctagcatatgataaaagcaggaagtcaaacctatcttggtctggccaaagarcctagcttcttaaaaatgcaacttttctgcttctgctatctataattaactcctctctcaaagggcaaacttgcgttttgtaaagaagtgacccgtttgtatgggtattttagattgtagcatattgacattttttaaaattgtttcattcatctattttgaaaagtaagaccaaagagttgaaaggattttacagatcacttgattctttgcttatgcttacattttatagatagaatgactgacggtcaaattgattaagttatttgccttagacaaataatgaatgacagtaatgagcctacaacttatatctctgacttac

SEQ ID NO: 250662 - DNA, 479 bp, Homo sapiens
tactgttttttatattacaaagaaaacaactcatcaaatcattttttgtatatattaaattttacctagtagcacatactattatgagttttcttttgtaaccattatttctgtcaagtctattttttctgggtcatgttttgtacctccascttttttgtcatgaagtttaattcttctagcttttctatccaaagccaaatgtatttttatttggtgtttagccccatttttaaaggctttattgagacatattttataaagcacacaattcatccatttaaagtgtacaattaaatggttttcaatatattcacaaagttatgaaaccatcaccacagtcttattttaaaattcttcatcactgctaggagaaatcccttacctattagcaatgactccttatcatcccctaagctcctccagccctaggcaaccattaatttactttctatccgtatgtatttgcctgtttggag

SEQ ID NO: 250663 - DNA, 573 bp, Homo sapiens
  misc_feature (1)...(573): n = A,T,C or G
tgctgcattttccaaactggctctacagacacaccacagaggtccacaggtcctctgttttgagaaacactcatttggtctaagatttgcttctggtgagtcacaaaggtaagaactacaactacattgatggaattttattaaaattattatttctagtgtgacagaagctgaggaagagatgacggagttagcccattccaggtcttatcggggtacttgggaaccaggacagttggccatttctgccatgtgcttgcagattaactcctgtagaatgttagatctggaagttttagtctatttggcagctattccaagcccccagccccatgctgctgctgnnctcctttctgcgggatgcaagccctggatcnagaaactgttcttgtagtcggccttgctctccctgtgtgtgataaatgctgtcagctcctttctgcaaagctgagctcatccactttcttcagtgcctctcttcctgttggctcygtacctcacagttatgtttagtttctgcagcttctggttaggcaggtggtatagtagttgggaagggtggctttggagcca

SEQ ID NO: 250664 - DNA, 419 bp, Homo sapiens
ttttttctgtcccaagctccacagcagcctctctgctgtgctgcctccctctgaggagagggtggtctggggcagtagtttcccaggtacagaaggctcagcaggagacagggtagcctcaggtaagcttcctrtctgttctgtgcccctggttctgtgggtgagaggggagaggtggactgacttggcctggacaacctgccctttgacctcaggcaattgacaccccttctctgaaggctcagttcctcagacgaaaaatgggacaatataatcccccctgtttgggttgctgcaagaatcaactggatgacatggtaattggaagtgtgctgaagataggaattcctttcccaagctgaaattaaagagttctctgggaaatagttaaagccttagaaaaatttaaggtagtgttt

SEQ ID NO: 250665 - DNA, 419 bp, Homo sapiens
ttttttctgtcccaagctccacagcagcctctctgctgtgctgcctccctctgaggagagggtggtctggggcagtagtttcccaggtacagaaggctcagcaggagacagggtagcctcaggtaagcttcctatctgttctgtgcccctggttctgtgggygagaggggagaggtggactgacttggcctggacaacctgccctttgacctcaggcaattgacaccccttctctgaaggctcagttcctcagacgaaaaatgggacaatataatcccccctgtttgggttgctgcaagaatcaactggatgacatggtaattggaagtgtgctgaagataggaattcctttcccaagctgaaattaaagagttctctgggaaatagttaaagccttagaaaaatttaaggtagtgttt

SEQ ID NO: 250666 - DNA, 419 bp, Homo sapiens
ttttttctgtcccaagctccacagcagcctctctgctgtgctgcctccctctgaggagagggtggtctggggcagtagtttcccaggtacagaaggctcagcaggagacagggtagcctcaggtaagcttcctatctgttctgtgcccctggttctgtgggtgagaggggagaggtggactgacttggcctggacaacctgccctttgacctcaggcaattgacaccccttctctgaaggctcagttcctcagacgaaaaatgggacaatataatcccccctgtttgggttgctgcaagaatcaactggatgacatggtaattggaagtgtgctgaagataggaattcctttcccaagctgarattaaagagttctctgggaaatagttaaagccttagaaaaatttaaggtagtgttt

SEQ ID NO: 250667 - DNA, 596 bp, Homo sapiens
ggtgactttgaagcaacatccatttgagatcctcagtgtaaaggttctgtttcattttaagctgygtttacatacctccaaacagagaggagaactgaataatttctcaaggaatggggaaaatgtagaccttccagctcatttagatgatccaccttttcctattagtattacctgagtgatcccatacttacttgaactctaaacttggcttttccttggtagaaatgctgaaggcatttcatatcttcacccttatgaaggagaaatttctagaaatgatttgtagaaaaaccaggttagtgtcattgggcaaatacaaggtagaaagcattgcaatatttgggcagtcaagagagcatatctagaaaactggaatgagagtagattttctaagggaatgtggtcatattttatatttcacaagccatagaaagaggctggagtgggctaaacatggtactgatctcagagttttggatggtgccaaatcatccattctttgtgcaatcctatcagagaaaaatttggcaatgaactttgcttggacaaagacccttcacaaaaatctttttgtaggaaaatgcatgttgttc

SEQ ID NO: 250668 - DNA, 497 bp, Homo sapiens
ttttttaagtatttaaaaatttagaaactatttttagttcacaaacccgacaaaaacaggcaataagctagatttgcctgttgattgcagtttgcccgcttctgacctagcacatagtaattgctcaacaaatgctagccattgatgagcaagagtttctttcctaagtgcctggctcctcattagaaccaatytcatggcagcttcctccgaagacctgcaacccttttagtattccctatgaacagcctggaaagcaaactttttaaagtccttagtagtgggtgaagacattttatctgcagtgaactagttcaagagtgcatcaagagaaggcggactggtgattagggcacagggcttggagcccagggaactagtgaggtctcagctctgagggtttaatgtggttattaactttcatacctgttttattcagaatgatactggagataacagcaacaacattaaaagtagctaaaaattattgagccagg

SEQ ID NO: 250669 - DNA, 610 bp, Homo sapiens
tttgaaacccttcatgatgcctagttcattcttttaaatactaagctatactttagaggttgcattatccatccttctaatgtgctcatgttttcatatattgatgaacccattcatccatcaatcagttattcccacctactgtgctgctgggttagatggtagggatgcggaaatagacamgtgattctgcgtctccagaattcccaagggtaaacggcagatgaatccacacatcatgtagtaccactcagttgaagtctgagaaaggcaggagagggagttgttggacctagaggctggcaaggggtggtggtgaggagttgggggtaaggatcagaaaaagcttcacagaaaatatcacctttgagctgagcctgtgaatctcttggtttggcattaaaggcactttagggtctcgatctagtttaccttcccggcatccagccctgcttctttattcactgaaagcatcactcccacaataccaaaatgctcattcttcccagcagctaatccctggacaagggcagtgagtggtaaagctttcaccatcatttggcaaaagaaaaacaacatctatgagtgactcttccacaaacctaaatgt

SEQ ID NO: 250670 - DNA, 606 bp, Homo sapiens
gcggaaatagacacgtgattctgcgtctccagaattcccaagggtaaacggcagatgaatccacacatcatgtagtaccactcagttgaagtctgagaaaggcaggagagggagttgttggacytagaggctggcaaggggtggtggtgaggagttgggggtaaggatcagaaaaagcttcacagaaaatatcacctttgagctgagcctgtgaatctcttggtttggcattaaaggcactttagggtctcgatctagtttaccttcccggcatccagccctgcttctttattcactgaaagcatcactcccacaataccaaaatgctcattcttcccagcagctaatccctggacaagggcagtgagtggtaaagctttcaccatcatttggcaaaagaaaaacaacatctatgagtgactcttccacaaacctaaatgtgttcagtggaaaaatatgcctttcgtttttactgtgttctacctaatttgttttttaacactggggtggggcatccctctatgttgcttgggctggtcttaaactcctgggctgcagtgatcctcctgcctcagcctccctagtagctgggattataggtgtgag

SEQ ID NO: 250671 - DNA, 576 bp, Homo sapiens
tgcatatgaaattgttttaaatgcacactacatagtacatgcatggatggcaattgtgtaattgtgttaccatcactctaggwgaagtcatttcctcatctgcctgcctttcttgccacacctttccagtgtccttcccttaaggggaagaggtggctgatctgctcagttattgcaagatatttatcagggcagagtctctgtgcattgggcctttcctggccctgttccctctcagtggcctcctgttttgctccacatctcagaggtagtgagcaaagctgatgatcctttggtcactggcatctccctcttccacttttctcttccatgaggctgtgagagcaggcggggctagaaatggccccttgggacagagcatccatcttctgtcttctttcttcatgtggcttggtaaaggggatggtaaaggccaaatgtcagacattccactccagcccagcttctttagagggccctgtttggcaagtagaaaccggcatgctgtggtccatttgattaccgttctttgtgtctgtctctctcgaggattctgcgaagaacagtaatggccga

SEQ ID NO: 250672 - DNA, 576 bp, Homo sapiens
tgcatatgaaattgttttaaatgcacactacatagtacatgcatggatggcaattgtgtaattgtgttaccatcactctaggagaagtcatttcctcatctgcctgcctttcttgccacacctttccagtgtccttcccttaaggggaagaggtggctgatctgctcagttattgcaagatatttatcagggcagagtctctgtgcattgggcctttcctggccctgttccctctcagtggcctcctgttttgctccacatctcagaggtagtgagcaaagctgatgatcctttggtcactggcatctccctcttccacttttctcttccatgaggctgtgagagcaggcgggrctagaaatggccccttgggacagagcatccatcttctgtcttctttcttcatgtggcttggtaaaggggatggtaaaggccaaatgtcagacattccactccagcccagcttctttagagggccctgtttggcaagtagaaaccggcatgctgtggtccatttgattaccgttctttgtgtctgtctctctcgaggattctgcgaagaacagtaatggccga

SEQ ID NO: 250673 - DNA, 590 bp, Homo sapiens
cagaccttgtctcttaagagacgggacacttgaagtctgcaaagtatgatctggagacctcctgcatcagaataatcctgagttccagyccagacctactgagtcagagtttctgtcagtgaggctcgaggatctgcgtttctaaggagcttccaggggatttttatgacctaaagctggataatcattggcttcagaaatgagcagcccaggtgaggggcccaggttgacttacctgcccaaggtcatccaagtgagtggatagagtcaggatttgaattaagttatgttggcccaagtcctatccttattctactacgctctgctgtatttcccgaatgccaaatatacatgcattcctcgggcccctgagtctttgcacacgtggcttctgccatgggaaatggccattcatatttggtaagttcatatttatccttcagaatccatctccattgtaactttctctaggatgccatccccgattccatctccatttccctttctccacctcccagcaataaatgctcatggcattttgcctgtgtattttcttttaaaatggacatatcctggtcttatagtctatc

SEQ ID NO: 250674 - DNA, 538 bp, Homo sapiens
gtaagttcatatttatccttcagaatccatctccattgtaactttctctaggatgccatccccgattccatctccatttccctttctccacctcccagcaataaatgctcatggcattttgcctgtgtattttcttttaaaatggacatatcctggtcttatagtctatcaaggcctcaagacaagagatgtcatattccaaagcaaggtgtgaaaccattctgtgggacttgcaaagrgggaggccaacaccaattctgcctctgttaacccttctctctatcaaaagtagaatgcattagagagttgactagggtctgggtcctgcctgagtaatgtaaaggattccatggataaccttgcaaagagcaccacagcttcttggctgcatcctgaaaggatatcacacacaggcaggctgaagtgcccagggggcagtggaaggaggtctgtgctcctcgtgagcaggccaaagatgtatgtcttcagtggaccaggtgtgggtaagtaggcaggtgtggggttgcccttgattctg

SEQ ID NO: 250675 - DNA, 375 bp, Homo sapiens
cccaggtgacctatatggacgcttgctatgtgcagggcactacaccacattctctacatctatcatctttgcaatttttgccacaaaacatgtggagtagattctaacatgatccttatattaaaagtkggaaactgaggcttagaacagtaattggcccaacgtcatatatctagtaagggctgtttaaatccaggttgcctgactccacagtttgtgccccaaaccagcaagctgtaaggcccatttcattcatcagcaataagtgttaaatgacatggtacagcagaaacattttataaactgtaaagcagtggcaaacaatgggtattccttgaatattgaaaacatacttggagtctttatttcatgcca

SEQ ID NO: 250676 - DNA, 543 bp, Homo sapiens
gagttggaattcttgttgcccaaatgttgcaaaygaaaagctaacaggattcacatctctggctggcacaagggaccaagatctaaaacatcactgtctgctgtgtgttctcagggagctaggatcctgaaggtgggaagggagcagatgtccaccagacactgggcctggcttctagatgttgatctcaccttaccttccccacagccctgtgcaatgggggttgttttctgtgtttctctctggacatgagggaggctcagagagagagcgtcacctgtgcgacatcacactgtagatgctgttgcagatgtgtgcagtgtgtgccctcctcactgagtccactgatccttcctctctcctgcttttcccagccctgtgtcacatcagcaaagggcacagagctctctatcaccttggatgggctgaagcaaagacaccagcagaaaggacatgtgatgcctcaaatccaccacctccttcctcatcaccagttgctggctgctgatggtgctctgattctcagagacactgcctcattct

SEQ ID NO: 250677 - DNA, 543 bp, Homo sapiens
gagttggaattcttgttgcccaaatgttgcaaatgaaaagctaacaggattcacatctctggctggcacaagggaccaagatctaaaacatcactgtctgctgtgtgttctcagggagctaggatcctgaaggtgggaagggagcagatgtccaccagacactgggcctggcttctagatgttgwtctcaccttaccttccccacagccctgtgcaatgggggttgttttctgtgtttctctctggacatgagggaggctcagagagagagcgtcacctgtgcgacatcacactgtagatgctgttgcagatgtgtgcagtgtgtgccctcctcactgagtccactgatccttcctctctcctgcttttcccagccctgtgtcacatcagcaaagggcacagagctctctatcaccttggatgggctgaagcaaagacaccagcagaaaggacatgtgatgcctcaaatccaccacctccttcctcatcaccagttgctggctgctgatggtgctctgattctcagagacactgcctcattct

SEQ ID NO: 250678 - DNA, 600 bp, Homo sapiens
gaaaggtcaggagtggagaacaggaggaatgccaaggaactggggattctggtggggaaaggaggagacctctatttgccttcatgggagaaagtgctgaaacagaaggggtaaaaaaaattgcaattttgatgttagtcagcctaggttctggatcccagaggaaaggtcttggcttttagcaccaggatccatgctcacccataaggttaagatgacacaaatattttcaagtgggggcagatttagggccaccctccccgtgcccattctccttcacattgccttggctcatgcttgttgctagatatctctggctatacctccctgggtgccctattctttttattacccctgagaataccattcttttttttaagtgctcatcaatctaaatcycctcgaatatttatcttctgcacagacaattcacggtgtggatgcataacatttttcacaaatggcatttccttgctaattgttcagagagggcatgcacagagggcaggtgaagatgctgaacagcatagtctatatgaccagataaaggcagatgcaatttctttgtcatgttactctgaaaagaaaagaaaataatta

SEQ ID NO: 250679 - DNA, 600 bp, Homo sapiens
gaaaggtcaggagtggagaacaggaggaatgccaaggaactggggattctggtggggaaaggaggagacctctatttgccttcatgggagaaagtgctgaaacagaaggggtaaaaaaaattgcaattttgatgttagtcagcctaggttctggatcccagaggaaaggtcttggcttttagcaccaggatccatgctcacccataaggttaagatgacacaaatattttcaagtgggggcagatttagggccaccctccccgtgcccattctccttcacattgccttggctcatgcttgttgctagatatctctggctatacctccctgggtgccctattctttttattacccctgagaataccattcttttttttaagtgctcatcaatctaaatctcctygaatatttatcttctgcacagacaattcacggtgtggatgcataacatttttcacaaatggcatttccttgctaattgttcagagagggcatgcacagagggcaggtgaagatgctgaacagcatagtctatatgaccagataaaggcagatgcaatttctttgtcatgttactctgaaaagaaaagaaaataatta

SEQ ID NO: 250680 - DNA, 600 bp, Homo sapiens
gaaaggtcaggagtggagaacaggaggaatgccaaggaactggggattctggtggggaaaggaggagacctctatttgccttcatgggagaaagtgctgaaacagaaggggtaaaaaaaattgcaattttgatgttagtcagcctaggttctggatcccagaggaaaggtcttggcttttagcaccaggatccatgctcacccataaggttaagatgacacaaatattttcaagtgggggcagatttagggccaccctccccgtgcccattctccttcacattgccttggctcatgcttgttgctagatatctctggctatacctccctgggtgccctattctttttattacccctgagaataccattcttttttttaagtgctcatcaatctaaatctcctcgaatayttatcttctgcacagacaattcacggtgtggatgcataacatttttcacaaatggcatttccttgctaattgttcagagagggcatgcacagagggcaggtgaagatgctgaacagcatagtctatatgaccagataaaggcagatgcaatttctttgtcatgttactctgaaaagaaaagaaaataatta

SEQ ID NO: 250681 - DNA, 600 bp, Homo sapiens
gaaaggtcaggagtggagaacaggaggaatgccaaggaactggggattctggtggggaaaggaggagacctctatttgccttcatgggagaaagtgctgaaacagaaggggtaaaaaaaattgcaattttgatgttagtcagcctaggttctggatcccagaggaaaggtcttggcttttagcaccaggatccatgctcacccataaggttaagatgacacaaatattttcaagtgggggcagatttagggccaccctccccgtgcccattctccttcacattgccttggctcatgcttgttgctagatatctctggctatacctccctgggtgccctattctttttattacccctgagaataccattcttttttttaagtgctcatcaatctaaatctcctcgaatatttatcttctgcacagacaattcacggtgtggatgcataacatttttcacaaatggcatttccttgctaattgttcagagagggcatgcacagagggcaggtgaagatgctgaacagcatagtctatatgaccagataaaggcagatgcaatttmtttgtcatgttactctgaaaagaaaagaaaataatta

SEQ ID NO: 250682 - DNA, 439 bp, Homo sapiens
atgtgggcaaaatgtgttacattacacccagcatgcccacaggtggtcaatggatggcatctrtaattatcgagaacaaagataattctatgtttataccatattttcacaaccaacttctttggccatttggatgagggctcaaactgatttggaggttttgacgtcaggatgttgcatgtgtcacattcaggttccattgcttacccaattttcctctcatgagaggataatttattcattaatatctattatccatttacccattagctaacctagttaactaactaattagtttattcactcactccttcaactatacatccaatgaagacttatgagctcggtgctggcataggtcctggggaggcagaggtgacttgaacgtgggtcctaccttgagtaactgtggggagatgctcaggggaagggtgaactc

SEQ ID NO: 250683 - DNA, 568 bp, Homo sapiens
tgaaaattccaagtttccaatcatgacttggtctttctggtgacagccttcaatccaagagcccactaagagtcatctcattagaaaaaactatggtcctatgacccaggayaggttccaaggcatttaggagctctgtcagacacttccatcactcaggaaactataaaggctttaggagctctgtgtcaggaactggggacaaagatcaaaatacatgtatttttattataaatcataataaaatggtgagaaagacagcaacctcttgaaatatcaacaaatgtcgattatggcccttacttggtaataataattcctttacatcctcttgtgaaaaatgtacctacctctcattttggtaattttctattattttattaatattttaagttacaagatattaataacatgctattatgctaatcatagtgacatttatatagtacatttatatctgctataaaatttaactctttaaatatccctgtgatgaaagaacctatattaggtatttattattttatctgttcagtgcctttcacttctgggaccaatatgcccatcc

SEQ ID NO: 250684 - DNA, 568 bp, Homo sapiens
tgaaaattccaagtttccaatcatgacttggtctttctggtgacagccttcaatccaagagcccactaagagtcatctcattagaaaaaactatggtcctatgacccaggacaggttccaaggcatttaggagctctgtcagacacttccatcactcaggaaactataaaggctttaggagctctgtgtcaggaactgggsacaaagatcaaaatacatgtatttttattataaatcataataaaatggtgagaaagacagcaacctcttgaaatatcaacaaatgtcgattatggcccttacttggtaataataattcctttacatcctcttgtgaaaaatgtacctacctctcattttggtaattttctattattttattaatattttaagttacaagatattaataacatgctattatgctaatcatagtgacatttatatagtacatttatatctgctataaaatttaactctttaaatatccctgtgatgaaagaacctatattaggtatttattattttatctgttcagtgcctttcacttctgggaccaatatgcccatcc

SEQ ID NO: 250685 - DNA, 568 bp, Homo sapiens
tgaaaattccaagtttccaatcatgacttggtctttctggtgacagccttcaatccaagagcccactaagagtcatctcattagaaaaaactatggtcctatgacccaggacaggttccaaggcatttaggagctctgtcagacacttccatcactcaggaaactataaaggctttaggagctctgtgtcaggaactggggacaaagatcaaaatacatgtatttttattataaatcataataaaatggtgagaaagacagcaacctcttgaaatatcaacaaatgtcgmttatggcccttacttggtaataataattcctttacatcctcttgtgaaaaatgtacctacctctcattttggtaattttctattattttattaatattttaagttacaagatattaataacatgctattatgctaatcatagtgacatttatatagtacatttatatctgctataaaatttaactctttaaatatccctgtgatgaaagaacctatattaggtatttattattttatctgttcagtgcctttcacttctgggaccaatatgcccatcc

SEQ ID NO: 250686 - DNA, 568 bp, Homo sapiens
tgaaaattccaagtttccaatcatgacttggtctttctggtgacagccttcaatccaagagcccactaagagtcatctcattagaaaaaactatggtcctatgacccaggacaggttccaaggcatttaggagctctgtcagacacttccatcactcaggaaactataaaggctttaggagctctgtgtcaggaactggggacaaagatcaaaatacatgtatttttattataaatcataataaaatggtgagaaagacagcaacctcttgaaatatcaacaaatgtcgattatggcccttacttggtaataataattcctttacatcctcttgtgaaaaatgtacctacctctcattttggtaattttctattattttattaatattttaagttacaagatattaataacatgctattatgctaatcatagtgacatttatatagtacatttatatctgctataaaatttaactcttyaaatatccctgtgatgaaagaacctatattaggtatttattattttatctgttcagtgcctttcacttctgggaccaatatgcccatcc

SEQ ID NO: 250687 - DNA, 473 bp, Homo sapiens
tttattcattaatatctattatccatttacccattagctaacctagttaactaactaattagtttattcactcactccttcaactatacatccaatgaagacttatgagctcggtgctggcataggtcctggggaggcagaggtgacttgaacgtgggtcctaccttgagtaactgtggggagatgctcaggggaagggtgaactcagcctttcacaagctgccataatccagggattctccaatgtgcaatttaatttacattccagaataatccagtgagatgagcatcactctcatggattaggacagggagggtccttcctatatccaagcctatatmcagggtcacacagctggccagagtgcatagattcctgcctcatccaataccacatgctttttcaacatgccatgtggccctgcacagtgccatagagacagacacataaccagtcagtttcatggagaagg

SEQ ID NO: 250688 - DNA, 488 bp, Homo sapiens
tccaaaatctgaggtttggccactctgcaagattgcctttgacatcaggaagatgaagaaagacgcagaggtgtcttgacagctaagagtccagggaagatttgggaaggtcatgcccagtggggacttgtgaatgtgcaaatgctgtgtgaaacgcaatgtgattcttccctgggatgggtgaagttttgagttaaaaatcacaacaaaaatatcaatatgtttggtgtgacagtattttggggggaagctagtgatgcagctgggtttgtgctggaattggtaggggrtgaagcagcctgggaggacgaggagtcagcagccacctgggaggacgaggaacagtgccaaacaggggtgaaaagggcaccgttcaatcccattgtaccgccaaacccaccattaaatctcttcattaatgaggggcatgcacatgttttgctcgcttagagaagctttccctaactagtttaagctctgtgcaaagc

SEQ ID NO: 250689 - DNA, 645 bp, Homo sapiens
gagacaaatgctgctgctcccatgccacggagctctgcgcagccagtgaaaaacaatgaggacaatttctgggaactcatatgaaacaatgaccagtgtatatttaaagtaaacacacacaaatgcacacagatgcacacacaaattcaaatattttatgtagaatgtgaggttatttgtgttaagaattcttttctgcttgtaaatacacagcacatttctgagaggacacaccaagaattcacagtggttacttctggaaggttaaaaaagagagctgagaggaaaaggagagttttccttctttacacgattctgaattctttgcatttttttttaacactggcaacatgtagaaataattacaaaaaaggattctgaaacccgaggagagaaaaacagaggaggaatctggtttgtgtagaacagtggcagtttcctttgtcccacttggcaaattgttttgccaatttctggtaaggaagaattggaaatgaattctggaaacacttggacattatttatatctttgcctggagataattttgcttgttggctyttatagcgtgctgcggttctgacactgcaccatgtcaataagtcttttctcatttaatattcattaagtcccacattaaccaagcc

SEQ ID NO: 250690 - DNA, 579 bp, Homo sapiens
aaatggatccagccaggttggcagactggattttttgataacaaacaatgacagatgcttgttgtgtcctaacccctatgtcacctactaggaattcagcaagacattggctcttccccsaaggaactcagcaagggggtagggggtggtcagtgggtgggaaggattggcagaagaaggcaggaaaatcaataatactgtccactgtgatgcagagtgcgcaacaatggccacctcatctatcttggggtgggaggtgtcaggaaaagattcccagggatggtggcctttagttaaattctgaaagagcagaatgaattatagaggtatgggggagagggaaccgtgagcatctgaaacagaagaaaacagcacatgagaaggccttagagagtaaattatcgtgatgcatttgaaggacttgtagctaaatatggccttggtttctctaattgtaaagtgaaggatgaatgtctaaagatcctctaaaaattctatgatttgacagatagagtatttcttatacctcagtaagaacttaaactccaagtacaaagtggattgtaaaaagaattggat

SEQ ID NO: 250691 - DNA, 621 bp, Homo sapiens
tcagtcctctcaaaccccgcagctgctttgtcaactaagtttacgtgatattctaaatgatcatctgagccttcagtgagtcatcatcttttcgttggtggagtagggcctctgtgttgatggttgcttactgattagggtggtcgttgctgaaggctggagtgactgtggcaatttcttaacataaaacaacaacgaggtttgctacatagattgactcttcttttaatgaaagatttttctatagcatgcaatgctgtttgataattttttacccaccagtagaatttctttcataattggagtcagtcctctcaaaccctgcagccgcytcatcaaccaagcttatgtgatattctaaatcctttgttgtcatttcagtgatgttcgcagcatcttcagcagcagtagatttcatctcaagaaaccactttctttgctcatccataagaagcaactttgcatttgttgaagttttctcatgagattgcaataattcagtcacatcttcaggctccgcttctaattctagttctcttgctatttccaccacatctgcagttactttctccactgaagtctcaaaacccccaaagtcatccatgagggttggaatcaact

SEQ ID NO: 250692 - DNA, 621 bp, Homo sapiens
tcagtcctctcaaaccccgcagctgctttgtcaactaagtttacgtgatattctaaatgatcatctgagccttcagtgagtcatcatcttttcgttggtggagtagggcctctgtgttgatggttgcttactgattagggtggtcgttgctgaaggctggagtgactgtggcaatttcttaacataaaacaacaacgaggtttgctacatagattgactcttcttttaatgaaagatttttctatagcatgcaatgctgtttgataattttttacccaccagtagaatttctttcataattggagtcagtcctctcaaaccctgcagccgcctcatcaaccaagcttatgtgatattctaaatcctttgttgtcatttcagtgatgttcgcagcatcttcagcagcagtagatttcatctcaagaaaccactttctttgctcatccataagaagcaacttygcatttgttgaagttttctcatgagattgcaataattcagtcacatcttcaggctccgcttctaattctagttctcttgctatttccaccacatctgcagttactttctccactgaagtctcaaaacccccaaagtcatccatgagggttggaatcaact

SEQ ID NO: 250693 - DNA, 605 bp, Homo sapiens
tctatgaaattttctactgcagttaagactattaaagaaagggtggtaaccgtggacattcttacactcagaataacatgctacaaataaggtgagttgggcagaatcagagcgtgaaggatccagggaccactggttcattgaaggaaaccattgtgccaatcttgggggttaatatagcatagctggtaagagcataaatgccatggcttcaaatctcagctccactacttactagctatgagatatcaggcaagttacttgtcctctttgggctttagtgcttcttacctgtaaaagagggattttaactagcacctgctgttgtttgtgagagtaatggattattacttataagtctcctaaaacaccacctggcatgtaattaatgctcactagaaaccaactgctgttgttattaatattatttttcaatcagaattcttttagtggcaaccaatacaaataggctttagcaaaagaaaaaawaaagaggattctactgcctcacacaactgaaagctctagagtacagctggcatcatatctcgcaaacaccaccagaattcttctccagagttcagtcctgttctcctctgtggtgg

SEQ ID NO: 250694 - DNA, 639 bp, Homo sapiens
caatgtattttgtcattttttctgctaaattaaaaaaaaaaaaactaagtaatcccagggtctatttcaatagattttttttcctcttgactatgcatcccagttttctgggttttaaatatgtgtcttataattttaatgaacacagtagatgatactttacagagataatatgttctgtwatgctcctctgtagaattatttttgttatagaaggttgattatcttgaacttgtggtattcttatcttacttttataagaatgtcttgttttgttcgcagaaaaatctctcagttctggatcatagcatttacttctgaggtatggctgtttttgagtttcagtggaagactctgacgtttcaaataccaaggctctttacgttgttgggacccaatttgttctcctctacggtgagtagcagctaaaataccttctaaactttttcaagtttttggctgttgatttccactgaacttcatataatgtcatccacacatgcacaatacagacatcagctgagaattaaagtttgttttaggttggtgaaaaactaattgtggtttttgccattaaaagtaataacaaaaaactgcatttaattttgcaccaacccaatatgtagatttttggggctc

SEQ ID NO: 250695 - DNA, 621 bp, Homo sapiens
agtgagaacatggactggctttgagacttagaycattagcatttaaatattatttatctactttagtccacctgacaacaaataattatttttaatgattataaacatttcacatgggaaaatattttataaatattattcacctattaacgtatgaacagaattttattagtcacaggtaaatactatagatcatagagactatttattaaatttaattatagcatgtgaactctgtctaatgagagattagctgaccaatattaacttaagctggaaaagctgggctaatactattcttttcaaacaagaaataaatcttgttcctaaactctattcttacatattttatacaaactcttaaaacatcttggtcaactttttttacattagcctgtgctgtgagttttgacatttattttaaattttgtatttccttgcaaaaatggttggtacaatgcattcatgtagtaagaactgcgtttgagaatgagatcttgcaaaatagaaatagccacctgaaattgagatttggaaaggggactgaaagagaagctcagatcacagtggatgtttaggctgcttattttttcagtttcataagctaagtggaagtcttat

SEQ ID NO: 250696 - DNA, 621 bp, Homo sapiens
agtgagaacatggactggctttgagacttagaccattagcatttaaatattatttatctactttagtccacctgacaacaaataattatttttaatgattataaacatttcacatrggaaaatattttataaatattattcacctattaacgtatgaacagaattttattagtcacaggtaaatactatagatcatagagactatttattaaatttaattatagcatgtgaactctgtctaatgagagattagctgaccaatattaacttaagctggaaaagctgggctaatactattcttttcaaacaagaaataaatcttgttcctaaactctattcttacatattttatacaaactcttaaaacatcttggtcaactttttttacattagcctgtgctgtgagttttgacatttattttaaattttgtatttccttgcaaaaatggttggtacaatgcattcatgtagtaagaactgcgtttgagaatgagatcttgcaaaatagaaatagccacctgaaattgagatttggaaaggggactgaaagagaagctcagatcacagtggatgtttaggctgcttattttttcagtttcataagctaagtggaagtcttat

SEQ ID NO: 250697 - DNA, 621 bp, Homo sapiens
agtgagaacatggactggctttgagacttagaccattagcatttaaatattatttatctactttagtccacctgacaacaaataattatttttaatgattataaacatttcacatgggaaaatattttataaatattattcacctattaacgtatgaacagaattttattagtcacaggtaaatactatagatcatagagactatttattaaatttaattatagcatgtgaactctgtctaatgagagattagctgaccaatattaacttaagctggaaaagctgggctaatactattcttttcaaacaagaaataaatcttgttcctaaactctattcttacatattttatacaaactcttaaaacatcttggtcaactttttttacattagcctgtgytgtgagttttgacatttattttaaattttgtatttccttgcaaaaatggttggtacaatgcattcatgtagtaagaactgcgtttgagaatgagatcttgcaaaatagaaatagccacctgaaattgagatttggaaaggggactgaaagagaagctcagatcacagtggatgtttaggctgcttattttttcagtttcataagctaagtggaagtcttat

SEQ ID NO: 250698 - DNA, 459 bp, Homo sapiens
atttaaggaatattttaaaatgatctatgaggggatattctctgtcacaacacttgcacaattagcctaaatgagacttatgggctttcttattaatgagtcagaggacttaagagttttactatttttaatggctgctccctcagtacytgtcacaggattttgattttacttactttagaatataaagaggctgtcacaataatcccatagcaagacaaaaactggaagaaacagtttccctaatttggatactaatacatttatttggggcccttaagagttgtttagtatttaacattttgatatgtacacatcttatggatatcgacaatgataactggctatcaatgttcgctaggtaacatattcgctattctttctcactagggtgatatgtttgtgttgagctagccacatcattttctctgttttttttttttttttcttatagccatg

SEQ ID NO: 250699 - DNA, 613 bp, Homo sapiens
agctggtaggggggttgtactcacaaagccacaaaggcagagttgcccaagggtgtgggagctcaattgttgcatcagtgtgtcttggatataaaacatagagtcaaagaaaattattatggaactttaaggtttaatgacagatattgtttgactgtgtccccacccaaatctcatcttgaattcccgcatgttgtgggaggtgcccagtgggaggtaattgaatcaygggggcatgtctttcctgtgctgttctcatgatagtgaatatatctcatgagatctgatggctttatgaggcagtttccctgcacaagctctctctttgcctgctgtcatccacgtaagatgtgacttgctcctccttgccttctgtcatgattgtcaggcttccccagccacgtggaactgtaagttcaataaacccttctttctgtataaattacccaatctcgggtatgtctttatcagcagcatgaaaacagactaatacaatgactgacctgttagagttcacacttgcatggagactgtaggccctttattttggccaatttctcccatttggaatgggtgtatttacccaatgcctgtaccaccattgtatctagga

SEQ ID NO: 250700 - DNA, 613 bp, Homo sapiens
agctggtaggggggttgtactcacaaagccacaaaggcagagttgcccaagggtgtgggagctcaattgttgcatcagtgtgtcttggatataaaacatagagtcaaagaaaattattatggaactttaaggtttaatgacagatattgtttgactgtgtccccacccaaatctcatcttgaattcccgcatgttgtgggaggtgcccagtgggaggtaattgaatcatgggggcatgtctttcctgtgctgttctcatgatagtgaatatatctcatgagatctgatggctttatgaggcagtttccctgcacaagctctctctttgcctgctgtcatccacgtaagatgtgacttgctcctccttgccttctgtcatgattgtcaggcttccccagccacgtggaactgtaagttcaataaacccttctttctgtataaattacccmatctcgggtatgtctttatcagcagcatgaaaacagactaatacaatgactgacctgttagagttcacacttgcatggagactgtaggccctttattttggccaatttctcccatttggaatgggtgtatttacccaatgcctgtaccaccattgtatctagga

SEQ ID NO: 250701 - DNA, 613 bp, Homo sapiens
agctggtaggggggttgtactcacaaagccacaaaggcagagttgcccaagggtgtgggagctcaattgttgcatcagtgtgtcttggatataaaacatagagtcaaagaaaattattatggaactttaaggtttaatgacagatattgtttgactgtgtccccacccaaatctcatcttgaattcccgcatgttgtgggaggtgcccagtgggaggtaattgaatcatgggggcatgtctttcctgtgctgttctcatgatagtgaatatatctcatgagatctgatggctttatgaggcagtttccctgcacaagctctctctttgcctgctgtcatccacgtaagatgtgacttgctcctccttgccttctgtcatgattgtcaggcttccccagccacgtggaactgtaagttcaataaacccttctttctgtataaattacccaatctcgggtatgtctttatcagcagcatgaaaacagactaatacaatgactgacctgttagagttcacacttgcatggagactgtaggccctttattttggccaatttctcccatttggaatgrgtgtatttacccaatgcctgtaccaccattgtatctagga

SEQ ID NO: 250702 - DNA, 480 bp, Homo sapiens
aagccagaagtgacaggccttatccagagccagcaaggccagtctccagtctcactcccaccatgccccacacatagcaccaagtttatatccagasagctgatgcacagggctgagttcttgctccagccaacaagccttcctgctgagaaagcaagaagggctcttcagaactcacccttccatacctatctgcactatcagctatagcttctgtgctcatatctgtacttcccatttgctccccaatcctggcttcagctcaggaaaatttgtgctcaatcaaaattattacaaagtttaggtagaagcttccttcaacctgtgaccccaccctaattctgctggctgccttcctcaaggaaccccatgagataaggccaggaatggcttccctgggtttgagctggggactgggagtgcccacagggctcttctcactgctttttctacttttatatttcactcagctccctaaac

SEQ ID NO: 250703 - DNA, 632 bp, Homo sapiens
attcccctaagtgtttcacatgtaggaatctatcctacagatatattcacatatatattatgtcatttattgtggaattatttgtgaatgaaaataatgaaaacctgctaaatgtctattaatcacccgaaggggaaaagttaagtaaactataacacatccaatctattactaaacgtaaatcacacgaagggtgggacagttgtctgttttcttgatgatccccagagattggctgacttttcgtctaaagggccagatagtaaatattttaggatctctgtcttaactacttgactctccttctgtagcaaaaaagaagccatagacaatatataaacaagagagcatggctgtggtccaataagactttctctacaaaaacatgtgacaggctagatttgackcagggctgtagtttttcaaactcatgctaacaggaatcataaaacatctacattgcacccatcgacaaatatcttcaggcccatctactaagtaatcgtagctaacatttaccgaatacttactctgtaacctgctaagcctgtcagacactagttaggtaatttttataacaaaatgatgatgagatgggttattactattttcattttccacatgaggaaatg

SEQ ID NO: 250704 - DNA, 627 bp, Homo sapiens
taaactcttctgtttttcacaaattttatggatgaaaggtgatgaataaggcgcctcacatggaagaagcagataactaaacaaataatatgaataatcaactatggttgtggctataacttagaagcaacgggggtgggtgggtgatgttaggaaagacttttctgaataagatcatacaactgatagtagttacccaggcaaatagtgttcgaagtagcgagagggaaagagcttcagtttcctcctctgtctgtgagaataatagcactgtctcacattactaaatttagcagaatgccatgcatagactaaatgttygagagacagtgcaaaaatcaaacacatacataacaaaaacacaaattgctactttagataaatgtgcacatcaagtccatagtctgagcaatcatttgaccaaagtgtctcatctgtaatggtgggatgggctgagcaggaggtggaggatatatatgagtaaagaaggcaaagagggagtcctcacacaagctaacattctccagggatggtggctgctagcggaaagaggtgagcttgttacactaaaggaaaaatcttcatcatagagctgttataaggatctaatgcatttcaaaatctata

SEQ ID NO: 250705 - DNA, 577 bp, Homo sapiens
ccctgggtcaagtgtcaaagatataaattctagatgaggctcttttcttaactaatgtaatgacattgcccacattaccctcacttcttctggcatacttctcacatctgttaaatggaagaggtcatcccttccattattatattctcactttagctgaaaaccacatttttgctccttgaataccctactatgcatatgtaatttcactagcccaacataaccatgcatctacattccyatttaaaaaaataaaaggctttttgacatatctaagagcaatattcaggttatatttgttcaggtttgatggtatcacaaattgaaccatttagtaagtatacctggtcatgcacattacccgagtgttatttgcaaaatgaatgctatgtaaatatctattgatttattgactactattaatttatgtaaaatgaacctttttggaaaatcatacataataaagctatgtcactgatctttagaaacagaagagggcttatcacttaggataaagtggcttgttgagttcagtaaggaaaataaccagccattcaattttatttgggctgctccc

SEQ ID NO: 250706 - DNA, 535 bp, Homo sapiens
gcagtgataaagactagatttttttcacagacacttaaccatgtttatttgtctttttgaaggtactgaaaagtccttcgggaaaggaacatgcttaactttggaagatctggcattttcaattctaatttttataaaagatacatttaaaaaattttaaatacttttatggaagtacattttacatgcagtataacacgcagactataagtgtataatttagtaagttttgatacatatatacacttgtgtaatcaccacccaaatcaagatgtaacacattcctatcgaccctctaaaattcactcttasactgtaccttccagtcatcagaaactactgttctggtttctattatgatatagtttgtgtatttgtccccacccaaaatctcatgttgaaatgtcattaccagtattagaggtggggcctggtgggaggtgaatggatcatgaagatggatttctcatgaatggtttacaaccataccgttggtgctctcctcgtggcagagtgacttctcgtgagagcctgc

SEQ ID NO: 250707 - DNA, 545 bp, Homo sapiens
gtttttcctctgtctgctctcaaggccttccctctgaagatctgctaggagtgtgccagtcttcttgatgtccttgtctctctgtgggaggttttctttctggcggtgtctagttggctattttggagcaagaccaaacctatgctttatatctgctggaaaagttggacacttgaaagctactaggccaccttctttagggactgaaagaggaaaatggtaaggacctttctgacttggtctttgcttctttatttcttcgtatctcatataatcagacacacacctctctctctctctctctttctttctttgtctctctctctctgtcacacacacacacacacacacatacacgcacatacacacacacacctctcttgtaatccaaaagatgtgaacagtctacaaatatataaaccacaaactataggaattctatgggttcacccggacagaccctaacgtataaattgggtaagaagartaggaaggattagctcattggtaacctcaatttctcttcaggattaaaatttatactc

SEQ ID NO: 250708 - DNA, 595 bp, Homo sapiens
tccaattcatttgagcaatttacagtttttacaaataagacatttttcccatatagctcagagtaaaatcacaatagtaaaataaattacccaattctaatttaaatcaccaaccgtaattttgtaagcttgaacatctcacaaacactttaagtaccaaagatacacaaatccttatggtaattactaaatgtactcctagcactctttacataaggtatttgaaaaatgagaggatgacatatatttaattattatacaagagctgccacaatctctccatatgtagatgttaagaaggccgaattgaataacacccaatctattttccttcaaacattttctagtacctcagctgttttctttttttctttctttttcaagcctaattggataaaccaaactaactgatctaagttaatagcattcccatctttttctcatttcccattgtctatttttatggaatatgrtaaatctaagaggcactccagtatgtctcttgaattgcattcattcagtagcagcaatcaaaactgcctttggtaattgaaatcaattaccttggctaccataatgacattcttctttatta

SEQ ID NO: 250709 - DNA, 566 bp, Homo sapiens
ttactttatgcagaaagggggctcctcacaggtagaacaatggtgagagcacacctgaacaaaggagggaagcaatttttatctcttacgcagcttgtycctgctactttgtcctgtctccattggttggagccagaccgcacaatctaagctaaacccgactggctaataacttaaaactttctgaaataggtaaaggcaagggagaacaaaggaaaagagaaatttgcttacgaaaagacttagagaagtaataacatttccaaataaggaaggggcatatgctgtgagctgggacaggcctgagcatgtctagaacaaatatcttggttaaagtacaaggacgtagaatgtactcattctcttatatctaacagctacataggatagggcttaacaaagagttattagcaaaaagcaaggaggcgtgaaggaagttattctttaaaagaaactattatttctaacacttacgatttattctttaacaagaagggaaactttgaagaggaactgttttatttccacacaaattattaagagtctctgcaggaaagtttgggaga

SEQ ID NO: 250710 - DNA, 605 bp, Homo sapiens
acccaaccttcctaagcactaaatgtctttaatatcattttatttacatattattaacactggtttaaattgagcattttatatgtctgtggaagctctgggcattttcgtttccccagtttacattttccttgagaaattgttataagtaaaatgcttattcctcagtactgccagtaaaaatcagcattcagacaaaaagttttctcagcaagtcaattttactttatgcagaaagggggctcctcacaggtagaacaatggtgagagcacacctgaacaaaggagggaagcaatttttatctcttacgcagcttgtccctgctactttgtcctgtctccattggttggagccagaccgcacaatctaagctaaacccgactggctaataacttaaaactttctgaaataggtaaaggcaagggagaacaaaggaaaagagaaatttgcttacgaaaagacttagagaagtaataacatttccaaataaggaaggggcatatgctgtgagctgggacaggcctgagcatgtctagaacaaatatcttggttaaagtacaaggaygtagaatgtactcattctcttatatctaacagctacata

SEQ ID NO: 250711 - DNA, 653 bp, Homo sapiens
agatctttctaacatttggatgtaggaatttaacactataaactttcatcttagcactactttagctatgtttcagagattctgaaatgttgtatctttgttttcattactttcagtggatttcttgatttctgtattaattttattctttaccttaaataatttaggaggcagttctttaacctttttccatttaaaaaaaataagtgcagctcactgtctgcaatcatttaattttacataaacatgctctttgagtttgaagcaaatctgacagattttctatatgaaaataaaatataaaaactgctcttggagtaatttctaaacagaagtaacatcaaaatcacctgaatcatcggagtcatttattttttaaaaaaatggattcatcaaatcaatctttggccaattgttttagaacaatgttaatatcatgtgtagggatactrtgttttctaggatttgatattttcagctatcaagaattaccatattttatacatggaaataccactactaaaaccagaatgctataaaatagaacaatgtcttctgtttccaaggtcaatatactaaagagtgatgcaaaaataagaagaaaagcgaaatatttcatggcaaagttatctcagggcaaacaccaagccaca

SEQ ID NO: 250712 - DNA, 614 bp, Homo sapiens
aagttcagctgttagcctgatggggtttcctttaaatgtggcctgctcctcttctctagctgtctttaatgtattttcttacacattgactttagaaaatctgatgactatgtgtcttgggggtggtcatcctatatagtatctcactggatttctttgaatttcctatagtttcatcttgastcctctagcaatattgggaaaattttcatgggcagtattctcaatatatttgccaaatgtcttgctcttccccttctctttctgggacacaaaccagtcacagatttgatctctttacataatctcatatttttcagaagttttgttaattattaaaattcttttttctttacttttgtctgactgagttgatttgaataaccagtctttgagctcttagattcttttttcagcttggtctcttctggtattaacaattctgattgtattacaaaattctcatagtgagtttttcagctctagaggattactttggttctatcttaaaatgactatttcatctttcagctcttgtatcattttattgaattccttagattatttgcattggttttcaactttctcataatcttgatgatcttcattgccat

SEQ ID NO: 250713 - DNA, 593 bp, Homo sapiens
atggtaatatgacaagtttttatgacttaagaatctctttgtrtatataaattgcagtaatgatctttattttgaagttatttatcacttttcaaaagattcttaaaacatattatctggtcatatatatttacatatacaaatacacatatatgtaaatgtaaattatatatgtatatattttttaaatatcccctgcaagctctccatgatttggaccaggaccccattccaacctcaactcctcatccacgtcttcctctagctttgtaaggatggtcatctctaaatagaaacttattctattatgttttcaggtagtcaactgtctcatcatcttagactttcatgagttctcaccaggagatgcagtgtggtatagtgataaaggtcatagacctacgatctgagtgccctgacctggggcacattacttgacatttttgtgcctctgttccatcatctgaaagatgggaataaaaatattgcttagctgactgcatttatgtgagaattacattgtttaataagtgtacagaacttcagatggtgactactcaactctcacttgcaagtgactttactggacactt

SEQ ID NO: 250714 - DNA, 592 bp, Homo sapiens
actccatagttggagaagcgaatggagatggtggagggagaagaaggaacagttttcagaagaaatagtggctgcttctaaaacatgagattcttagcgagaaaaatacatattaagaaaaatatatttaaaatgtcaacataaccagtggttttcaactagaggcaattctgacacctatggcataggtaacaacatgtctaatattttcttgtcacactgaagaaggagggtgttactactggcatctagtaggtagagtccaggaatgctgctacacatccggtagtgcacaggaaagctacctccaacccccaaataaagtttatttagcccataatgtcaaaaatgctgaatttgagaaattctggtctagatttatattctggatgtctcctgtattcttcaacttttgtttatatgatataatttcacatcttttattacattaattattctccccttaccagcttttagttttgtggtgctacttaaactrcactacaatctttctgacacactggttattcagaagtaactagttgaccaaaagatttggaggagaaataagacaggaaatataataaacata

SEQ ID NO: 250715 - DNA, 541 bp, Homo sapiens
ttcaggacttgaactcagctctggatcaagtggacctgttacatatctacagaacactccacccaaaaacgacagaatatacattcttctcatcaccacatggcacttactctaaaattgattgcatagtaggaagtaaaacactcctcagcaaatgcaaaagtactgaaatcaaaataaacaaagcacaattaaattagaactaaagattaagaaactctctcaaaacacacaaatacatgaaaatttaacagcctgtccctgaatgatgcctccataaataatcaaattaaagtagaaataaaaaagtcctttgaaacgaatgagaacagacaatgtaccagaatctctgcaacacagctaaagcagtattaagagggaaatttaaccacttaatgcccacgtcaaaaaattagggagayctaaacttaaccacctaacattataactacaggaactagagaaccaagagcaaacaaaacccaaagctagcaaaagacaagaaataaccaagatcagagcagaagtgatagagataccg

SEQ ID NO: 250716 - DNA, 405 bp, Homo sapiens
ggtttgagagatcagtcggacacgattggcagggaaagcacgtgtgcttttacgagaattacgccgagataggtaacagatgaggaagaaatctgggcttgactgaagtaatgggggctgtctgtgaagctttgcagcagtacagcccaggtaatttgctgagcctaatggggtgtcagggtcagtctaagtgaaagcaaagagaggctgggacgaggggtgcaggggaatagtgaaaaaagcatctttaagatggagaacagaatagtgagttgtggaggaacgtattgaggacaaaagagygtacgggttgggcaccacagggtggataggcaaaacaatttggttgataagacgcagatcctgaactaatctgtaagacttatctgggttttggacaggtaa

SEQ ID NO: 250717 - DNA, 597 bp, Homo sapiens
cagaatttaagagtatgtacatttagaattttgatagaattcaccactttgttttccttgagagttttacatatttacgtccccctcagcattttatgacaacttgcacctctttacacctttgcatcgtagtgtattataaatattctgaaatctttgccactagacatgtttattttgagagtttttctgagtgcagtttrtagttgcttcactctgaactgtgtgttcatatctttgaccatttttttccactgggcaaatggttctttcattattgattggtaagaactctgtatatattaggaaggtttgctttttgcctgttatgttttataagtatcatgctcctattgagtttttattttgtttatggtacttttactatgttctaccagctaattagagagatatattaaattttccgactattgtggatttgcttatttctactttctacattatttttaatgtatatattattgacagcatacatatttaggattagctgtttttattataaaaaatttcatttcctataatgctttattttattttattttgcttgtagtctactactacattattactacacta

SEQ ID NO: 250718 - DNA, 532 bp, Homo sapiens
caaaagcattctctatatcaatatctatttcagtcaactttgaaatctgaatactaggggatgcatcctggggtgaaaggaggaagaatacatcatactactatttatccacatttcatctgtgtcattctgctaaacacaccaaagctatatgaggcttagtacctttaaaaaaatagagaaaagattaaagacaaaatcaatgtagaattaatagtttatctatgagatcaaggtactgatgtcactctcttttactgtgtgatttggaaaggtttggaggttagggaaccaatgatccttaattttaggcaggaccaaggtatcccttttagaccaacattccttctaatgtcatcatcatatcttcatgckcataatacactgttagttctccaaaatgattcagtttattgttagaattaagtttttgcaaatttttatattgagttgcaatatagactttttggtccttaaaaaataaagagaaaaaaactaatcttccttgagtatgacaaagcataaaatcatt

SEQ ID NO: 250719 - DNA, 631 bp, Homo sapiens
tgtggttttactctttgcagtttcagttacctgaggtcaaccttggtctgaaattaggtgagtacagtacaataagatattttgagagagagaaaaaggagaccccatatttgcataacttttactacattatattgtgataattgktctattttattattagatattgttaatctcttagtatgcatagtttataaattaaattttattgtaggtatgtatgtataggataaaatatagtatttatagggtttggtaatatccaaagattcaggcttccactgggggtcttggaatgtatctgttgtggataagaggggactactgtatagtgaaatgcccaaatcttacattaaaatttgttaagttttgatatttgacccacgttttgataagttaaatcctgcccatgtaaccaccatcccaatcaagatataggacattttcatcactccagaaagtttctatgtgtcccattccctagaggcaatctctgctttgttttctagtaccacacattagttttgcctgtgcaaagacaaatatgtgaaattaaacaatgcattcatatttgagtctggtttcatttatttagcatgcttttaacatcatatgtattattgtaggtttt

SEQ ID NO: 250720 - DNA, 555 bp, Homo sapiens
taaaagaggaagcagggaaacaccatgtgagactatagtgagacagtggccatttgcaagccagaaggagagctctcacaagaaaccgaatcagccagaacatcgatcttggatttctaggctttagaactgtgagaaaatgaatttctgctaagccatgtagtctgcagtattttgcaatggcagcccaagctaactaacgtatagttatgcaatcttgaaggtcttttccttccttctatgacttatttttctattagatgactgtgtaatgccattctgcttgtggattacataatgctgcctcatcttcttgggaagcagtcctacctctgatgaaatgactgaacacagcctggtaagtgaagtcaggaaggcaccaagtcttcaagctatgcatatgttrtatgaacaatgacataaataaaatacctgggtcattgcagtaatttctctttttggctattacccagacaaacaaaataaacagcatgtgcctgacatcaacacatcgagttttctcccaagatcacatgacttttctattctctaccc

SEQ ID NO: 250721 - DNA, 560 bp, Homo sapiens
ggcattttagaatagtggtgtgactgaagttacactgaagtcagaatgatcatgttccaccaattaccagttgtatggccttaggaaattttattaatattgtggagctcaagttttctcagtaatagaatgaacacaataatatcaacttggtaggatcattgtatatttaaatcaagcaatgcacatttagtctcagtgcaggtcctctcacataggtgcaaaatagtgttcagtaaataccagtaataaattaatttataaatatcaatattggacattgcaaatattggctcccactttcaaactatgacaaattttatattagcagaagatgacaatagctaagtgagcaaaagatcccatcactgtaagtattggtaatgatgtgcccagttaaacttagccaatccaaatctggacaatttaagggagagaytggatacttatttccaacaatgtccccatgaattgtgaattatttaaaaccacccacctgaaaggacatgaatcccgtattgacgtcataatccattattttgatatatggctccttccaa

SEQ ID NO: 250722 - DNA, 612 bp, Homo sapiens
ctgcatgttctcactcataagtgggagttgaacaataagaatacatggacacagggaggggaacatcacacaccagggcctgtcatggggcagggggctaggggagggatagcgttaggagaaatacctaatatagaygacagtttgatgagtgtggcaaaccaccatggcacgtgtgtacctatgtaacaaacctgcacattttgcacatgtatcccagaaattaaagtataataataattttaaaaaaaagattttcttaccacttcacgaacccctataaaatgaatggcaaattaaagaatcttgagatgccaagtaagcaaacaccacctgtaccccaataaccaatggggaaaatttttaaaataaaataagaaaacaagttttaatctcaagaattttgcaatttggttaggagtaacagtttaatcatccattcaaaaaagacttgagaaatgcaaacttacaaacttaagaggtaggttaggtgatttaaaactatgaagtactatagtaggtgagattcagtaagggttggagatgtctgggaagactctgaccttgaatagggccttggttagggcaaacctgctgatgtttaaggtctga

SEQ ID NO: 250723 - DNA, 665 bp, Homo sapiens
tctgctgcattaatgatggatcacttcatkaatgctgagttgttaaggggcctgtcattccagcaagaggctgatggatttattaaagcttcccatgaaagctgtactaactggattagctgctaacatggattgaggctttgagtgggattaaccacaattgccatgaattagttcctctttttttatccttttctttccttctcctatatcttgactctttggcaaagccaggtgacaggggaacaatagtcaggtttactttcttggagttaaaggaatctgggaaaatctattaagtgacttttctctggtttttaaaccctgggggatttaattcaatggtaaagaaaccttatcccacaatttaattcctcaccaccagggtttccatcccccaattccataggcttaattagactagttcaaggtggtttaatcaaggagatccatttttagagagttttccaagttcttgctggtactatcatgggcttcattgatggaggagaatggttaacaaaatcttttcttctttttctcttgcctttttcttttctttttcttccttctttttcttgttctttccacattaattgagcaatgttacaatataaaaactcagttttggatacacaaaaatgcataatgtgctcatagctgaa

SEQ ID NO: 250724 - DNA, 560 bp, Homo sapiens
ttacaagccacaaagaatagaacatctaatatccaaaagtagcaattaataacagaaaattgcaatatttgaatattataacctatgaagaaacacttttttttttttttttgtaattttctatcctctttctgacatttcaccaacttccatatatggcagtcactaatgaatttgctctgacacagaaaataagactttaaaatattgaaggaaccaaaagatcactgtgcatttatgagtgattcaagcacatctagaaactcagatctggcccaaatgaagctatgttttctccccgcaaacacctgagatttccattgctagttcacctacrtggcttaaggtgaaatgtcagcttcttgagttctattcttttttcctgtcctcctaaaatcttcaggctaagagtcaagagtcctgcattcaggccataaatatgtcaacaatttgccaagcagcttgagggaaatcacatctccaggtctgagtttcctcataatatgcatcttatctctccccaccctggtttagacaggatgaagtaggctaaaaggcaa

SEQ ID NO: 250725 - DNA, 610 bp, Homo sapiens
ttgctacaggtagctgccctgtctgcagctaaggacctgacaggactttctctggagcagttaacccatgttagtggcaacttctctccgaaaattgccaggaggcacccgagattagacaayagagtccaaaatgcctttgttttttcagatgtcatttcactaagaaactgatttcatgtgtggaaattacaaagcgatagaatagagggttgggctttgaaaagtcttggaaatagcattggattagtccaggctctgatcttgagttctgaatccaactattattttctgtgtgacccccaaacaatctcctccctactctggaccctagtttcttcatcaatacaaggatggagctggactaggccatgcctaggggtccttttatctctcacatcctgtcattctttttttttcaaatcatcttttatggtgagactccctcctcccagcagcaatggaacaggggtgcctctctcagcatatttgctaacgcccagccgccaggggaaaaaattgctgactgatgctctggctgcctccgtgttgttaaacacctacttacagctctaatcggctggttttcacgcccaggagatggggattg

SEQ ID NO: 250726 - DNA, 620 bp, Homo sapiens
gatcaaaccagaaagactaatgtggctgcagaggaagaaggaagttggataggaatgggaatttgctacaggtagctgccctgtctgcagctaaggacctgacaggactttctctggagcagttaacccatgttagtggcaacttctctccgaaaattgccaggaggcacccgagattagacaatagagtccaaaatgcctttgttttttcagatgtcatttcactaagaaactgatttcatgtgtggaaattacaaagcratagaatagagggttgggctttgaaaagtcttggaaatagcattggattagtccaggctctgatcttgagttctgaatccaactattattttctgtgtgacccccaaacaatctcctccctactctggaccctagtttcttcatcaatacaaggatggagctggactaggccatgcctaggggtccttttatctctcacatcctgtcattctttttttttcaaatcatcttttatggtgagactccctcctcccagcagcaatggaacaggggtgcctctctcagcatatttgctaacgcccagccgccaggggaaaaaattgctgactgatgctctggctgcctccgtgttgttaaac

SEQ ID NO: 250727 - DNA, 602 bp, Homo sapiens
gctgtgtgttgtatttcctgctagtgcactgtcattagctctcatgcacagacagtcctactttgtgcaagatcccacttgactctcctgtcagcattaggctgttgaacagtaccctatcctcatgtcccgctgtcctgggcaatttccccagcatctcaaccaacaaaggaaacactgcctacaagatccaaattttcctcatgaataacatttatttaggatacaaagataccaaaagcaagaattctcaaaatgaaaatattttygcttgatgcagtggttgtttaagaaaacagacaaaaattcccatccaaaccaactcagaagtgtttccaaaatactcactggagtccaaaatatgactccagtcataacaccagatgggatggaagtagatgctattttacccactttccaagtagacaaagtaaatttgccttgcgccattgcatgtagactgatagagaagctgctcatgtgtatactgtgtggtccttttaaaagccctattatatgatcctcccaacagcactcagaggaaacaccacaaagggggtggcatatggcacatgggataagatctagctttggaaagaatg

SEQ ID NO: 250728 - DNA, 570 bp, Homo sapiens
tgaaaactgactaatacaagtggggaccctattctgaaacaccttttgaggcctggaatgtcattttaaacattaatgagtattaatacagtagagtccaaggccctggccatcaatcaaatgatcaactgattgactaatatatctatttatacatttcttttttattgatacatatttgtatatatttatggggtacatgtgacattttacacaggtatagaatgtgtaatgaccaagtcaggggatttaggatatccattgccttgagcatttatcatttctttgtgttagaaacatttcaaattttttcttctagctattatttattcagttatatcccatacctccttccatctttctctcctcaccctgcatcccctgtgtgcctggactctttcacatatatacccacaaaggaccacctgcccaacygttctgttataagcctggggactcacttggcagcagagagaggagacacagccttagaaagcccatcagtactaaaaatcagagctggcagataatttataggaacataacttagatgccacagagttgagtgta

SEQ ID NO: 250729 - DNA, 616 bp, Homo sapiens
tataaatattgacaattatttgactctctaacttttgacaaaatataagaactatactaaaagtaaaaagaaaaatcttgtggtccattagtgggtcacacttcaataatgagaacttacctcgtccaatccctaattacattttacagataaagtatctgagacccaaaggggtgaacagacttgcccaggatcacccagggagttagcggcattgacaggtgtaagtattagctcttttaacatttcacaaacttacaaagtttttgtttgtcctaccctgccaatatgccaagtctgcccaagcaggccgtgcagcaactgggcttccatctaccatttttgactgagttttataagaacaagcatcatggaaggagacctgcaaaytgctgccagaagtttataatcagaagactaggaccagtatatgccaagcccttgcagaatacttcagcaccctaggaacttactcttaacaattttccctgactccctgacactgccctctcccttcctcccttgcagctcttagttatcacagctttggctaactgagaatttcacagatgtggacctacctttcttcttacagttagatttttttaaataagat

SEQ ID NO: 250730 - DNA, 582 bp, Homo sapiens
tctaaggtgtttattgtaagcggagctgcactggagaaggagccatttgacaatacctatcttaggacagaggagagaaggggccacacgagttacacaatgaccgcaacagtgtcgttggaacactactctcccaccaaatcactcttctgggcaagacagcaaactgcctacagaagcgtctatggaaagacaagtgtattcagtggaagagcttctaaaatgccccagataatctctcagtctcctttaccataaatggggagcctaaggctatagctctctttccttcccaaagtaatatgtaccatgactggatttgtacgtaatgagcactatactgagggtccttgcagaaaactccaagggccactcaagtcccttctccctgggctctgtttccccacctaatcaaaaacaagttttaattagatgaatgttaatcaactgtcagtcattcttgaccaccttcatgattatttgccacatacgcataccccatttttcrcccttttcttcaagtgaaaccacttgtttttgcctacgcttaaataaatatatttgaaaaaaagaaatctttct

SEQ ID NO: 250731 - DNA, 545 bp, Homo sapiens
tcacattgtactagagttggtctgtgtgaccagtaacatacaacagaagagatgggatgccactgcagcctgggttataaaatacatggcttccatcctacttgcatcagatctcttgctcrgaaagaagctggctgccatgctgtgagcagtcatagggaaggacccacgtggagagaaactgaaggctcctatcaacagccagtgaggactcaggccttccaaaaaccacaagtgagcttggaagtagattctccagccccatttgagccttgagatgactacagtcctggccaacagcttgaccacaaccttgtgagagactctgagccagacccacccagctaaaccctcctggtttcctgaacctcagaaattgtgagagataataaaagcttgttggtttaggcctctaagttttgggctaatttgttacacaacaataaataactaacatatccatctcattagtttattgtgaaaagtaaaggggataatatgcctgaagcatttggtgcctggcacttcgtaaatagtgaataaat

SEQ ID NO: 250732 - DNA, 471 bp, Homo sapiens
caaaaacaatgtccacacagaaaccgcatccaaaggtcaccaacatcaaagaccaaaggtagataaatcaacaaagatgagcaaaagccagcacaaaaaggctgaaaattccaaaaaaacagaatgcctctcctcctccaatggatcacaactcctctgcagcaagggaacaaaactagatggaaagtgagtttgacgarttgacagaagtaggcttcagaaggtaggtaataacaaactcctctgagctaaagaagtatgttctaacccaatgcaaggaagctaagaaatttgataaaaggttgcaggaactgctaactaaaataactagtatcgagaaaaacatagtgacctgatggaactgaaaaacacagcacgagaacttcgtgaagcatatacaagtatcaatagccgaatcgatcaagcagaagtaaggatatcagagattgagatcaacttaatgaaataaag

SEQ ID NO: 250733 - DNA, 614 bp, Homo sapiens
cgccttctaccttgttcccagcccaccccagtgccaccacacacacgattatattgaaattctcggtgggtttaaatgcatgtgtgccacccttaccccctgctgcactgaagcttacaacctctaataatatcagattaattcactggagtataaacagcaatgggcaccattatgaacattaggacgtgttgcatgttaggacaaaaatttttatctaattaaacacagaactattctgatattacctatactcattatggagctatctgacccctgcaatctgtctcacctacacacaccacaacaaacagaatatactgcattgctgagaatattaggagcttgaagcatggarttaaatgtttcccattcatggttttattaaaaagcaaaaccaaaagttcttcgaagtcattcaacttgataaggcaaaactgcttctccagccatttccaagagagaggaaatgcatcgagatgttttgagttaactttctcatcatgagccctcataaagagcactggttagtaagacaataaatgagcatgttttaattagaaaatgtggaatccaagcacttttgcaggaaagaagatgatagcttaaaagag

SEQ ID NO: 250734 - DNA, 614 bp, Homo sapiens
cgccttctaccttgttcccagcccaccccagtgccaccacacacacgattatattgaaattctcggtgggtttaaatgcatgtgtgccacccttaccccctgctgcactgaagcttacaacctctaataatatcagattaattcactggagtataaacagcaatgggcaccattatgaacattaggacgtgttgcatgttaggacaaaaatttttatctaattaaacacagaactattctgatattacctatactcattatggagctatctgacccctgcaatctgtctcacctacacacaccacaacaaacagaatatactgcattgctgagaatattaggagcttgaagcatggagttaaatgtttcccattcatggttttattaaaaagcaaaaccaaaagttcttcraagtcattcaacttgataaggcaaaactgcttctccagccatttccaagagagaggaaatgcatcgagatgttttgagttaactttctcatcatgagccctcataaagagcactggttagtaagacaataaatgagcatgttttaattagaaaatgtggaatccaagcacttttgcaggaaagaagatgatagcttaaaagag

SEQ ID NO: 250735 - DNA, 614 bp, Homo sapiens
cgccttctaccttgttcccagcccaccccagtgccaccacacacacgattatattgaaattctcggtgggtttaaatgcatgtgtgccacccttaccccctgctgcactgaagcttacaacctctaataatatcagattaattcactggagtataaacagcaatgggcaccattatgaacattaggacgtgttgcatgttaggacaaaaatttttatctaattaaacacagaactattctgatattacctatactcattatggagctatctgacccctgcaatctgtctcacctacacacaccacaacaaacagaatatactgcattgctgagaatattaggagcttgaagcatggagttaaatgtttcccattcatggttttattaaaaagcaaaaccaaaagttcttcgaagtcattcaacttgataaggcaaaactgcttctccagccatttccaagagakaggaaatgcatcgagatgttttgagttaactttctcatcatgagccctcataaagagcactggttagtaagacaataaatgagcatgttttaattagaaaatgtggaatccaagcacttttgcaggaaagaagatgatagcttaaaagag

SEQ ID NO: 250736 - DNA, 571 bp, Homo sapiens
gttttaattagaaaatgtggaatccaagcacttttgcaggaaagaagatgatagcttaaaagagatgtcaggagactaataaaagttaaaatgcattaagtggccacagtgaactcaaaagtaaagtcgtgggacgtttgagaagtcaaccagagagggtgatgagtcagaagggggcagaagttagtcagtgaaacttaattttttcgacttcttattggaatcagctgtaaacccccttctgtgctctggcaagtgagataactcaatgtcctgcaatttccccaccctggccgggactgtgtctgcctggaggagaaaatcattacaatcaggcaatatgagctgggctgtgaccaaaytaacattgaatgtggcctgagttggtctgtggcttttgcctgccagccctccatttcagggtctcctaatagcacgatgtttggttatgggccacactccttcctctccactatgaggcccccacatgggcacgtgatccaggcctggccaattaatgtggtctgctcgccaagactccaggcttgaggcttgggtcagttgtgggcat

SEQ ID NO: 250737 - DNA, 571 bp, Homo sapiens
gttttaattagaaaatgtggaatccaagcacttttgcaggaaagaagatgatagcttaaaagagatgtcaggagactaataaaagttaaaatgcattaagtggccacagtgaactcaaaagtaaagtcgtgggacgtttgagaagtcaaccagagagggtgatgagtcagaagggggcagaagttagtcagtgaaacttaattttttcgacttcttattggaatcagctgtaaacccccttctgtgctctggcaagtgagataactcaatgtcctgcaatttccccaccctggccgggactgtgtctgcctggaggagaaaatcattacaatcaggcaatatgagctgggctgtgaccaaattaacattgaatgtggcctgagttggtctgyggcttttgcctgccagccctccatttcagggtctcctaatagcacgatgtttggttatgggccacactccttcctctccactatgaggcccccacatgggcacgtgatccaggcctggccaattaatgtggtctgctcgccaagactccaggcttgaggcttgggtcagttgtgggcat

SEQ ID NO: 250738 - DNA, 539 bp, Homo sapiens
atctcgtgacggtttgcaagtctggggacataagattccaactcacaaaagcaaatraggccaagactaataaatcaaaggtgccttcagaaaagttgcaggacctacttcccctgcctggtaggactgcggatgccttatctggcttctgcgaaaagaaaaggatcatcagggagccagaattagaaaggacttgcgcttcatcaagtttctccctgtctgagccagataaaatatcctctgggaagacttcaggaagtgcctcaagggaatgacagttgatattagttgaatgggtgaaagagcacagacagagatggaaatatttggcttttttcaactgtgaacttaaccccagagtcttcgacatttacacagactcagggcaaagtcttgctcttacaatgcatgaccacagggtggtctcaatttgtaattgggtccccacggtaaaggctgctgagggatggatttttatttttcttttttttaagttctttctacctagagacttagctgtggtaccctgcaataagaag

SEQ ID NO: 250739 - DNA, 629 bp, Homo sapiens
tgtttctttcttaatgcaccttgtaatttgcacacgtgccacaacactttatttattttcttattaatgggttcgagtgtgtttaacaccacaagccataaattacagagcagtggattagactaggcttgctttattttcctgccaattatcagaaagtgatgtgggggatgaggtgcccctcctaaccagctttttctctgccacctcccttgcctccatccaacaaccaacccccttgtttccatctgccaagaaaaaaaaaagacacagcctggtctctcattggtgagcttgcctattgagcagctcagttattgagattaataagctgccagtttccaaggaagactaagaaaactgcaaaattaaagtgcactgcaacatgaaatgctgctggtggccaggcgagatcgtggtgtcaaaaaggcaaggtaaagctataaaataaggctgagcttgaaaggctaayctaaaggtctcattaatttccatgttgcctgtgatgagaatttagagggggcataatgttttgcaatacagagaaatcaagctgcctattgatttgaaagtgcttcgatgcatttggttcacccagaatgaatcctacctttaaacctcacttgaaa

SEQ ID NO: 250740 - DNA, 607 bp, Homo sapiens
gtaggtaaagcttagtgccaagcaaaaagtatttgacaaagaaaagttagtattcacaggcctatatgattgtgtgaaataaatttaacaaatttctggagagaattttttttctttttttttaagatggaatctcacgctatcacccaggatggagcgcagkggtgtgatcatagcttactgcagcctccacatcctgggctcaagagattcttccatctcaacctcccagattactgggattataggtatgaaccactgcatctggcctggagagacattttttaaagagaaaaatcaattgctgagggctttggatatactacatatgctattatctgtaaatggatgattttctgtgttatacatattattttagaatcaaaataagtctggccaataactgcactcaattctcttgcctcataaatgtaacatgtccaaaactgaacttttgttttctgccacaaaaacctgttccttcttcagcacatgacattgctattcacccagacatctaagtcaaaaacttgaagaatcctaaccttcatcttcaaatcccagcaatcattaatttctactgatcctaccttcaaactatacctca

SEQ ID NO: 250741 - DNA, 567 bp, Homo sapiens
taggttctgtcactgagctactttctactgttttagacaagagaagttgactttagaaactcccaaagaagcagccgaccgggaagatttctcaccttgtcactttcagcagaggaaggagtagataggtgatwttgaacaagaattgcaagtagactttgtttcaaaaccttctgtgaataggctgggaggaaggtggagggtagagggattctgtaacacactacttaagaaaagacagtacagactgcttgcagttagttctgccttatgtttgattttcgttggattatattatggtttatacatgaatagactgcttttggtagtacaaatttatatgcattgttcttttattttacattgatgcagaacttcccttatatgcttgtttgtcttttgttaaattccaaacagtcctattttctggttatgcctccttaatcagcccctccaatgtactcatcatagaaaaaaaaaagcagcatagttcagagaagatctaacatgcttcattaagactgatggggacatcaagagagcaatgcagagaggaaaggacccact

SEQ ID NO: 250742 - DNA, 568 bp, Homo sapiens
tcacccaggaagcacaaggggtcagggaactccctcctctagccaagggaagctgtgagggactgtgctgtgaggaatggtgcattccggcccagatactgtgcttttcccactgtcttaacaacccacagaccaggagattcccttgggtgcctacaccaccagggccctgggtttcaagcacaaaactgggtggccgtttgggcagacactgagttagctgcaggagtttttttattaataccacagaggtgactggaacgctagtaagacagaaccgttcactcccctggaaagggggctgaagcaagggagccaagtggtttagctcagcagatcccaacccatggagcccagcaagctaagatccactggcttgaaattcttgctgccagcacagcagtctgaagttgacctgrgatgctccagcttggtgggagggagggggggtccactattactgaggcttgagtaagtagttttcccctcacagtgtaaacaaagccactgggaagttcagactgggcagagcccaccacagctcagcaaacctgctgtagccagactg

SEQ ID NO: 250743 - DNA, 631 bp, Homo sapiens
tgtgttcataagttctcatcatttagctccagcttataagtgagaacatgtgatatttggctttctgttcctgcattagtttgccaaggataatggccttcagctccatgcatgtccctgcaaaagacgtgatcttgtacttytcatggcggcatagtattccatggtgtatatgtaccacattttaaaaatccaatctgtcattaatgggcatttaggttgattccatgtctttggtattgtgaatagtgctgcgatgaacatttatgtgcgtgcctctttatgataaaatgatttatagtcctctggttatatacccagtaatgggattgctggcttgaatggtatttctgcttttaactctttgaggaatccccatattgctttccatgatggttgaactaatttacactcccaccagcagtgtcttaagcatataatttgaaacgttttgacaaatacatatacccatgtaactatcggctttctcaggatagagaatatttccaccactccagaaagttccctcgtgcccctttccaggtaatcctcaaccctctggaggtcacacccatgatttctatcatcataagttagttttacatgttttgaacttatataaatggaatga

SEQ ID NO: 250744 - DNA, 631 bp, Homo sapiens
tgtgttcataagttctcatcatttagctccagcttataagtgagaacatgtgatatttggctttctgttcctgcattagtttgccaaggataatggccttcagctccatgcatgtccctgcaaaagacgtgatcttgtacttttcatggcggcatagtattccatggtgtatatgtaccacattttaaaaatccaatctgtcattaatgggcatttaggttgattccatgtctttggtattgtgaatagtgctgcgatgaacatttatgtgcgtgcctctttatgataaaatgatttatagtcctctggttatatacccagtaatgggattgctggcttgaatggtawttctgcttttaactctttgaggaatccccatattgctttccatgatggttgaactaatttacactcccaccagcagtgtcttaagcatataatttgaaacgttttgacaaatacatatacccatgtaactatcggctttctcaggatagagaatatttccaccactccagaaagttccctcgtgcccctttccaggtaatcctcaaccctctggaggtcacacccatgatttctatcatcataagttagttttacatgttttgaacttatataaatggaatga

SEQ ID NO: 250745 - DNA, 419 bp, Homo sapiens
ggagtcttttcatttctggaacccccgatcacttttgtgaccttgtagatccaaaaatttcttcagcctgatggggccaggatgctcccctcgacattctgtgaaggactaamtcttctaaaaatatttatctatcatttggccaccagatattgcaaaggtttcagatgatcctgagaaatgagaaaattgctaaagactggcctaaacggtgagcgagcctgtctgacactgtctcttggtcccagtttctctatgtgtaaaatggagagatgacacttttggtctctgaaggtctttcatgtctaaattataaaagaaaaccacagagtgatttgaagatataaagtttttccctcttattttctttaaaatatgaggtgattgatttttatgcagctcaatacgaagccagcagg

SEQ ID NO: 250746 - DNA, 560 bp, Homo sapiens
ctgggagtcagggcctggttcaggtcaagtgcaccttcacactaaagttctactttcctttacaataccaccccaaccactgtcctcagccagacaaaattgttttctctgtgtttctatagcaattatgcttttctgcagcccacagcagatgttgttaggtattgtacttgattttgcatgccttyctaagtctctgtctctggacactgtgctccctgaggtcaggcagagatgcagattcatctctaggttctctaagctttgcacctggcaaatgtaagtgatctataaatgcttattgaactggatcaaactctacaaatccatctggtggggtattgtaacaaaacccctgtgatgacagggtaaagtgagagccttaacaaagatttactttgaaaatctacatgtgtaaggaaaatggatgtgctgcggtctaggccgagggagacatcctgtcacgcataactcagcaagtttggagcacaggcgcacaactccgctcattatgtaattatgccatgtgaggcgcattaggtaaccactcatgtgagctt

SEQ ID NO: 250747 - DNA, 560 bp, Homo sapiens
ctgggagtcagggcctggttcaggtcaagtgcaccttcacactaaagttctactttcctttacaataccaccccaaccactgtcctcagccagacaaaattgttttctctgtgtttctatagcaattatgcttttctgcagcccacagcagatgttgttaggtattgtacttgattttgcatgccttcctaagtctctgtctctggacactgtgctccctgaggtcaggcagagatgcagattcatctctaggttctctaagctttgcacctggcaaatgtaagtgatctataaatgcttattgaactggatcaaactctacaaatccatctggtggggtattgtaacaaaacccctgtgatgacagggtaaagtgagagccttaacaaagatttactttgaaaatctacatgtgtaaggaaaatggatgtgctgyggtctaggccgagggagacatcctgtcacgcataactcagcaagtttggagcacaggcgcacaactccgctcattatgtaattatgccatgtgaggcgcattaggtaaccactcatgtgagctt

SEQ ID NO: 250748 - DNA, 560 bp, Homo sapiens
ctgggagtcagggcctggttcaggtcaagtgcaccttcacactaaagttctactttcctttacaataccaccccaaccactgtcctcagccagacaaaattgttttctctgtgtttctatagcaattatgcttttctgcagcccacagcagatgttgttaggtattgtacttgattttgcatgccttcctaagtctctgtctctggacactgtgctccctgaggtcaggcagagatgcagattcatctctaggttctctaagctttgcacctggcaaatgtaagtgatctataaatgcttattgaactggatcaaactctacaaatccatctggtggggtattgtaacaaaacccctgtgatgacagggtaaagtgagagccttaacaaagatttactttgaaaatctacatgtgtaaggaaaatggatgtgctgcggtctaggccgagggagacatcctgtcaygcataactcagcaagtttggagcacaggcgcacaactccgctcattatgtaattatgccatgtgaggcgcattaggtaaccactcatgtgagctt

SEQ ID NO: 250749 - DNA, 560 bp, Homo sapiens
ctgggagtcagggcctggttcaggtcaagtgcaccttcacactaaagttctactttcctttacaataccaccccaaccactgtcctcagccagacaaaattgttttctctgtgtttctatagcaattatgcttttctgcagcccacagcagatgttgttaggtattgtacttgattttgcatgccttcctaagtctctgtctctggacactgtgctccctgaggtcaggcagagatgcagattcatctctaggttctctaagctttgcacctggcaaatgtaagtgatctataaatgcttattgaactggatcaaactctacaaatccatctggtggggtattgtaacaaaacccctgtgatgacagggtaaagtgagagccttaacaaagatttactttgaaaatctacatgtgtaaggaaaatggatgtgctgcggtctaggccgagggagacatcctgtcacgcataactcagcaagtttggagcacaggcgcacaactccgctcattatgtaattatgccatgtgaggygcattaggtaaccactcatgtgagctt

SEQ ID NO: 250750 - DNA, 391 bp, Homo sapiens
ctgtgctaccctcagccagatccatatttaccaaggctttcctctgacacgttcaagaagatccccaccaccattctccttgacttgataaaattcctgtttttggcagcaggtgtaattttactccgtaaacwattgtgtttacgttgtactgtagatgctcctagaaatgactgagcaccagagagaaagaagatgaaggtgtctggctgctagatgcacatcccagctttgagcccataacctctgtctcagttcttccatctgtaaaaggggactgccactaatgctacctagctcatatggtgttgtgaagataaaacaagataatgcacatggaacaatcagtccctgttacattgtggccctcagatagtgctggctattattc

SEQ ID NO: 250751 - DNA, 591 bp, Homo sapiens
tgttaagtcttcccattcagctttagggtagtcttttctgggctaccagctttattcctccctctcacaacatgctcttttctttggcttttaaagataaatggatagagtctcttaggatgctggggacagggctgtgaacagatgggctaaaactgtagcctcatcatccagtggaaacataagaactggcttaatctaagtcagaggattttcctaactgcccatgaagcttgaacttctgttttttcacgaagccagtgatgggcatgtggttcttccttgttctgtagaagccgatggaaactataattctctctagctagscatttggcctcctctttttatattcccaggaatatataccatatatactacagtgacacaaaggaatgcttctcctgtcttttctgtcttgtgcatgcttgctttttcttatggtacttactttcccctctgcacaaaaaatactctctgtcattagggtctgcaccccacttggcctatcatatgaatgacaaattaggcagcactcgacaccattatctatacaacacaaagaattttttctatgtttctgcaattcatacc

SEQ ID NO: 250752 - DNA, 673 bp, Homo sapiens
ccttcccttctctttcactgctccactcccaagtccccactaccactagccatggcctcagcatatctatgtcctggtctagaccagaccctgttccactgggattaagagactctcccaagtgcaggcagttcataaatccacagaatttgattgggaactaacattgcagggtaatctaaaatatcactactggatctttcttcacactatsaagttaggcaaaataaggcatgggaagggtctggtataaaataattctcccttatgtagatttttttacaaatcaggattgaaaagaagacgttcatgaatgccctcacttgattaaaaaataaatagacttgctctctggcttcaaggatcattccaacgacaatacatttgaagacaaaggcgatttggaacccccaacttgctatggtctctggagaaccaacagccacattcagtctttccatctcttacatcattttcagtagcaagggttgtagctgaattacgtggagatcaattagacacaacagaagataaaccacctctagtgcaaagtgattttgtagcataagttgtttctcgaggccctccttcatactatacttgaaatatagattgatgttcgacattagacacattactctcgtctattaggcaagagtccgctgtgtctata

SEQ ID NO: 250753 - DNA, 673 bp, Homo sapiens
ccttcccttctctttcactgctccactcccaagtccccactaccactagccatggcctcagcatatctatgtcctggtctagaccagaccctgttccactgggattaagagactctcccaagtgcaggcagttcataaatccacagaatttgattgggaactaacattgcagggtaatctaaaatatcactactggatctttcttcacactatgaagttaggcaaaataaggcatgggaagggtctggtataaaataattctcccttatgtagatttttttacaaatcaggattgaaaagaagacgttcatgaatgccctcacttgattaaaaaataaatagacttgctctctggcttcaaggatcattccaacgacaatacatttgaagacaaaggcgatttggaacccccaacttgctatggtctctggagaaccaacagccacattcagtctttccatctcttacatcattttcagtagcaagggttgtagctgaattacgtggagatcaattagacacaacagaagataaaccacctctagtgcaaagtgattttgtagcataagttgtttctcgaggccctccttcatacyatacttgaaatatagattgatgttcgacattagacacattactctcgtctattaggcaagagtccgctgtgtctata

SEQ ID NO: 250754 - DNA, 673 bp, Homo sapiens
ccttcccttctctttcactgctccactcccaagtccccactaccactagccatggcctcagcatatctatgtcctggtctagaccagaccctgttccactgggattaagagactctcccaagtgcaggcagttcataaatccacagaatttgattgggaactaacattgcagggtaatctaaaatatcactactggatctttcttcacactatgaagttaggcaaaataaggcatgggaagggtctggtataaaataattctcccttatgtagatttttttacaaatcaggattgaaaagaagacgttcatgaatgccctcacttgattaaaaaataaatagacttgctctctggcttcaaggatcattccaacgacaatacatttgaagacaaaggcgatttggaacccccaacttgctatggtctctggagaaccaacagccacattcagtctttccatctcttacatcattttcagtagcaagggttgtagctgaattacgtggagatcaattagacacaacagaagataaaccacctctagtgcaaagtgattttgtagcataagttgtttctcgaggccctccttcatactatacttgaaatatagattgatgttcgacattagacacattactctygtctattaggcaagagtccgctgtgtctata

SEQ ID NO: 250755 - DNA, 569 bp, Homo sapiens
gtatgttgcgtattgttttagctcaggggtgacagtctgagtcccatgtcatgccgaactcttgtgttgactctcgccttagaatttctaagattatctggagttaaacaacagagtcacacatgagaagcatctttcttccttgatgtggggtagccctgcaagaacttcgatgccttttaaggaaactagatctattccaatgttaacctaggacaagaaagcaatgatgtcattccatgacacagcatcattacaatctgttggaaaacctcaacaacgaaggcatcagaaactgagtaacttctaaaaacaggtgataattttccagaggaacctgggataatcaaagattgaggacaaatgagtactaggcaaaatggccaggcaattccactctatccatggattggagcactgtttcaagcagtctagttaaaagctatgctttcaygatgaagtgtcctaaaattcctaaaattttccttggaaaaatttatcctatagaaagtatttaaagagaaaagtgacttgctttttctactttttggtttgggccagaaagtcag

SEQ ID NO: 250756 - DNA, 589 bp, Homo sapiens
tactctgctactttcaattaaagtgggcacattcgctggttgacatgctaagaaagaggttcctttagattaatgtttggaagcacagtcaacttgaattcactttttcttttcaatgccataaaaattttctctgccacttattaacattgagaaatttgatcacaacttacacttggtttagatsaatgcttataaaaagcatacaatcttttataagtgctaaaaatgaactaagggcaatgacatatcaagaaagaaagcagcatgggggtagttttgttaagggtggtttaaaagcctgtattgtactactgccacgtaagtagaggaaggctgctgtcaaacacgttgctgaaatgagaattgtttaaaatacaaaaagcaagacaactccatgtgagtatctgaaagtcccaaggtcacttacaaaggagaaccaggtggtgaggcactcgcgagacaaacatcatagccatattttggcactagcgaccctccgaggggaggcatactaaatattttcaaagacagattttcttctgcctctggattaatgcaaaacttcaagaaatggaatattaagagt

SEQ ID NO: 250757 - DNA, 611 bp, Homo sapiens
actcgaatagcagcgaataaacctgaatcttattttgagatatagtttcttttagattgaagtactttttaaaaataaatataagctctggacaagcagagtataagattggaaactcttccaatactatccgcttactaataaacatgtgcagagagtggaacagaccagaggagttataattctttgactgtacctggtagcaaagatttgtgatatcatcatgtaaaaaaatttaataataatacctcccaagaatctgatgcaagaaaacactgcaaaccaaagataggtggagagcatgccatgaagaactgttaacaacatagagccacaaaagcaagaaagaaaataaaaatgaccgggagagaatgttcaagagtcttcagagccaaaaaataaagatgttaatctcwtgataaacataacatgttgagggagaaaaagcacgtaaaatctcattcctcagaactgaaatgattcagttgggagaaataaatttttaaagattcaaaagaaaaaggaccacagaaataaagtgaaaggcaatccaatacaacaataaatgacaaagtgggcagagaaatatggtattgacaagagagattgat

SEQ ID NO: 250758 - DNA, 610 bp, Homo sapiens
tgtctattattgcctcctgcaaatctgtagcaatgtgatgcaaaacggcatttttaaagaaattctcttttggaatgcaaatgattcctcctgcaattttgaatattttagccagcatgtaccatacagtagttctggaatcactggcatctctcatgctgtcaaaactgagtcaaatgcattgtaatcctggagaacgataaccttaaacagcaatgcaacgttaaaatgcatcctaaaaaaaaatccctataattgcgatgaacattagagagaaaccggcagtccttctgcagggaaataacagtctgctctagcaatctttcccctcccccctgaaactcatgcaactaatgatgacctcccgaagtgccgaatttaaatgttccagcattcatctgaggatgaaggaggaaaaaaaaatacatagaaaaccatgaaacaagttgtaaactgcacaaacgcaaggagagaaagagaactgcagctgattcaggagcgattgcagaatgaggagcaacagaaaggaawcaagaaagaaagaaaaggggaaaaaagccttaagcattaaagagtaagaagtgaaaaacatttaccagcagctcggtca

SEQ ID NO: 250759 - DNA, 437 bp, Homo sapiens
tgtgcacactctcctgggggaactaaagttggaaatacacatacccagaaattttactgttaggtatcagcttgaaccatataaaattgccaatatttgccattacaaatgacaagtttatacggtccgcactaacatatccagttgaaacgcatacagatacatcgaaagtgtataaaatattcattgcaatattatttgtaatggctccaaaccagaggcatcataaatgataatcagctgtagagtgaataaataaattgtggtaaattcacccaatgcgatwcagtatagaaatggaaagaagtgaactacagctatgcacaatgaaatgaatataaaggagggtgctttattatttcattagtaaaaaaatgaaaacaggcaaaaatcatagtgtttagataagtctaggtgtgtaaacaatagggaaaagc

SEQ ID NO: 250760 - DNA, 579 bp, Homo sapiens
tgacctaaacattaaagatgacataaacagaataagtgttcttgatatacttatgtatttaataattttctcagctgacatttgtttctaatgtcatgtgcactggctgaattatgttttccaaaaattcatatctacccagatgctctaaatgtgtgaagttatttggaaatagggtcttcctagatgtaatccagttaatgtgaggtcatgctggatcaaagccctcaattcaatatgactaacgttacattgttatcttacacaaagagggcaatctggacatagagacatagatgtgcaggggatatggccatttggagatggagacagagattggagtgttgcacctactagctatggaaacccaaagactacaggcaaccactataagctagaagataccatcaggattcttctccagagacttcagaggaaacatggccctgccaatactttaatcttagacttctagcctccagatctatgaaagaatacatttctaggttttttcaaagccacccactttgtagtaatttgckacaggagcccttgaaaattaatatactgtgtaaccta

SEQ ID NO: 250761 - DNA, 493 bp, Homo sapiens
acttttttctttttctaaatcttaaaaggagatgcctgactgtctgtctcagtaaacactttgtgtatccctgtgaaggcctatgaaagagctgctgataaagttttatgtcttctagttctttgtagatcccactatggctgagattgactgagaaatccacaatgttgaaaacgagaacactaagctccttctctgagacactgactctggccagtccaacttactcagagataagatgagaccaaaacacgtaatgaatgaacaagaaatgatcctttggaattttagttatttgagcagcttagtttagagaattccttcttccttttcagacaagcagttcacacgccctaagtggaaaacctggaaccagagtgaagactagataaggcagcttttctcctgagggagggaggagggggcatratgaggccatgtagttgacattggtattgtgtagctgagctggcacagaatacagcagagtatc

SEQ ID NO: 250762 - DNA, 579 bp, Homo sapiens
ccagcaacaattggtttctgatgctgtcacaaagggcagtgtgtaggacttttttctttttctaaatcttaaaaggagatgcctgactgtctgtctcagtaaacactttgtgtatccctgtgaaggcctatgaaagagctgctgataaagttttatgtcttctagttctttgtagatcccactatggctgagattgactgagaaatccacaatgttgaaaacgagaacactaagctccttctctgagacactgactctggccagtccaacttactcagagataagatgagaccaaaacacgtaatgaatgaacaagaaatgatcctttggaattttagttatttgagcagcttagtttagagaattccttcttccttttcagacaagcagttcacacgccctaagtggaaaacctggaaccagagtgaagactagataaggcagcttttctcctgagggagggaggagggggcatgatgaggccatgtagttgacattggtattgtgtagctgagctgrcacagaatacagcagagtatccccctgactattcctatttcaaagatatataatactttc

SEQ ID NO: 250763 - DNA, 486 bp, Homo sapiens
aacaaaagcaaaagcaacaacaaattgtggacattgatactcattttcatgatgtggagcttacaatgagatgcaaacacacctccttaatattccaagaattactactacaggatgtgtgtgagtgtatgtgtgtgaatttcctgagtttaaagaatttatgccttttcctgagaagtatgcttagatttataaacattttaaatatttaagcacaatgtaaaaaaagaaatctcacagcaatcacagaacaagacacctacagatgatctgtattaagatatttcaaataatacattctcaaatttcattccatttctattatgttgattcgcctcttcaggtgctgaaatattctggatgatggagtccacactctggctatagaagcagacwttcatacattaattctagcatccattaaaataagttttcactgcctgccacttccaattaccccctttctgagtcaaatcaacttgcact

SEQ ID NO: 250764 - DNA, 600 bp, Homo sapiens
tgctcatcctgcaaagcgagacttggatggacatcaataaatagggctttaaaggcttaatttttctcctctacctttgtctactcaatgttttgttttcccttttttcttaattttaaaatacgtaattgacaagtaaagattgcatatattcaagctgtacaacataatgagttgatataggaatacaatggttaataattatcataatcaaattaattaacacatccatcacyaaccatgctgtacattaggtccccaaaacttttccatctcatacctgaatgtttgtaccctttgatcaacatgtcttcatttccttcgctctccaggcctgggaatcaccattctactctctgtttttatgagttcaactttttatgattctacatattaatgcaatcatgtggcatttgtctttctttttttttcaatttttctaaatttttattatggatgattccaaacatataatcaagaaaataacttacataagtcatgttctcattacccagcttgaagtattatcacttcatgccaattacatttatctgtttctgtgctgttagtacagtagcccttcaccacttattaattgat

SEQ ID NO: 250765 - DNA, 676 bp, Homo sapiens
tgttttagtctagttcattgcaggatgaacttttccctaatctccactacacctgcttcacgttcttatatgacctccctagccttatttgaaagtgtgatcccagacttactctagccctctcagtaattcaatttagtaagtattgtttggaatacttactttgtaccaacggtaatggtcagctttagggatacttaagcaacaagacacagtccctgcccacatgtttcccatcataaaggaaacacgaatttgttgaacttatagttagaggattgaaactgggggagggagttagcagaagattccacaaggccatctaaataaagaacactgagggccagagacagtaacatgggattagaacctgcgctcatctctgaggttagtgttattttcattctgtttgtgggctttgagaggggcaggaacccctttgagaaggaccataaggcaaaggggtgtcagttctcttggcagctcatgctttcgaaggtcttctcaccaccttgcaattaatacagattaattaattaactgtatyttctgggatcttttgaagagtaaaatcttactcttctctttgtactccacatatctgcctcttacttcctccaaaaccatcatcacttgaaacagcagtgtaaagctatacatgttcacttgatttacc

SEQ ID NO: 250766 - DNA, 638 bp, Homo sapiens
ttgacaggtttgcttcaactagctttgttaagcaggagcatatgttttaaaatggcaaactatgtccccctctttttttatgtgagaactgtgggtcaatttaacgagacaggtttttaaacaatctgtgatatcaaagaagggttagtaggctatgctctttgcaaagcaactttagcttttaacttatttaatcactgagatattctcctgggtggtgggagcaagggagagttggatgtgaaatatttcacagtggaataaggctttgttctatttgaaatacaaattctgaattctcwtatggattagaaaacataacatcatcgccaaaaaaagatcatgtaatattagcattaggaatcatgcccagagagaaaatggggacaacaaattaagaaatgtctttatctttctttctatatgcaaaatgtaagtaaacatgtttcattatttctccaattaaaacgataataggtactgacccacagaagttggttgcagataccaacaagatgtaatggaaaattttgcttttctagaatgtaaaaggcaagaaatgaaaacagaccaccaaaccaggagactcagcattcactgatctaagaagggactgactctaagaagggactgactgc

SEQ ID NO: 250767 - DNA, 587 bp, Homo sapiens
tgtgtggtttcattgtgttcagaatatttcttgtttgaactgttagtatgagttatattgtagaatgatggcttttgtgaaatgaaataagaagcctgggaacttgggacctactgtcaggcaaacttgaatttgagcattgatttgccagttctgaggcgtaattgtgtagtgacaacctgcctctcagttttcttatccataaagcaaagacatgattttacctttttcatagggtagttgtgaaggcaaaatgaaataaccccaaagaagactttagcacagtacaagctacgtggtaagtggtctataaagagtagatgctattgttttttattatcatcrttccagatgattctgcgtatatctcacaaatgctattaccagatctaaaacttcaccaaaattagtaaatattccttaagtttagatattttacattaaggataactaattaaaaatttggctttaatcctgaaaacaagggataaacatgaggtgttcatttagttcacattcaacatatatttgctgaagacatttgggtaatcgcttcttaaaaattgatcttcatttaattctcacca

SEQ ID NO: 250768 - DNA, 536 bp, Homo sapiens
tcccaacgtttcctggactcactctgcattgaggtgggcctgacttagactagcagacaaagccctcagaagagggattttagtgagaagctaaggattacgaaggggtaaggaatggttggaagagccttggagagagacaaggggtgggcaggggttcaggactcaagaggagactcagggagccctgtcttcactacatcaacaactctggtgatagagaatgggacataaatgaaatgagcgatagaagctgctaacacatttccaccaccctgagactcaatgtagattggagtttagtcatgaacctgaagtgcagaactaatagaagkttatccagaaattttgggataaatcagcagtgagggaaggaaggagtgtacaaataggaagaagaaattgactctaatgataataatatatgtgtatagctgataaagaaaacagtttgaaaattgctagtctcttgtggcggactgaggaacctggtctcccccattggtgtccctggagaagaccagagaaagaaggag

SEQ ID NO: 250769 - DNA, 629 bp, Homo sapiens
gattccagtgacacatttagacaaagtcacctctaatattttttttttccaatcttggatgtacctatagcagtgttgctcatggctctgcagatatgggtcttcacgaagacaaattaattatctacctcactgcagcagactgaggttcaggagtctcaggcttcaggtctcaactctgaggagccatatatgtgatatcagaaatgtcaacctctgtcaaaaaataaggatgtgatcatcaagatctcatccagtaacctcaaaattacatagctctaagatactcattgtttccttgtctgcatttcatcagtctcattacctcctttcagttaaacctactttcatttatttctactacaaatgagtggtaattaatgtacaatttatatacacttacaaagagtatacatcttactgttatttaaaacctattcgctttaacaagtttccytttggaaatatgaaaaatgtctatggaaagaaatattataaaataattcctcgtgttagcaacaatttaatgtgcttcggatgtgatttctgtcctaaaaatgatgcatctataaagatttatcgtatatttcaaaatagcaagaagacctaaaatgttcttgacacaagga

SEQ ID NO: 250770 - DNA, 622 bp, Homo sapiens
gtttttgaataaataaactctactgattaacatttacacaacagaaaaaattggtctttttatctgctatgtgttccaagtaaaccataaacatcttcagtaggtatgtagttaaaaatctatcagattagtaactgataaaaaaaaaggatctgactcaaaccatgtcaaacatatatacacagatagaaagttattctgatggttctttatttagatggaagctttgccattttgcaatatgtataggagtgtttgaaggtttatttagtatccaacctacagaagaataggtcttctcagtttattattcatgcaaaagatttttatttataccagaaaaaatatcttactcaagaaccaactttatttattaatttgctgacataccaactttagttctcattccttttctgctctcaacctcaagtttctccaacattagagggcacaggggtggatatgtggttttaggaaataaaaggagcaaggatgaggtgatttaaattgaaaacagaatttagagccaatgacatacacatgaataggrtcatgtgaaggcaacagtaaactaatgttttgtgactttttcagatgtagaaacttacccaaatttaagcaa

SEQ ID NO: 250771 - DNA, 581 bp, Homo sapiens
agaaaagaatactagtagctactatttgctaagtgccctgtgccggttaacttacataacttatcatgcttaatctctatagcagccatccgcagtaggtatcgtgacccccatctacagatgaggaaacagaagttcatggaggggtaatgacttgcccaaggccctacagctagtcagcggcaaagctgggtaaccctgggctccatctggatcctggaactccctttgctttccctttcctccctcccttccgtctgtcttgctctgagcgccactctgattgcagtggtgcaatcatagctactgtaacctctaactcctgggctcaagtgatcctgcggcctcagcctccggagtagccgagaytacaggcgcgtgccaccacgcccagctaattaaaatttttttcgtagagacagggtctctgtgctatgttgcccaggcttgtcttgaattcctggcctcaagtgatcttcccgccttggcctcccaaagtgctgggattacaggtgtgacccacctcgcccggcatgacttccttttctatttccagcccaggcctcccaagttcaagaccc

SEQ ID NO: 250772 - DNA, 530 bp, Homo sapiens
gtattccataatgtggtccaaaacttacttttcattcattcaataaatagcacatgtccactgtgtgctagacatgctaatcaccatcttcccttcaagtcatctctgttcaatgtgccagcatttactgggcacttattctatgccgaacactgtgctaggcactctgcatgtattacttaatttaaccttcacagcaaacctttaaggtaggaaccattacccccattttacagataaggacactgagaataatagtggttaactaacttggccaatatgatcctgctgatgaatgacagaaccayggattatgtctttctgacttcaaagccaatgctcttcataacctctactgtcccactagtgacttctctattcatgttccctgattttctgcatctgtgcctcttctttccttgaacttgactatcaaagctattctcagctcactcttacaacactcatatctactagtttatatttccattattcattaattaataagtccctcgagagcagactacttg

SEQ ID NO: 250773 - DNA, 530 bp, Homo sapiens
gtattccataatgtggtccaaaacttacttttcattcattcaataaatagcacatgtccactgtgtgctagacatgctaatcaccatcttcccttcaagtcatctctgttcaatgtgccagcatttactgggcacttattctatgccgaacactgtgctaggcactctgcatgtattacttaatttaaccttcacagcaaacctttaaggtaggaaccattacccccattttacagataaggacactgagaataatagtggttaactaacttggccaatatgatcctgctgatgaatgacagaaccacggattatgtctttctgacttcaaagccaatgctcttcataacctctactgtcccactagtgacttctctattcatgttccctgattttctgcatctrtgcctcttctttccttgaacttgactatcaaagctattctcagctcactcttacaacactcatatctactagtttatatttccattattcattaattaataagtccctcgagagcagactacttg

SEQ ID NO: 250774 - DNA, 584 bp, Homo sapiens
cttacatgattgttacgaaatttctccttgcattaaagctatgatatgtcacacactgtttcaggatgtcacatcttcttgtgaattttacttttataagtgtaaatgagctattagtcctatttagcatttcatgatttgaattcttctttatctaaaatacaattgcaagcccttctttctatggtttctatttgttcttcccagctttttatagttggacttgtttcttcactaggtcattgtacattataggtaaccttttcaatataaggatttaaccccttaaaattaactcttagccaggcatggtagcactgtctatagtcccagctactcaggatgctgaggcaggaggacagcttgagcccaggagttcaaatccagcctgggcaaaatagcaacaccatatctctaaaaaatacatgtaaaaaaagtaatttttatgacaacatgtattgtcatgtacttgtcataattttttctgattctttgctattttcttcatttccttcattgttttctacacacactttttttctcccagtaatttggaagrtgctttgttaaaattacatctgtag

SEQ ID NO: 250775 - DNA, 565 bp, Homo sapiens
gcatcaacatcaacaaaaacgatgtcaacacaaaaaccccatccaaaggtcaccaaagtcaaagaccaaatgtagataatacacaaagatgaggaaaaacaagcacaaaaaggctgaaaattctaaaaccagaacacctcttctcctccaaaggatcacaactcatcaccagcaaggggacaaaacaggacagagaatgaatttgacaaattgactgaagtaggcttcagaaggcgggtaataacaaactcctcagagctaaagaagcatgttttaacccaaagcaaggaagctaagaacyttgaaaaaagattacaggaattgctaagtagaataattcgtttagagaagaacataaatgatctgaaggagctgaaaaactcagcacaagaacttcgtgaagcatacacaagtaccaatagcagaatcaatcaagtggaagaaaagatatcggagactaaagatcaacttaatgaaatgaatcatgaagagaagagaaaaaagaatgaaaaagaatgaacaagccctccaagaaatatgggactatgtgaaaagaccaaaccta

SEQ ID NO: 250776 - DNA, 531 bp, Homo sapiens
taataagttctccaaactgaaaattccaaagttttaaactatgagctttgtttatgggtgtatacatatgtacagctatagatatatatttatatatacacattaagatagatgtacacacatatgtacatatatatacataattttatacataaacacaaaacacacataaatacacacactcctcacacacacacactcacacatgcatgcacgtatttcggygaagtttcttttctaaagctgcctctctttttcccaacttataacagtaacaatgagatgctgagggcagttaatcacatttgggcttttgacctgtcttgaataaaaacctgagactgtttaacaagccaaaagatgaaaatagcagatacctagatacactcatgcataaacacatataaacacgctcatacacctattttacttctcctgaagcttgccctagtgacctgtgtgcagcacagcaagcaattgcaggtgtcattttctccagacgtggaagctagcttatcacggtgagtttct

SEQ ID NO: 250777 - DNA, 542 bp, Homo sapiens
ctctttttcccaacttataacagtaacaatgagatgctgagggcagttaatcacatttgggcttttgacctgtcttgaataaaaacctgagactgtttaacaagccaaaagatgaaaatagcagatacctagatacactcatgcataaacacatataaacacgctcatacacctattttacttctcctgaagcttgccctagtgacctgtgtgcagcacagcaagcaattgcaggtgtcattttctccagacgtggaagctagcttatcacggtgagtttcttagggtatcagtackcaccagatacttgttctacaacattattgcccccttgaaaatttttgtggcataaagtacaagctgtagcaaatctgccctttctttacctcctaggcagatacaagtgacaaacaaacaaaaaaaactgatgacttttaggaaggatgtcaggctgggatctcaccttgtttagcataggagagaggagaaacaggcaaagttcagagaacagagagaacagattgtacaaagagatggttaag

SEQ ID NO: 250778 - DNA, 581 bp, Homo sapiens
agagaacagagagaacagattgtacaaagagatggttaagccagcagcctttagagtctaataaactcagaggaaaatctggctctgccactttttagctatgagcctttatgtgctactttatctttctgagcctcactgacctcatctgtaaagagaggatagtggtagggcttacttcattggattatgataggattaaatgagataaggcatgaaaagtactcagtagagtttcaggtacataataataaatctgtaatatatattatttataactggatatttaaaccataattctagaatactgatcagaactacatatagaaataatgttagtctaggawttgaatgaacttaattcaagttctttactccaaatttgattgcttagacattataatgctcacgacagtgacctatatatagtatgtacccaacaaatatttgctggatatatgcataaacaaacaaataaatgaccgatttaaactttctgggtccttagtttcccttgtataaaatggaattagaatgaccctaccataattccatccctgggatattggtatgatacatta

SEQ ID NO: 250779 - DNA, 594 bp, Homo sapiens
gtcaggggtcagaggaacactgccacgaacactccttttgcagtgtttaatttcctgtttaaagaatgtagtagaaatattgggttgactatcatcttaattctttactcttayaagggtatctctctatcttgaggccattacagtcaggtctgaaatttaaggaagttggaactttggccattttagttagacccccaaagtctttgacagtacttccagtgacaacacaataatcatttgaccaaagtgagtttcaggatattttccccaaattcaacttcttgacccattaagctctgtgattctttgcaagatcttctgttattaggatgatggtattgccatgtgctatcaagaaacattgaaaagaatcaagacatactggtaagtttacaaacaaagctatgttgtagttaagaccaaatatctgctaatatattaatacagaaaagaataccacttaaattcataaattataattctcttgacaactcaactcccaagataaactttctttttcacttatgtaaaactttcaactccattcaaaccttcaggacaaggaaacattagctgagtctgtcatcctag

SEQ ID NO: 250780 - DNA, 594 bp, Homo sapiens
gtcaggggtcagaggaacactgccacgaacactccttttgcagtgtttaatttcctgtttaaagaatgtagtagaaatattgggttgactatcatcttaattctttactcttataagggtatctctctatcttgaggccattacagtcaggtctgaaatttaaggaagttggaactttggccattttagttagacccccaaagtctttgacagtacttccagtgacaacacaataatcatttgaccaaagtgagtttcaggatattttccccaaattcaacttcttgacccattaagctctgtgattctttgcaagatcttctgttattaggatgatggtattgccatgtgctatcaagaaacattgaaaagaatsaagacatactggtaagtttacaaacaaagctatgttgtagttaagaccaaatatctgctaatatattaatacagaaaagaataccacttaaattcataaattataattctcttgacaactcaactcccaagataaactttctttttcacttatgtaaaactttcaactccattcaaaccttcaggacaaggaaacattagctgagtctgtcatcctag

SEQ ID NO: 250781 - DNA, 594 bp, Homo sapiens
gtcaggggtcagaggaacactgccacgaacactccttttgcagtgtttaatttcctgtttaaagaatgtagtagaaatattgggttgactatcatcttaattctttactcttataagggtatctctctatcttgaggccattacagtcaggtctgaaatttaaggaagttggaactttggccattttagttagacccccaaagtctttgacagtacttccagtgacaacacaataatcatttgaccaaagtgagtttcaggatattttccccaaattcaacttcttgacccattaagctctgtgattctttgcaagatcttctgttattaggatgatggtattgccatgtgctatcaagaaacattgaaaagaatcaagacatactggtaagtttacaaacaaagctatgttgtagttaagaycaaatatctgctaatatattaatacagaaaagaataccacttaaattcataaattataattctcttgacaactcaactcccaagataaactttctttttcacttatgtaaaactttcaactccattcaaaccttcaggacaaggaaacattagctgagtctgtcatcctag

SEQ ID NO: 250782 - DNA, 602 bp, Homo sapiens
atatattaatacagaaaagaataccacttaaattcataaattataattctcttgacaactcaactcccaagataaactttctttttcacttatgtaaaactttcaactccattcaaaccttcaggacaaggaaacattagctgagtctgtcatcctagtgtgaaggcgagaattacaaaaattcagaaagatattcatatactaatcatcactaagaacagaaatcaagacagaacatcttacataataaatgtgcatcaatgaaagatttcaaaaggaagaaattagtcattgttttcctcctacagatatcatccaattgcctttattacctgtgatacacatacacacatgcacacacacgcaataaaacaaattaggagtgcttggcacacaactattaattgacaaattattttttggttaccactgaaatgcatgaggaatgctgaaaataaaactggtcttttaaccttcttgtagcacaagtctatgaaagagctattggtaycttagtaaaatacagagttacatggacggatggctattaacagtttctttttggctgtgtctatacaagtcaggatgtaattgaaaaagat

SEQ ID NO: 250783 - DNA, 541 bp, Homo sapiens
tttaaaaatgcataagcactttgtgagtttgctaagtcatgtttcactcagctcggtttgaatttttcatagaggagaaatattctgtagtcttttctgtttaagttcttctttatcagtaagaactgccacagtgrggtctatagtggaagggggccaagtctaatcatacaatttgcttgattagtcctcagtttttctaagttgtaaaatgcttgaagatttagggctttaaggacttaatataacttagtttcctgcctctccctgtttaatccaaaatgcaaattctttcccgttctggatttaagtttatttgatgtgttttcaagtcaatctttatcctgaagggcttatccatttgtgaaattttaagcactgcactataaagactcctttttttccaaaaacatcctctgttcacacaccatgtcccagacacagtatgcgcttgtggtcactcactcaccattcctgtgctgaggcagacattactaactactgaatacacattttcctgaggcatccagctgtaacatcg

SEQ ID NO: 250784 - DNA, 500 bp, Homo sapiens
ctagacagacaaaagctgaggaatgtcatcaaagatctgtcctacaaaaaatgttaaagttctttaatctgaaataaaaggacattactgaccaacaagacatcatgtgaaggcagaaaactcactggaaatactaaatatacagaaaaatacagaatattctaataactataactgtggtatgtaaactacttatatcttgagcagaaagactaaaagttaaactatcaaatatcataactacaacagcttttcaagtcatagacagtataagaagatataattagaaacaaaaacytaaaaagcagagggaataaagtctggagtttttattagttttctttttgcttgttagctagtttgttcatttttgtaaataatattaagttgtcatcagtttaaaataatgagttataaaatgtcatttgctatctcatggtaacctcaaatccagaaacctacaacagacatacaaaaaataaaaagcaagaaattaaaac

SEQ ID NO: 250785 - DNA, 618 bp, Homo sapiens
aaagaaggaagatatttatctggtctccccagattcccgtgggttcaaagtttcactcctctaggacrttaattcccttaaagttcccagcagcatctgtcacttcagcatcccagtgcactgaggacacaggtgagtagtgcacagagcgtacacaggttatgatgctgctggcttgtgtttatgggaagtcgggtccagtttgtcagagacagctgggacgggacaaggggccagagtctgatgaagccaaaaacatctgaagcagcacataagaggtctttggcatccgagttaatttacaaggagacttttttttttgacacccaggctggactgcagtgatctctgctcaccacaaccttcacttcctaggttcaagcaattctcctgcctcagcctcctgagtagctgggattacaggtgcctgccaccacacccagctatttttttctattattattagagatagggtttcagcatgttgatcaggctgctctcaaactcctgacctaaagtaatccgcctgccttggcctcccaaagtgctgggattacaggcgtgagccaccgcgcatggcctgaggcatttttcttaaatggaaactgtcattagcat

SEQ ID NO: 250786 - DNA, 577 bp, Homo sapiens
acacaggtgagtagtgcacagagcgtacacaggttatgatgctgctrgcttgtgtttatgggaagtcgggtccagtttgtcagagacagctgggacgggacaaggggccagagtctgatgaagccaaaaacatctgaagcagcacataagaggtctttggcatccgagttaatttacaaggagacttttttttttgacacccaggctggactgcagtgatctctgctcaccacaaccttcacttcctaggttcaagcaattctcctgcctcagcctcctgagtagctgggattacaggtgcctgccaccacacccagctatttttttctattattattagagatagggtttcagcatgttgatcaggctgctctcaaactcctgacctaaagtaatccgcctgccttggcctcccaaagtgctgggattacaggcgtgagccaccgcgcatggcctgaggcatttttcttaaatggaaactgtcattagcatatgtccacttggggggcaatcttgcacagaggttaaaagactggactttgagtccagtaaaggaggtttttaacctagttctgcc

SEQ ID NO: 250787 - DNA, 575 bp, Homo sapiens
gtccagtttgtcagagacagctgggacgggacaaggggccagagtctgatgaagccaaaaacatctgaagcagcacataagaggtctttggcatccgagttaatttacaaggagacttttttttttgacacccaggctggactgcagtgatctctgctcaccacaaccttcacttcctaggttcaagcaattctcctgcctcagcctcctgagtagctgggattacaggtgcctgccaccacacccagctawttttttctattattattagagatagggtttcagcatgttgatcaggctgctctcaaactcctgacctaaagtaatccgcctgccttggcctcccaaagtgctgggattacaggcgtgagccaccgcgcatggcctgaggcatttttcttaaatggaaactgtcattagcatatgtccacttggggggcaatcttgcacagaggttaaaagactggactttgagtccagtaaaggaggtttttaacctagttctgccatttcatgactatgtgactttgggccacagatttcttacctgtaaaatgaggctaagaaaaggacct

SEQ ID NO: 250788 - DNA, 594 bp, Homo sapiens
ttgaactatttatgcatcaacaatttgaataaatttccaggtaattactctgagtcgggaaaaaaagccagtcctaaaagctcatatactgtgtgatttcatttatatagcagttttgaaatgacaaaaatttagacatggggggcatattatggggcaggggagaagaagggagaaagatatgtagggtatataaragatagcatattattaatataaaagactaacaggagagattcttatgttggaactttcagggtcttgattgtggtggtggataaattaacctacatgtaggtaactgtataaaactgaacacacacacaaatacaaatgtaaatgggaaaatttgaataagatcagtgtattgtatcaatattaacatcttagttgtgatattatattatttcctcacaaaatgttaccatcaaggaaaatgaacaaaatttacatgggatctctctgtactattttacaaaactgcatgtgaatccacaaatattacaataaatatttcaaccacaaaaaaatcaaagacccatcattaaaatagaattggaaacgaattcagatgcaaagtttcaaatctgctgc

SEQ ID NO: 250789 - DNA, 529 bp, Homo sapiens
aacagtttcatcctgaaactcctcctctggcctaccatcccctctttgtacctcccctacccctcaccccccccacacccctccatctgtggaaaaattgtcttccacaaaaccagttcctggtgccaaaagtgttggggatcattatgacagaggacttaatttagacaggggatatgaaagttgtttagaaaaataaaaattcatcttgacagcatgaaaaactactgtgtgcattgttttggacacagctgtaaagtatcttatggtacaggaaaaatcaaattcaattagtgaaagagtgagaaaagagacgaatccctggcttgccctcattagagaaagctagcagagggatcaattatttccattagaggaaagaaacaagttatgccaggtctgtgttgcagcatggaaaactctgcttaaatgcttagaaaacatcatcagaataatttggtgatrgaacaagttgctgatggaatcaactactctggggaagccagaggtggtcaaaggagaaaaagtt

SEQ ID NO: 250790 - DNA, 546 bp, Homo sapiens
cagttcctggtgccaaaagtgttggggatcattatgacagaggacttaatttagacaggggatatgaaagttgtttagaaaaataaaaattcatcttgacagcatgaaaaactactgtgtgcattgttttggacacagctgtaaagtatcttatggtacaggaaaaatcaaattcaattagtgaaagagtgagaaaagagacgaatccctggcttgccctcattagagaaagctagcagagggatcaattatttccattagaggaaagaaacaagttatgccaggtctgtgttgcagcatggaaaactctgcttaaatgcttagaaaacatcatcagaataatttggtgatagaacaagttgctgatggaatcaactactctggggaagccagaggtggtcaaaggagaaaaagttgctggaagaaatacttttttttttttttgcagatcataacaaaataatttttttttctgtttcrcaaatatcacttcataaaacacagtgttccaatatttcaggtggacccatgtgacaattaattaaa

SEQ ID NO: 250791 - DNA, 521 bp, Homo sapiens
gtcttcataatggctatatataaaatgtagttacatatatataatatagttacatatagttaacataatgtgtctgtcattttgacatacatatacatacatatatcataacaacattaggtaacatcaattaatatttcttaaatgctttatctatgagacagcatgtcttggaagagctgtatataaattattttatttacatacttttaaacataaatttatttatatattcattaaatatatttagacccataatatacrccaggcattgtgctatgattgaagtccacactcagaaggtagaaattagtatcttgcccattataaagaggagaaattgctacttggtgccataatatgccccaggctgcatggcaaataaggagcttaactatgagcactactctcctgactgtaggttttgtctctttctttgtcatgtgtcaaagtaaaaagagttcaaaaatttctcctagtaacaaagacttcaatgagatttaatgtagtcaacatttttg

SEQ ID NO: 250792 - DNA, 594 bp, Homo sapiens
cagtctatatcataaatccttcatatccacctttgaggcttctagcacaaggaaagtgtcttaagtttagcaaaacatttaaaccatttgctaatttttaacgtataagaacaaaaaatctgagctctttctagctgtcagagctgttcaggaatgtgttgtgcaaacagacaaagtgagtttcctgtcactagaagtatgtaatgtggcctggtagacaacttggtgggcttcctggggaaagaattgaagcaatagatttgatgagaggatattttatgatcctctggcycatcttagtaaccagcgtgtgctatgagaaaaacaacataatttttctaaacctgctgtacatcagcagaatactattccttagagggaccatatgacacattaaattctaaaagaaatctctgaaatgaagtttactttaaaacttaagtataggaaataagccctttatatatttaactttggagcaaaaatgttaatttttggaatagattttgcctataggtttgtcatcttttgtaaattaccactgttagtgacagcttcttctaagaagatatttttatatttttaaatgatgga

SEQ ID NO: 250793 - DNA, 540 bp, Homo sapiens
ctactatttctgtctttcactgaaaaagctcaatatgaatgcaagtgtgaaatgtagggataactactatcattttaatgactagtacattactgacagatttttactactaattattggtaacaatttacttgttatatacttcaccagcacatagatgaatatatcttaayattgtagttgggaaccagtgttctaaattcctagagcaaagcctgtggaagtaggtaggcaattcccaagaaaagtttttcatattttttaaaaaatctatgagcatatagaagagcatatagagtaaagtcaaacacatctgaatgcaaattctatgtgaccctgtaaaaatttttttacctctctaaactttagtttttttatctgtaaaataaagataataaccacattgtagggtggaagtaaaaaatatgtaaatgaaaagatatgtgtacaatgcttagcactacattgcatggaaaatattgaatgaataataggcacaattttttatcttttgatttctctttcaggtctacacaaact

SEQ ID NO: 250794 - DNA, 540 bp, Homo sapiens
ctactatttctgtctttcactgaaaaagctcaatatgaatgcaagtgtgaaatgtagggataactactatcattttaatgactagtacattactgacagatttttactactaattattggtaacaatttacttgttatatacttcaccagcacatagatgaatatatcttaatattgtagttgggaaccagtgttctaaattcctagagcaaagcctgtggaagtaggtaggcaattcccaagaaaagtttttcatattttttaaaaaatctatgagcatatagaagagcatatagagtaaagtcaaacacatctgaatgcaaatyctatgtgaccctgtaaaaatttttttacctctctaaactttagtttttttatctgtaaaataaagataataaccacattgtagggtggaagtaaaaaatatgtaaatgaaaagatatgtgtacaatgcttagcactacattgcatggaaaatattgaatgaataataggcacaattttttatcttttgatttctctttcaggtctacacaaact

SEQ ID NO: 250795 - DNA, 565 bp, Homo sapiens
ttctaatatcaatttctaacgaatagaaatgttttcatttttcaagcaaggggaaaaaaacttgaaaaattactggttgtatttctttaatatgccatgcatgttgcaaagaaagtgatttatgtttttaggccttagtaaatattggagaaggatgggcattcagatcataattgtttctttagatttttgtaggacattatagtttataaagcatgtttgcatgcattatctcatctgactcccacaatatacatgtctaattaggggtgattattctctttattttataagtaaggaaagaaatactttagatacacattaaattactttcgcgggctacataccttgtaaatgttcagrttgcgttaagcccatgagtctcctgggttcattgtgttctcctgagctgcttggtggagttttataatgaaaacaatgatgagaaggattcataaagaccataaagatgcaaatgctgattgatcacacagagagacaaatctcaatgaaatcacttcttctccaatacctaaccttcaaaaggtaaaattttaaaaacaaa

SEQ ID NO: 250796 - DNA, 604 bp, Homo sapiens
acttatctcactggaactggttagacagtgggtacagcccacggagggtaaacagaagcagagtggggcgccacctcacccgggaagtgcaatgggtcagggaactccctccccagccaagggaagccatgagagactgtgctgtgaaggacagagctatccagcccagatactatgcttttcccacagtcttcgcaacctgcagaccaggagattccctcaggtccctacaccaccagggccctgggtttcaagcacaaaactgggtgcccatttgggcagacactgagctaattgcaggagttttttttttcataccccaggggtgcttggaatgccagggagacagaactgttcactcacctggaaagggggctgaagccagggagccaagtggtcttgctcagcaggtcccatccccacagagcccagcaagctaagatccactggcttgaaattcttgctgccagcacagcagtcggargtcgacctgggacactcaagcttggtggggggaggggcgtccgccattactgaggcttgagtaggtggttttcccctcacagtgtaaacaaagccactgggaagttccgactgggtggag

SEQ ID NO: 250797 - DNA, 640 bp, Homo sapiens
ttggtttttggttttttgaactcctactacgttcattactatattaggtgttagatataccctagtaaatgttataaacactgtcttcaaggaagtttccaagctggtgacattaaaaggtctgtattcataaggttgttttgggatttaaataagattatgatgtaaagcatttagtaagaacctggtatcagatattcttcaatgaatgttagtaaactcaggaggcatgcgagaactatcttaaaaataccaaaagtgttctcaactagactttttctctgtggccccaagagctacatttaggacacatgagggggtaaataatacatggtcaatttaacttgatgaccttttggtagtaaaattcctcattaattactgcctccagaaatgatgagctcctgctcactccagggatccatgaagktacatgaatatctgttaagaatcccatggagacaattcctgcattgagtgtgaggattgtagccatcagtattttgtactttttaacagtaatactaatacttgttgaatgctaattatgtaccataaatattctaagcactttcattcatgaagttgtttaatgcttacacaaattctatgaagtgggcacaaacaggatccctatgta

SEQ ID NO: 250798 - DNA, 400 bp, Homo sapiens
ttcctctttgactcgagatatatttaattacatacatcagaactgtttrgttctagaaatacagagctgaataggaagtaacccctgacattgggcaattcacagtctaatcagctaactggacaattcagtcacttactcactaaatactctttaagtacttatgagattgggagacttgtctagactcagtcttcagtggtcatcaaaacaggtttgtgcactcatgcactttacagtccagtgagggagcaataaaacaaaagattattaaacaatatgataaaatgtgagaaggagtaaaacaacccatggcatgcagaagcttgccttagcattgtaacacgttggtcttctacttacatctgggccttcatgttctccatttgagataaacaat

SEQ ID NO: 250799 - DNA, 400 bp, Homo sapiens
ttcctctttgactcgagatatatttaattacatacatcagaactgtttggttctagaaatacagagctgaataggaagtaacccctgacaytgggcaattcacagtctaatcagctaactggacaattcagtcacttactcactaaatactctttaagtacttatgagattgggagacttgtctagactcagtcttcagtggtcatcaaaacaggtttgtgcactcatgcactttacagtccagtgagggagcaataaaacaaaagattattaaacaatatgataaaatgtgagaaggagtaaaacaacccatggcatgcagaagcttgccttagcattgtaacacgttggtcttctacttacatctgggccttcatgttctccatttgagataaacaat

SEQ ID NO: 250800 - DNA, 503 bp, Homo sapiens
aaatgagtgagaacgtgcataatttgtctttccgtgcctcgtgtattccacctaacataatgaccttgagttccatccatgttgttacaaatgtcaagatctcattctttcttatgactttttctttttaagacaaaaatagcttcatggttaagatgaagtccttcatcctgctctatttgctatgcctgtagtcaggccttggtcatgtgaccactcttcaagtccttctgmgacagggcccctttcagggatgtgagccctgtggctgagaccttgcaacatttcaacagatctctgacagtaaatgcctcccagcattacctctctgaacattccttgctcctaatgcacagtgagctacaccctctagtgggcaaaccacatgcagtacattgaactttggaagagtaacatcctctgtctactaccaaccacctccagtaatgatcaggctccccagatttcacaagaaaaaaaaagcaggggatagggggaagagg

SEQ ID NO: 250801 - DNA, 619 bp, Homo sapiens
atctctaattttgcaaagttctccatcggcacctcatttcatctttggatgctgctgcctcactccccaccactttggtgcagatgactccacagccactgcacaccygctatcttccttcattcctcaagcactttaaaggctatttagggtaacaaatgttttctgaaggtttggagtactggaggaggacaatggctaacacggcctatgaaatatgtcaggatactttcagttaagagagatgaaaatctaaatgaaacagcttaggtcaagcaagaaatgtgtaggctcatgcaattaggaggattcagggtgggtcgtaattcaggcacagctttatccatggactcaggtattgtcagaagtctcagtctccatctctgccctctgcttgtctctggattttattaaatgctggtttcatcatctcccatacaaactctatctaccagataagaaaaatggctgcagccactccagtctcatgtccttacagctcatgattagaaaaaaaaaggcgggggtggggttgggaatgggaagaagagaatcctggagcccagtcaaacattccccgcaatcagtatgcaactgcggtccccagataagagaaata

SEQ ID NO: 250802 - DNA, 619 bp, Homo sapiens
atctctaattttgcaaagttctccatcggcacctcatttcatctttggatgctgctgcctcactccccaccactttggtgcagatgactccacagccactgcacacctgctatcttccttcattcctcaagcactttaaaggctatttagggtaacaaatgttttctgaaggtttggagtactggaggaggacaatggctaacacggcctatgaaatatgtcaggatactttcagttaagagagatgaaaatckaaatgaaacagcttaggtcaagcaagaaatgtgtaggctcatgcaattaggaggattcagggtgggtcgtaattcaggcacagctttatccatggactcaggtattgtcagaagtctcagtctccatctctgccctctgcttgtctctggattttattaaatgctggtttcatcatctcccatacaaactctatctaccagataagaaaaatggctgcagccactccagtctcatgtccttacagctcatgattagaaaaaaaaaggcgggggtggggttgggaatgggaagaagagaatcctggagcccagtcaaacattccccgcaatcagtatgcaactgcggtccccagataagagaaata

SEQ ID NO: 250803 - DNA, 603 bp, Homo sapiens
atcttcacatggcctgcaggagagagcaagcaaaggaggaagtgatacatgctttaaaagaatcaaatcgcataagaacccactcactttcgtaagaacagaaagcaggaagtctgcccccatgatccaatcacctcccaccatgcccctcctccaacactgagaattacaattcaacatgagattttggtggggacacagaccccaaccatatgagtttgcaacacatgaactttggggaacacattcaaaccataacactgaagggtaattttttaaaaagaagtttactgaatttgctttttcactcttaaccttttcacttccttgtcacataaacatgatcttgtgcagtatagcacaaattaaaaatgaactgcagtgtccttaatttttaatattgtttaatggtcactcagagttcatgcttatgraagtgtaaaagtcttcaatgcaggcttttgtttttgttttctcttaatctaccaccatgtgttggttttgaaattgcaattctctatgtatacacctacatacaacagcctttcacagaattttcttatgtaacttgggaaaaattagggcactttgaaagtaaacttc

SEQ ID NO: 250804 - DNA, 577 bp, Homo sapiens
aaagcaaatgttttcaaattcatggccaatttattcctgagaacacctacttattttctccttgtccttctaatcttttctctgtttcgtcatatattgtatatacacaatgtatataataaatatacagtttaaataataatgataatgacaatacacatgctcatacgtcttatcagtcagtttatgaaatagcacgtgggctctatcttttaaactgtttgtatgcctcccctccagctgccattctttactgctgctcaggctaccagctctcctctaattctgtttccatcttcctctcttttaggaaggacactcacgcaaccacagattctagaaacatttcttcatctgtggaggtattcagttggtgktgttctctggccttggctaaataatactggtctcttttgtaattttcaggcaatgtagaattcactatggggctctttgtgcccttaggatattacatatgtgtttttaaatatatttatcctagagttggttttgatgttgttttccctcacagtagagtttgttttgatgtcgtttaccctgacagtttaaaaattac

SEQ ID NO: 250805 - DNA, 390 bp, Homo sapiens
ggtgctgccgtatcaactgagtttatgtagtattctaaatcctttgttgtcatttcaataatgttcacagcatcttcaccagaagtagatttcatctcaacaaaccactttctttgttcatctataagaagcaacttctcatctgttcaagytttatcatgagattgcagcaattcagtcacatcttcaggctctacatccgattgtagttctcttgctatttcctccacatctgcagcgacttcctccactgatgtcttttgttgtttattatttcaatcctgctcctcctataaccacagaagtcttgaatccctcagagtcatccatgaggactggattccaaactcttgttaatgttgatattttgacctcctcccatgaatcaca

SEQ ID NO: 250806 - DNA, 586 bp, Homo sapiens
tgtgctttagaagacacctttaagaaaatggaaatgcaagccatggacttggaaaaaatgtttgcaaattatataccagatatataaagataccaggataccaaaccaatataaagactggcatccaaaatatataagggacatttataatttaatacaaagataaacaacttcatataaaataggcaaaagatttgatgagatatttaagaaaagaagatatatgaatggccagtaaacccatgaaaggttgctcyatatcactggtcttcaaagaaatgcaaattataactataatgaaatacaattgcacagaatggccacaattaaaaagactgataataccaagcattggcaaagatgtggagcaatagaaactctcatagatagctggcagaaatgtaaatggtacaaacacgttgggaaacattttggcatctttgataaagctcagcacacacttaacatacaacccagaaatcccattccagtcaggcatggtggcttacgcctataatcccagtactttgggaggctgaggcaggcggatcacttgagctcaggtgttcaagaccagactgggcaa

SEQ ID NO: 250807 - DNA, 525 bp, Homo sapiens
tcctggatatttacccccaaaagaaaaatatgtaattccataaagacttgtacaaagatgttcatagcagctttattcatagtaatctcaaaacttaaatgacccaaatgtctgtcaacaggacaatgggtaaatacwtcatagtctgttcatccaatggaatattactcagcagtaaaaaggaatgttatagttgcatgcagcaatgtgtatgaagctcataaacctcatgctgagtaaatgaagccagacgcaaatgagtttacactgttttactccatttacatgagattttagaaaatacaaactaatctatagtaacagaaattagatctgtggttgcctggtgtcaaagcttgagaggcactcactgcgaagaagtgtgaagggatgtcttttggttgtgaaaatgttctatatcttgagtgtggtggaggttacatgggtggatacatttgtcaacattcatcaaacagtacacttaaaatgggtgaatttgttataagtaaattatgctccaataaa

SEQ ID NO: 250808 - DNA, 404 bp, Homo sapiens
aataatagtgaagccatgttaatttcctgggtttggtcattgtgctctggttatgcaagttgttaacattagaggagactgagtgaaaggtrtgcatgaactctctgtactaattttgtaaattttctgtaagtctaaaattattcataatatgcaaaaattaaacaaaaaataaaataaaataagcacatggaatgagactgtcccctgggtctctgtagaaaccaggtcaaacatcccaaatgctcttttacccccattctgagttgggccagaatggtcagaataatggttcccaatgtaccttgataaacacggaaactctcaggaccgagtcctaaggttctctgattcaataggtttggagtggacttgagaactgatctttttaataagggcctcag

SEQ ID NO: 250809 - DNA, 404 bp, Homo sapiens
aaggggtctttaaaaaatattgtgtattcattctaatgtgtaatttaagaatgtgtatgtatctagcaagctctgcgtttgcgattttccatttattgtaataatgatgtcgcagtttattttaaaacaaatttaagtaaaagtagtaactctatataaagataagtggtagtacagggaatacatggttatggccaaatacrtgtatctatgtgtatatctagaatgggaccgaatgaaatttaaggaacacctgtataattgaaagaggctacaaaacagggaggctgagggaagaaaacaaaaactcccctgccggtttgcctcctgtggcagaaggtgggtgggagcagctgaaatgtgatccctgcacacccctcccctcaaggagagaagggctgagg

SEQ ID NO: 250810 - DNA, 492 bp, Homo sapiens
cccacttggggagcagtgacctctgccatgggttaccctaaggaaggaagccagggtagataagggagtcccgagrggaagggagggcatagagggccacaggcagagggaagattcctcaaaacactctccatgtattcagacgtccattcactgagccagcagctactcattagtacttactctgtgccagggaccaagggtatggccaagggcaggagagaaaagcagctccgtccctcatggaaacccccttctgtggggggcaggggacagttcctaaacatgcttcaatgtgcagtggctgctggcggtgggaagcccacaggaggctgctgggtaggagggaggtcagggatggcctctgaggaatggtctgaacagggacctgaaggaagagaaacagcccacatgcccaaaatctgggtttgatgacgtcatggcacaaccttacggtggaaaactaggcagccattgcagacattgtttccc

SEQ ID NO: 250811 - DNA, 548 bp, Homo sapiens
gccttctcctttattgaaagttcaaagagcataactttttaaatcatcagtttttatccaggatctagcacactaaggacatgcaaagaggtatgtacatatttattgatatattgattaactggtgaaaaggaaaaaggcatatataaagagtttgaaaatcacagtaatgacaattgtgaacactttctccctgccatgttttctcctgtattcaattgctctgaggtatgtcatatatcagctgaatgtttctcacgttatgaagaattgtatgtttccgcactgaacatgttattcagacctgccatccctttcttcatttttaaaatccacttctcatttttcatttcctctatcaaaaacctttactcattcattgattcagtagttttttagtatcagtttcaaagttctgtgggtgttactggcaatgaatcagatacaaaccttgcccyaaaggagcttataatataataagatggagaaggcatatccctagtgtaacctactttgaaatgaaaagttataactgccaaaaaataaag

SEQ ID NO: 250812 - DNA, 559 bp, Homo sapiens
aaaactttgaggcaatagaaatgttttacacttggatctaaatggcrattatacagatacatgtttacataaatattatcaaattgtatacttaagatctgcaaattttaatgtatatagagcatgcattaatgaaaagaaaaaaaaaaacctgcctatattcctgtctgaattgcattctttattgaataatacctagagatgcttttctggtagatttagaattacgtttagaattggagacaaggaaaattgaggtaccgagcagagagcaagttttctcaagatcatataatatggaaagagctagaattagattttacatttccatgctgtaatgccttggaaatatctggtattatgaataagtttcgatggaggcccctgtgataaagtgcataaagcaaagtaaaaccaatattgagtttgaagccagataatctgtactcaaagatcagtaataccattatttgtataaattacaatgcctggcacatggcaggcattcaatggatttttaagggggtgaataaggtagatagaattaaatataaattat

SEQ ID NO: 250813 - DNA, 559 bp, Homo sapiens
aaaactttgaggcaatagaaatgttttacacttggatctaaatggcgattatacagatacatgtttacataaatattatcaaattgtatacttaagatctgcaaattttaatgtatatagagcatgcattaatgaaaagaaaaaaaaaaacctgcctatattcctrtctgaattgcattctttattgaataatacctagagatgcttttctggtagatttagaattacgtttagaattggagacaaggaaaattgaggtaccgagcagagagcaagttttctcaagatcatataatatggaaagagctagaattagattttacatttccatgctgtaatgccttggaaatatctggtattatgaataagtttcgatggaggcccctgtgataaagtgcataaagcaaagtaaaaccaatattgagtttgaagccagataatctgtactcaaagatcagtaataccattatttgtataaattacaatgcctggcacatggcaggcattcaatggatttttaagggggtgaataaggtagatagaattaaatataaattat

SEQ ID NO: 250814 - DNA, 633 bp, Homo sapiens
atctatttcattcacctttgtataatcattatacacattatacacattgtacattgtagatgtttggtaaatgctattgaaggacttaaatattctaggtgtacttccaaactttgtgtaaagacctacttttcattttctgaaaatgtgttattttcaacaatgtaggtaaggactttgacattaaaatctgtgtgttttctttccaacatgagttgcgagataatccagagaaaggatccacttgatagcaaataacttaagaattttatcaaggaagtgtgatctactggcagggtctaccccagaactaacagagaatgtaatagcttagttgtatttattttatttctagaactgtgaatcttggccattataaagaaaagatttatttcaaatgctttacagataaccttctgkttctattacatgtaaggaaaggacaaacacaatacatattatttgcctggctcattgcttccccaattccaccatcccacagtagtggttttctttgtgcactcacaagactgccttacacatggcacacttgttgccatgggtcttgccatctgggccacgcacaggatcattttctcttgtgcagaaaagttttccattttgcaaaagtct

SEQ ID NO: 250815 - DNA, 633 bp, Homo sapiens
atctatttcattcacctttgtataatcattatacacattatacacattgtacattgtagatgtttggtaaatgctattgaaggacttaaatattctaggtgtacttccaaactttgtgtaaagacctacttttcattttctgaaaatgtgttattttcaacaatgtaggtaaggactttgacattaaaatctgtgtgttttctttccaacatgagttgcgagataatccagagaaaggatccacttgatagcaaataacttaagaattttatcaaggaagtgtgatctactggcagggtctaccccagaactaacagagaatgtaatagcttagttgtatttattttatttctagaactgtgaatcttggccattataaagaaaagatttatttcaaatgctttacagataaccttctgtttctattacatgtaaggaaaggacaaacacaatacatattatttgcctggctcrttgcttccccaattccaccatcccacagtagtggttttctttgtgcactcacaagactgccttacacatggcacacttgttgccatgggtcttgccatctgggccacgcacaggatcattttctcttgtgcagaaaagttttccattttgcaaaagtct

SEQ ID NO: 250816 - DNA, 558 bp, Homo sapiens
aagtaaaaacaaaagtgataacacatagtagtaaatcagtaagtatttacaaagcttccgtcatcaatcagaattgtcccatcattatagcagatctgaaaatatttatcatcaaaaacatacgtgtgtgttgtgttgcatagcatggtctrtaaaagctaggaaagatcagaggtgggaagattccataggcaggcttagatgagaagccttcctggaggaaatgagaatattgcttacctgtgatttgtctttaggggtctgagaaagaagagaaaaaacatgcttaacctaagaaataaatatatattttgtccaagtatggtggctcacacctgtaattccaacactttaggaggccactgcaagagtgcttgagcccaggagttcaagacaagcctggacacaatagcaaaactctgtgtctacagaaaaattcaaaataaaaaaataaaataaattgccaggcatggtggtgtgtgcctgtagtcccagctacttgggaggcttaggtgggaggatcacttgagcccaggagttcgaagttgtagtgagctt

SEQ ID NO: 250817 - DNA, 558 bp, Homo sapiens
aagtaaaaacaaaagtgataacacatagtagtaaatcagtaagtatttacaaagcttccgtcatcaatcagaattgtcccatcattatagcagatctgaaaatatttatcatcaaaaacatacgtgtgtgttgtgttgcatagcatggtctgtaaaagctaggaaagatcagaggtgggaagattccataggcaggcttagatgagaagccttcctggaggaaatgagaatattgcttacctgtgatttgtctttaggggtctgagaaagaagagaaaaaacatgcttaacctaagaaataaatatatattttgtccaagtatggtggctcacacctgtaattccaacactttaggaggccactgcaagagtgcttgagcccaggagttcaagacaagcctggacacaatagcaaaactctgtgtctacagaaaaattcaaaataaaaaaataaaataaattgccaggcatggtggtgtgtgcctrtagtcccagctacttgggaggcttaggtgggaggatcacttgagcccaggagttcgaagttgtagtgagctt

SEQ ID NO: 250818 - DNA, 526 bp, Homo sapiens
catcagaacaatgctaggccatgaccagtctgtaccaactgtacccgagatcacacacttgaatcttacacagggactgaagttccacctgtgtccaggacacgttaatttttgtttcattaactaacagcataataatttctgtcattattaatgcctgctatgcaactccagtggaaagcatacactcagaaatggaagaacggcactcttttacaacaccctgtgtgataagccccggcaacattcttcattatttaaagaaatacatcttatcagtataaacctatggcaagttctttataaagtagtttttccaagttgcctacacaggatgagagttacagggaagtgtggtctaaggtgtggtctattggactggcataaagctattttgacctttctctcctgagatatatgtaaaggtgagtttgtgaggacggggaacagtatattctgtcaataaaatgggagcmaactactaagaatttctatataataagacagcaaacacaatatagggact

SEQ ID NO: 250819 - DNA, 559 bp, Homo sapiens
  misc_feature (1)...(559): n = A,T,C or G
tccatttatgtttacctaatgtgttaatcccaattgttttcctgattcttttgttacacatggccaagttggctatattatctgttgggtaaggtgccagcaggtgcggaagtcctgattcccaggagccttctctacttagtgatctcctaattgagcttcctttccccatgtctrataaactttgcctgcctcctgataacatctcaggaaatgcccacccacattccacctgagaatcttagcttcttccttcctactcagatctttttgatagttccataaatatctccttgtcatctagcttttctattttcttcctgacacaagcaaaatttctgaagtaataagagcaataacaaatatataaatgcttgttttgaaaagcttctacgtgcacattttttgttctcactctaataatgtgataaagctgaattatttccaattttctgacgagagaggtcaagagacttgttcaaggtcttttctcttggtaagaaaggtgtccattatgagaacatnattcttcttaggtaaaagaccactccagaagctt

SEQ ID NO: 250820 - DNA, 561 bp, Homo sapiens
cttcaggttatgccaccatgattttagttttggtgcctctgttatgaacattgatcatgctccttttcttactatgggcaagaaaactaatttacagaaagcaagtatcccagatccactattgccgtctttctttcaacattaaacagacattatgaagaaatcatagcaccatactatcctggaggatattttgttgcttctcattgatatgcagtgataaagggacaaaattgttccactctaaggagggagaacagttaacagtgcaaggatgtggagaaatcatggcatgtgtttgttcctaatggatctgcttctttttcyctcttattcagccaagcagaaaatgaagaaaagaaaaaggctgaagcacgagctagaaacaaaagagaatctggaaaagcaacctcatatgcagtgagtggaatccatccaataaatcctatttggtgctataatttgaacaaattttaagagcctaaagggtgagattttgccctgcagaaatccccagaatatcttaactcttcaatctggggatggtattgagatgaatta

SEQ ID NO: 250821 - DNA, 559 bp, Homo sapiens
  misc_feature (1)...(559): n = A,T,C or G
tccatttatgtttacctaatgtgttaatcccaattgttttcctgattcttttgttacacatggccaagttggctatattatctgttgggtaaggtgccagcaggtgcggaagtcctgattcccaggagccttctctacttagtgatctcctaattgagcttcctttccccatgtctgataaactttgcctgcctcctgataacatctcaggaaatgcccacccacattccacctgagaatcttagcttcttccytcctactcagatctttttgatagttccataaatatctccttgtcatctagcttttctattttcttcctgacacaagcaaaatttctgaagtaataagagcaataacaaatatataaatgcttgttttgaaaagcttctacgtgcacattttttgttctcactctaataatgtgataaagctgaattatttccaattttctgacgagagaggtcaagagacttgttcaaggtcttttctcttggtaagaaaggtgtccattatgagaacatnattcttcttaggtaaaagaccactccagaagctt

SEQ ID NO: 250822 - DNA, 604 bp, Homo sapiens
ttaagactctcatctagaaagttgctataattctcatttttacttttccaattaaattataaccaaactcacaatattgattgttatttacataggtataatgctttgaagttcataaacatttttaaaatgtccttgaatgttatttacgtaggtataatgctttgaagttcataaacatttttaaaatgtccttgaatctccacaaaactatattgtkcagtcatttttccctcaggaggaactgaggctctgcacaatgaactggcctgtcccaggttacctagctgataagctacctcttcctaccccagaggttctgggtatgattatgcttttcaacatcaaaataaaaaaattattgtgaaagtgctttggaaattgtctcttcaaaagagaggaggtatcatatcattaatgtgtgatgccaagtatcttaggttttaaaagtaacaaaaactaatttctagcaaacaggcacaactatcaaatttattgataaacctttttacgtacaagatgctctgacacatagcacatttattgatgtgcatcttgccatatgggcctcgaacagggttattttctctggtgcagataagct

SEQ ID NO: 250823 - DNA, 604 bp, Homo sapiens
ttaagactctcatctagaaagttgctataattctcatttttacttttccaattaaattataaccaaactcacaatattgattgttatttacataggtataatgctttgaagttcataaacatttttaaaatgtccttgaatgttatttacgtaggtataatgctttgaagttcataaacatttttaaaatgtccttgaatctccacaaaactatattgttcagtcatttttccctcaggaggaactgaggctctgcacaatgaactggcctgtcccaggttacytagctgataagctacctcttcctaccccagaggttctgggtatgattatgcttttcaacatcaaaataaaaaaattattgtgaaagtgctttggaaattgtctcttcaaaagagaggaggtatcatatcattaatgtgtgatgccaagtatcttaggttttaaaagtaacaaaaactaatttctagcaaacaggcacaactatcaaatttattgataaacctttttacgtacaagatgctctgacacatagcacatttattgatgtgcatcttgccatatgggcctcgaacagggttattttctctggtgcagataagct

SEQ ID NO: 250824 - DNA, 583 bp, Homo sapiens
gaatagaatagggattacttacttttatggtcagttaatgtttaaccaacatgtcaaggtaatgctgagaaaattgaatataattaattttaaaaaacagttttatcttataccatacacaaaagttaacttaaattttattttggcactaaatgtaaaagctaaatatatraaacttctcatgtaaaatataggaggaaaaaaattcatgaacttgggtaggtagagtgactttagacataaaactaaaagcgtaatccatgaatacaaaattaataaactgaaatttataaaaattgcaaatttgtgtgcttcaaatgacaacaagaagtcaatgaaaaagcaagttatagactgggagaaaaatagtcacaacctatatagcaggtaaggacttaaatccacaaaacataaaaacctcttacaaccttattataaggagacaattcaattaagtatagatattacaccaaagatatatgaatggctaataagcacacaacaagatgcgcaacaccgttattatttaggcaaatgctaattaaaaccacaatggtgtatcactacacgtacccactagaat

SEQ ID NO: 250825 - DNA, 634 bp, Homo sapiens
ttaatctatttatacatctaaggactattttgtttcttacattttgacgttccttgatcatgtcttttgcagctgaattgtgatgattttaaaaaaggagaaagagatggggattttatctgtcctgattattatgaagctgtttgtggcacagatgggaaaacatatgacaacagatgtgcactgtgtgctgagaatgcgtgagtattctctgaagtaggctttctccctaaaacgtgttctctctataattacatgacacaattttccctacagtctttaagctaacgattcattatgtgggagttagccattcctaaattattagtaccacttcttttactactcttaagacaaataaaggtgtatagcataacactttatattttacaaagcacttttatgtatgatttatcagatggttatcactttatgaagtagacagaatagggagattatagattatatgttcataatctataaaatgttatagattttatatttaaaatgtataataaaatatagctttaatataataaaacagatttaatattttaataaaatatagayttatgattttataatctataagttatagattatatgattatcatatataacagattatataata

SEQ ID NO: 250826 - DNA, 461 bp, Homo sapiens
aaaattctgttaatgggattgaaagtttactgtggtaaaacagattttttccaaggttagcctaggtttctcaaactatttttggatgagccatgtcaacatctgaccaggccccagcatagcagatgcaatcaacactgttgatgaaaactcaggaaacatggaggtttcgcccaacccttggtatttttcactgaaaacttctaagtggacaagaaacctccatagacaactcattctgtaccctkgcttggagacactgttccctccacttggcttctcagagcggtgtagaaactaagtaggaagggcctcaagtggcatctctcccaatgccttcattttataggtgatgcaactgaggcacagaaagaataagtgacttgcccaagctcacatagtgagtcattgtcaaagctgaggcacaagaacccaatgtactcttccttcctctcaggagt

SEQ ID NO: 250827 - DNA, 572 bp, Homo sapiens
tgctaatccatgcagtgtaggaggcagttacattcagtgatccagagcctatgacctggtgcatttgaatgacacgatataattaatggaaggaagaggaacaaaggaatgaagtaagagtaaaatgagtaagagccctgggtggttctagacaggaatcaggaaaggaaaaattctgttaatgggattgaaagtttactgtggtaaaacagattttttccaaggttagcctaggtttctcaaactatttttggatgagccatgtcaacatctgaccaggccccagcatagcagatgcaatcaacactgttgatgaaaactcaggaaacatggaggtttcgcccaacccttggtatttttcactgaaaacttctaagtggacaagaaacctccatagacaactcattctgtacccttgcttggagacactgttccctccacttggcttctcagagcrgtgtagaaactaagtaggaagggcctcaagtggcatctctcccaatgccttcattttataggtgatgcaactgaggcacagaaagaataagtgacttgcccaagctcacatagtg

SEQ ID NO: 250828 - DNA, 598 bp, Homo sapiens
aatgagtcaaatgcctgctagaacatgttaaaccctgagaccggcttttaaaacttagtttctattcggtctaaaactcattttacagatgaaaacattgagatccagagatacatamattttctaagttacacaagcaataagaattctaagatttgaacttagttctacagtcccaggaaagctcttctttgggctaagacaggacaagaggaatgagaaatgatggccttggaaggcagacatcacactggctcactccacctcttagtttccgtcagtgcctaaaatgtttttagagtcggatcatgggttgggcctatggacaagatgtaccagatatttagcccacccctggactaacccatgttccctccctcctaagttgttggcttcaaaacaggtatgacctagtaattaaggaataaacagatagctctaaatagagtcaaacatcctctcaaaagtaaacaggttggctccaaatagtctcacctctgttggggcagtagccttgggagctcttgctaaatgcctggccctcttctgtgattttgcttctttttccctggaaaaggacaagaaatagcatagttta

SEQ ID NO: 250829 - DNA, 657 bp, Homo sapiens
ctgcataacagactaccttcctggaatacttccaacagccaggtggtcaccaactctcaaagctatctgcaccattytttgaatgcagtttttgaaagagaatattcacattgaacctgcttatattggttctaattccaacatctagggacccacagagcaaatcaattttcttttccataagccagttctttaggaatctgatgacagcttttatgctttgcacagcctccttctttccaggtaaaaaaaaaaattttattctaacataatttacgtaagtcataaaaataataattgaataacttcaaaatgataaactgtctttagactcttaaggcatttcatttttgttttacattatttttcagtaaatttattatattcatactttcagtctcatattaaaacatcttatgaaacaagaagaaaattttataataaataatatacctgctggtttacattcagctttcaaaaaaagaaagaattattcaacctgccctaggcctcccatcctctattaaatcttgtcctggcttctttatagtctcacagtctcttcactagaagcagtgcatgatcaaacgatctgagcttcattatcccaatatgattgactacgtcaatccccaaattaaatcctgtgacacacac

SEQ ID NO: 250830 - DNA, 577 bp, Homo sapiens
catttcatttttgttttacattatttttcagtaaatttattatattcatactttcagtctcatattaaaacatcttatgaaacaagaagaaaattttataataaataatatacctgctggtttacattcagctttcaaaaaaagaaagaattattcaacctgccctaggcctcccatcctctattaaatcttgtcctggcttctttatagtctcacagtctcttcactagaagcagtgcatgatcaaacgatctgagcttcattatcccaatatgattgactacgtcaatccccaaattaaatcctgtgacacacaccaacctgacatttaaaaagccaattgtaayataattatcctaagtgggtaagctcagtattggcttgctaccactgttgaagttttgacagtggtcagaaattgaggctaaccttccttttcaaaaacaaattaggacattctggtttgaggatttgcaattgataacccaagccttcttttacctttggggtgacaatggagagaaggaaaccaagttaagaagcattgaatagagattggtaaacttccaggatacta

SEQ ID NO: 250831 - DNA, 596 bp, Homo sapiens
tcacagtatcattttgcacgtggcacatttattgatgaacattattccatcaagactttgaaaaaatttcttatcctggggacagaacagttttccatttttcataaatgcctgaaattcatggcacatttcctaagataatgccaaaaaagttgtgttagcyaaaagtacatcaaaacaagctttattttgatatatatatgtagatatatgtatatgtctgcatatatatacacacacaattccaaggttttttgaagattaagtatgtaaagccctcaaagaatgcctgatacatagtagatattcaattaataaattatcctccttccttcttcctccttttttattattattgttttgatgttgctggtgattgtcagtattattactggaatatgctaagatgacacatataaaatacctagtacacagtaggccaatagtaattgctgtgaaaggaatatgaaaatgttgctgaaggactgaggcaaggtgtttgagcattgaacattataaaatgtctgcctacatttccccatggctgtactgcaacatatcagttcctagaaattttaacagtgttaaatgaaaaa

SEQ ID NO: 250832 - DNA, 596 bp, Homo sapiens
tcacagtatcattttgcacgtggcacatttattgatgaacattattccatcaagactttgaaaaaatttcttatcctggggacagaacagttttccatttttcataaatgcctgaaattcatggcacatttcctaagataatgccaaaaaagttgtgttagctaaaagtacatcaaaacaagctttattttgatatatatatgtagatatatgtatatgtctgcatatatatacacacacaattccaaggttttttgaagattaagtatgtaaagccctcaaagaatgcctgatacatagtagatattcaattaataaattatcctccttccttcttcctccttttttattattattgttttgatgttgctggtgattgtcagtattattactggaatatgctaagatgacacatataaaatacctagtacacagtaggccaatagtaattgctgtgaaaggaatatgaaaatgttgctgaaggactgaggcaaggtgtttgagcattgaayattataaaatgtctgcctacatttccccatggctgtactgcaacatatcagttcctagaaattttaacagtgttaaatgaaaaa

SEQ ID NO: 250833 - DNA, 568 bp, Homo sapiens
cccttcactgtcacatcccccttccgaggttctgggagaggcctaaccattttgcattttcaaatttgtattatattttttagaaagtacccatacttccacccccaccaccatccccacaaatgtcatcagcactactatcactaccatcagaatcaaaccttgtgaatctatggaagtactgaggaaatttctcaataattgcataagsctttctctctctttctctctctttctctctctctctggtaattttttttttggcacatcccttggaactaaaatcctactatgtttgttttgggcttttggttttgtaaataccaataactccgttatacaaagtttaaggaggacaggggaaacattttaaataatagaattggtggggaaaaggaaagtagaatgatcttcaaaagtggtaattctttgattcattcaatattaaatattaataaataatattaaatattattattaaagtcctgctatacatcactcattcttttttaggagcttaaaatatggtgcatttctgctacctagtaaagtatgattttaaaatgtt

SEQ ID NO: 250834 - DNA, 568 bp, Homo sapiens
cccttcactgtcacatcccccttccgaggttctgggagaggcctaaccattttgcattttcaaatttgtattatattttttagaaagtacccatacttccacccccaccaccatccccacaaatgtcatcagcactactatcactaccatcagaatcaaaccttgtgaatctatggaagtactgaggaaatttctcaataattgcataaggctttctctctctttctctctctttctctctctctctggtaattttttttttggcacatcccttggaactaaaatcctactatgtttgttttgggcttttggttttgtaaataccaataactscgttatacaaagtttaaggaggacaggggaaacattttaaataatagaattggtggggaaaaggaaagtagaatgatcttcaaaagtggtaattctttgattcattcaatattaaatattaataaataatattaaatattattattaaagtcctgctatacatcactcattcttttttaggagcttaaaatatggtgcatttctgctacctagtaaagtatgattttaaaatgtt

SEQ ID NO: 250835 - DNA, 576 bp, Homo sapiens
ataactccgttatacaaagtttaaggaggacaggggaaacattttaaataatagaattggtggggaaaaggaaagtagaatgatcttcaaaagtggtaattctttgattcattcaatattaaatattaataaataatattaaatattattattaaagtcctgctatacatcactcattcttttttaggagcttaaaatatggtgcatttctgctacctagtaaagtatgattttaaaatgttatattcccttttaatttagaaaattcactaggtatttatttatctttagatggagtcttgctctatcgcccaggctggagtgcagtggcatgatcttggctcactgcaacctctacctcccaggttcaagaggttstcctgcctgagccccctgagtagctgggattacaggtgcatgctaccacatctaggtaatttttgtatttttagcagagatgggatttcaccatgttgggcaggctgatctcgaactcctgacctcaaatgatacacctgcctcagcctcccaaagtgctggaattacaagcatgagccactgtacccagtgaaaatt

SEQ ID NO: 250836 - DNA, 547 bp, Homo sapiens
tgcttaccttgatgaatataattgatcctaaaatccatatagtagaatcagagaagagcctggggtctttgtaatgaaaatatatcccttattaagtaagtcttatagaaagtatatagacractcatgataatcctggaataaagctctaaataattttgaaagcttatcataaaagagtagcatcaggccaggtgcagtggctcatggctgtaactcagcaattttggatgcaaagggaggaggattgcttgaagccagaagttcaagatcctcctgggaaatataatgagaccttgtctctacttataagaaaaattaaagagttgcatcaataagaataatccctaaattggacttctccaatatcactgttagatgagaacttaattcctagaaagactccctttcttacaaactgagcatcagaggcccaaataataggttaagaaatttgttcacagtgattaattagttaagatgagattcaatgctatttttctgagttatgaaattatccaatgtattctcttgggaaacaggaaaa

SEQ ID NO: 250837 - DNA, 547 bp, Homo sapiens
tgcttaccttgatgaatataattgatcctaaaatccatatagtagaatcagagaagagcctggggtctttgtaatgaaaatatatcccttattaagtaagtcttatagaaagtatatagacgactcatgataatcctggaataaagctctaaataattttgaaagcttatcataaaagagtagcatcaggccaggtgcagtggctcatggctgtaactcagcaattttggatgcaaagggaggaggattgcttgaagccagaagttcaagatcctcctgggaaatataatgagaccttgtctctacttataagaaaaattaaagagttkcatcaataagaataatccctaaattggacttctccaatatcactgttagatgagaacttaattcctagaaagactccctttcttacaaactgagcatcagaggcccaaataataggttaagaaatttgttcacagtgattaattagttaagatgagattcaatgctatttttctgagttatgaaattatccaatgtattctcttgggaaacaggaaaa

SEQ ID NO: 250838 - DNA, 563 bp, Homo sapiens
caagctactaaacttggaaaataaccaaaatcacagcatcgtaaaaaagactacatcaatagttttcatttctgacacagtatccaaaaactctgattagaaaggcttccaaataaataattacttctttgtgttcttgcctttaataccaaatataagaagtcactaaatttgtttttaaaatatttttcagtgaaatagaggttaatgctatgaaaaatagcagtgtaaaattcacagtatctgccataaatcaccaaccatcrtcacggactctgaaaaagaaaatgatggttttatacacaatgatatttatataatatccttcttttttcccagtataaaacttccaagtgagcatgctctctgattcccaaatgtctagcttattttctactctactgaactttctggacctctccctatcagtaaacttagatgaaatagtagagaacatgataaaattctctagaacactcatgtaagaagtttctttaaaaaaaatcattgcaacaaaatacggcaagagagtattttaaccatggttctcagagtttcaacgt

SEQ ID NO: 250839 - DNA, 563 bp, Homo sapiens
caagctactaaacttggaaaataaccaaaatcacagcatcgtaaaaaagactacatcaatagttttcatttctgacacagtatccaaaaactctgattagaaaggcttccaaataaataattacttctttgtgttcttgcctttaataccaaatataagaagtcactaaatttgtttttaaaatatttttcagtgaaatagaggttaatgctatgaaaaatagcagtgtaaaattcacagtatctgccataaatcaccaaccatcatcacggactctgaaaaagaaaatgatggttttatacacaatgatatttatataatatccttcttttttyccagtataaaacttccaagtgagcatgctctctgattcccaaatgtctagcttattttctactctactgaactttctggacctctccctatcagtaaacttagatgaaatagtagagaacatgataaaattctctagaacactcatgtaagaagtttctttaaaaaaaatcattgcaacaaaatacggcaagagagtattttaaccatggttctcagagtttcaacgt

SEQ ID NO: 250840 - DNA, 495 bp, Homo sapiens
actcaaagttgaatattctataatcctatataataaccgaattcctcagaaataccagatatactacctcgtagacaaacatgtttctgactggactcccttcataagtgggagaggagaggaaaggaagacagattggttgtcctaccagtcaggtatagatttaaagatttccacatccagagaaatccagggttcctgttctgaagtgtctgagttcagtgtcacagactcatatatatgttagagttgaacgaccctaaaagataacctggcaaaattctaatgttgaatatatagggaggcaggaactcagaggagcaatgactttctcataagcagacagtttagttggagcaggcagaggaggcatccagcacttgcaagcagaccacacatataacattctttcctctctgtacactgcttcatccttagacattagaaaaggcagraacgttggaaaaataaaacttgtatgtaactacttttaaa

SEQ ID NO: 250841 - DNA, 614 bp, Homo sapiens
ggatgcttttttaatgctgaggtgtgctgtattagttcattttcatgctgctgataaagacatacccgacactgggaaatttacaaaagaaagaggtgtattggattcatagttccacgtggctggggaggcctcacaatcatggtggaaggcaaggaggagcaagtcacatctttgtagcagkcaaagagagattgtgcagagaaactcccatttttaaaacaatcagatctcaagagactcattcattatcatgagaacagcacagaaaagacccacctccatgattcagtcatctcccactaggtctctcccacaacacatgagaattatgggagctacaagatgagatttgtgtgggaacacagagccaaactacatcattctacccctggctcctcccaaatctcatatcttcacatttcaaacctgatcatgccttcccaacagtgcctcaaagtctcaactcatttcagcattaacttaaaagtccacactctgagacaaggcaagtctcttccacctatgatcctgtaaaatcaaaagcaagttagttactttctagatacaatgggggtacagccattgggtcaatacagctgttccaaatggga

SEQ ID NO: 250842 - DNA, 643 bp, Homo sapiens
tacttgattcatccaagagaaagcagaaaagaagaaaaggggaattaaaacacaggtggtascagcctgggcatcatggtgaaatcccatctgtacaaaagatagaaaaattagccaggaatggtggtgcatgcctacagccccagtaacttgggaggctgaggtgggaggatcacctgagcctagagaggtcgaggctacagtgagccaggatcatgccactacactacagcttgggcaaaagagcgagatcctgtctcagaaaaaaaaggtagtaaaaatagaaagcaggtgataaaaatagaaaacaattggtaaagataataagatggtagatgcaaatctgaccatgcggattatgaaatatgtaaatctgttttatgtaaattatgtatatattaaatgtaagaatatactttatgtaaatgtattatacatagatataggttatatatgtaaattaaaagatagagattgacagattagattttttaaaaaggaagcccaaactatttgctgcctaaagagacatactttaaatataaatacaaaaatagttcaaaagtaaaagaatgggataaaatatatgatacctacacaaataaaaaaaaaagcttgagtgcctatgttaatatcagacaaa

SEQ ID NO: 250843 - DNA, 581 bp, Homo sapiens
gcactcaaataaaatctccgaaacaaaacctgaattcactgcctaaggtcagggcctttcttttgtgtgtcgctttaagcatcggcgcgtgggctgggggcagaccgcgcgtacccgccctctttctggggcgtcggcggagcgtggccaatcaacgggcgcggctatggcagcggaagccggaagcggcgagcggggtcgttctgggcctaggggaggcgggccgagggcgtctgagctgaggcccgcgtcgatcctgggttggaggaggtggcggccgctgaggctgcggcgtgaagacggcgggcatggtggggcgggagaaagagctctctatacactttgttcccgggagctgtcggctggtggaggtgagggagtcggcctgggcgtctccggtgggagcgggggcgccgagggggacgagccaccggggckcgggcggctttgcaggcgtattccgcccgggtcagagcctccggccgggagtggtctcaccgccaccctcccagccccggatccgaggggggcgccaccgagtttgtttatctcagcgcacacgggtcagtgtttttttcttc

SEQ ID NO: 250844 - DNA, 550 bp, Homo sapiens
gaccccattaaaagaaggtaagacatgaataaatgtataaaagtgtcctcttcctttggatttgcttttatagcatttagcaagtcatccattttatgaactgtgaaaatttgttgacaccttctgataaaagcagttcttactgagattgttgtgtacaatgactgttttcttcctccttctacgctttctcttctgtatacctggattctgcctgttcttcaaggcaaatctcaaatcttccttgaagctttgcatgactattttgtccctgtccacacaccccaaattactccctctataatacccttagcattttaacctaaatgtctcttaggtccttaatcattttctgatttgtagttttagagaagtaaatttcttatttcttgactgtgaatgtttgtctttcacgataaattaaagttggttgaaawgataaatctaaaaattatcttacagaatatattgcttcatctgccttaaagaagatacaaggcctgtttttagtttataatgatggataaattcgttttaatctagattacta

SEQ ID NO: 250845 - DNA, 578 bp, Homo sapiens
gggtttaggcagagactggggttggtgaggcaggacatgatatataatgaatatttaggaatgaccactctaggagtagatcaggagatagaactgaaagatgagaaggaatcaatatgtaagattggaggaaaagcgttccagggacagggcatagcatgtgcagaggcgcagcatgtgcaaaggaaaactggctggtgtgactggagagtagaaagcagggggagagagtaggataaatgacattagacaagcaagcaatggcttggttatgtaggacctggcaggttattgtaagaaactgagatttcattttaagtgtggaacaaagcccctggagggatttaaagccagacaatgatgtgatatgatttataagctttctgccactccagtccaattgcatgtacttattgcaaatttaaagttctggaagaaaaattagctccaagtgagagctgcctgtgtacaaactgtattaaactctacagatttttttcyctgggagaatggggaaattcttttctaacagccacatcttgacaaggcaagtgctttttgaaagggttttgcagtat

SEQ ID NO: 250846 - DNA, 555 bp, Homo sapiens
aagattggaggaaaagcgttccagggacagggcatagcatgtgcagaggcgcagcatgtgcaaaggaaaactggctggtgtgactggagagtagaaagcagggggagagagtaggataaatgacattagacaagcaagcaatggcttggttatgtaggacctggcaggttattgtaagaaactgagatttcattttaagtgtggaacaaagcccctggagggatttaaagccagacaatgatgtgatatgatttataagctttctgccactccagtccaattgcatgtacttattgcaaatttaaagttctggaagaaaaattagctccaagtgagagctgcctgtgtacaaactgtattaaactctacagatttttttctctgggagaatggggaaattcttttctaacagccacatcttgacaaggcaagtgctttttgaaagggttttgcagtattgaaattgccaaagactcctggaaattttacccttgatgttatggttaagcagagagtttytgaatgacttgctgagcttcagtgaaaagcaacagc

SEQ ID NO: 250847 - DNA, 616 bp, Homo sapiens
tgtcaaaacagaccactcggctctaccaatcagcaggatgtgggtggggccagataagagaataaaagcagaaggcccgagacagcagtggcaaccygctggggtccccttccacactgtggaagctttgttctttccctctttgcaataaatcttgctactgctcactctttgggtccacactgcttttatgagctataacactcaccgcgaaggtctacagcttcactcctgaagccagcgagaccacgagcccaccgggaggaagaacaactccagaggcgctgccttaagagccgtaacactcaccgcgaaggtctgcagcttcactcctgagccagcgagactacgaacccaccagaaggaagaaactccgaacacatctgaacatcagaaggaacaaactccagacgcgccaccttaagagctgttaacactcaccgtgagggtccgcggcttcattcttgaagtcagtgagaccaagaacccactaattccggacacactccctttgatgggctaactgggcaacaaaaatataactttatgagctttgaccaaggttccctggaatagactattttaataataatgataaaactaatagtaataacac

SEQ ID NO: 250848 - DNA, 616 bp, Homo sapiens
tgtcaaaacagaccactcggctctaccaatcagcaggatgtgggtggggccagataagagaataaaagcagaaggcccgagacagcagtggcaacctgctggggtccccttccacactgtggaagctttgttctttccctctttgcaataaatcttgctactgctcactctttgggtccacactgcttttatgagctataacactcaccgcgaaggtctacagcttcactcctgaagccagcgagaccacgagcccaccgggaggaagaacaactccagaggcgctgccttaagagccgtaacactcaccgcgaaggtctgcagcttcactcctgagccagcgagactacgaacccaccagaaggaagaaactccgaacacatcygaacatcagaaggaacaaactccagacgcgccaccttaagagctgttaacactcaccgtgagggtccgcggcttcattcttgaagtcagtgagaccaagaacccactaattccggacacactccctttgatgggctaactgggcaacaaaaatataactttatgagctttgaccaaggttccctggaatagactattttaataataatgataaaactaatagtaataacac

SEQ ID NO: 250849 - DNA, 616 bp, Homo sapiens
tgtcaaaacagaccactcggctctaccaatcagcaggatgtgggtggggccagataagagaataaaagcagaaggcccgagacagcagtggcaacctgctggggtccccttccacactgtggaagctttgttctttccctctttgcaataaatcttgctactgctcactctttgggtccacactgcttttatgagctataacactcaccgcgaaggtctacagcttcactcctgaagccagcgagaccacgagcccaccgggaggaagaacaactccagaggcgctgccttaagagccgtaacactcaccgcgaaggtctgcagcttcactcctgagccagcgagactacgaacccaccagaaggaagaaactccgaacacatctgaacatcagaaggaacaaactccagacgcgccaccttaagagctgttaacactcaccrtgagggtccgcggcttcattcttgaagtcagtgagaccaagaacccactaattccggacacactccctttgatgggctaactgggcaacaaaaatataactttatgagctttgaccaaggttccctggaatagactattttaataataatgataaaactaatagtaataacac

SEQ ID NO: 250850 - DNA, 616 bp, Homo sapiens
tgtcaaaacagaccactcggctctaccaatcagcaggatgtgggtggggccagataagagaataaaagcagaaggcccgagacagcagtggcaacctgctggggtccccttccacactgtggaagctttgttctttccctctttgcaataaatcttgctactgctcactctttgggtccacactgcttttatgagctataacactcaccgcgaaggtctacagcttcactcctgaagccagcgagaccacgagcccaccgggaggaagaacaactccagaggcgctgccttaagagccgtaacactcaccgcgaaggtctgcagcttcactcctgagccagcgagactacgaacccaccagaaggaagaaactccgaacacatctgaacatcagaaggaacaaactccagacgcgccaccttaagagctgttaacactcaccgtgagggtccrcggcttcattcttgaagtcagtgagaccaagaacccactaattccggacacactccctttgatgggctaactgggcaacaaaaatataactttatgagctttgaccaaggttccctggaatagactattttaataataatgataaaactaatagtaataacac

SEQ ID NO: 250851 - DNA, 517 bp, Homo sapiens
catgtggggccattttcctaatatggaaacttttcatattatatctttttactgcctaatgctaaattctacctggcttccagtcctatagtattgaatgccaagtatcctgtgagaaacaagagttctgctttcatttaatttgctttaggtgaactcattttgcctgctgaatccataagccagtggtaaaaaaaaaaaatgtattgccctgagtggcagatgagggtagtatgatcacataggacatacttgtagtaaaatagtcactgtttatctgaaattcatatttaatttgtgatcctctatttttaaatgctgagtctggaaaccctatttggagacagactgaacagggttcaacttccagctccaccatctactgactgtgttaaggtcagttattttgaacatgtgtgaacatgtccagttatttaacatggcatttccttatctgtaaaayaaggttaatgcctgcacctatctcataaggttgtgttgagaatttcattttaaa

SEQ ID NO: 250852 - DNA, 615 bp, Homo sapiens
cagcccaccacagtagtcagagaactcatgaaggacaatgcaatggagaagaggattagagatgaagactgtcaggaggtgagcctagagagttgagagagaccaactcttatggactcttaaaggacacaccattgaacagaggattcctttacacctgcagtgacccaagaatattgtcatgcaatttaacatgtactttttaaaaagtagatgaaaaagatggtgttttaattgataagctcaaaggaccccagaattacttttccaatcattatttcttccaaatggaggccccccaaagtgtcagattagtaagcagcagaaaacgcttgacagaaaaattaatatttgggcatgatgcttagattaaaaacatcaagatttttgaaatgtaatgtgagtactgtggatactacttttttctaataattcacattgtctttttttaaaagattcatttgtcaaaaactaaatcatttagacaactattctcaagcttatactccttcttctccagkattgaggttacgtaaactctgcccatttcattcgtgatggccaaggctgacttttgaagacagatctttaagcagtttccatccaatgctcaga

SEQ ID NO: 250853 - DNA, 615 bp, Homo sapiens
cagcccaccacagtagtcagagaactcatgaaggacaatgcaatggagaagaggattagagatgaagactgtcaggaggtgagcctagagagttgagagagaccaactcttatggactcttaaaggacacaccattgaacagaggattcctttacacctgcagtgacccaagaatattgtcatgcaatttaacatgtactttttaaaaagtagatgaaaaagatggtgttttaattgataagctcaaaggaccccagaattacttttccaatcattatttcttccaaatggaggccccccaaagtgtcagattagtaagcagcagaaaacgcttgacagaaaaattaatatttgggcatgatgcttagattaaaaacatcaagatttttgaaatgtaatgtgagtactgtggatactacttttttctaataattcacattgtctttttttaaaagattcatttgtcaaaaactaaatcatttagacaactattctcaagcttatactccttcttctccaggattgaggtyacgtaaactctgcccatttcattcgtgatggccaaggctgacttttgaagacagatctttaagcagtttccatccaatgctcaga

SEQ ID NO: 250854 - DNA, 532 bp, Homo sapiens
agtgatgcctgaacaaacaatgcttacataatgctctgaaccacaactcatattgctgttccacatttctgctctaccattcaccatttgtttattcattcaataaatatttctgagaactgacrctaggagctagacattgaatgtacaaaaaatagtaagacagagctcctgcttgcacagaagccatgtgtaattacaattaagaccatgggctccagaggcagactgcctggtttccaattccgatccaaacctactacttgtaagctctgtgacactggacaacttacttaacctctctgatctaaaatttctaattctgtaaaacagcaataataataacaactacctcttggagttaatcagattaaaagagataattcttataaatctcttagcatctggcctagtgaatggaaagcacagaataaatggtagtttttatcagtgattgtccaagttctatattataatgagaaggtcttgttctaagccagggcctctcatcagtgccactgcagttaattgg

SEQ ID NO: 250855 - DNA, 532 bp, Homo sapiens
agtgatgcctgaacaaacaatgcttacataatgctctgaaccacaactcatattgctgttccacatttctgctctaccattcaccatttgtttattcattcaataaatatttctgagaactgacgctaggagctagacattgaatgtacaaaaaatagtaagacagagctcctgcttgcacagaagccatgtgtaattacaattaagaccatgggctccagaggcagactgcctggtttccaattccgatccaaacctactacttgtaagctctgtgacactggacaacttacttaacctctctgatctaaaatttctaattctgtaaaacagcaataataataacaactacctcttggagttaatcagattaaaagagataattcttataaatctcttagcatctggcctrgtgaatggaaagcacagaataaatggtagtttttatcagtgattgtccaagttctatattataatgagaaggtcttgttctaagccagggcctctcatcagtgccactgcagttaattgg

SEQ ID NO: 250856 - DNA, 609 bp, Homo sapiens
acacaatgcagtcatagtttagccagaatctccctaagactgaatagtctgtggatacaaatgaggtcacttyaaattagtggttatcaactgggggtgattttgccttccagggacatttggcaaagactggagacattttcaattgtcacaagtgggggaggaaaggtgctactgacatttaatgaacaaggtcacggatgctgctaaatagcctaccatgcagaggacagcatcccacaagatacaattatctggttcaatgtgtgaagagtgccaagattgagagactcttctctaaagtaagaacttaactttttctactttgtacacctgcccatataacaccatagtgcacagggtttgcccactaatttttgagagtccttgagtatggtagctattgatattcatggagcatttctagctctctgcctcttgagtcatggtaaggctgcactttcctactccctttgaagttaggtatagccatgtgacttgttatagtcaatgaagtttgaatggaagtgatgtgcttattttgaagggctagtgggtgattcactgtggtcctgtcccactactgcaacagtcttggaaccacaggtc

SEQ ID NO: 250857 - DNA, 609 bp, Homo sapiens
acacaatgcagtcatagtttagccagaatctccctaagactgaatagtctgtggatacaaatgaggtcactttaaattagtggttatcaactgggggtgattttgccttccagggacatttggcaaagactggagacattttcaattgtcacaagtgggggaggaaaggtgctactgacatttaatgaacaaggtcacggatgctgctaaatagcctaccatgcagaggacagcatcccacaagatacaattatctggttcaatgtgtgaagagtgccaagattgagagactcttctctaaagtaagaacttaactttttctactttgtacacctgcccatataacaccatagtgcacagggtttgcccactaatttttgagagtccttgrgtatggtagctattgatattcatggagcatttctagctctctgcctcttgagtcatggtaaggctgcactttcctactccctttgaagttaggtatagccatgtgacttgttatagtcaatgaagtttgaatggaagtgatgtgcttattttgaagggctagtgggtgattcactgtggtcctgtcccactactgcaacagtcttggaaccacaggtc

SEQ ID NO: 250858 - DNA, 584 bp, Homo sapiens
actgactgttgaggggcttgagctgtaaggagtgaatcatcatttataatttcccactctacttagttgaggcaggcacatgccttagagcctgagaaaaagaaggacttgaagctaagcagatgggcaggcaaatatcttagcagcacctgctgctggctgtgatggttccagctacctgtctttggggaagagattctgtggtccttactgcttgaagtatatagatctgcactgtccactactatagtcactagccacatgtggctattgagcacttgaaatgtggctagtccaaattgagatgtgttgagtgtataaaatatacaccgaatttggaagacttaaaaccagaatgtgataatttttatattgatttcatgttgaaataatcatatattggataaactgggttaaattatatatgcaataamattaatttcacttaatagcattttacctttttaatgtggctactgaaaaactggaaattacatacatggctggcatcatgtttatgctgggcctcattgtcctagagccagagtatcatgaaatctcaccccttcatttgacagagaaga

SEQ ID NO: 250859 - DNA, 557 bp, Homo sapiens
ggaaaaatcaatatcactaaaatggccatactacccaaagcaattcacagatgcaacgctattcctatcaatataccaatgacatttttcacataawtagaaaaaaaatttctacaattcatacagaaccaaaaaagagcttgaatagctaaagcaatcctaagcaaaaacaacaaagccagagacatcacattaacctacttcaaaccaaacaataatgctacagtaaccaaaacagcacggtactggtacaaaaagacagaccaatggaacagaatagagaacccaaaaataaagccacacagctatagccatctgatcttcaacaaagtcaacaaaaataaccagtggggaaaggactccctatttaatagatggtactgggatagatggttagccatatgcagaagattgaaactggatctctacctttcgccatatagaaaaattaactcaagatagctcaaagatttagaggtaagacctcaaactctaagaatcctagaagaaaaccaaggagataccattctggacattggtcttgggaaagaatttat

SEQ ID NO: 250860 - DNA, 616 bp, Homo sapiens
atctaaatgtgagaggcaaaacaataaaaccttgagaagacaatgtaagaggtcaatcctcatgacctcggggtagagaagactttttaaagagagaagcacatcactgccataaaacaaaagttcgataaatttgactaaatcaaaattaaaagcattcattcatcaaaagacttcattmagagaatgaaaatgcaagtcacagagtaggacaagatatttgcaacacctataaccaataaagagcttgtgtctagaatacaaaagtaagtcctataaatcaataagaataaaaaaacacagaaaacctagtagtaaaatcaagaagagaattgagaagtcatgttaccaaaatagacatccaaatggctaccagacatacgaaaatgagttcattagccaccaggggaatgccaattaaaaccacagaaagatatcactatacataccactgaactggctagatttcttaaactgagaattccaactgctggcaaggatgttgaacaagggaactctcaaaattctgctggtggggatataaattgacacgaacccttcagaaaattgggcattatctacttaaattgaataacacgcataacctgtgacctag

SEQ ID NO: 250861 - DNA, 616 bp, Homo sapiens
taatacttctttccttttaatgactgaatagcatttcattgtatgaagaccacatattagttatccattcatcagttgatgaacatctatgttccttccatttttggctattacaagtaatgctgctatgaacattgatgtacaagtttttgtgtgaacatgttttaatttctcttgagtatatacctatgagtgaaattgctgtatcacatggtagctctatgttcaagtttgtggggaacagccagactrttgtccacagtggctgcatcattttatatttccattagaaatgtaggaaggttaaaattacttcatatcctcaccaacacttgctagttttcttcctttttttagagatggggggtcttatatgttgcccggggtggtctcaaactcctggctcgagtgatcctcctgcctcaacctcccaaagtgctgggattacaagcatgagccaccatgcctgggtcttctttttttttttttgattatggctatcttagtgggtttataagtggcatctcatagttttgatttgcatttcattaatgactaatgattttgagcattttttcttgcgcttattgaccatttatatatcttacttggagaa

SEQ ID NO: 250862 - DNA, 502 bp, Homo sapiens
aatcctctgctacttttcgttacctatcctggtcctcctccttgctgcctgctgcaccccaacctccccaacccatggagcagccatgggaagcaggagacatcaaaaacctaatgaatcaagtatgcagaacaagccagcattttttagctctttgttagggaagatcctggagggaagtgttttgtattacaaacaatgagaaagttcatgcaaccttgcaaattagcacaggctggcctcagctaaatctggtcttgaagaagttgggcagaaaatggatttwaaaaaaaagccatgagcacatgtatacatatgtaacaaacctgcacattgtgcacatgtgccctagaacttaaagtataataataaaaaaaagccatgaaaatgaaaaatgaatctttttatctaatcaccatgtggagcccagcaggaaaactcatagctattggggaagtcttttatatagattgatatttagagcagagaatagtggaaacgt

SEQ ID NO: 250863 - DNA, 603 bp, Homo sapiens
acatctgcttaaagtagttgttgtgtcttttcctgaggatcagatggttaagtttactccagaaaaagaaaaaagaattatggaaagaggtttttttttcaacttatgtttacccctacgaagattctcatatttgcaccatgttccccatcattagaaacacacacacacacacacacacacacacgatcccaagaggatttgtttaaatgaagattttggccatagacctaccaaattagaatctctagggatgaggccctggaagctgmctttctcacaataacctcaagtgagccttaagcagactaaagtctgtgaactactgctataaatgacccatataactggtctaaatttatgatcacatttttactttgcacctataaactgactttgaaagcaatttgtagaatcaaagaattctcacattaaaaggcattgtgggtattattgagtctccatgtttgagaagaaaaaactcaaggccaaagaggaagagtaacttgcccagggtagaagaagagattaaggaccagagccaggctctcaatctgagtcaagtcctcttaccgctctaacagacttcttcaaagaagagat

SEQ ID NO: 250864 - DNA, 508 bp, Homo sapiens
ttgcctcaggcagaaggcaaagggaaagcaaagcatgtcttacatggtggcagaagggagagagagagagcaaagggggaactggcaaacamttttaaaaccataagctgtcatgagaattcactcactattacaagaacagcataggggaaaccgtcaccatgatccaatcacctcccaccaggtccctccctcacacctggagattacaattcaagatgtgatttgggaggggacacaaagtccaaccatatcaccttctaaagtttgctggaaatgaaccttaaaatctaacttatttttattcagacatgagcttgggttttcaaatatagtccttaaagaaggagagggagagaagagggacacttcagggcacaatcacatttcagagatttttttcacttgaaatctctcaggctttgattaatagcacttacaataacaacagcaatgacaatgatgatgatagaaatcaacctacacttttctctttgatggttcccac

SEQ ID NO: 250865 - DNA, 508 bp, Homo sapiens
ttgcctcaggcagaaggcaaagggaaagcaaagcatgtcttacatggtggcagaagggagagagagagagcaaagggggaactggcaaacacttttaaawccataagctgtcatgagaattcactcactattacaagaacagcataggggaaaccgtcaccatgatccaatcacctcccaccaggtccctccctcacacctggagattacaattcaagatgtgatttgggaggggacacaaagtccaaccatatcaccttctaaagtttgctggaaatgaaccttaaaatctaacttatttttattcagacatgagcttgggttttcaaatatagtccttaaagaaggagagggagagaagagggacacttcagggcacaatcacatttcagagatttttttcacttgaaatctctcaggctttgattaatagcacttacaataacaacagcaatgacaatgatgatgatagaaatcaacctacacttttctctttgatggttcccac

SEQ ID NO: 250866 - DNA, 617 bp, Homo sapiens
gtacgtgtagcatagttctggttcttaccactaagtttgctataatatctaggaaagtcaccacttctctaagcttctgtttcctgacctataaagtgggaacaataatgttgcttatctcaggatattctgaagataaaaatgaaatgatgcatattaagtacttagcttggtgccaggaacatgatcatatttccaaactgttagctgctttataattattactgttgttacaagtaatgtatctacgatggaaaaccctcacagcccatcctccaacagcagaggcwaagaagcaatgtgtccttgttttataaccattaagatgtttctctataaaaataaaaaaggggaaatggtattttttctttcatcactgtttcatctgaaataaaaattttatcaggtattctatatgtgataaaataaatataaaagggaaattgtctagtgagcccctccaaatacttacttacaaacgataggtgttcacagcttcagcatgttataatcctcccaaggtacaaagtacaatgacccatcagataaattgctggagacataagtgacccggatggcaagggctaaaagactgtgtttggagcagtagcttagag

SEQ ID NO: 250867 - DNA, 572 bp, Homo sapiens
ggctttcaaagtgagtggctgctaaactaggrgtgagcaagctttctttaaaaagggccaagaagtagttgctttgtgctctgaaggccatgtggtctttgttacaaatactcaactctcccgtgataatgtgaggacagccatagccaatgtggaaatgaatgggcatggttgctgtacagtaaaacttcactcaggtaggctgtaggctggatttggccagggcatgtaatttgctgacccctgtctagaatgaaagccaatgtctcaacaataaaacagaagctagaagccagaggatcttccatgtgataaaggaaagtaattgttaatccagtattttatgttaaaatatctcttaagaataaaggcaacattaaacacttttttttcacacaatcaaaagtggaggtagtttgctaccatcaggtcctcactaaaggaaacttcaagtagaaggaaagtggtcgctggtggaaagtctgagatgcaagaaaaaaataaagaagagatattaaaatgaaattaataaaatagttattgcataagaaatgcatataagctaagatgct

SEQ ID NO: 250868 - DNA, 572 bp, Homo sapiens
ggctttcaaagtgagtggctgctaaactaggggtgagcaagctttctttaaaaagggccaagaagtagttgctttgtgctctgaaggccatgtggtctttgttacaaatactcaactctcccgtgataatgtgaggacagccatagccaatgtggaaatgaatgggcatggttgctgtacagtaaaacttcactcaggtaggctgtaggctggatttggccagggcatgtaatttgctgacccctgtctagaatgaaagccaatgtctcaacrataaaacagaagctagaagccagaggatcttccatgtgataaaggaaagtaattgttaatccagtattttatgttaaaatatctcttaagaataaaggcaacattaaacacttttttttcacacaatcaaaagtggaggtagtttgctaccatcaggtcctcactaaaggaaacttcaagtagaaggaaagtggtcgctggtggaaagtctgagatgcaagaaaaaaataaagaagagatattaaaatgaaattaataaaatagttattgcataagaaatgcatataagctaagatgct

SEQ ID NO: 250869 - DNA, 570 bp, Homo sapiens
  misc_feature (1)...(570): n = A,T,C or G
aaagaaagtagaaggaagaaaatggaagttaataaaattgaaaacacagagataatagtgagaatccataaagttaaaatttgcttttctgaaaaaaaaaaagcccaatataattgattaacctctggtaaaactgatcaagaaaaaagagagaagacacaaatagyttatgtcgggaataaaaaacgaacatcattacagagccttcacatacttttttaaaacaaccagaagatattacaattttatgcccaaaattttgaaaatttagagtaaatgaagaaattcccaggcaaatacaaattaatacaattgacacaagatagataaacatgaaaatcctantagtaataattaaatgtgtttttcaaaatatcccctcaatgaaatcttgaaacactgatnacattacttgtgagtgctatgtaatgttcaacaagaaataattctagtcttattccaactcctccaggggaattgaaaaagagaatagactccccatctcattttatgaggtagcacatgacagtataagaaagagagcaatcttgattataacaataaagacaa

SEQ ID NO: 250870 - DNA, 570 bp, Homo sapiens
  misc_feature (1)...(570): n = A,T,C or G
aaagaaagtagaaggaagaaaatggaagttaataaaattgaaaacacagagataatagtgagaatccataaagttaaaatttgcttttctgaaaaaaaaaaagcccaatataattgattaacctctggtaaaactgatcaagaaaaaagagagaagacacaaatagcttatgtcgggaataaaaaacgaacatcattacagagccttcacatacttttttaaaacaaccagaagatattacaattttatgcccaaaattttgaaaatttagagtaaatgaagaaattcccaggcaaatacaaattaatacaattgacacaagatagataaacatgaaaatcctantagtaataattaaatgtgtttttcaaaatatcccctcaatgaaatcttgaaacactgatnacattacttgtgagtgctatgtaatgttcaacaagaaataattctagtcttattccaactcctccaggggaattgaaaaagagaatagactccccawctcattttatgaggtagcacatgacagtataagaaagagagcaatcttgattataacaataaagacaa

SEQ ID NO: 250871 - DNA, 537 bp, Homo sapiens
aggagacattataaactacatggcagaaattcaaaggatcattagtggctactatgagtaactatatgccaatacattggaaaatctagaagtaatgaataaattcctagacacatacatcctaccaagattgagccatgaagacacccaaaagctgaacagacaaataacaagtaatgagatcaaagctataataacaattgttccagtagagaaaaacccacgacctgatggctttactgctgaattttgccaaayatttaaagaactaataccaatcctattcaaactgttccaaaaaataaaggagggaatacttttaaactcattctaccaggccaatattactcttatgtgaaaaccagaccaaaacacatcaaaaaaaaagaaaaccataggccaatatccctgatgaatatttatgcagaaatcctaaacaaaatactatcaaaccgaattcagcagcatagaaagatcgttcatcatgaccaaatgggatttatcccaaggatgcaaggatgcgaggatggttcaaca

SEQ ID NO: 250872 - DNA, 548 bp, Homo sapiens
tcattatgttaagtgaaataagccaggcacagaaagacaaactaagcatgttctcacttatttgtgagagctaaaaattaaaacaattgaactcatggagatagaaagtagaaggatggttttcagaggctgggaaggatagtgggtgtgggtgagagggaagtgggaatggtgaatgggtacaaaaaaatagaaagaatgaataagacctagtatttgcttgcacaacaggatgactatagtcaaaaatagtttaattgtacattttaaaataagcaaaagagtataattgaattgtttgcaacacaaaggataaatacctgagatgatggatactccacttaccctgatgtgattattatgcattgcatgcctgcatcaaaatatctcatataacccataaatatatacactactatgtacacataaaaattaaaaattttaaaaagttgtgggaatatttctgataaaattattaaatgtagtaattggtataattatgwtcaattggatcaattaaatatgtctagcatttctagaatgaatat

SEQ ID NO: 250873 - DNA, 540 bp, Homo sapiens
cgtcttgctgaaagctaagctataaagattttggaatctttctaagaaagttaccatatagatagtggttaagagcctagcctccaaaatcagaggctaatctaaatcaatagactagacatgagtgttagttcttcctctgttacttaccaactgtgtaatctcaagcagctaataaaactctttggacctcagtttctttttctgtaaaatggggataacacctacctcaaaaggtcactgtrgttttaaatgaaagaatgtaagaaaagcactcagcgtagtttctggcacatattatcaaacaaaaaatatgatacatggctataataccattattatcattattattgatattatcaattgatattattattaatgatattatcacttttgaggtttacttcagttgtttgttttgccagacccacattgcttagctcccctcctcccttctttaaataacgaagctagtctttcctgtagagaacacaggtggtgatgagtccctcaccacctgcccatccctgggatagttgc

SEQ ID NO: 250874 - DNA, 588 bp, Homo sapiens
aaatttcagcagaatagtccaaacagcaggtgtcatggtgcttgccattttttcataagctccaacctgtataggtggaacctttcctcaaaaccattttatcttagacatctatgtttgttctgtcaccaaccatatctacctagcaataaaaatatctctctccaatccaacaagttgtacctctgcaggagaggatgttttattaaataatgagttcctatcattgaaagcatttaagcaaacttagatatactagatgctttggatctactagatggaatttaaggttccttataattctaaattctactgataccatgatttttatcaccttttaccaactgtgcctgcagttacactagttctcctactcacactttcttgggggaatggcttcgtgaaaytgactgttacagctatctactgctatataatgaaccaccccaaaacttactgacataaaacaataattttattacacttatggattctacaggttaggaatttggacagagaacaatagtttgtctctgcttcccaatttctgggacctctatttggaagacatgcatggctaagtatgac

SEQ ID NO: 250875 - DNA, 656 bp, Homo sapiens
gacagagcatagaagactttttgggcagttaaattactctctatgatattacaatgatggacacatcccactatacgtttatcaaaacccataaaatgtacaacaccaagagtgaactttaagataaactatggactttgggagattatgagtcagtgtggtctcatcagttgtaacaaatctaccactcttttgggggataataatagtaataataattatgagggaggctatagatgtgtgggggtagggagtcgatgggaactctctgtaccttctggtcaatttcactataaaaactactctaaaaaaggggggttgaaaagttacgtgttgggtacaagtttcactattcaagagatgagtatgctgaaagcccagactttagcactacgcaatatacgcatgtaagaaamctgcccttgtaccccctaaatctattaaaaataaaaaataaaaaatgaagtctgtattttaaaaaagttaactgtctgtaagagcctgaaggcttctgagagccaggatgaaagctccttgaagtcaggaatcatgttgtcttgctcactgtggaagcctttggcacccggcacataatagacacatgaagagtcaagaggacaatagttgcaagcatgggctctgaagccagactacca

SEQ ID NO: 250876 - DNA, 510 bp, Homo sapiens
gggagcgcagaaggtagtaggcatcagcaggtgtgagcccacttggtagccatgatcatgagtttggatttcattgtaggtgtgaagcgaagcccctaacattgagtcccctggtatgatcttaggcttgtccatgacagatcaatggatcccaagtcaagagaaacgagagacaactggmtggggcttcttctcattttgcaaaatgaggcccgtgctaaaggctctttacaggtctgacattccatttttttctaggttctatttaaaagactatttaggtgaaagcagaaataatatgaatataatcactttctagccttggctgacctaattagaaagaaatctggtcttctgcttcttccatacatcttccaacactcatgaacacacccttgagtcacttcataaataacaacaataatattaataatatagaggcatttccaggagcaaaatgcaatttgtcctttggtcaggggagaattcataattactgtttttaaaaat

SEQ ID NO: 250877 - DNA, 549 bp, Homo sapiens
actagatttaccctcctgacttagacaacttaaaaattgataaaatatatgaaacaacagtattcaaawgtttggacaacaggcagtaaacggcagtgatccccgaaggaagaaaaacaaattagggtggtcctgtgattactctggctaactacaaagagcaggaggtaagaaaggacttggcttgctagaaaaacgaagcaagccaggatgcttggagcagaggaaacaagcaatacgagatgagctggaaaggaagccagaagggctgtgataagaagcttagatttcactctaagtgctttgggaagccattagaaaaatttaagaagggtagtaataggatcagaaaatagcttttaaaaaatgactctggctgattgtatggacaaaggactgaaatatgcaaagagcatgaacaaggtgattacttcgggggccatgcaatagtccaagtgggagacgatgttggcttggcaagagtggtggcagaaaggtggagaaacacaagtggtgtttcttagacattaatatagggcagacccaaaa

SEQ ID NO: 250878 - DNA, 599 bp, Homo sapiens
tcttgcctcatctagcagcaagtagcctaacaaatactctatcttaagcttcaaagaatatagatttattacttcctgagtcctatggacaaaacctttaatcacctatcagataattccagtttcacaaatgatgtggatccatttcttataagctcagagattttctagcactgactccaagatccttcctgttaaggaggacaggatgttatcccgtttagctctaaaaatgctgttcctcttctctcctactgcgtcagagtgtgtatgtgcatgtgcgtgtttgggatggagctattgtctaattcattcatttattcattctgcaaatatttaaagacttactgtgtgccaagtatgcatggtgcatgaaaatgcactagtgactacaacagtcaccagctaaagtccctgtattcatagaacttacagaccaatgagggcaaatatttaaacgggtaactcaataagcagtgatgaaggaaatgagaaaagtaaacctaaaaaagccttcagtaataatccmgtctaaatggttcctggtgcccccaaaccacacccactttaatttttgatcattttctcatttacttcat

SEQ ID NO: 250879 - DNA, 579 bp, Homo sapiens
aatcagtatttttcagcattttgtggggggatggttctccatgtgcacatccacccagacatcacrgtcacgcagccgcatccattaactgtcatcctggcagccagtggatgaggctaagtgatactaaacgtcaatcaaagctgtccacacacatttccaaacctcccctaaggtgacactgttgcctttggctgagaaccactgacttggattgtgtagagttgaaagaagactgaaatgaagcaacatagcacagagagactggagtcctggggctattgtacactgtgaccaaagaaagccctgccaaagaggtgatatctgagttgagactggaggagggaatggaagcaggccagtgaaaaatctatagaagtgtgttacaggtgcaggagaatgtcattggatataaaggccctgagaaggaacatgtatgatgtgttggaaggatagataaggaagggcagattgcctggagaagaagagtgggatgggaagtgagaccagggaagaggcagggctttctgtgtggggctggcaggtcatggtaagaagtgtagctttgattccaagaga

SEQ ID NO: 250880 - DNA, 320 bp, Homo sapiens
ccactgacttggattgtgtagagttgaaagaagactgaaatgaagcaacatagcacagagagactggagtcctggggctattgtacactgtgaccaaagaaagccctgccaaagaggtgatatctgagttgagactggaggagggaatggaagcaggccagtgaaaaatctatagaagkgtgttacaggtgcaggagaatgtcattggatataaaggccctgagaaggaacatgtatgatgtgttggaaggatagataaggaagggcagattgcctggagaagaagagtgggatgggaagtgagaccagggaagaggcag

SEQ ID NO: 250881 - DNA, 563 bp, Homo sapiens
aaataattctttagtagtactcacctactttctgcttttcaatatatttactacctttctcagttagtattctccagagaaagagaaccaatagagtgtggagggggtgaatggatggatggatggatggatgaattaatgggggaaggagagagggagggagtgaggcagggagggagggagggatggatagataaatagatagatagatagatagatagatagatagatagatagatagatagatagatggtagctcatgtgattatggaggctggcaagttcaagatatgcagggtgagccagcaggctggaggccttaggaagagccattgtccagttyatgtctaaaggccatctgctgaggagtttccttttgcccagggaaggtcagccttcgtcctgtttaggccttcaactgaatctatgaggcctacccatattatggagagcaatctgctttacccagagtccactactttagatgtaaatctcacccaaaaatatgctcataattgacaacgtgagctcagaatagttaagtgatttgtctaatgcatact

SEQ ID NO: 250882 - DNA, 523 bp, Homo sapiens
accctccaccctctgataggccccagtgggtggtgttccccagctttctcttagtaagactttgcctagggtgtcttttgccatatctttatttctagcctttctatattgttttgctttaaatatctcttttataagtagtatttacttgcaattttgtacatgttatggatattttctattcctactatcttggtttgtatttcttctctaccattctctttcttttcatcttttttgttttttgtttcattttgtttttgttgagacagagccttgctctgtcgcccagcctggagtgcagtggctcaatctcagctcactgccactctgcctccagggttcaagtgattctcctgccacagcctcctgagtagctgggattacaggtgygtgctatcgcacccagctaattattgtatttttagtagagatggggtttcatgatgttggccaggctggtctttaactcctgacctcaagtgatccgcctgcctgggcctcccaaagtgctgggatgaca

SEQ ID NO: 250883 - DNA, 574 bp, Homo sapiens
ggttctagttccagcctgtctgcctaaagccatgctcttaatcactacatagaaagcagaaactgaccatatcctaacatcactgtcagtttgatggagctgacagagcttagcaaccatcagtgccaaattaaccccctatttaaaaatataagtccagaggtacaaacatgatgctaaattccttatacatgctatttaatcaatttagttctgtaagggaggtactgttactatctccattttgtacattattatccccattttctagctraagaaactaaggctgtgtaatctagggttactggttcagaaatagcacagctaggatgttaattcagggctctgtgcctccaaagccctaattaaccacaacagcacaccacaaagaaaggctcgagtaaccccagggttagtagtctgggctttgggttttttttccctgtgttattctgattttttaagaggtcatacctccttcaaatcagtcagcattagactaggcatatttcctctacaacaaatcagattgtatctctcccatgacataagccagtctctatgtagttgtttt

SEQ ID NO: 250884 - DNA, 590 bp, Homo sapiens
gaaacaccatatgaacctgaaaataaagtgtgctaacacattgttgagaaagagaatgtagcatgtgttccatgattctactagagggtagaatcccatccgtacacatattaaacttatgaaatctaatgatacctacttagtggggtaagaaaaaaaawttttctaagcagattttcatagaacatggcccctaaatataaaccagctgcttcatcaggtgctcagccaaagaaaagcttcttgctccaatgctggaggaaaaacaggctgtgttggattggttgagagaagaatgcagtatctataaagccagggaccatactttatgggctgtgaaagggatttttaactatagtttgaacccatgccatatttgctgtacgtgctgactttgaacctaactcaattgcaggatgtggatgtatctttactgaatatgtttgtgtgtaatttcttttaatacagcagatctgtgcctaacggctgtggaaagcacccactgtgttttaaactacaaattcctgaaatctaaacaaggactggttattcacaataatgattataatgataaacatggacctcgtgat

SEQ ID NO: 250885 - DNA, 449 bp, Homo sapiens
tctcctgcctgtccctgggcaatggaatgtctcggtataaaacccgattgtatgctccatctactgagatagggaaaaaccgccttagggctggaggtgggacctgcgggcagcaatactgctttgtaaagcattgagatgtttatgtgtatgcatatccaaaagcacagcacttaatcctttacattgtctatgatgcmaagacctttgttcacgtgtttgtctgctgaccctctccccacaattgtcttgtgaccctgacacatccccctctttgagaaacacccacagatgatcaataaatactaagggaactcagaggctggcgggatcctccatatgctgaacgctggttccccgggtccccttatttctttctctatactttgtctctgtgtctttttcttttccaaatctctcgtcccaccttacgagaaacacccacaggt

SEQ ID NO: 250886 - DNA, 264 bp, Homo sapiens
  misc_feature (1)...(264): n = A,T,C or G
tcactgccctctagcctgggagacagaacaagactccgtcttggaaaaaaaaacannaaaaaaaaaagactgatgctgctaggccattcttagcaaragatgaatatcatgtggtgagactagagagaaagtttggctcagggattgcagagcctcagaggccacagtgaaggttttaagcaggggatctgacttgatcaacctggcattttccaaagatcactgtagctgcatgttatggattacttgtttgtgtccccccaa

SEQ ID NO: 250887 - DNA, 555 bp, Homo sapiens
atcaaatgtggtgcctgcatgcagcscctttattgagtagacaactgtaaaactagttatttcttttctgaggtttggtgattagaatggcagaagtagaaaacaaaactggcatgatgatgctttctgctgaaatgtaaatcagttttacttgtcaaagatgtcaaggatggcagatcccagtgacttctttactatgtcttactttaaaaacaaatcccagcccatgttctcattataaactaagtatgatttatacttagtaatggaagataaatatttggactcctgtacattaagaaacattctctaaataagaagttttcaatgggttactgaatttgaacaaaggcatttcctttacatcttaaattctcaaggtatttcagactccatattttggtaagtgaaccaagttggctcttgccagtttgctatggtttggatctgtgtccccacccaaatctcatgttgaattgcaatcctcaatgttggaggtagggtctggtgaaaggtgcctggatcatggggttgaatttctcataaatgttttag

SEQ ID NO: 250888 - DNA, 565 bp, Homo sapiens
acctttccttttaatggcttaatggctgattgacactcaggattggcgttttcatatgccatcaactccactatgaccttacsggctttttcatcggcaattgacttttgagcaacatcttggagccttgccacaaaatcagggtagggctcttttgaaccttgtcttactgtattaaatgaggggcaggtacttcctgggtcttggattttttcccaggctctaaggcagatagctctaacttgctcaatggcctcattttgcattaatgcttgttgactaatagtactccaattttgacctattcctaatagttgatctgcatctatgttaactggaggattggcagccctatttcttcggacctgttcttgtaccccatcaatccaccaagtcttaaattgtaaaaattgagagggtgagagagacgattttgccagaatctcccaatcataaggaatgagtctatgtccataagcaatggaatctaataatgtcctcatataaggggagttgggtccatactgttttactccctctttcatatcttttagcatttttatcg

SEQ ID NO: 250889 - DNA, 430 bp, Homo sapiens
accatgggcaaaattgttctattrtttgaaatagcttgattagattttttgtagatactttaactccccctctttttaaaagaattttaataaagctgagataagaggcatatttacttttaattttacttttagtttgccccattatcaccctagcttcttccgagcgcgcaagcttaccgtaaggctgactgtagatgtactcgggatctctcgtcgacttgtcctcaatgaccacgctcgagcgtaccttcaccctagagaaaagcctccacgttgggcaccagatgtaggggtgggttgcccctacacacctgtgggtgtttctcgtaaggtgggacgagagatttggaaaagaaaaagacacagagacaaagtatagagaaagaaataaggggacccggggaaccagcgttcagcatatggagga

SEQ ID NO: 250890 - DNA, 430 bp, Homo sapiens
accatgggcaaaattgttctattatttgaaatagcttgattagattttttgtagatactttaactccccctctttttaaaagaattktaataaagctgagataagaggcatatttacttttaattttacttttagtttgccccattatcaccctagcttcttccgagcgcgcaagcttaccgtaaggctgactgtagatgtactcgggatctctcgtcgacttgtcctcaatgaccacgctcgagcgtaccttcaccctagagaaaagcctccacgttgggcaccagatgtaggggtgggttgcccctacacacctgtgggtgtttctcgtaaggtgggacgagagatttggaaaagaaaaagacacagagacaaagtatagagaaagaaataaggggacccggggaaccagcgttcagcatatggagga

SEQ ID NO: 250891 - DNA, 626 bp, Homo sapiens
actacctcttttgcagagcagacgctgtggcttaatgagaattagtgacttgcccaagggaaagatgctcaaagtagattagacccacaacagtcaagttcagagcacatgccctccctaayagcaacatactgcctgagggctccagactagtattatacttcgagagtcctgccttactaccaggaaagggacctgaagtcacatgatgctgaaaactgagcagcacttagcaagcacctgttagatgaacaaacagattccttgaaccctttctttatctagatcagtggttataaatgagggaggcatatcaggcagactttattttaactgtcatgactagtgtatatggggggtactactggcacatactgagtagaaaccactgatcctacagtgcacaggacagctcccgcaataaagaaactttcagcccaaaatgtccaaagtgctgaggttgagaaacactggtttagatgaaaccagccaagctattacatctacagatcataaagcagcttctgccttgagaagtttcttagaatcatgatcttctttggtttctagacctgatcttgccctcatgcagatttctgtgtttttgttatatcttagatgcctgc

SEQ ID NO: 250892 - DNA, 626 bp, Homo sapiens
actacctcttttgcagagcagacgctgtggcttaatgagaattagtgacttgcccaagggaaagatgctcaaagtagattagacccacaacagtcaagttcagagcacatgccctccctaatagcaacatactgcctgaggkctccagactagtattatacttcgagagtcctgccttactaccaggaaagggacctgaagtcacatgatgctgaaaactgagcagcacttagcaagcacctgttagatgaacaaacagattccttgaaccctttctttatctagatcagtggttataaatgagggaggcatatcaggcagactttattttaactgtcatgactagtgtatatggggggtactactggcacatactgagtagaaaccactgatcctacagtgcacaggacagctcccgcaataaagaaactttcagcccaaaatgtccaaagtgctgaggttgagaaacactggtttagatgaaaccagccaagctattacatctacagatcataaagcagcttctgccttgagaagtttcttagaatcatgatcttctttggtttctagacctgatcttgccctcatgcagatttctgtgtttttgttatatcttagatgcctgc

SEQ ID NO: 250893 - DNA, 551 bp, Homo sapiens
tttgtatatcataaatagtaacccttttcctgtcatttttatcttccataagtgattttctttttatkattataaaaataatcagaatttttaaaattaacataaaccttcaatcagtatagaactataaaaatcattttaaacccatagtcttagtctattttgtgtttgtataatagaataccacagactgggtaatttataaagaaaagaaatttatttctcacagtattagaggctggaaagttcaatatcaaggtgccagcatcttgtgagagtcttcatgcaacatcaccccatggcagaagcagaagggcaaaagagcaccccggggaggcaggcatcagtttttaacaagaggtcttatttgattctgatgtgcagccaaggttgggaatcagacaatgtaaccctgaaatgtcaatcttaagtcaatttgtttctaaatcaaagtgttgctagtaattactactgccatctgttggtgggaggcagaactgacattctatggatatctatgaaaggccatgttttttaaattcttagaaatg

SEQ ID NO: 250894 - DNA, 551 bp, Homo sapiens
tttgtatatcataaatagtaacccttttcctgtcatttttatcttccataagtgattttctttttatgattataaaaataatcagaatttttaaaattaacataaaccttcaatcagtatagaactataaaaatcattttaaacccatagtcttagtctattttgtgtttgtataatagaataccacagactgggtaatttataaagaaaagaaatttatttctcacagtattagaggctggaaagttcaatatcaaggtgccagcatcttgtgagagtcttcatgcaacatcaccccatggcagaagcagaagggcaaaagagcaccccggggaggcaggcatcagtttttaacaagaggtcttatttgattctgatgtgcagccaaggttgggaatcagacaatgtaaccctgaaatgtcaatcttaagtcaatttgtttctaaatcaaagtgttgctagtaattactactgccatctgttggtgggaggyagaactgacattctatggatatctatgaaaggccatgttttttaaattcttagaaatg

SEQ ID NO: 250895 - DNA, 596 bp, Homo sapiens
gtaatacttcatcaataacagttaaaaaacagcaaaaacaatttttgtgcttaatcctaaccaaactaaccaaaaattaaaccaccgcctctcccaatcccactctccccagctataaatgttaattgaaattttcctctactggggtattttaagatgtctctttttttcttgtggcattacacaatgtaaaacatcaaaggaaataacaggaaaggcagtgaacagggaaacacactttgagaaatagtgatattggcataaaaagtaagtgtctggggaaaaaataagataaaactggcagaattacaggtttctgcatgagttggtaattagcgagtttatcttctgagaaaaaggtatctttcctctcctttttatagtcaggccaaaagaagtcaatgacacaaagagcatgaaattttttgccatgcaaaccatttttgaygcactgaatttaaaatatatacattaattccccaggcagcttttatgcatttattattcttacagctggccataggggataagtctttcaaatatatattttatatgtctttgaaatatagatattaaacatagatattttatatatt

SEQ ID NO: 250896 - DNA, 574 bp, Homo sapiens
gggaactactgtcgtcttgctgccctgagtgagagctcattgaagaactgaagttacacagagcaaaagcagccagaggagaaagagaagtcaggtgctgactacactgtttgagcctggatcatgcagagtctgaagccaaatctgctcttgaactttttattacatattctctagcctaaactcaggatcatttttgcttaaatttgtctgaattacattttctatcacgtgcaattgaaagaaaaaacagagtcctgaccgatgcagtcctcttcccactgcatttctggctgtacccagccccacagcatgaacacaggaggatactataaatgcccaygaaagaggatgacagcctggagaactttgagctaggaagagaaatcctgcagtactttagaaaccctaaaaggcaagatgagtaagaaaaaacagcaatatcaacaatcattgagcatcaacaaccaatgattgtcaacatgtgtcccagactgtgccatatatcgttgcaagcttgtgtcttatgaaaacttgctaaaatcccctgtaatgaacagaaactgacgctcaa

SEQ ID NO: 250897 - DNA, 574 bp, Homo sapiens
gggaactactgtcgtcttgctgccctgagtgagagctcattgaagaactgaagttacacagagcaaaagcagccagaggagaaagagaagtcaggtgctgactacactgtttgagcctggatcatgcagagtctgaagccaaatctgctcttgaactttttattacatattctctagcctaaactcaggatcatttttgcttaaatttgtctgaattacattttctatcacgtgcaattgaaagaaaaaacagagtcctgaccgatgcagtcctcttcccactgcatttctggctgtacccagccccacagcatgaacacaggaggatactataaatgcccacgaaagaggatgacagcctggagaactttgagstaggaagagaaatcctgcagtactttagaaaccctaaaaggcaagatgagtaagaaaaaacagcaatatcaacaatcattgagcatcaacaaccaatgattgtcaacatgtgtcccagactgtgccatatatcgttgcaagcttgtgtcttatgaaaacttgctaaaatcccctgtaatgaacagaaactgacgctcaa

SEQ ID NO: 250898 - DNA, 570 bp, Homo sapiens
tcttttgttcactgtgtacacatactacctaatacagtgattggcacttaataaatgtttgtcaaatgaaagaatataattctaagatatttaatgacctgaaacacaaagcctgacttggttcaaagaggtttttcttctcaggcttatttcaatctgtatgacaaagccagtaaaagaagaaattagggacatattgaggctgttgaagggtgtgagcaggaaatctcaaaattatattatttggataggattcccaggggttttggcggggtgctggtgagtggcagtttcattctggaaacaacagctctgatatgtcgctgtaagccagagccagcctatcactcctgctttctgaacaccatccaccattgatccatggaagaaacaggttttttgaccaaagygaggtttaacgctccactaattctttgagggaaaatgccccaggaccaggagaaatatatctatagaaaataaacatcagtatagatagcacaagaggcctttaaatgcttcttttcacgtttttaaaaaatggaattaagatgcatattttttaaaatg

SEQ ID NO: 250899 - DNA, 624 bp, Homo sapiens
aatgagaactggtatctaggtgaagagtggatagggttaggtggagaaaaggatattttatcaggctgtgatccaactctccttaccctccctccttcctaggaaattcagtctctgaacattatcatcagtaatagtctgataagtatatatatttctagagccacccctggtgtgccaacaaccttcagggcaaaaattctcaaatggaaatggtattattgtttaagtctctataggcaagacaatgaagattatacaaatgaatttaaggtctggttcatcactcccctcaatggtggccaatctaactttaaagacaaaacaatccayaaatagttaagaaaaaatatctaggctgtttaaggcaacaaaagaagtcatttttttttattcattaaacaaatatttatgtagcaactatgaactcaacattgtgtggggaacaaaaatggctaagatccatgataaatcaagaaagttttcaatgggtcttaagggggagtagaaattggattggtgagaaagtgaagaaatatagcccaggtagatgtaatgaagggaataaagtcagataaaggagaaagatgtctttaagaacagcaaggaatccagtttggttgt

SEQ ID NO: 250900 - DNA, 581 bp, Homo sapiens
cccttggtggatggaagagatgctaaaacctcatagtcaatatagaaaagtcagaaaatcttccccaagcaatctttcagaatggaccatttttctacaattggaagttaatggtaagaatgctaataatagctaccataggggctggagccagacagctgacatccagggacaattctaccccttggcaacaatatgaccttgggcaaacttcatgacctgtgttgcttcaggagttacatccataaaatgacaatgatcttagtacctacttcataaggccattgtgaagattcaataacatgatgtgcataaatgattagcacaatcctggcacaaatcatgtctccataaatgtttcttcgttagatggtatgtgtcaatcgtcrtgctaagttctcctaacagtgctactgaaaatgttacatatccccaacgttaaggaggggaatactgatatcaagaaagactaagcagcaaacccaaggccacatggttggtaattagcacagccaggatccaagcccaagtccacataactctaaaaaccctcttataccattcaaattgtgtgcttgtgt

SEQ ID NO: 250901 - DNA, 581 bp, Homo sapiens
cccttggtggatggaagagatgctaaaacctcatagtcaatatagaaaagtcagaaaatcttccccaagcaatctttcagaatggaccatttttctacaattggaagttaatggtaagaatgctaataatagctaccataggggctggagccagacagctgacatccagggacaattctaccccttggcaacaatatgaccttgggcaaacttcatgacctgtgttgcttcaggagttacatccataaaatgacaatgatcttagtacctacttcataaggccattgtgaagattcaataacatgatgtgcataaatgattagcacaatcctggcacaaatcatgtctccataaatgtttcttcgttagatggtatgtgtcaatcgtcatgctaagttctcytaacagtgctactgaaaatgttacatatccccaacgttaaggaggggaatactgatatcaagaaagactaagcagcaaacccaaggccacatggttggtaattagcacagccaggatccaagcccaagtccacataactctaaaaaccctcttataccattcaaattgtgtgcttgtgt

SEQ ID NO: 250902 - DNA, 581 bp, Homo sapiens
cccttggtggatggaagagatgctaaaacctcatagtcaatatagaaaagtcagaaaatcttccccaagcaatctttcagaatggaccatttttctacaattggaagttaatggtaagaatgctaataatagctaccataggggctggagccagacagctgacatccagggacaattctaccccttggcaacaatatgaccttgggcaaacttcatgacctgtgttgcttcaggagttacatccataaaatgacaatgatcttagtacctacttcataaggccattgtgaagattcaataacatgatgtgcataaatgattagcacaatcctggcacaaatcatgtctccataaatgtttcttcgttagatggtatgtgtcaatcgtcatgctaagttctcctaacagtgctactgaaaatgttacatatccccaacrttaaggaggggaatactgatatcaagaaagactaagcagcaaacccaaggccacatggttggtaattagcacagccaggatccaagcccaagtccacataactctaaaaaccctcttataccattcaaattgtgtgcttgtgt

SEQ ID NO: 250903 - DNA, 581 bp, Homo sapiens
cccttggtggatggaagagatgctaaaacctcatagtcaatatagaaaagtcagaaaatcttccccaagcaatctttcagaatggaccatttttctacaattggaagttaatggtaagaatgctaataatagctaccataggggctggagccagacagctgacatccagggacaattctaccccttggcaacaatatgaccttgggcaaacttcatgacctgtgttgcttcaggagttacatccataaaatgacaatgatcttagtacctacttcataaggccattgtgaagattcaataacatgatgtgcataaatgattagcacaatcctggcacaaatcatgtctccataaatgtttcttcgttagatggtatgtgtcaatcgtcatgctaagttctcctaacagtgctactgaaaatgttacatatccccaacgttaaggaggggaatactgataycaagaaagactaagcagcaaacccaaggccacatggttggtaattagcacagccaggatccaagcccaagtccacataactctaaaaaccctcttataccattcaaattgtgtgcttgtgt

SEQ ID NO: 250904 - DNA, 598 bp, Homo sapiens
tccactatcgaatattaactttatgtctattttctagtagcaataaaaaaaaaatcttctaaataggttacttttccttagataaaaacaaacccaaaaaaagttctgttgatattttctcctttgtcttgaccactaagggaaaaaaataatcttttcttccagcacaagttcattattaacccagttaacgtttgcaaattaagatacaayattagacatttgtacttactttacagaaattttcctcttaattggactgctttcctataaaaatcatcccgccagcatctgtggtaagatagattctggaaaaacaatgtgccatgccaaattatcaggtagaattagattgctctatatttctgtttgataacaacactgtgcctttgcataattcttgctgattatcagaaggaaaaaaccataactcagacagatgagctttattggcactggtcccttctaggaaagaaagaaaaatgtatgaacagaagcatttgcaagtgccatatatgttgagagataaaattccaaacagtctgtaaacttagcttccctgcaaccttaaaaaataaaaatgcctccctatatttgg

SEQ ID NO: 250905 - DNA, 508 bp, Homo sapiens
catgataattattgagagaacaaggaaactagaaaagttgaacattagaatggtagcttttattctgctaattttattatctggattgtcttttcaattctagactcttcctttggttctgcagttgggtgtcctttgcaagatgctgycccctagttactaaatgttttcaggaactctgaggtctagggccttgtgtttagcaccagatcagagcaaggcatttctaaacctcatgataactggtcatgaattctctcccttccatccatagccagtctgtccttgtcttgtgtaacagtttcccacataagcagtcaaactttcgtcttaataggctaactacatcaggactataacaactcattaatagattagtagttttctagggcaagagacaatagcaataaatgaaaatttatattaaaagatgttgcttctttatgaaaactatggtatacctagaatcctttgaactctttttgcaggactaagaatgaactgacct

SEQ ID NO: 250906 - DNA, 508 bp, Homo sapiens
catgataattattgagagaacaaggaaactagaaaagttgaacattagaatggtagcttttattctgctaattttattatctggattgtcttttcaattctagactcttcctttggttctgcagttgggtgtcctttgcaagatgctgccccctagttactaaatgttttcaggaactctgaggtctagggccttgtgtttagcaccagatcagagcaaggcatttctaaacctcatgataactggtcatgaattctctcccttccatccatagccagtctgtccttgtcttgtgtaacagtttcccacataagcagtcaaactttcgtcttaataggctaactacatcaggactataacaastcattaatagattagtagttttctagggcaagagacaatagcaataaatgaaaatttatattaaaagatgttgcttctttatgaaaactatggtatacctagaatcctttgaactctttttgcaggactaagaatgaactgacct

SEQ ID NO: 250907 - DNA, 598 bp, Homo sapiens
tccactatcgaatattaactttatgtctattttctagtagcaataaaaaaaaaatcttctaaataggttacttttccttagataaaaacaaacccaaaaaaagttctgttgatattttctcctttgtcttgaccactaagggaaaaaaataatcttttcttccagcacaagttcattattaacccagttaacgtttgcaaattaagatacaacattagacatttgtacttactttacagaaattttcctcttaattggactgctttcctataaaaatcatcccgccagcatctgtggtaagatagattctggaaaaacaatgtgccatgccaaattatcaggtagaattagattgctctatatttctgtttgataacaacactgtgcctttgcataattcttgctgattatcagaaggaaaaaaccataactcagacagatgagctttattggcaytggtcccttctaggaaagaaagaaaaatgtatgaacagaagcatttgcaagtgccatatatgttgagagataaaattccaaacagtctgtaaacttagcttccctgcaaccttaaaaaataaaaatgcctccctatatttgg

SEQ ID NO: 250908 - DNA, 583 bp, Homo sapiens
agctttattggcactggtcccttctaggaaagaaagaaaaatgtatgaacagaagcatttgcaagtgccatatatgttgagagataaaattccaaacagtctgtaaacttagcttccctgcaaccttaaaaaataaaaatgcctccctatatttggtgtcatatctcaaggatctgggttatcccattttctatatttcaagacaaaaaaatgtacagtgcctatagatatatctagaatagaatgtcattttaaactagagagttctcgtgaaggaaaaaataaatcgtcggagagagttgtgagtcagagtctttatagaacttggaaattaacaagaaagtgttaaatgaatactcaaatagaacagctgcatatactacttatagagggagggagtcttgttctgccatctgttaatttgtttgcatgctgaaccaaactatggtgtccattttctctagctgtctttatccatctcagtttctgcaagcagttttctgtgwtgggatagataatgtaactttaatctggtacatgcgaacaaagtctgcttaccctttatgtgtctttcaagcattcc

SEQ ID NO: 250909 - DNA, 552 bp, Homo sapiens
ctggcagagaccagcgaccctgggggaggtgctgaccacaacagattttctttgaagccttatttttctttctaaaaattcatgtgaattttacattttamcccatataaaatctattttcactttaatttaataattatgtttctacccccactcccaaattttaaacaaaactggtgtttccaaaagatgtaacatttatcctatggcttcctgtactttttagtatacccccatatcctcccctcttcctaacgcccaaggatatatacaggtaccccggttggagaagcacagtttctagtatgtgggaggtaatttgagagcatttcgctggacagcagagttaataaaaattgtgttttatggaagattaacacagtggtcatgtgaataaaggtaggaaagttagaaggttttgctttagtctcaatgcaaggataatttggaacctagatcaagaatggtggctatagaaatccaaagaaagagaagggggaaaatgaacattttcttttaaaataactatgggtgttataagtgacattagtg

SEQ ID NO: 250910 - DNA, 552 bp, Homo sapiens
ctggcagagaccagcgaccctgggggaggtgctgaccacaacagattttctttgaagccttatttttctttctaaaaattcatgtgaattttacattttaacccatataaaatctattttcactttaatttaataattatgtttctacccccactcccaaattttaaacaaaactggtgtttcyaaaagatgtaacatttatcctatggcttcctgtactttttagtatacccccatatcctcccctcttcctaacgcccaaggatatatacaggtaccccggttggagaagcacagtttctagtatgtgggaggtaatttgagagcatttcgctggacagcagagttaataaaaattgtgttttatggaagattaacacagtggtcatgtgaataaaggtaggaaagttagaaggttttgctttagtctcaatgcaaggataatttggaacctagatcaagaatggtggctatagaaatccaaagaaagagaagggggaaaatgaacattttcttttaaaataactatgggtgttataagtgacattagtg

SEQ ID NO: 250911 - DNA, 578 bp, Homo sapiens
tgcactggctctaccagcaagtccactgcctgtagacactctcttctagcagcaaggcccttctgcattggcaagtctgcagcccaaggattggccacagaaatcccctccttcggatgacaccaaagcagccttcctgtccaggggcagtctgactttttcatgctgagrgggaaatggcataagcactttagaccttaaaatctgagatgttaggccaggtgcagtggcttacacctataatcccagaactttaggaggctgaggcgggcagatcactttaagtcaggagttcgagaccagcctggccaacaaggtgaaaccctgtctctactaaaaatataaaaattagctgggcatggtagcgcacacctgtaatccccactactcaggaggctgaggcaggagaatcacttgagcccaggaggtggaggttgcggtgagctgagattgtgccactgcactccagcctgggcaatagagcgagactccatctcaaaaaaaaaaaaatctgagatgtttctgtgaacagtgtagtcattggagaaacagcccgagttccaatgagaagaaggcaa

SEQ ID NO: 250912 - DNA, 578 bp, Homo sapiens
tgcactggctctaccagcaagtccactgcctgtagacactctcttctagcagcaaggcccttctgcattggcaagtctgcagcccaaggattggccacagaaatcccctccttcggatgacaccaaagcagccttcctgtccaggggcagtctgactttttcatgctgagggggaaatggcataagcactttagaccttaaaatctgagatgttaggccaggtgcrgtggcttacacctataatcccagaactttaggaggctgaggcgggcagatcactttaagtcaggagttcgagaccagcctggccaacaaggtgaaaccctgtctctactaaaaatataaaaattagctgggcatggtagcgcacacctgtaatccccactactcaggaggctgaggcaggagaatcacttgagcccaggaggtggaggttgcggtgagctgagattgtgccactgcactccagcctgggcaatagagcgagactccatctcaaaaaaaaaaaaatctgagatgtttctgtgaacagtgtagtcattggagaaacagcccgagttccaatgagaagaaggcaa

SEQ ID NO: 250913 - DNA, 605 bp, Homo sapiens
gctatttaagaatgaagcctcaggaggaagagtagatgctgggagaagagtcagaaagctatcaaagtgctccaggtaagagatgagcatggcttagactaagatggtgacagtggaaatggtgagattgaattgatttgggccgtactttgagtgtaaagttratagaactgtttttttaaaaaaaagatgtagagggtgaagtaaaggaaagcaccaaggacagctcccagctttttggcctgagcacacacctagatgaaggtgccatagagcgagttcacaacaacagtttgcaggggaaatttacaaattctgtggactctcagatttatgtttttaaaaaggcataaaatgataaaagttgataccttttgctgtttagccctttgctatttatagagccccttctcattgatttatcttcattgatcctcctgaaaacccagtaagtttgcagtatctcttcctttttgcagctgaggaaatcagggtttagaaaacattaagtctgaaacactgacaatgattggttttttttcttacatcatataatgaatacaaccatcctcacgacttgcatggccctgtaagatggagaaggg

SEQ ID NO: 250914 - DNA, 554 bp, Homo sapiens
ctgtattttctattgctctttaagaactctcaggtgattctgatttttttaaaagccagtttaggaatctctgaatgagaaaaatctgattttgtttttaaattcttttaaattcattcaacaaacatttgttgaatatytgttctgtgtaatgtcctgtgtcctggatgccaaggatatgatggaaaataatacagatactgtgttcactgagtttttgcctgcttatgagctttactcctatgctaatcacaacctgaaagatataaaagtgtcataattttgtgaacattttttggttatgattctgacattgagtttactgcagagagaaacctgaagctagccttattttccctctaatacaagaggaattcatgtttaaagatctagataatccataaatcttctttatactggaaatatagtaacgtcaccagaaaaaaatgccatggtattgaccattctctgtaagtgttcatgatgtgtatttgaatcctatgttctgctgatctccgaggatcctcatgatcttattatgtcatttaacctca

SEQ ID NO: 250915 - DNA, 554 bp, Homo sapiens
ctgtattttctattgctctttaagaactctcaggtgattctgatttttttaaaagccagtttaggaatctctgaatgagaaaaatctgattttgtttttaaattcttttaaattcattcaacaaacatttgttgaatatttgttctgtgtaatgtcctgtgtcctggatgccaaggatatgatggaaaataatacagatactgtgttcactgagtttttgcctgcttatgagctttactcctatgctaatcacaacctgaaagatataaaagtgtcataattttgtgaacattttttggttatgattctgacattgagtttactgcagagagaaacctgaagctagccttattttccctctaatacaagagraattcatgtttaaagatctagataatccataaatcttctttatactggaaatatagtaacgtcaccagaaaaaaatgccatggtattgaccattctctgtaagtgttcatgatgtgtatttgaatcctatgttctgctgatctccgaggatcctcatgatcttattatgtcatttaacctca

SEQ ID NO: 250916 - DNA, 586 bp, Homo sapiens
  misc_feature (1)...(586): n = A,T,C or G
atcattagtattatttagcaaaaagtattttttacttcaggyatgtaccttgttgttttaaacataatgctattgtacacttaatagactacagtatagtataagcataactttatatacactgggaaaccaaaaaaatttgtccaactttattgcaatattcactttattgtggtgttctggaactgaacttgcagtatctctgggacatgcctgtatattgttatttacggatgtttttataggatggatttcattaaagtaaggtttactaagttaaaagatgtatatgttattttaacagctacttccagattaccttctgaaaatcttgttgtagtttatgcttccatgagtaaatgcttgttgtttattccatctccaggatagaatgttatatttttctttttatacttccaactgagaggcagcatagtatagtggtttagagttaggactcccttggctagaaatactgagtacctgtctcagctccagcaagtactagttgtgtactttangctaggacacattactgctttgtgtctangatatgctgatctgtaaaaagaggatgatatgaata

SEQ ID NO: 250917 - DNA, 557 bp, Homo sapiens
  misc_feature (1)...(557): n = A,T,C or G
ctcgggtttttctttatagcaatgcaagaacagactaatagaggtaatttgtgatgtttcttgatgaaagaatcagctgaaactcgagaattaatacattcattgaagatcagacaaatatcatagaaannnnnnnnnnnnnnnnnnnnnaacaagaaagttcagctcaaaaagctgattttttcaaagtacaaaatgaaataccatttcaggcatggatcatgactcaaagaagctcttcactttgaccagcacggggttgattcattaactccattgttctcaaatgaatcccacggtgtcccaagagaaactctggagaggcttcaccaagaacagtaattatagcttttccatgttatctagcattcaataaattcttcctaatgtgacctctctctctctctctctctctctctcwcacacacacacacacacacacacacacacacacagcctcagtgtcccattaacaggcttctttcctctcagggaatcatctcggaattcattatccttgtagaaatggaggatgcttcccagctgcataaggaccc

SEQ ID NO: 250918 - DNA, 557 bp, Homo sapiens
  misc_feature (1)...(557): n = A,T,C or G
ctcgggtttttctttatagcaatgcaagaacagactaatagaggtaatttgtgatgtttcttgatgaaagaatcagctgaaactcgagaattaatacattcattgaagatcagacaaatatcatagaaannnnnnnnnnnnnnnnnnnnnaacaagaaagttcagctcaaaaagctgattttttcaaagtacaaaatgaaataccatttcaggcatggatcatgactcaaagaagctcttcactttgaccagcacggggttgattcattaactccattgttctcaaatgaatcccacggtgtcccaagagaaactctggagaggcttcaccaagaacagtaattatagcttttccatgttatctagcattcaataaattcttcctaatgtgacctctctctctctctctctctctctctctcacacacacacacacacacacacacacacacacagcctcagtgtcccaytaacaggcttctttcctctcagggaatcatctcggaattcattatccttgtagaaatggaggatgcttcccagctgcataaggaccc

SEQ ID NO: 250919 - DNA, 586 bp, Homo sapiens
  misc_feature (1)...(586): n = A,T,C or G
atcattagtattatttagcaaaaagtattttttacttcaggcatgtaccttgttgttttaaacataatgctattgtacacttaatagactacagtatagtataagcataactttatatacactgggaaaccaaaaaaatttgtccaactttattgcaatattcactttattgtggtgttctggaactgaacttgcagtatctctgggacatgcctgtatattgttatttacggatgtttttataggatggatttcattaaagtaaggtttactaagttaaaagatgtatatgttattttaacagctacttccagattaccttctgaaaatcttgtkgtagtttatgcttccatgagtaaatgcttgttgtttattccatctccaggatagaatgttatatttttctttttatacttccaactgagaggcagcatagtatagtggtttagagttaggactcccttggctagaaatactgagtacctgtctcagctccagcaagtactagttgtgtactttangctaggacacattactgctttgtgtctangatatgctgatctgtaaaaagaggatgatatgaata

SEQ ID NO: 250920 - DNA, 581 bp, Homo sapiens
gcacaggtaggatttggcacacaggacatagtttgcctaagcctggtttagaacatgggctttagaaacagactacatggatactaatcctgagtccatcatttgcacactcctgaacaagttacttaatctctctatgcttcacttyccccactgtaaatgcaagtgataatactaccacctcctcatagactcattttgagggttaagtgaattagtaaatgtaatgtgcttataaaaagcatctgaaacattgaagtactatatgtgttagctgttattaccattatcatcatgatcattatcaaaggtgccaagagacagaaacccagtcccgtgtcatttgactcccagatcaaaatgagctaaaagccgttagcccagcctatttagttacctgagataataaatttccttttatgcttaaattagtctgagttgattttctgtcttataactaaagtcatcccatctgactaaatgagggaaatcaaggcagggatgacaattcacctaatgcttataacgtaacttctctcatttcagcacccatcacagaaatcaatcaatcacagaattct

SEQ ID NO: 250921 - DNA, 510 bp, Homo sapiens
gtgcacagatagaattgaggggattcagcagagggcacatttcaggccaatatgggcaaagacagaaaggaataataaatagtatactcagagtaacaatttgataggcaaagcagaagagccaagaaatgaatctggagaggaggcaagggagaagatggagggttttataggccaggtaagggtttcagccaytattcaaagctattaagtgacagggtcacatttttgctttggagagattagcctggcagctggctgaaagacagatagctgaggataagaccagagccagagttagcaggctgttgtcatttaaacaggagaggataagggcctgaagtaggtgtatcacaagggatgtagacggtagaggtgacagaagggacagattcaagaaaggagaaggagtgaagaacggtaataaaccaaagatgagagagtgtaagggtgaaactgctctaaggaaaagattatgagctctcccttttgcatgtgttgaatttgagg

SEQ ID NO: 250922 - DNA, 603 bp, Homo sapiens
aactaataagtatgactaactcaactttcttaagtcctttcacttgaaaatttttttaaaagcagcagaaccacaaaaggaacttaaatacgaattgaaaaagggagaggaaaaaaataactatttaaaaaatgaagacaaaattaacacaaacttggaataaacacttgttaaggggggaaaaaaaggcaaaataaaaaatgttttaagaatcacaaaataccagattgagaaaagcaagttaaatgaagtgaaaatgaaaaaaagggattagagagaaaattatgtaaatggaaagaaacaaaagmaatccaatatgtatataatctaacaaaagaatctagaagttggaacaggaaaaaaaaaaagcagataaatattttgagacactttccagaaataaaagacctaaatctatagattgaaagagcatatcatatcccaaattaaaaaatgtcaagaataatcaaagcaagacctagtctagcatagctactggatttcaaagataatgaaaggatctttcatgcatccagagcaaaatgatcaagacatctataagggggaaaaaattaaaatgtaattctaaaggtttcataccca

SEQ ID NO: 250923 - DNA, 580 bp, Homo sapiens
tcttcacgctggataccttacctttatttctccagatgtactctccagtcttctccaccctgctctgggcactagaagtagatatgtttaaactgtatcaatgggctccctccccctgtggcttctgattgggttcagtcaatgggaggccctggcaagagctcagaaggcagaaaggaagtaaaattagacgatttatttacctgctccagctgcttggttgctgtgggttgcttgcatcctgcccctgaaagccatgaatactgtccagtattcttttcattcagctaatctctctgagttccagtaacttctccctcccctctgtcgttcaggcataggagtgacaacactttcccagaaaattccatcccgctggatccaccctgaatcctccaccacctactgccccaccatttccctgttgggattgaatcttgtctctaggaagggaaagggccaggggcaactcaatgttctccatttccttccttaatcccattaaagtrttctgaaaggaaaagtaaatgatgtcactctaaacatatttttaaaatctgggcccagttaaaaatcaaaa

SEQ ID NO: 250924 - DNA, 586 bp, Homo sapiens
aggggctcttgacgaggtcaaggctagagatagagtcaacagggagaaatgaaattgtgagggtacatatgatttctgaaagaaaaagtagcgaatagaagatggaactaggaacacatccccatggcttgccttccaggtcacactagtcatgtggtctcccaagacccacactttagagaaggaactacggaccaggcatgggcagtcagacatggacccatgacccaagtctattcaatgagactcaacctcaggacttttgcaggaactactgggaaagagaagctctctgtctcttttctttctctctttctttcttttttttttctttttctttcttagacagggtctcactctgtcacccaggctgcagcacagtggtgtgatcatagctcmcagcaacctccacctcctggattcaagcaatcctcccaccttagcctcctgagtagctgggactacaggcatgcaccaccatgcccagcttatttttatattttttgtagagatggggtttcaccatgttgcgccggctggtctcaaactcctaagctcaagtgatcatcctctctcagccttccaa

SEQ ID NO: 250925 - DNA, 586 bp, Homo sapiens
aggggctcttgacgaggtcaaggctagagatagagtcaacagggagaaatgaaattgtgagggtacatatgatttctgaaagaaaaagtagcgaatagaagatggaactaggaacacatccccatggcttgccttccaggtcacactagtcatgtggtctcccaagacccacactttagagaaggaactacggaccaggcatgggcagtcagacatggacccatgacccaagtctattcaatgagactcaacctcaggacttttgcaggaactactgggaaagagaagctctctgtctcttttctttctctctttctttcttttttttttctttttctttcttagacagggtctcactctgtcacccaggctgcagcacagtggtgtgatcatagctcccagcaacctccacctcctggattcaagcaatcctcccaccttagcctcctgagtagctgggactacaggcatgcaccaccatgcccagcttatttttatattttttgtagagatggggtttcaccatgttgygccggctggtctcaaactcctaagctcaagtgatcatcctctctcagccttccaa

SEQ ID NO: 250926 - DNA, 607 bp, Homo sapiens
tcaaactcatgcctctctgcctccaggaaccatggtcagcaaggaggctgtcgtcaggacagagtggccacttggagaccatattctccctctgttagcaggttgttgccaccggtctggctgtggggcgtrggattccctagtcaaggctcttattcaagatattctctggagtcccaagcaattctggaaccaggtgtccagaagaggacggccgctgagtgggatggaatggcccttcggttctcagggatgccataccagccagccaccaggcatgatggggaaggaggtcacagggtagagaaggcaatctggaggattcttggaagccaggttggggaagctggacttgacctgagttcaggggcaggtgaggggcttagccagggaactctgtatgctgagaggagagtgaagaatggatggacaggatggaaacagttcttggaggcttccgctgcactccatgcaaaagatgacggtggcctggactgtggccacagtgggaatgaggacaagtagataaactgataacccctgaggggtggactcagtgggctgtgcacctatgaacctggtggcaaaggagagggaggaggccaca

SEQ ID NO: 250927 - DNA, 607 bp, Homo sapiens
tcaaactcatgcctctctgcctccaggaaccatggtcagcaaggaggctgtcgtcaggacagagtggccacttggagaccatattctccctctgttagcaggttgttgccaccggtctggctgtggggcgtaggattccctagtcaaggctcttattcaagatattctcyggagtcccaagcaattctggaaccaggtgtccagaagaggacggccgctgagtgggatggaatggcccttcggttctcagggatgccataccagccagccaccaggcatgatggggaaggaggtcacagggtagagaaggcaatctggaggattcttggaagccaggttggggaagctggacttgacctgagttcaggggcaggtgaggggcttagccagggaactctgtatgctgagaggagagtgaagaatggatggacaggatggaaacagttcttggaggcttccgctgcactccatgcaaaagatgacggtggcctggactgtggccacagtgggaatgaggacaagtagataaactgataacccctgaggggtggactcagtgggctgtgcacctatgaacctggtggcaaaggagagggaggaggccaca

SEQ ID NO: 250928 - DNA, 607 bp, Homo sapiens
tcaaactcatgcctctctgcctccaggaaccatggtcagcaaggaggctgtcgtcaggacagagtggccacttggagaccatattctccctctgttagcaggttgttgccaccggtctggctgtggggcgtaggattccctagtcaaggctcttattcaagatattctctggagtcccaagcaattctggaaccaggtgtccagaagaggacggccgctgagtgggatggaatggcccttcggttctcagggatgccataccagccagccaccaggcatgatggggaaggaggtcacagggtagagaaggcaatctggaggattcttggaagccaggttggggaagctggacttgacctgagttcaggggcaggtgaggggcttagccagggaactctgtatgctgagaggagagtgaagaatggatggacaggatggaaasagttcttggaggcttccgctgcactccatgcaaaagatgacggtggcctggactgtggccacagtgggaatgaggacaagtagataaactgataacccctgaggggtggactcagtgggctgtgcacctatgaacctggtggcaaaggagagggaggaggccaca

SEQ ID NO: 250929 - DNA, 587 bp, Homo sapiens
ggtggcttggtagccttgcaatttaacagagaattcttttccatttctgaaatgtgtgaagactgtaacttgccagatgaatctagcctttcctttctccrtgtgactatatgtgctccactcttcagtgttaaaggctgattactttgtgtcattgtgtaagttcattcatcctcatcttttataagccctcaagcttggacttagcctaagatctgaatggttgtctccagcattgacatccacatcctttgctatttcttgtaataggctgtcaagtcaccaaaccggatgtgatattcaagttggagcaagaagaggagccctgggtgatggaggaagaaatgtttgggaggcactgtccaggtgaataagtgaaaagcagctctgaatgagaaagccacatgagagttgttcagtgaagggttgatatcatttcacaatttccaagattttcttaaaggccttattcttctagagtgacaaatgggatggagtgctttagattactgtgacatttctaggtattattcttcctattttgcagatattttcctcttttaaattgtagagggccagtagcccta

SEQ ID NO: 250930 - DNA, 405 bp, Homo sapiens
taatctcactacttagtggtctgttcagattttatatttcctcstcattcagtcttggtaagttttatgttttcaggaatatatctgttttccctaggttttctagtttgtcagtatatagctgctcgtaagtctctgacactctcttgtatttctgtagtatcagttgtaatgtctccttcttcatttccaattttgcttatttgggtattctctcttcttggttagtctagctagtggtttatcaatttgggttatctttttgaataaccaacttttcattttgtggatccttcatattgttttagtctccatttcatttaattctgctctgatctttattatttcttttattttgctaatttgtggtttggctttttcttgttttctagttctttgaggtac

SEQ ID NO: 250931 - DNA, 426 bp, Homo sapiens
gggcacctgtaatcccagttacttgggaggctgaggcaggaraatcacttgaacccgggaggcagaggttgcagtgagctgagacggcatcactgcacaccagcctgggcaacaagagcaaaactccgtctcaagaaaaaaaaaaactcttaaactctttatgttttttttttcgcatttctaatgtttttgctttattttgctcttgtatatcagtcttgtgtttcatttatcttttagtactaaactgtggatttttaaattttggtccagtagtttgttttctagtttgtaaactagaaatacttaagaattttttttaatgaaatgttataagtaatgtttcacaagaaagaaacgataatggccaaaaatataagggactactttttaactgaaaagaaaaaaagtcacaattacacatcc

SEQ ID NO: 250932 - DNA, 523 bp, Homo sapiens
ggaagagacacatagaatgaagtctgagaggggtccaaagatgagtcttctggtcatcctatccctatggagtcctggatggcattacctccttccagctacaatgtgtactgataagtgttgcaatccagggaagctcaccttagcctttggtttccagtgtttttcttggggtttgataatatactgcccacatrgctgacctttgtctttctgcccttcttgctggtttgtctaatactgtttgtctgccatttccccagaagtcaaaactgagatagcatgcctcaaagcactcatcataaatcatgttatactgtcgggtggccatccaaagcacccagccaaaccaagacactgttattgggcaggacattccagaggcctagagtacccccagtgggcctcccagtacccaaggtaaaggcaagacctctctttgggtgaagttaatttatcactatacaggaatatactttgacttactcattctttcgttgatgggtatctgtattgtttctac

SEQ ID NO: 250933 - DNA, 499 bp, Homo sapiens
caccacctgcacctaccaccctgaccctgtgggccccgggctggacatacagcagctttactgggagctgagtcagctgacccatggtgtcacccaactgggcttctatgtcctggacagggatagcctcttcatcaatggtgagtgtcaggctgaacttggatttacagtgacttttggggagttggtttctttgtttttgagatggagtctcactctatcacccaggctggagtgcaatggtgcaatcttggctctgcaacagtgattctcctgcctcagcctcccaagtagctgggatttacaggtgcatgccaccacgctyagctaatttttgtatttttagtagagatggggtttcaccatgttgcccaggctggtctcgaactcctgacctcaggtgatccacctgccttggcctcccaaagtgccaggattacaggcatgagccaccatgcccggcccaccatgactattatttgtccctgttgtatgccct

SEQ ID NO: 250934 - DNA, 526 bp, Homo sapiens
cagcactgcaacctgtgccccacccttctgcctcctcccatcgcagacaaggagctgcctgccttctccgcagggcttgctgggcagttctggcctggggtccaccctcctgcttttgaggagctgtctgtgctcgaagctctctcctcygccctttcccttctagctctcccgtgctgctagacccttcctcatgcccctcaagcctgatgtggcatcttctgtagtgcgatgagcccatccttggggtacagctttctttccggttactgccccgtctgtatcccccatcccagccacagctcttcactctgtcccctttcctgagtcctcacacggtgcaatctggcttccctactatcatcccaaggacaatacccttgatggaatcgacaatgaccttactcaccagggagacgtggattgcagcaactctggcgctatttcctatctggcaggtcaacagagacacagtggcccacactcttcattctcacacactgctgggggtaacccctagggaagg

SEQ ID NO: 250935 - DNA, 526 bp, Homo sapiens
cagcactgcaacctgtgccccacccttctgcctcctcccatcgcagacaaggagctgcctgccttctccgcagggcttgctgggcagttctggcctggggtccaccctcctgcttttgaggagctgtctgtgctcgaagctctctcctccgccctttcccttctagctctcccgtgctgctagacccttcctcatgcccctcaagcctgatgtggcatcttctgtagtgcgatgagcccatccttggggtacagctttctttccggttactgccccgtctgtatcccccatcccagccacagctcttcactctgtcccctttcctgagtcctcacacggtgcaatctggcttccctrctatcatcccaaggacaatacccttgatggaatcgacaatgaccttactcaccagggagacgtggattgcagcaactctggcgctatttcctatctggcaggtcaacagagacacagtggcccacactcttcattctcacacactgctgggggtaacccctagggaagg

SEQ ID NO: 250936 - DNA, 649 bp, Homo sapiens
cactgggtatgtagccttggatggctccgagtggattgaaacagaggaatatagttcatgtccagaactggtggttcccacattggtcactgccatgcttgaagaaggatgaattttctctgtatctgtggtgacttcagaggcagccagtatttcaactgaggtgccactcagatttggagataaactggttccaggttctgtgcttgtgtctgtagtcttcaccatgcctggggtgaggagtgaagtcacagaaaaagaggaggaagggatactctgcggtaatgtggaagaaacagaaggtgaggtcgtgacaggtaaggacaacagagaagatgaagagctagttttttccacaaagrgagagctcttccatgatggattttcaggactcctactcataagagttgtcatctctgagtgtaaaaatctaggaggaacagttgagtgggtccttgccaagggggctgttgttgtggccaaggtaagagttactctgtgctgtagccccaggagaacttttttgggtggtgatggtcatttgtgttgattctgacatcatggatgaggaagagagcctggtgatcacttcagtgatgatgtctggagacatcgtggactgatcagagtcagggatgtgtattctatt

SEQ ID NO: 250937 - DNA, 491 bp, Homo sapiens
tgtctcttatagaggaagaggtgaccactggagatatcacttttgttggctctgagaagcctggggaagaggaatagagttcctctgtagcactggtggtttccacatgggacgctgctgtattttcaaaaacstgaattgcctctgtctccgtggtggctttagaagcggccagactctcatctgaggtgatattcatattgggagctgaagtggtctcaggttccaaacttgcatccaacatgtctgtggccttcatcatgatagaggtgaaaagagaagtgacagggacaggagaggagtggctactcccagatggtgtggaataaagtggcgaaggtgaggttactgaagatgaagataccagggaagatggagggctgtttttttccacagacagcgggcttggccatgacacatcctcaggacctctgctcataggagttgtcaccactgactgtggaaatctctgagttgtagctgagtgagtt

SEQ ID NO: 250938 - DNA, 491 bp, Homo sapiens
tgtctcttatagaggaagaggtgaccactggagatatcacttttgttggctctgagaagcctggggaagaggaatagagttcctctgtagcactggtggtttccacatgggacgctgctgtattttcaaaaacgtgaattgcctctgtctccgtggtggctttagaagyggccagactctcatctgaggtgatattcatattgggagctgaagtggtctcaggttccaaacttgcatccaacatgtctgtggccttcatcatgatagaggtgaaaagagaagtgacagggacaggagaggagtggctactcccagatggtgtggaataaagtggcgaaggtgaggttactgaagatgaagataccagggaagatggagggctgtttttttccacagacagcgggcttggccatgacacatcctcaggacctctgctcataggagttgtcaccactgactgtggaaatctctgagttgtagctgagtgagtt

SEQ ID NO: 250939 - DNA, 539 bp, Homo sapiens
gctgatcctgtcgtggtgaggggagtagaaattctagtgatggtttccgtggagatttctggtgatattgtggattgagcaggacctggggtggatgttctgcctaaggagagggcttctgttctggagaccttagtagtagcaccagtgggcattccagaaagagaagcacttctctctgttgctgagctggtctcttgagaggtactgatctcccttaatccagaagtcagggaggaagttggctgtgtcatcatagtttctgggaaggcaggagttgatgtggaaacacttgtattccccagagtggaggtggtagccattggagatgtgggttttgttgtcactaagtcagccaaaacagaggaaggggatagatgtttataaatcacagtccctacattgactacaggtgtgtttgaggagggatgaattttctctctatctttggtgacttcagasgtggctaatatttcagctgaggtgctgctcaaatttggaggtgaactggtttcaggttctgagcttgtgcgcaacat

SEQ ID NO: 250940 - DNA, 658 bp, Homo sapiens
ggtgtgcttcattctgaatagagcgtctctgattcccgtctggtgcctgagggtgcatggcccatgagccttagaagagacgtcttcgggccttgcacgttggcctccatagaaacttgtggcaaattctgggctccggactgggtgatggaggtagaggtctgagggcagaggtgggcaggggctccaggccrtggagatccaagtggaattcttcaggcagagcctgtctccagggactaggcttgggcatttgggatgagccctgggggacggccgctctgtagtcaggtttgaggtagaggacacgccaggaagaagggctgactccatgcacaaggtttgctgggggtcccatcaggggcaggaagccttggggagcctcaccctcttctactgaaggcgccacacacacattctctgctctctgggctctcacagatccattttcaatgtcaatctcccagacagtctctgtactagtgagcaggagccagcgggcatgggcagggtacaagagatccttcagggacatcaagagttgctcagggaccaccaggagctgcacattgaggaggctgagtcgcaggctccctgtgggtccagccccaggaactcctgcccccaggcgcaggtgcaggaccattcctggttccaa

SEQ ID NO: 250941 - DNA, 428 bp, Homo sapiens
ggagctcaggcagacctgtctcacccacgcccacctaggtggtgtgaccttacctggggcagctccaggggcagctgtgcagggtggtggggagctggctgtaccggagctggttctgcacctgtggagagagcagagtgtgcaggtgaaagcccttgtcatgcaggatgcccttgagggttcaaggtgccwccgtgagaaagaccaaatacagaagaagccaggtacaggacacccagccacggagctgcaggaggaagctcccgacactctggacagcacagctgctcgcctcatgacgtgacgggacactggcttggtagcaggggactcaggatgaaaaagagaagatgcctcacctggatgaggacccagctcctccactttctggcgttttggggcatttgatggcgtgccgctggagctgt

SEQ ID NO: 250942 - DNA, 608 bp, Homo sapiens
taactgctgctcctcagaagcctcacttcctaatggcgtccagatggaggcctcattcccctgtcaaccacgggtgtctctggtcatttcctcctctagggaggcttcaaaagcgcagagaccagaacccccaggggtgtgcaaccctctacctgtgtctttgaccccctccaagcacacacgcaggggaatgactgacggagaatcccaacccctgtaccctcccgctctgggagcagcctggccaggggcctaccttgcatggccttgtactgcattggggtgatgtgctcaaagcctgggggtggcacgtcccagtatttacggaccttcttcttcttctcgtggcggggggaacgactgggggaggtgggaggggagagcggggcagggcaacctcagtctgaccaacagtgggcctgcgagccccctcccaggcaccctttcaccctccccgcaaccakgtaagctccactctctccagggaaggagagggtctggggcagggcctgggaaaggggtgctggtttcaaggtaagtggactcttcccagtgcttgggccagggctggaaatgggcgggacagggtgcacgggcgtgaggaaggt

SEQ ID NO: 250943 - DNA, 628 bp, Homo sapiens
cctgcgcaccggcggccctggtgtgtccccagtgggaaataacccagcaccacatccccaaccacctcgaaacgcctttcctctcacaaagcmcacagtcgggtgacccaaagacagataccgaatgatgaggagcgggaaaatggctgcccagtgcccgtaattaacatggcaccggacaggcttcgaagcccatggagtgctaagtggataagatggtgccggtcttttccagctctgtattgcagttggcgcacttcgctttctttttttttccctagtccaactgtacatcctaatcggaggagtccgaggctgtgaaaaagaaatagtatctgctctcatttacgttagcatcgcctagtgtcgccacggagaagccccctcgctctcagctccttgcccttagtctgtatggcgccgtgggtgtccctaagccccgccccttcccgctgccctcacccaagatggcgcgggcctggcttcttcaacctccagggctgggaaaggaaagggaaagagggagaagggcggggatgaggaaggggagccaagagggcgggagaaagggggagtacggcgggggaagggagctgaggcggaagtcgaggggccccccgggtggaag

SEQ ID NO: 250944 - DNA, 628 bp, Homo sapiens
cctgcgcaccggcggccctggtgtgtccccagtgggaaataacccagcaccacatccccaaccacctcgaaacgcctttcctctcacaaagcccacagtcgggtgacccaaagacagataccgaatgatgaggagcgggaaaatggctgcccagtgcccgtaattaacatggcaccggacaggcttcgaagcccatggagtgctaagkggataagatggtgccggtcttttccagctctgtattgcagttggcgcacttcgctttctttttttttccctagtccaactgtacatcctaatcggaggagtccgaggctgtgaaaaagaaatagtatctgctctcatttacgttagcatcgcctagtgtcgccacggagaagccccctcgctctcagctccttgcccttagtctgtatggcgccgtgggtgtccctaagccccgccccttcccgctgccctcacccaagatggcgcgggcctggcttcttcaacctccagggctgggaaaggaaagggaaagagggagaagggcggggatgaggaaggggagccaagagggcgggagaaagggggagtacggcgggggaagggagctgaggcggaagtcgaggggccccccgggtggaag

SEQ ID NO: 250945 - DNA, 628 bp, Homo sapiens
cctgcgcaccggcggccctggtgtgtccccagtgggaaataacccagcaccacatccccaaccacctcgaaacgcctttcctctcacaaagcccacagtcgggtgacccaaagacagataccgaatgatgaggagcgggaaaatggctgcccagtgcccgtaattaacatggcaccggacaggcttcgaagcccatggagtgctaagtggataagatggtgccggtcttttccagctctgtattgcagttggcgcacttcgctttctttttttttccctagtccaactgtacatcctaatcggaggagtccgaggctgtgaaaaagaaatagtatctgctctcatttacgttagcatcgcctagtgtcgccacggagaagccscctcgctctcagctccttgcccttagtctgtatggcgccgtgggtgtccctaagccccgccccttcccgctgccctcacccaagatggcgcgggcctggcttcttcaacctccagggctgggaaaggaaagggaaagagggagaagggcggggatgaggaaggggagccaagagggcgggagaaagggggagtacggcgggggaagggagctgaggcggaagtcgaggggccccccgggtggaag

SEQ ID NO: 250946 - DNA, 628 bp, Homo sapiens
cctgcgcaccggcggccctggtgtgtccccagtgggaaataacccagcaccacatccccaaccacctcgaaacgcctttcctctcacaaagcccacagtcgggtgacccaaagacagataccgaatgatgaggagcgggaaaatggctgcccagtgcccgtaattaacatggcaccggacaggcttcgaagcccatggagtgctaagtggataagatggtgccggtcttttccagctctgtattgcagttggcgcacttcgctttctttttttttccctagtccaactgtacatcctaatcggaggagtccgaggctgtgaaaaagaaatagtatctgctctcatttacgttagcatcgcctagtgtcgccacggagaagccccctcgctctcagctccttgcccttagtctgtatggcgccgtgggtgtccctaagccccgccccttcccgctgccctcacccaagatggcgcggrcctggcttcttcaacctccagggctgggaaaggaaagggaaagagggagaagggcggggatgaggaaggggagccaagagggcgggagaaagggggagtacggcgggggaagggagctgaggcggaagtcgaggggccccccgggtggaag

SEQ ID NO: 250947 - DNA, 614 bp, Homo sapiens
ccttctgctacatcccaaatagccacagtcctatcaaaccctccagaaatgagaaaagagcctgcaacagaaaatgaaagggtggagatgggggtcaactttccaagccaagtgagcccaaagccagctgaagatgccttggcgaggyaccacctcatctcactctgacaacactgaaaccccttcctggagtggctccacgaccccaagccaattacagctgattcttatcatttacagtagtcatgttctatgacaggggtccccagtccctgggccacagactggtaccaatccatggcctgttgggaaccaggccacccagcagacagtgagtggtaggcaagcaagccaaagcttcatctgtatttacagccactccccatcgctcgtattaccacctgagctcggcctcctgtcagatcagctgcagcattcgattctcacgggagcatgaaccctattgtgaactgcggatgcgagggattaggttgtgcactctttatgagaatctaatgcctgatgatctgtcactgtctcccatcacccccagatgggaccatctagttgcaggaaaacaagctcagggctcccactgattctacatgatgctg

SEQ ID NO: 250948 - DNA, 614 bp, Homo sapiens
ccttctgctacatcccaaatagccacagtcctatcaaaccctccagaaatgagaaaagagcctgcaacagaaaatgaaagggtggagatgggggtcaactttccaagccaagtgagcccaaagccagctgaagatgccttggcgaggcaccacctcatctcactctgacaacactgaaaccccttcctggagtggctccacgaccccaagccaattacagctgattcttatcatttacagtagtcatgttctatgacaggggtccccagtccctgggccacagactggtaccaatccatggcctgttgggaaccaggccacccagcagacagtgagtggtaggcaagcaagccaaagcttcatctgtatttacagccactccccatcgctcgtattaccacctgagctcggcctcctgtcagatcagctgcagcattcgattctcacgggagcatgaaccctattgtgaactgyggatgcgagggattaggttgtgcactctttatgagaatctaatgcctgatgatctgtcactgtctcccatcacccccagatgggaccatctagttgcaggaaaacaagctcagggctcccactgattctacatgatgctg

SEQ ID NO: 250949 - DNA, 552 bp, Homo sapiens
tctttgacagccaggtcccaggtgatgctggtgtgctgggaagcgagggacaaagctcctttggaccaattcatatcagtcagctagtgaatgagtctccaccaagcacccttaagggcccaggcacagaatggggagacaaaggtcggtggacagaagaggaacagtgtctaggaggaagatatcagcatcagcactgaatcagggtgggagagaggcattcctcacccacccactcatgccactggacccccagttgcctgtggaatgttgtcttgctatctcctagtgctggtcagcaaggcccatgggagggaagaaggaacaggaggacacagctgtggtcatctcagagtggcccaaatagttcctaagaaggcaggggtgaaccacagaggcaggagacaggcaagagttgatttctcactcytgatcttgttttcatgtgtcatttgctatattttacttggtattgtacaacactgtggcctttgaccaagagtagactaggtccagaatctcccattagtatgttttgaattctaggttgtc

SEQ ID NO: 250950 - DNA, 510 bp, Homo sapiens
aaactttttaataacatcttatcaagtgttccatttgtgataaagaacttaattaacgagccacatcaagatgaaaatcaagaaaaatatttagctgaaacactactttgtcctttatcaaacaaaatggctagataaatctcaaagtattaaggtggtcattttttttatttgacttaattttaagtgcttttcatttcccaaatcaaacataaatagggcagccctaaatttgttgcttcacatgggattctgcccccacaaaaatgtaaaataacttccagattttccagtaaaatatactaagccaaacattttgagcaacttgtccactaaaataactttaaaactattttctcaaatacctacctattttttcttttgatcctccagcaagtagattgatattttctcctggtaacaattctaattgctcggtacattygacaaattttccagactcaaagctgcttaatgatctgtaattaaaatattggttagcttgtattc

SEQ ID NO: 250951 - DNA, 463 bp, Homo sapiens
cctgtgcattgcagggtggtaagcagcatccatggcctccacccaccagatgccagcagcgcagccccatgtggtaaccctgactctcaatccaaactctcaaaatgtatccaaagccacctccaacttgcaacccctgtcctggccctgatcactgtgctctaacctcactgtcctgctttcatgcttgttcccaaatttacatttgcttctcctctgcctggaagacccttcttccagatctgcacaggaccagccccttcmcatcatccaagtctcagttcagattgtcacctcctcagaaaggtcttccccagccatcctgtgtaaagcagcccacccacccacttctctatctcattgcccagttttatttccctcactgcacctgttagtgcctgaaatcatcctattaatttatttgttcaggtttgtggtcctgcattaaactaccagcttgatg

SEQ ID NO: 250952 - DNA, 435 bp, Homo sapiens
cagacccacctctgcacaaatagaaatcaaaactacagaagcaggcctgaccatggacctcaccaacytacctgcccagaatctcaggacaggctaactggtgaagggcttccctgccaaagccagcagaagagatgcctacttcttcaaatgttcagacacaatgcaaggccacaaggatcataaataatcatggaaacatgacaccaccaaaggaacaaaataaaaggccagtaatttaccctaaagaaatggagatttatgaactgcctgacaaagatacgaaatgattatcttccagatgctcagtgaactacaagaggacatagatagacaattaaataatatcaggtgtgatgattaatactgagtgtcagcttgattggattgagggatacaaagtattaatcctgagtgtgtctgtgtggatgttgc

SEQ ID NO: 250953 - DNA, 435 bp, Homo sapiens
cagacccacctctgcacaaatagaaatcaaaactacagaagcaggcctgaccatggacctcaccaacctacytgcccagaatctcaggacaggctaactggtgaagggcttccctgccaaagccagcagaagagatgcctacttcttcaaatgttcagacacaatgcaaggccacaaggatcataaataatcatggaaacatgacaccaccaaaggaacaaaataaaaggccagtaatttaccctaaagaaatggagatttatgaactgcctgacaaagatacgaaatgattatcttccagatgctcagtgaactacaagaggacatagatagacaattaaataatatcaggtgtgatgattaatactgagtgtcagcttgattggattgagggatacaaagtattaatcctgagtgtgtctgtgtggatgttgc

SEQ ID NO: 250954 - DNA, 435 bp, Homo sapiens
cagacccacctctgcacaaatagaaatcaaaactacagaagcaggcctgaccatggacctcaccaacctacctgcccagaatctcaggacaggctaactggtgaagggcttccctgccaaagccagcagaagagatgcctacttcttcaaatgttcagacacaatgcaaggccacaaggatcataaataatcatggaaacatgacaccaccaaaggaacaaaataaaaggccagtaatttaccctaaagaaatggagatttatgaactgcytgacaaagatacgaaatgattatcttccagatgctcagtgaactacaagaggacatagatagacaattaaataatatcaggtgtgatgattaatactgagtgtcagcttgattggattgagggatacaaagtattaatcctgagtgtgtctgtgtggatgttgc

SEQ ID NO: 250955 - DNA, 546 bp, Homo sapiens
gattccatgtctttgctattgtggatagcgctgcaatcaacatttcagtccatgtgcctttttggtagaatkatttattttcttttggatacatacccagtaatggattgctgagtcaaatggtagttctgttttaagttctttgagaaatctccaagctactttctacagtggctgaactagtttacattcccaacaacagtgtataagcaagaacctgcattttgaggtcaagctctacttcttaccagctacactgatgtctttcaagttctctgagcaaataagacactatttttcatctatctgattagtgaagttttgttaaatgtaataatacacagtgcataatacagcaaagaaacaggcaactgaatatgttcttggtgggattttattctatttttccaagggcaactgaatcatacttatgatggtgggttgcaaaaataccccctaattcttctcatctttgtatgcactcctgtttgcaatgttacttagcagctcctacctccatgaatctgggttagtcatgggccttgc

SEQ ID NO: 250956 - DNA, 546 bp, Homo sapiens
gattccatgtctttgctattgtggatagcgctgcaatcaacatttcagtccatgtgcctttttggtagaatgatttattttcttttggatayatacccagtaatggattgctgagtcaaatggtagttctgttttaagttctttgagaaatctccaagctactttctacagtggctgaactagtttacattcccaacaacagtgtataagcaagaacctgcattttgaggtcaagctctacttcttaccagctacactgatgtctttcaagttctctgagcaaataagacactatttttcatctatctgattagtgaagttttgttaaatgtaataatacacagtgcataatacagcaaagaaacaggcaactgaatatgttcttggtgggattttattctatttttccaagggcaactgaatcatacttatgatggtgggttgcaaaaataccccctaattcttctcatctttgtatgcactcctgtttgcaatgttacttagcagctcctacctccatgaatctgggttagtcatgggccttgc

SEQ ID NO: 250957 - DNA, 546 bp, Homo sapiens
gattccatgtctttgctattgtggatagcgctgcaatcaacatttcagtccatgtgcctttttggtagaatgatttattttcttttggatacatacccagtaatggattgctgagtcaaatggtagttctgttttaagttctttgagaaatctccaagctactttctacagtggctgaactagtttacattcccaacaacagtgtataagcaagaacctgcattttgaggtcaagctctacttcttaccagctacactgatgtctttcaagttctctgagcaaataagacactatttttcatctatctgattagtgaagttttgttaaatgtaataatacacagtgcataatacagcaaagaaacaggcaactgaatatgttcttggtgggattttattctatttttccaagggcaactgaatcatacttatsatggtgggttgcaaaaataccccctaattcttctcatctttgtatgcactcctgtttgcaatgttacttagcagctcctacctccatgaatctgggttagtcatgggccttgc

SEQ ID NO: 250958 - DNA, 582 bp, Homo sapiens
tttctcttctgtccccttctgaatatttggtgcatttgtttttggttcttctaaatttacattttcaactttatgcaatatagtttgtacacagtttctatcttcccattttaaattttatcggtgcttttttcctacgttctttttgagatggggacattatttcctttcatttttcttcctgcctctactcaactctcaccctccccttttctgttacccttttactctcatgttgccaagacacttaacagctacattctgttctttaacaaacagttaagttgttctttgccaataggttgacactgaaaatagaatacaaactcatgctttcgttattataattatgtaatggtcattcacacctggagcagggattgaactaaaattatattttcttctttacagatctaaagtcacaacccttgggtcactcaaataagaatgtcctaagcctcaaagttaaaagatttttatgttcttacggcartggcttaaaaccacaccacatttaattagcttcatatttagagcatgactttctcatagttttttaagcctggagtttctaattgctct

SEQ ID NO: 250959 - DNA, 592 bp, Homo sapiens
tgacagggttagaccctgtctcaaaaaaaagagagaagaaatatacaattatatactgtcttttgtaatttctacataatttcctttaccaatgttctttgtatgtgtgtattgtgtgtttgtgtatgttgtgtgtgtgtgcatgttcacattactgtctggagtcacttgctttctgcctgaacacttcttgtcaagcaggtgtgctatcaacaaattcaggttttgtttatctgggaatatctttatcttgccttcgtttttaagagagaattttgctggatataagatgcttgctrgatgaaattttattttcagcactttgactgtatcaacccactgcctctggcttccattgtttctgatgaaaagactgctgttaatcttactgggaactctttacatgtgacatgttgtttgctcctgttgcttctaagatttttctttgtcttgcagcatctttaccgtaatatatctggatgtggatctctttgtttggcatacttggaatttgttgagcttcttggctgtgtagattaatgtttttcatcaaatatgagaagtttcaacctttgtttctttgagtacattg

SEQ ID NO: 250960 - DNA, 592 bp, Homo sapiens
tgacagggttagaccctgtctcaaaaaaaagagagaagaaatatacaattatatactgtcttttgtaatttctacataatttcctttaccaatgttctttgtatgtgtgtattgtgtgtttgtgtatgttgtgtgtgtgtgcatgttcacattactgtctggagtcacttgctttctgcctgaacacttcttgtcaagcaggtgtgctatcaacaaattcaggttttgtttatctgggaatatctttatcttgccttcgtttttaagagagaattttgctggatataagatgcttgctagatgaaattttattttcagcactttgactgtatcaacccactgcctctggcttccattgtttctgatgaaaagactgctgttaatcttactgggaactctttacatgtgacaygttgtttgctcctgttgcttctaagatttttctttgtcttgcagcatctttaccgtaatatatctggatgtggatctctttgtttggcatacttggaatttgttgagcttcttggctgtgtagattaatgtttttcatcaaatatgagaagtttcaacctttgtttctttgagtacattg

SEQ ID NO: 250961 - DNA, 592 bp, Homo sapiens
tgacagggttagaccctgtctcaaaaaaaagagagaagaaatatacaattatatactgtcttttgtaatttctacataatttcctttaccaatgttctttgtatgtgtgtattgtgtgtttgtgtatgttgtgtgtgtgtgcatgttcacattactgtctggagtcacttgctttctgcctgaacacttcttgtcaagcaggtgtgctatcaacaaattcaggttttgtttatctgggaatatctttatcttgccttcgtttttaagagagaattttgctggatataagatgcttgctagatgaaattttattttcagcactttgactgtatcaacccactgcctctggcttccattgtttctgatgaaaagactgctgttaatcttactgggaactctttacatgtgacatsttgtttgctcctgttgcttctaagatttttctttgtcttgcagcatctttaccgtaatatatctggatgtggatctctttgtttggcatacttggaatttgttgagcttcttggctgtgtagattaatgtttttcatcaaatatgagaagtttcaacctttgtttctttgagtacattg

SEQ ID NO: 250962 - DNA, 620 bp, Homo sapiens
ctctctctctccaactagatggaagacactctgacaaacggggtcatttcttaattattatttaactccaacatttagccaagtgcctatcgcacagaagatggattatggctatccgaaatgaacgaatagctcctctattagccacagaactcagcatcacctgtgaccttttgttttaactaaagctattcactcattcgttcatcttattgcggtaaaaacacatatcataaaatgtaccatcttagccatttttaagtatacagctcagtagtgttaagtgtatttacattgttgtgaagcagaactccagaacgttttcatcttgcggaactgaaactctgyacccactaaatgattccccatctctctcctgctcccaggccctggtaacccccattctgctgcctctacgaatttgactgtgttaatacctcctatactgaaatcatttggtatttgtccttttatgcctggcttattttattcaacgtttatccaggttgtggcaagtgatgggatttccttcctttttaaggctgcatagtattccattgtgtgtatatactatattttatctgttcacctgtgaacatccgtgaacatcatatttttac

SEQ ID NO: 250963 - DNA, 620 bp, Homo sapiens
ctctctctctccaactagatggaagacactctgacaaacggggtcatttcttaattattatttaactccaacatttagccaagtgcctatcgcacagaagatggattatggctatccgaaatgaacgaatagctcctctattagccacagaactcagcatcacctgtgaccttttgttttaactaaagctattcactcattcgttcatcttattgcggtaaaaacacatatcataaaatgtaccatcttagccatttttaagtatacagctcagtagtgttaagtgtatttacattgttgtgaagcagaactccagaacgttttcatcttgcggaactgaaactctgcacccactaaatgattccccatctctctcctgctcccaggccctggtaacccccattctgctgcctctacgaatttgactgtgttaatacctcctatactgaaatcatttggtatttgtccttttatgcctggcttattttattcaacgtttatccaggttgtggcaagtgaygggatttccttcctttttaaggctgcatagtattccattgtgtgtatatactatattttatctgttcacctgtgaacatccgtgaacatcatatttttac

SEQ ID NO: 250964 - DNA, 642 bp, Homo sapiens
gctccttcttcttcttcttcacaaagttgatacccctatgccaagggcacggattcctgatttttacaagaatcacttcctagaggcatcaaagtggtttctgcattcactccagttcccacttggctgaaggcacaggggatcgttcacggaggtcggggggaaagtcactctctttgtaaggactacaaaacagcacttgtctctccccaaatcccagtttcttctgcacctcagttcccccccagaaacctctgcaaaggaaagacaacaaccccaccttcctcttccagccaaaaccccaacatttatgcaaatagactggcgactccacckgctaaacccaagtcaatatgaatcccagttgaggctgacacaggaactgattattaccgtgggaatctaaacgaaaaataagatgaaaaaggagcagtcacggcggcctaggagtggacgcagattcctgacgctaagcacagggattctaggccacaagcccacctggcctggctgtgtctccttggccctgtctcatctgttgggcaccagctcccccctgcccccttctccagccccttggcttggtcctcacaggactcccagaacttgggacagggcctggctcagagcaggaattcaatc

SEQ ID NO: 250965 - DNA, 408 bp, Homo sapiens
tccaggagcagaagactcaggccgactgggggctagggacgggtgggcctatgggaggcaggctggccactgagtatccctgtgccttccctggctcttccccaggtcctgactccacacagctgtctcttggtttctgtgtatgcttggcacccctatccgccccaggagacagaggtgcaaggtggaggttgctggccagttgcctcraggtcctgttccgccgtggcaaccctctccagcctggcgcttacggtctggtgcccagtgggctgcctgagcatctgtctggtgcctggccccacgctggaggctgaggggaggaggtggctggtccttggctggcctctcctactgggaacttagcggtgtgaccctgtctagaagtggctccacatttcatttttt

SEQ ID NO: 250966 - DNA, 592 bp, Homo sapiens
cctcaccacacttataatagagaaagtctatacatctagggaatgtgggaaagcctttggcaaacagtcaatcctcaatcgccactggagaattcatacaggagagaagccctgtgaatgtcgtgaatgtgggaagacttttagccacggctcatcccttacacgacatcagataagccatagtggagagaaaccttacaaatgtattgaatgtgggaaggcctttagccatggctcatcacttactaaccatcagagcactcacactggagagaaaccatatgaatgtatgaactgtggaaagtcttttaggcgtgtgtcccatcttattgaacatctaagaattcatacgcaagaaaaactctatgagtgtcgtatatgtggaaaggccttcattcatacgtcgtctctcattcaccatcagaaaatccatactggagagaagccttatgaatgtagagaatgtgrgaaagctttctgctgtagctcacaccttactccacatcaaagaattcacactatggagaaacaatatgaatgcaacaaatgtctgaaagtctttagtagcctctcatttcttgttcagcatcag

SEQ ID NO: 250967 - DNA, 592 bp, Homo sapiens
cctcaccacacttataatagagaaagtctatacatctagggaatgtgggaaagcctttggcaaacagtcaatcctcaatcgccactggagaattcatacaggagagaagccctgtgaatgtcgtgaatgtgggaagacttttagccacggctcatcccttacacgacatcagataagccatagtggagagaaaccttacaaatgtattgaatgtgggaaggcctttagccatggctcatcacttactaaccatcagagcactcacactggagagaaaccatatgaatgtatgaactgtggaaagtcttttaggcgtgtgtcccatcttattgaacatctaagaattcatacgcaagaaaaactctatgagtgtcgtatatgtggaaaggccttcattcatacgtcgtctctcattcaccatcagaaaatccatactggagagaagccttatgaatgtagagaatgtgagaaagctttctgctgtagctcacaccttactcsacatcaaagaattcacactatggagaaacaatatgaatgcaacaaatgtctgaaagtctttagtagcctctcatttcttgttcagcatcag

SEQ ID NO: 250968 - DNA, 565 bp, Homo sapiens
agtgacaagttgaagaaagtgagacagcaaaccatgcagctatctggggaaagatcacttatttttattctacttattttatttatttttttttagagatgcgtcttgctcagttgtccaggctgaagtgcattggtatgatcatagctcactgcagcctcgaactcctgagttcaagtgatccgcccacctcagtctcccaagtagctgggactatagtcgtgcaccaccactcctggataatttaaggaaaaaaactttttttaaaaaatagggtcccayggggaaaatcactaagtagagataagggtactagacactaaagcaaaaatatgcttgtggacttgagggagagtgaggagatcagggaggatggtacagaatgagtaatgaatagaaagttagaccggacacagtggctcatgcctgtaatcgcagcactttgggaggccgaggcgggtggatcccctgaggccgggagttcaagaccagcctggccaacatggtgaaacctggtgtctactaaaaatacaaacattagccgggtgtggtaacgcatgcctgt

SEQ ID NO: 250969 - DNA, 410 bp, Homo sapiens
agggtgctggcaagctgagatgagcaggatcccccggactaccccgcggggcggtgacccgaggcggcggcgggaggctggcgggcgcccagccgcggcagctcctcaktaagatggacgccgtgtgtccgggcgtggcggccgctcgggcctcctgcgctggctcctcctccttctccgcggcggccgcggctcttcgccgtctcggtggctcctcaggcgccgtccgtgcggacggttgacggcagcggttggcctcggacaggaggcgcccagcttcgatgtttttggtttttaaaaaggtttaatccttcttccgcttctttaaaacaaagcttttatttctgctgcccccagagcataacctttctgtgggataatgatgtatcatttatttattttaaaatgac

SEQ ID NO: 250970 - DNA, 410 bp, Homo sapiens
agggtgctggcaagctgagatgagcaggatcccccggactaccccgcggggcggtgacccgaggcggcggcgggaggctggcgggcgcccagccgcggcagctcctcattaagatggacgccgtgtgtccgggcgtggcggccgctcsggcctcctgcgctggctcctcctccttctccgcggcggccgcggctcttcgccgtctcggtggctcctcaggcgccgtccgtgcggacggttgacggcagcggttggcctcggacaggaggcgcccagcttcgatgtttttggtttttaaaaaggtttaatccttcttccgcttctttaaaacaaagcttttatttctgctgcccccagagcataacctttctgtgggataatgatgtatcatttatttattttaaaatgac

SEQ ID NO: 250971 - DNA, 410 bp, Homo sapiens
agggtgctggcaagctgagatgagcaggatcccccggactaccccgcggggcggtgacccgaggcggcggcgggaggctggcgggcgcccagccgcggcagctcctcattaagatggacgccgtgtgtccgggcgtggcggccgctcgggcctcctgcgctggctcctcctccttctccgcggcggccgcggctcttcgccgtctcggtggctcctcaggcgccgtccgygcggacggttgacggcagcggttggcctcggacaggaggcgcccagcttcgatgtttttggtttttaaaaaggtttaatccttcttccgcttctttaaaacaaagcttttatttctgctgcccccagagcataacctttctgtgggataatgatgtatcatttatttattttaaaatgac

SEQ ID NO: 250972 - DNA, 410 bp, Homo sapiens
agggtgctggcaagctgagatgagcaggatcccccggactaccccgcggggcggtgacccgaggcggcggcgggaggctggcgggcgcccagccgcggcagctcctcattaagatggacgccgtgtgtccgggcgtggcggccgctcgggcctcctgcgctggctcctcctccttctccgcggcggccgcggctcttcgccgtctcggtggctcctcaggcgccgtccgtgcggacggttgacggcagcggttggcctcggacaggaggcgcccagcttcgatgtttttggtttttaaaaaggtttaatccttcttccgcttctttmaaacaaagcttttatttctgctgcccccagagcataacctttctgtgggataatgatgtatcatttatttattttaaaatgac

SEQ ID NO: 250973 - DNA, 356 bp, Homo sapiens
gggggagagagcagccagttgcagattaaaatgtgacaggtgtgaaatgaggctctgaaggaaatttgcccaaagggagcagaggcttgaggggtatggttgggtagccatggatgcagcgggtacgtacatgggggtccgtgcgggcagaacccagggcatgaagatccaaaagggcctggttcagctttttctccagggccatggcagctttcatggcgtctggggttttaccccactcatcttcagctggcttstatatagaagggagaaatggctcagaatacacacactcggcacatagaactaaacctacatttcccaagagtcgttgggggtcagaggcccaggccaca

SEQ ID NO: 250974 - DNA, 473 bp, Homo sapiens
agaaggagcccgatggggaaggtttactgtgccgtttctgctctgtggtctctcagaaggatgacatcaagcccaagtacaagctgagggcgctggtttccatcatcaaggaactagagcccaagctgaaatctgttctaacaatgaacccaaggatgaggaagtttcaaggtaaggaatctataggacctgccacaacccataaaaggcactgggaaaaygactttcaaacatttcttcattaaacataggcattagcaggatatctagcatctaaaacttccatgcttcacaaacaacagcagttctcacctttgcgtagagattttcatggaatctgtgcaagtttgtagaatactttggagagcaagctactgtcttctttcatgtatcatatgtgctaaatggaaaactaattttcatcaaattatccactaacttatttcgaaaggcatttctaatatgaataaggt

SEQ ID NO: 250975 - DNA, 473 bp, Homo sapiens
agaaggagcccgatggggaaggtttactgtgccgtttctgctctgtggtctctcagaaggatgacatcaagcccaagtacaagctgagggcgctggtttccatcatcaaggaactagagcccaagctgaaatctgttctaacaatgaacccaaggatgaggaagtttcaaggtaaggaatctataggacctgccacaacccataaaaggcactgggaaaacgwctttcaaacatttcttcattaaacataggcattagcaggatatctagcatctaaaacttccatgcttcacaaacaacagcagttctcacctttgcgtagagattttcatggaatctgtgcaagtttgtagaatactttggagagcaagctactgtcttctttcatgtatcatatgtgctaaatggaaaactaattttcatcaaattatccactaacttatttcgaaaggcatttctaatatgaataaggt

SEQ ID NO: 250976 - DNA, 526 bp, Homo sapiens
acttggtgaggcttaacttattaatccctaatctacttgtgttcacttaggggggaaaaacacctagatacaagatttaaaagaagaaaacacttgtgttaaacagatttacagtggacccttgaacaatacaggtttgagctgcatgtgtccacttatacatgaagtttcaaaaataaatatattggagaattttgggggagatgtatgacaacttgtagatgaaccaggcagcctagaaatacttaaaaaattaaagtcagatatgtcatgaatgcaatcaatatagatgtgagtctacttatgtgttaattgactgttgataaggcttctggtcaatagtaggctatgagtgttggaagtcaaaagttatacgtgggtttttgactgcctaggggctggcascattgacttttgagttcaggagtcaactgtatttccctctaatatgtttaagaaagtggagttacctttagactcaaacagttcatacttctgtaaacgctgttttatgagctttttcttg

SEQ ID NO: 250977 - DNA, 584 bp, Homo sapiens
tgtggccactgaagtctctgccttctggtctactaacaatttgatggagatttttaaaamatgcctgaacgcaaacccaaaattctctcaagctctttgccatgggatccctctagggagcttagccaggattttgatttttttttttttttttagacggagtctagctctgtcgcccaggctggagggcagtggcgcgatctcggctcactgcaacctccacctcccaggttcactagccaggatttttacaactctcatttcagccttcatttcctgcttgcatggagcctcgggatcatcagaggtaaaacatagggtttctcagatttttataatcttgcatggacatgtatgattgaactcaatccttggtatacctcagtgctattcaaagcccttactatctcatgtaattctccccccagactcttccttaataggcttttcattctgtcatctgttttccctgttatccctcacccaggcaacttcagcaagtgtatttgtctttaagtgcttttaatgacactggcaccccccaataaatcagcttcagtctgtgtagatctaaaaagggtgaa

SEQ ID NO: 250978 - DNA, 584 bp, Homo sapiens
tgtggccactgaagtctctgccttctggtctactaacaatttgatggagatttttaaaacatgcctgaacscaaacccaaaattctctcaagctctttgccatgggatccctctagggagcttagccaggattttgatttttttttttttttttagacggagtctagctctgtcgcccaggctggagggcagtggcgcgatctcggctcactgcaacctccacctcccaggttcactagccaggatttttacaactctcatttcagccttcatttcctgcttgcatggagcctcgggatcatcagaggtaaaacatagggtttctcagatttttataatcttgcatggacatgtatgattgaactcaatccttggtatacctcagtgctattcaaagcccttactatctcatgtaattctccccccagactcttccttaataggcttttcattctgtcatctgttttccctgttatccctcacccaggcaacttcagcaagtgtatttgtctttaagtgcttttaatgacactggcaccccccaataaatcagcttcagtctgtgtagatctaaaaagggtgaa

SEQ ID NO: 250979 - DNA, 584 bp, Homo sapiens
tgtggccactgaagtctctgccttctggtctactaacaatttgatggagatttttaaaacatgcctgaacgcaaacccaaaattctctcaagctctttgccatgggatccctctagggagcttagccaggattttgatttttttttttttttttagacggagtctagctctgtcgcccaggctggagggcagtggcgcgatctcggctcactgcaacctccacctcccaggttcactagccaggatttttacaactctcatttcagccttcatttcctgcttgcatggagcctcgggatcatcagaggtaaaacatagggtttctcagatttttataatcttgcatrgacatgtatgattgaactcaatccttggtatacctcagtgctattcaaagcccttactatctcatgtaattctccccccagactcttccttaataggcttttcattctgtcatctgttttccctgttatccctcacccaggcaacttcagcaagtgtatttgtctttaagtgcttttaatgacactggcaccccccaataaatcagcttcagtctgtgtagatctaaaaagggtgaa

SEQ ID NO: 250980 - DNA, 598 bp, Homo sapiens
tcatgtaacctccagaggtatactgcgttgatcacgaccttcactctttcggcctgcaacacctcccctcttcctgggtccaggccccagaccccgccacgcctcctcttaacctacatgatcagggccaggcagaggaaaagaagagccgtgatgccgattcccagaaacgctccrttggagaatgccgttgagatgagtcccttcttatctgcacacggagagggcaaggtgagcatttcccatccacgcagggctcacgaagcccgctcatcactcggcattaaggcttccggttcccatggcggacattgtatctgcaacccctctgtttacttttaggaaaccctgccacaccccggcccaggtgttaggacttcccattgtgttttcctgtctacatacagatgccacgggtctgctgtgtccctccaagctcctgctccaaccacaggaccctactctttgccccagtcagcttctcctccaagaaccttggcatccaggcggccccctaacctggcagctgcaggatggatccactctgggccccatggacgttccaggcctcacagcggagcctgaggccggagctgag

SEQ ID NO: 250981 - DNA, 598 bp, Homo sapiens
tcatgtaacctccagaggtatactgcgttgatcacgaccttcactctttcggcctgcaacacctcccctcttcctgggtccaggccccagaccccgccacgcctcctcttaacctacatgatcagggccaggcagaggaaaagaagagccgtgatgccgattcccagaaacgctccgttggagaatgccgttgagatgagtcccttcttatctgcacacggagagggcaaggtgagcatttcccatccacgcagggctcacgaagcccgctcatcactcggcattaaggcttccggttcccatggcggacattgtatctgcaacccctctgtttacttttaggaaaccctgccacaccccggcccaggtgttaggacttcccattgtgttttcctgtctacatacagatgccacgggtctgctgtgtccctccaagctcctgctccaaccacaggaccctactctttgccccagtcagcttctcctccaagaaccttggcatccaggcggccccctaacctggcagctgcaggatggatccactctgggccccatggacgttccaggcctcacagckgagcctgaggccggagctgag

SEQ ID NO: 250982 - DNA, 602 bp, Homo sapiens
gtgagctacccttatctgggccactggtggtggaggtggtgggtacaggggaagggaccgttactggagggggctggtcttgtcaggtaaaatgcaggatgcctggttaaagctttcacagacaatataaagtattttattttatgttttttggtataagtatgtccgaaatgctgcatgggatatacttataccagaaagcaaaataaatttatctgaaattcaaattaattaattaattaattatattttgagacagagtctcactctgtcacccagrctgcagtgcagtggtgcaatctctgcttactgcaacctccacctcccaggctgaagtgattctcctgcctcagcctcctgagtctgggcttacaggcacgcgccaccacgccaagctaatttttgtatttttagtagaggtggggtttcaccatgttggcagggctggttttgaactcctgacctcaaatgatccacctgccttgacctcccaaagtgctgagattacaggtgtgaaccaccgcacctggcctaaaattcaaatttaactgagcatgttgaatttctttttttctaaatctggccaccgtagggtggtgtca

SEQ ID NO: 250983 - DNA, 602 bp, Homo sapiens
gtgagctacccttatctgggccactggtggtggaggtggtgggtacaggggaagggaccgttactggagggggctggtcttgtcaggtaaaatgcaggatgcctggttaaagctttcacagacaatataaagtattttattttatgttttttggtataagtatgtccgaaatgctgcatgggatatacttataccagaaagcaaaataaatttatctgaaattcaaattaattaattaattaattatattttgagacagagtctcactctgtcacccaggctgcagtgcagtggtgcaatctctgcttactgcaacctccacctcccaggctgaagtgattctcctgcctcagcctcctgagtctgggcttacaggcacgcrccaccacgccaagctaatttttgtatttttagtagaggtggggtttcaccatgttggcagggctggttttgaactcctgacctcaaatgatccacctgccttgacctcccaaagtgctgagattacaggtgtgaaccaccgcacctggcctaaaattcaaatttaactgagcatgttgaatttctttttttctaaatctggccaccgtagggtggtgtca

SEQ ID NO: 250984 - DNA, 545 bp, Homo sapiens
tatgctgtcttccctctcttcttcagctacctataagggaagggccccctgtcctatgatcacgtgacttgcttgaccttatcaatcacttggatgactcaccctccttaccctgcccccttgtcttatatacaataaatatcagtgcatccgccatttggggccactactggtctctgcgtcttggtggcagtggtcctcagggcccagctgtcttctctttatctctttgtcttgtgtctttatttcttatgatctctcatctccacacatggggagaacacccgcaaagccctgtagggctggactctaccaggagatggagccygggactcagttgtggggaaaagaaagagagatcagattgttactatgtctatgtagaaaaggaagacataaattccactttgatctgtattaagaaacattgttttgctttgagatgctgtgagtcttaactttagccccaaccctgtgctcacagaaacatgtgctgtattgaatcaaagtttaatggacttagggctgtgcaggatgccttgtta

SEQ ID NO: 250985 - DNA, 462 bp, Homo sapiens
agtcaacccatatgggaaatggctcctctttgtccaacatcaaaacctctaaggacataactcccttgtacagtaacaatcatatttaagtaagtcataatctaatatattaagaaccatatgagatggccttgctgagagctgaggagactcaggggaaggaactcatgcctgaggaactgaaagaagtctttcaatagctgggaagagaagaaggaaggcacccaagacagggagctcacggaggcctaaacggatgttgtattttcagggaagttgggtgtagctacacctcttgggagaaggaagggttagagggggaagtaaggaaggagaaaaccagaaacgtgggttgggcatagattgtgaagatccacttatactgtgagtggtgtcttgagggcttatgtgaaatgcacagtgctcacgaaaagaygaacacacataagcacttggcatgca

SEQ ID NO: 250986 - DNA, 548 bp, Homo sapiens
taattgcatgccagcatgatcccataatttctgcactgagaaaagcaaataaagggtatctgctcactcttttggtatggtcaatattgctcagtcagtcaggctcagctgggggtctcgggttattctgctaacatttgctccatcaagcaaataagtaacagagtctaggactggccatatagttaaagaacctaccgtcaagcagtagtagtgttagaaattgcttgatggttktattagtctgttttcatgctgtgatacagacacacccaagactgggtaatttataaagaaaaagaggtttgattgactcacagttccacatggctggggaggcctcaaaatcatggtggaaggctaaaggacatcttacatggtagcagacaagagagaatcaggaccaagcaaaaagagtttccccttgtaaagctatcagatcttgtgagacttattcactaccacgagaacagtatgagggaaattgcccccatgatttaattatttcttaccaactccctcccacttatgggagctacaattcaaga

SEQ ID NO: 250987 - DNA, 622 bp, Homo sapiens
ttgtgcatgcacgttgcaaaacgtttgattacttctggggattgctcttctggcatcttctttggttactcagtatattggccatgatacatcaggtggggttagacacatggcaggctgggaccccagccacatgtgttggtggagaagaatgaaatctgggatttgggactgggaaaagaaattcattagactgttctcaacataggtgtgacctgtgggacaaggtataatgttagcattcttgtctagtgtatcagtcagctattgacacaacaatgctgcataaccaaccatcttaaaacttgtgtgctacaaacacagcatttattctcatgcttatgggttttatagaccaatggtggctcaaaggaatctgtcaagtggcaggttgcctgagcttgcatccaagccatcaactgggttcaggtctgatccatgttctcaggcctgggctgaaagggcagggagtgctcagtagatgggtatcacaaaaactgcagagccamgccaaaccatgccagcatatttaaggcctctacttacattgtgtctgtcaatattcctttggccaaagaagtcacatggccaggccaaaaatctagggaaagaggagcatgta

SEQ ID NO: 250988 - DNA, 512 bp, Homo sapiens
aaaagtcaaggtggcttcagacttttccatcacagcattaaacatccaggagaaaatgcagcaataatcacacaaatctgaggtgaaggaactaaaattytaaaacattctatcatgccattcagcataaaaacaacgtggcaaacattctcaaagatgaaataaatcagagctaatagcacacctgagcttatctagagcagttatataataatacatcttgccagctacaaaaaaaaaaaaaaaaaaaaaaaaaaagaactgagggaatgaagaactttggcaaacagccttaaagtagagtccatttaattatagattctggattcggtaactagggtttcagtgttccaagaacaaagcataagttactaaatggtgatgaagtaaaagtgaagatataatccacacatcaagagggttggggatattaggttggatatgggagcgtgaatatcttttcatgcatcattcatactgtccaaaattaaaatatgaagttaaaaaaatta

SEQ ID NO: 250989 - DNA, 512 bp, Homo sapiens
aaaagtcaaggtggcttcagacttttccatcacagcattaaacatccaggagaaaatgcagcaataatcacacaaatctgaggtgaaggaactaaaattctaaaacattctatcatgccattcagcataaaaacaacgtggcaaacattctcaaagatgaaataaatcagagctaatagcacacctgagcttatctagagcagttatataataatacatcttgccagctmcaaaaaaaaaaaaaaaaaaaaaaaaaaagaactgagggaatgaagaactttggcaaacagccttaaagtagagtccatttaattatagattctggattcggtaactagggtttcagtgttccaagaacaaagcataagttactaaatggtgatgaagtaaaagtgaagatataatccacacatcaagagggttggggatattaggttggatatgggagcgtgaatatcttttcatgcatcattcatactgtccaaaattaaaatatgaagttaaaaaaatta

SEQ ID NO: 250990 - DNA, 562 bp, Homo sapiens
atttggcccacagacaagttttgtttggcccatttgtgtttaaaattatttttttaatttgtgyttaaaattaattggtctaagttaagatatcaggactgtatcatgatgtcaacaaaattttgttccaactcaatctgatttcctctgattgaagtctagtgacaatttgtagcaatttgtcatccctcaattattagaaaagggaaagaagaaaacacaagaaaggtagggagggaggtgaagatgtaaaagagaataaagactggatatattcctccccctccccatctacctacccatgaaaaattattttaattaactaccaatatttgtaagtgacaagaaccttacataaccatctgaatgtcagttctcatttgaaaaattcaaaatctggcagcaccgggcccttatttattcactgctactgactggggctgcagaacgtgtgtccttttagacccatcttgcattcttctgttgacacagcccccactctgcccactgcacccacttttcacttctggcctagtgcctgtggacatctgagttcttaccc

SEQ ID NO: 250991 - DNA, 581 bp, Homo sapiens
ttttcttctctaaaatccattttgatctcccgctcaatgcagagcaccttagaagaacaacaaaagggcctcagattctttatctacatcatgcagtctcgcctgaaggtagaaaagatgcagaggaatggaacacggatggagcccaggacattatttgtttttttttttttttaatgaactagcttgttgtcaaaagaaggcaagatatgaggattttggatatgtgggtttcgctcattcagtgcaattagctttttttttttttgtaacagggtctcactctgtcacctaggctggagtccagtggtataatcatagctcattgcagcctcgaattcccaggttcaagtgatcccccaacctcagcatcccaagtagctgggaagacaggtgcatgccaccacacctggctaattaaaaaatttttttgtagacatgaggtctcactatgttgcccaggctgaccttgaactcctggcctcaagcagtccttctgcctcagtcttccaaagtgctggaattacaggcaygagccactgcatctggccaacaacctctcttaacttctctttcttcgt

SEQ ID NO: 250992 - DNA, 602 bp, Homo sapiens
ctctctgcacagcagcggaagccggagctcctgctttcactgtctgggtgaaagcctcagcactgcagggctggcaggaaacaggaaagaggctagcattctccttgcatctgagggcaacggcaggacttagtgtctgggctgagaactcattaagtcagtacgggaactggcaggcacatttgaggtgagagcaaaggctcaggcgacctccacattcagtgttagagtctgtaacccatctctctgggacatcagcaggccagctccagacagggccagatgggagtcacaggctgggaagaaaggggctcaaggagtgcaccagagtgarggagagaacaccattagaccgtgactgtaatcttgtagattcttaagagcaacaggctctttcacggccttgcaggcagaccaacagacaatccactgcagtccttccagcatgatggcagaggtaagctcagcattttatgatagaccttggttttggcttggaccattcctagggacctagacttatcatctgcttcttccttcttttgtcatctgagaccagtgttctaaaactggccacccagaatgtggtctgcagatgagca

SEQ ID NO: 250993 - DNA, 544 bp, Homo sapiens
tttttttattaccatttcaatcttgctacttgttattggtccrttcagagtatctaattcttcctgatttaagctagaaagattgtatgttttctagtttatgtgcataaaggtgttcatagtagccttgaatgatcttttgtatttctgtggtgtcagttttaatatctcccatttcatttctaattgagcctatttggattttctgcctccttttcttggttaaccttgctaatggtctatcaatttatttatcttttcaaagaaccagctttttgtttcatttatcttttgtattttttgtttgtttgtttgtttgtttgtttcaatttcatttagttctgctttgatcttggttatttcctttcttccacttggtttgggttgggtttgttcttgtttccctagttccttgagtgtgaccttaaattatctatttgtgctctttcagactctttgatgtagacttttagggctatgaagtttcctcttagcaccacatttgctatatctcaaaggttttgatagcttgtgtaactattgt

SEQ ID NO: 250994 - DNA, 541 bp, Homo sapiens
attgcatgtgtaatgaagcctcataattttaggttagggttatgtggatgtcccaattaatgggcaatagattgtgtggagataattctagttgatcatactttttcttcaatatctttgaatgcttaaatatccaatttcctgagatttttattgttcaattttcttcttaaatgaycctcccttcctccaagttaaagttgctaaagcaatgaggtatgagtcccggcagcctaaggtgagcaaagctggccggctcaggttcaacgagggaatggttcatggttccgaatgcttggaatattccataacaaatgctgccagagattggagactcagatcttttccccagcgctcagacagaattgaaaatggagaaaattaaagacaggtttaattaacctgccaaaaaggaaaaaaaaaaatcacaggatgtctgcgtgtgagattaagagtaaatctaatgatcaaaaagactgggaagggatggttttaaaggcacatttcatattcactcaactaatatcactgaatctcctta

SEQ ID NO: 250995 - DNA, 541 bp, Homo sapiens
attgcatgtgtaatgaagcctcataattttaggttagggttatgtggatgtcccaattaatgggcaatagattgtgtggagataattctagttgatcatactttttcttcaatatctttgaatgcttaaatatccaatttcctgagatttttattgttcaattttcttcttaaatgaccctcccttcctccaagttaaagttgctaaagcaatgaggtatgagtcccggcagcctaasgtgagcaaagctggccggctcaggttcaacgagggaatggttcatggttccgaatgcttggaatattccataacaaatgctgccagagattggagactcagatcttttccccagcgctcagacagaattgaaaatggagaaaattaaagacaggtttaattaacctgccaaaaaggaaaaaaaaaaatcacaggatgtctgcgtgtgagattaagagtaaatctaatgatcaaaaagactgggaagggatggttttaaaggcacatttcatattcactcaactaatatcactgaatctcctta

SEQ ID NO: 250996 - DNA, 541 bp, Homo sapiens
attgcatgtgtaatgaagcctcataattttaggttagggttatgtggatgtcccaattaatgggcaatagattgtgtggagataattctagttgatcatactttttcttcaatatctttgaatgcttaaatatccaatttcctgagatttttattgttcaattttcttcttaaatgaccctcccttcctccaagttaaagttgctaaagcaatgaggtatgagtcccggcagcctaaggtgagcaaagctggccggctcaggttcaacgagggaatggttyatggttccgaatgcttggaatattccataacaaatgctgccagagattggagactcagatcttttccccagcgctcagacagaattgaaaatggagaaaattaaagacaggtttaattaacctgccaaaaaggaaaaaaaaaaatcacaggatgtctgcgtgtgagattaagagtaaatctaatgatcaaaaagactgggaagggatggttttaaaggcacatttcatattcactcaactaatatcactgaatctcctta

SEQ ID NO: 250997 - DNA, 598 bp, Homo sapiens
tgttgggcagtgtatgagtgagtgtggggtgggtgtaacttctacatggtagggggtgtgagtgtaggtgaacacgtgactgttgttactcaccagtacccgtgtaatatgccatttccttgacacacacagagaccacactccccagtcctccttggatatgggggagggggtagggacatgtgactttttattttattttatattttattttgtgagacagggtcttgctctgttgcccaggctggagtgcagtggcttcatctactcactgtaactgcgaacttctgagcctatgtgatctcctgcctcagcytcctttagtagtgggactacaggcacataccaccacacatggctaattttcttattttctattttcttgtagagatggagtctctctatgttggccaggctggtcctgaactcctggcctcaggcagtcttcctgccttggctttccaaagaactgagattagaggcataaatcaccaggctctggcccagccgccacatgactgatttcatcagtggtctgggagcaggagtgcggcgcaccacctcagtcaagctggttaacatctagtgaccttccttc

SEQ ID NO: 250998 - DNA, 611 bp, Homo sapiens
agacccaatgctgaactagaaaaacaaacaaacaagcaaaatgatctggaccctgactttatgaatatagtatgcaaaggccctgcggcatgtgaagaaacccagagaagagcagtaataccagaacaaaagaatgagagccagttgacagtcaaggcagaggtcagcagaagccaggcatgcaaggacttgtagcccattcaccatttttgtttttattctgagagcaatggaatgtcaacagagttttaagcaggagaatagcttgagggacattatctttggtaacctaagcagtttcaagatttcacagtgctgtggtttagatatagtttgattggccccaccaagtctcatgttaaaatttcaaccccagtattgaaggtggagtctgataggaggtgtttgggtcatgaggtggatctctcatgaatggcttggtgccattctctagggagctagtgagttctcattcttatttttcrtgaaaagaaggaacctccttcctctgcctcttgcttcctctcttaccatgtggtctctgcacacagcggctcccgttcaccttctgccatgactggaagcagcctgaagctctcaccagaagcaga

SEQ ID NO: 250999 - DNA, 597 bp, Homo sapiens
accatgctgccctaggtagtttgctacagtaaggaccccagcgcatcatgcatccattactctgtgtgtgcctctcctcattgactctgggcttggctttgtgacttgctttggccaatggtacatgtacaaacctggtgccagcagaagtgtaatgagtacttgtgcactgaggcttcctctctgagaccactgatgagggagctggtctacagtaaaccacgtgagaggccacatgcagaaccaagatgcctcagccaacagctgacaccagctgccagacatgtgactggcaaattcaaagcctttgaattcatgaaagaggaagatttttctcgtacaatcttaggaggtagggaaagtgcccagcagagagctccttcaacacggaaaacaggtagccctggccacgtggagctggagaggggagatgcagacagagctaggagtggccagaagccagaaaaagttgagtctggcaaatctctcggccaccttgactagagttctggagttcatatrgaaacatggatattttatagagtcatgtattttccttgtttatttccccagcttctcacacattttcagcgatgc

SEQ ID NO: 251000 - DNA, 495 bp, Homo sapiens
cactggttcattaatatgtgtacttagcaaatgttttctgggtcctggcatctaagacataatttaaaaaaaaaaaaaactgggatgtttttaagtgtcttgctttagcaggacttgggtgttcaaaagcaagtgacataagatctctgagctttaactcttcatcttgaaaaggggaggtggtaatccctcctttatctgcctcaaaatgatgctcatgctcgtttccaggaagactgggctgccacagctctctttgttatcagaagktggattctgaggactgtgcctctagcatcagcagcagaagcacacagatcccatgccaatgtgagctgcagtggatttattgaccccacccagaggaggtgctatctatgcccctctttgtgtgccgtctgcctcctggggtccccagctgttaagcaggccaacaactgcccacctcagtctccagtagaaaacatgaagactcccctctcctctggtagtgtc

SEQ ID NO: 251001 - DNA, 564 bp, Homo sapiens
agtcatccctttgtatctatggaagatgattccacgaaccgcccctccacacccccgcagatamcaagtctcccaatgctcaagtccctgacataaaatagcacagtatttgcatataaccatgcatatcctcccatatactttgtcatctctagattacttataatatctaatgcaatgtaaatgttatgtaaatagttcttacactgcatgttttatttgtatttttaattgccttttttttttcccataagagtttttgtgggatttttttttttttttgagacagaaccttgctctgtcacctagactgggccgcaggggcatgatcttggctcactgcaacctctgcctcctgggatcaagcaatccttctgcctcagcctcacaagtagctgggactataggtgtgcaccaccaagtccagctaatgctaatttttttttattttttattgtagacactaagtctcactatgttgcccaggctagtctcaaactcccaggctcaagtgatccttctgccttggcctcccaatgtcccgggactagaggcataagccag

SEQ ID NO: 251002 - DNA, 564 bp, Homo sapiens
agtcatccctttgtatctatggaagatgattccacgaaccgcccctccacacccccgcagataccaagtctcccaatgctcaagtccctgacataaaatagcacagtatttgcatataaccatgcatatcctcccatatactttgtcatctctagattacttataatatctaatgcaatgtaaatgttatgtaaatagttcttacactgcatgttttatttgtatttttaattgccttttttttttcccataagagtttttgtgggatttttttttttttttgagacagaaccttgctctgtcacctagactgggccgcaggggcatgatcttggctcactgcaacctctgcctcctgggatcaagcaatccttctgcctcagcctcacaagtagctgggactataggtgtgcaccaccaagtccrgctaatgctaatttttttttattttttattgtagacactaagtctcactatgttgcccaggctagtctcaaactcccaggctcaagtgatccttctgccttggcctcccaatgtcccgggactagaggcataagccag

SEQ ID NO: 251003 - DNA, 551 bp, Homo sapiens
attacagcaaaaggctgtctggctcctaagcataactggcttgaccatctctcccattcatacttggtagtgcccaataaattgatcgtggtggatggttagagtcgtctaaagtgtgaacggtgcattgatctggcatgctttcaaccagatttcccaggagagccttaaacagtttcttcactttcattgattcattcagtcaacaaatatctataaagaacttgtaggtgataggccctggagataccacaattttcagagccsagaatattagagagaccctaggctggtggagaagatgaacatcacacaaataggtgcatgattgagtatagacacttatatggacttcagacaagtttccatgcaatgtagacttggtctttctgtatctccaattctgggctctgttttcctctcattggcttcattcttagtttgtatcatgcagtgtcccctggtagcttcaggcttacattaaacaagccagtgtagcaatcctatggagtgtctcttcttgttcccacaaaaggctgactctcattgga

SEQ ID NO: 251004 - DNA, 551 bp, Homo sapiens
attacagcaaaaggctgtctggctcctaagcataactggcttgaccatctctcccattcatacttggtagtgcccaataaattgatcgtggtggatggttagagtcgtctaaagtgtgaacggtgcattgatctggcatgctttcaaccagatttcccaggagagccttaaacagtttcttcactttcattgattcattcagtcaacaaatatctataaagaacttgtaggtgataggccctggagataccacaattttcagagcccagaatattagagagaccctaggctggtggagaagatgaacatcacacaaataggtgcatgattgagtatagacacttatatggacttcagacaagtttccatgcaatgtagacttggtctttctgtatctccawttctgggctctgttttcctctcattggcttcattcttagtttgtatcatgcagtgtcccctggtagcttcaggcttacattaaacaagccagtgtagcaatcctatggagtgtctcttcttgttcccacaaaaggctgactctcattgga

SEQ ID NO: 251005 - DNA, 601 bp, Homo sapiens
cttgggctgctacaaagaactgaagctgtatatgcaggaagtatcaagcatgtcacagggaccagtacctctttttcaattaaggctgtcctttggagtcttttgcagtaagccaaggttggattggtttttagaaatttaggagacatgtctccttaacctaaggctcttccgtatcttataaatctcagtattagagcatccctttctgctcccatttctggactaaagctttggagaaggttctgataattattttgggatcaggaatggagacatgcttatctttttgacatttcttgattcacatgacaaatgaawtggctgggacccggtgtgcttggagatccaagcacaaatcctgactttcagaggttgcattcactagatgaagaagtgatttttctgtcccattttctgtctgcaccctgatcttctcggggttgcagccagtgcaaagatctggagccttgttatcaacagggtattctatggcaattagctgcaaacaaagaaaatagaatggaccatcaggtcccaggcagaatacagaggcagggacacaggtgtgcgctcagctgagtacctgccaatgctgttt

SEQ ID NO: 251006 - DNA, 568 bp, Homo sapiens
accctgcctgccaccagacgcctgcagttgttggttacctcttgatttcaaccctgtcctgttccccttgccttgaatataaaaagagactaaaatttgcactgacttaaaatggtctttgtgactataattcaccatcttcttggttttgctgactttctgaataaacctgcttttcttcccaccaaccctcatctcttgtgtctggccttcaagcagtgagcaggtgaacctgggttcagttcgatatgtgtgtgcttgggaatatgcgtacgtctatgggcgtatacatttaaatatgtgcatgccttcctgtggggacctgtacatgcctaaactatctcagaccacatatatgcacaaatatggaaacatacatatctatccacatgtgtgtgcccacacatacatgtatgctgtaatgagggggtgtagtttgtgtgttggctaatatggtttataaaaaatggggtaaaatgagcagacagggttcagagacttctaacttgaggtycacccttatacacaagtttccctggactcaagcagagccgttgaagttatgggg

SEQ ID NO: 251007 - DNA, 551 bp, Homo sapiens
tttccctggactcaagcagagccgttgaagttatggggacttcyttgggtgaagtttagttccttttagtttcctagaagccacattgttcacgcaaaaggaaggaatcacaacaggacaggatgccccagatgttgatatctgcattcagagggcccaaggaaacccaagcactaaggttcactctagggccagagtgcctggtcttgattctcggctgtggctgttaccagccctatgctcttgggaagttatctgacctcattgtgcctcagcttatgcatttgtaaaatagggatactaatggaatctgcctcatagggcattggggaaattaagggttaatatgtgtaagcacatagtaaatgctagataagctttgactaattttttttgttaaatatggccggaaattattttcttattcttggaagcaaaagataacctttattattttacttatataaaataagtccatgttcactttagacaatttggaaaataaagatagacagatatgataaaaaaaaattcctacctatagtctgtcc

SEQ ID NO: 251008 - DNA, 556 bp, Homo sapiens
cgacgtaatttaatcagtctcccattgttagagatttatgctgtctccaattctttcactactatagaatatagaatatgcagagcaaacactctcatttccatttttcaaaggaggaaatagagtgaaactgaaaaaggctaagcaacttgctcacggttagaagacagtggagctgtggctgtaaatcctgtattctcattcctagggcagtgcttgctggcacacccagcttgagcatttagcaatctacctgcatgcaggttttgtctgctgcctctggcattgcattataaccctgtttccctggagactagagctatcatgagcaaggaaagatttttttgtcatgctaatttttctaagtgacagaacattctaaacttctcactctgcttgcttcacccttctctgtcagccagagcacatcatttttggactggcaaaggcatctcttggtagggaagaactggaaccaaaagtgagagatggtattgtgtgatggagtgagyttgagcctgcttccaacagtcctgactttgagtttcagttctgc

SEQ ID NO: 251009 - DNA, 564 bp, Homo sapiens
gtccatgatggtcacttctgtggccccagaataatttctgcttcatggctcttggactctcttctctgataacgctcttcatcttcttcagaagatgtcattgtgtcaatcaatgtccaaccactgctataagtaatttcatttttgtgggacttagacagtcttgaagatggcaaagtagtctaatttcaatctttcgggaatgaattcaggttgatagatggtcattttggtaacttttcattttatttcttcctttctgtattttccccgacagttttgtcagcatggagcttaatcattaaactcaagcgccaataaaaggctgttttaacaaaggcttttgcactttactaagaatatgatcattctttatttcttccytttctttctccctcccttccccttaccttcttttctaccctccttcttttctttccttctctcttccttctttcttcaagcacatatagatacttcctagacgccaaatcacatgttggaggtgggagatgtagttttatatgtaagagacagtctttgcccttcagttttcagttgttc

SEQ ID NO: 251010 - DNA, 564 bp, Homo sapiens
gtccatgatggtcacttctgtggccccagaataatttctgcttcatggctcttggactctcttctctgataacgctcttcatcttcttcagaagatgtcattgtgtcaatcaatgtccaaccactgctataagtaatttcatttttgtgggacttagacagtcttgaagatggcaaagtagtctaatttcaatctttcgggaatgaattcaggttgatagatggtcattttggtaacttttcattttatttcttcctttctgtattttccccgacagttttgtcagcatggagcttaatcattaaactcaagcgccaataaaaggctgttttaacaaaggcttttgcactttactaagaatatgatcattctttatttcttccttttctttctccctcccttccccttaccttcttttctaccctccttcttttctttccttctctcttccttctttcttcaagcacayatagatacttcctagacgccaaatcacatgttggaggtgggagatgtagttttatatgtaagagacagtctttgcccttcagttttcagttgttc

SEQ ID NO: 251011 - DNA, 605 bp, Homo sapiens
gtcatttaccaaactcattaaactatatgcttaaaaggggagcattttattgtatgcaaattatgcctcaataaagatgactttaaaatattttttaactctcctcattttttaagtctcattcagaataaattccaaagtcgtcaccacggctccacaaatccctttcctctcttgcccctcttccccttgcttcccatgcccagacacactggcctgctcttcctcacacacaccacgccttctcccacatgcactgatgctcccaattccttctacgtggacacctaattccctagatgtcttcctggctcctggccttgctgcacccaggtctctgctcaaatgtggcctcctcagagaacctcccctgatctcccctttccatccctcacaatatctttattttaattttccttcttgtagctgatcattacctgaaattatgccgtaagtcatttattgctggaaaggaagttttgagggcaggaattttgctcagccatctccatagagtcaacgcctatwatagtgcctagtatgcaatagcttcttagcaaacgtgtgtttaatttacaagaatatatttgtgtgtctgtatacat

SEQ ID NO: 251012 - DNA, 586 bp, Homo sapiens
ctgtgtgtgtatgactttgcgtgcaacctgtcaggtgtgtgattggccatgtgagtatggctttatgcagctattagtctctaaggtgaggttccttgtttgagtgaccccactgtgtgactgactgtatgcacatctgtgtgttgcttcaaatgactccatgatgttgtctatgaaccacagtctgagcgaaagtcaggcctagaggcacacagtgactgatgcactcacacactcaggggcaygcacacacacttagatacacaatggatcctccatttagacacaggctgttaccatctcccacctccaacccacatctcacatagacatcttctcatctacaaagcaacttgcagatgatttggatacaaaagtccaaacttattcatttgtagtgttctcaaacccctagagggcttttggaaatgtgtgggagcacgattatcacatgacctgtgtgtgctataatatttagtgtgtatggtcaaaggacattaggtctctcctaaggtatacccttttggcagcagagactgattttgtgggagacaatttttctatggaccagggagggagatgattt

SEQ ID NO: 251013 - DNA, 617 bp, Homo sapiens
aaaatctacagaacctgtttggatgggctgtaaaggaagaatggtcaagagaggctggcgtagttcccgttttctggcctgggtgcttagaatgaaggaggaagccttcgtttggggtgataggttgcacagagggtaatgactgctaaggtgagcctctgagtttaaattctgtggggtacaccccaagaggcagcgagatatatgacgcctgaactcagctgagaattctgggyaaaagcgcagatctgaaagtcatcagaacataaaaggggcaagactggggatatgactgaggtcccagatagtcttcagcaaaggaggagtacagaataccacaagaaattctcagaaaacacttaagagtataggtggaaaagaagccccaaaagtggattgagatggtcaaactctaaatgagggctccatccctaggcaaatgctttgcccataatgaaatgcatataatgtatggtgattcaactatgcagttcagagagagagagagaggcacacggagttaaagagttctaatggtttctcctgacacgttgctcagggaacatatacacttggagtgagtattaaataggacacacaaatcaggggttctcaat

SEQ ID NO: 251014 - DNA, 515 bp, Homo sapiens
cgggttcaagtgattctcctgcctcaggctcccaagtagctgggattaacaggcatgtgccaccacactcagctaatttttgtatttttagtagagacggggtttcaccatgttggccaagcwggtctcgaactcctgacctcgtgatccgcctgccttggccttccaaagtgctgggattacaggcatgagccaacgcgcccagcctgttgatgttttctattgatttcttgattgctatttcattaatatctcttcccattgttattttcctctgcttgatttacattaatcttgctattctctagtttcctaagatggaaagttagagcactgattttagagttttactttctagagaatgcattcgattctttaagtttccctcaaagcactgccttttctgcattccagagattttgctaaaatatatcctttttcatcagcaccataatatttgcatttcatgtgacaagtttctttgacatctgtgtacttgagaaatttgtggctta

SEQ ID NO: 251015 - DNA, 515 bp, Homo sapiens
cgggttcaagtgattctcctgcctcaggctcccaagtagctgggattaacaggcatgtgccaccacactcagctaatttttgtatttttagtagagacggggtttcaccatgttggccaagcagrtctcgaactcctgacctcgtgatccgcctgccttggccttccaaagtgctgggattacaggcatgagccaacgcgcccagcctgttgatgttttctattgatttcttgattgctatttcattaatatctcttcccattgttattttcctctgcttgatttacattaatcttgctattctctagtttcctaagatggaaagttagagcactgattttagagttttactttctagagaatgcattcgattctttaagtttccctcaaagcactgccttttctgcattccagagattttgctaaaatatatcctttttcatcagcaccataatatttgcatttcatgtgacaagtttctttgacatctgtgtacttgagaaatttgtggctta

SEQ ID NO: 251016 - DNA, 515 bp, Homo sapiens
cgggttcaagtgattctcctgcctcaggctcccaagtagctgggattaacaggcatgtgccaccacactcagctaatttttgtatttttagtagagacggggtttcaccatgttggccaagcaggtctcgaactcctgacctcgtgatccgcctgccttggccttccaaagtgctgggattacaggcatgagccaacgcgcccagcctgttgatgttttctattgatttcttgattgctatttcattaatatctcttcccattgttattttcctctgcttgatttacattaatcttgctattctctagtttcctaagatggaaagttagagcactgattttagarttttactttctagagaatgcattcgattctttaagtttccctcaaagcactgccttttctgcattccagagattttgctaaaatatatcctttttcatcagcaccataatatttgcatttcatgtgacaagtttctttgacatctgtgtacttgagaaatttgtggctta

SEQ ID NO: 251017 - DNA, 484 bp, Homo sapiens
tcgtgcctctgcatcccagcctaggcaacagaggccgaccctgtctcaaaaaaaatggatgtccacagctgccaagtctcttggagggtctagtgaatatcatcccctgggtcactcctcccaggggacagcctgagatggraggtgtggccccctggggagcaactggatccactgggatgggaggaatcttctggtatataattcctgtaaaaagctaactcctgggacactcaccttttcttcccaaccctagtttccattccttggagacacatgactgaacagccaatttcatggtcatattccataggaaaaaaaacggaaatgatttttgccttctggactctctcagacttaaaaggtagaaagttatatctaaggactggagaacctgccctttgaggtagtgcaagatcctgaaaagcacacaaggcagtgtctcctaggagggtggtgagtgtctcctaggagggtggcgaac

SEQ ID NO: 251018 - DNA, 484 bp, Homo sapiens
tcgtgcctctgcatcccagcctaggcaacagaggccgaccctgtctcaaaaaaaatggatgtccacagctgccaagtctcttggagggtctagtgaatatcatcccctgggtcactcctcccaggggacagcctgagatggarggtgtggccccctggggagcaactggatccactgggatgggaggaatcttctggtatataattcctgtaaaaagctaactcctgggacactcaccttttcttcccaaccctagtttccattccttggagacacatgactgaacagccaatttcatggtcatattccataggaaaaaaaacggaaatgatttttgccttctggactctctcagacttaaaaggtagaaagttatatctaaggactggagaacctgccctttgaggtagtgcaagatcctgaaaagcacacaaggcagtgtctcctaggagggtggtgagtgtctcctaggagggtggcgaac

SEQ ID NO: 251019 - DNA, 484 bp, Homo sapiens
tcgtgcctctgcatcccagcctaggcaacagaggccgaccctgtctcaaaaaaaatggatgtccacagctgccaagtctcttggagggtctagtgaatatcatcccctgggtcactcctcccaggggacagcctgagatggaaggtgtggccccctggggagcaactggatccactgggatgggaggaatcttctggtatataattcctgtaaaaagctaactcctgggacactcaccttttcttcccaaccctagtttccattccttggagacacatgactgaacagccaatttcatggtcatattccataggaaaaaaaacggaaatgatttttgccttctggactctctcagacttaaaaggtagaaagttatatctaaggactggagaacctgccckttgaggtagtgcaagatcctgaaaagcacacaaggcagtgtctcctaggagggtggtgagtgtctcctaggagggtggcgaac

SEQ ID NO: 251020 - DNA, 604 bp, Homo sapiens
attgcagcctcaacctcctgggctcaagtgatcttcccacctcagcctcttcagtagctgggactacaggtgtgtgctgccagctcccagctaatttttaaattttttgtagtgatggagtcttactatgttgctcaggctagtcttgaactcctgggctcaggcaatcctcctgcctcagcctgtcaaagcactggtgttataggtataaaccactgtgcctggccttttaataatttcttaagcatactgtcagtgtttctttttataaaaataagcaattgcaaatgcatgtttttcatactcatgttggttctgtaatgagtagttggactytgcatgttttgattttggctgtgcacatcataagcgtcacccttctctcttctcctcgtgctgcacacctgggcaagctgaaaaagtctgggagcaggaaattcaaaccacagaagctcctgcccttgagcaggtactctcttgtagccccacccccaaactacaataaaaacccaggccaggaggctttctttgctctctgaagctatgtcacacctgcttgggcagcctgccctgctttccccaagacctcaatgatcacagtagt

SEQ ID NO: 251021 - DNA, 552 bp, Homo sapiens
aacccatctctactaaaaagtacaaaaagtagccaggtgtgatggcgtgcacctcacctacttaggagactgaggtgggaggattgcttcagcatgggaggtagaggatgcagtaagccatratcacaccactgcactccaggctaggtgacagagagagacctagtctttaaaaaaaaaaaaaaaaatcaaaagaatttaagaggctggttgctatggctcatgcctgtaatcccaacactttgggaggccgaggtgggtggatcttctgaggtcaggagttcaagaccagcctgaccaacatagagaaacactgtctctactaaaaatacaaaattagctagacatggtggtgcatgcctgtaatcccactactcgggaggctgaagcaggagaatcgcttgaatccgggaagcagaggttgtggtgagccgagatcgcactattgcactccagcctgggcaacaagaacaaacctccgtctcaaaaaaaaaaaaaaaaaaattacacaatggaactttgttttggttttggtatgttgacaaaccaaaa

SEQ ID NO: 251022 - DNA, 604 bp, Homo sapiens
agttcaagaccagcctgggcaacatggcacggctcagtctcaattaaaaaaaagaaattagccaggcatgatggcacacacctgtagtcccagctactcaaaagagactgaggcaggaggattccttgagcccaggagttcaaggctgctgcatgagctacaactgcaccactgtactccagcctgggcaacaaagtgagaccccacctctgaaaaaaagagaaaataaaaagtaaccaaaaatgtgaaggagctatacaaggaaaactataaaacactgatgaaacaaactgtagagaatacagaaaaaaaatggaaagacattccatgctcatggattagaagaatattgttaaaatgacaatactacccaaagcaatttacaattaagagcaaccgttatcaaaatagcaatgacattcatcgcaaaaatagaaaaaaaatcctaaaatttatatgcaacmataaaagacttcaaacagccaaagaaatactgaacaaaaagaacaaagctggaatcatcacactgccttacttcaaaatatactacaaagctatcataaccaaatcagcatggtactgacataaaaaaaacaaacaaaca

SEQ ID NO: 251023 - DNA, 570 bp, Homo sapiens
acagaaataatcagctgtgaaagtgcactggcagttaaggatggtttcatacctgccatgctctgcaggatccgtgggaacagaagagacccttagaggagcatcttttaacaacccacctctggggcctacatcatcttggcttctgggaaattttgacatgaatgtgccacactggcagctactaacaggggctgggaccaatctagatgacttatctcatacagaaattcttaatgctatgatcttagaaayctaatcaccaaggtaaggtagcctgcagtactgacctcaccatccattacccttcttcacagatgcccagactcaggcaaccatgatgttgtattcagaacctgtaggtttaatttcagacccttgtgatggcacccaaggccaattcatgagccattacaacctccaaaaggcatttaggacaaatctgaatatctttagtgtcactgccactaattaaagatggcaaccaatgagctaaatggtaacattcatacccttatattcatagggttcctccccagtgtgaattctttcatgtctacttaggtgtga

SEQ ID NO: 251024 - DNA, 513 bp, Homo sapiens
ctataattataccatatcataacttattacaaaacattctatttaatttaaatatacccaaaatagtatcatttcaacattttgtaaaaagttgcaaaaccacaacccactaataatgtgactataaccttttaatatttgataataatctactagtatatcaaaattactgatgatatattttacttctgtttgcactaagtcttcaaaatccagcatgtgttttacaattcagtgcatctcatttaggatactagattttctttcttttttttttttgatacaggagcttgctctgtcacctaggatggagtgcagtggtgtaaacaggatgctaagttttctttttttagtagagacagggtgtcaccatgttggccaggctggtctcaaactcctggcctcaagcaatctgccttcctcagcctcccaragtgctggaattacaggcgtgagccaccgcgcccagcgcaggatgctaggttttcactggaaatactttgatctgtattt

SEQ ID NO: 251025 - DNA, 532 bp, Homo sapiens
tgcagtgagccatgatcgcaccactgcaccccagcctgggcaacagtgataccctgtcacttaccaaaaaaaaaaaaaaaggacaaaaaacaaaaatccttttgactaggttggacctacccacataacccaggataaggtcctttacttaatcacatctactaaatctcttttgctgtgtaaggaarcaaacatatccatagatcctaaggagtaggatgtggacatcttgaggtgtggggttggggagaaattgccttattctgtctgccataacagtcctttgtggcaaataaagaatgttttctatattttaaataatcaaggtgtgtgcctatgagtgttaaaaacagaatccagcttactttacatgtttacaccaattacttggcccctgtaagcatttgagtttggaatccttgaatatccttagataacatggctcatgaccaggatttgggaatgcaaaggattctgacatttaacctttgagttgataaaacaaagactggagggccgagggctctaggca

SEQ ID NO: 251026 - DNA, 532 bp, Homo sapiens
tgcagtgagccatgatcgcaccactgcaccccagcctgggcaacagtgataccctgtcacttaccaaaaaaaaaaaaaaaggacaaaaaacaaaaatccttttgactaggttggacctacccacataacccaggataaggtcctttacttaatcacatctactaaatctcttttgctgtgtaaggaaacaaacatatccatagatcctaaggagtaggatgtggacatcttgaggtgtggggttggggagaaattgccttattctgtctgccataacwgtcctttgtggcaaataaagaatgttttctatattttaaataatcaaggtgtgtgcctatgagtgttaaaaacagaatccagcttactttacatgtttacaccaattacttggcccctgtaagcatttgagtttggaatccttgaatatccttagataacatggctcatgaccaggatttgggaatgcaaaggattctgacatttaacctttgagttgataaaacaaagactggagggccgagggctctaggca

SEQ ID NO: 251027 - DNA, 532 bp, Homo sapiens
tgcagtgagccatgatcgcaccactgcaccccagcctgggcaacagtgataccctgtcacttaccaaaaaaaaaaaaaaaggacaaaaaacaaaaatccttttgactaggttggacctacccacataacccaggataaggtcctttacttaatcacatctactaaatctcttttgctgtgtaaggaaacaaacatatccatagatcctaaggagtaggatgtggacatcttgaggtgtggggttggggagaaattgccttattctgtctgccataacagtcctttgtggcaaataaagaatgttttctatattttaaataatcaaggtgtgtgcctatgagtgttaaaaacagaatccagcttactttacatgtttayaccaattacttggcccctgtaagcatttgagtttggaatccttgaatatccttagataacatggctcatgaccaggatttgggaatgcaaaggattctgacatttaacctttgagttgataaaacaaagactggagggccgagggctctaggca

SEQ ID NO: 251028 - DNA, 532 bp, Homo sapiens
tgcagtgagccatgatcgcaccactgcaccccagcctgggcaacagtgataccctgtcacttaccaaaaaaaaaaaaaaaggacaaaaaacaaaaatccttttgactaggttggacctacccacataacccaggataaggtcctttacttaatcacatctactaaatctcttttgctgtgtaaggaaacaaacatatccatagatcctaaggagtaggatgtggacatcttgaggtgtggggttggggagaaattgccttattctgtctgccataacagtcctttgtggcaaataaagaatgttttctatattttaaataatcaaggtgtgtgcctatgagtgttaaaaacagaatccagcttactttacatgtttacaccaattacttggcccctgtaagcatttgagtttggaatccttgaatatccttagataacatggctcrtgaccaggatttgggaatgcaaaggattctgacatttaacctttgagttgataaaacaaagactggagggccgagggctctaggca

SEQ ID NO: 251029 - DNA, 571 bp, Homo sapiens
agtaaatgggccccctccccacctagcctcacccaggacccccagaccaccccaggacccagtaagacaagacttgttacctcaatactcagccccaccctgtcccccaagttaccatgggtatccctgttagccacagtgggaattgaggctcagagcattcagggacaagcctggggccatccagcagtgacagaggaggctagacacatgccttccaggctgggaccccgtctcycttagcattgcccgtgactttgagaccaagtgataattagcgaacactgagcaaagacttgttcagtccagactaagccacaaagtggatataattttcctcatctagatgggaaaactgaggctcagagaggttaagtgccttgcccagggccacacagcaggactgcaatttgaacccaggcccatctggcttgtcagagccatcaccacatcaccatcttgctagtgtctgtttgggggtggggtggaggacggatatggaggtgtttgtatagagggaggatttttcctttaaaaggtcagactggctggcaatgtggctcacgcctgt

SEQ ID NO: 251030 - DNA, 571 bp, Homo sapiens
agtaaatgggccccctccccacctagcctcacccaggacccccagaccaccccaggacccagtaagacaagacttgttacctcaatactcagccccaccctgtcccccaagttaccatgggtatccctgttagccacagtgggaattgaggctcagagcattcagggacaagcctggggccatccagcagtgacagaggaggctagacacatgccttccaggctgggaccccgtctcccttagcattgcccgtgactttgagaccaagtgataattagcgaacactgagcaaagacttgttcagtccagactaagccacaaagtggatataattttcctcatctagatgggaaaactgaggctcagagaggttaagtgccttgcccagggccacacagcaggactgcaatttgaacccaggcccatctggcttgtcagagccatcaccacatcaccatcttgctagtgtctgtttgggggtggggtggaggacggatrtggaggtgtttgtatagagggaggatttttcctttaaaaggtcagactggctggcaatgtggctcacgcctgt

SEQ ID NO: 251031 - DNA, 489 bp, Homo sapiens
ggttgcctctgagggcatggcatgaagattggatgagcagatgcgtgtgaatagttgggtacagggtcgcacacatactggtgctccatgtgtatctgtctgccagaggtggggtgaggcaatctaattgaaactgtgaaaacagtagtgagattcttggtttctggggaacttgggctccttggttcctgggatcttctagaacaatgttggccatccaatacagcagccatcagccccatgtagctactgagccttggaagagaggctggcacagctgaggagctgggcatataattgtatgtatgtatgtatgtatgtatgtatgtatttaattattatttttttaagacagaatctcactctttcaaccaggttggagtgcagtggggcaatcttggctcactacaacctccgcctcccaggttcaagygattctcctgcctcatcctcccaagtagctgggactacaggtgtgtgccaccacgc

SEQ ID NO: 251032 - DNA, 594 bp, Homo sapiens
ttggttaaaaatatgtggttaaatttcagacaacttgaatgttgagaaatgagcgtcgagatctggtgaggataaagttctgtttcctaaaatattgccaaatcctgtgtctccaagaaagatcaatttgataatgacttcatgccagctgctccatttggtcttagaaagaagtcagttactgagctataggaccgccttctaatggagcagacggaccaattggatgtgggctctgccttgatggacaggcacagggggtggagccacagcgttgcacatttcccgggcttgggtggggctgagacgcggctccaggctctggacttcctttgagaaaaaggtcacgctaaaccagaggcccacaagcaatcatgtcatgtgggaaacatctgcaaagctgcctgaccagcacccgtccctttcatagggtaacattctcaattttcttttaagaaagaaaatgtgtgctagrtccagcaaaccataagctagggattggtttacagtggacaaatgatccagacccagccaaccagagtctaagattgggcagagaggcgggcatttgagcaagatccagccaatgaaacg

SEQ ID NO: 251033 - DNA, 455 bp, Homo sapiens
tgtgccgtccccgaaatcgttgctcctgtggtggtgacccaaagcgagacaaagcgccgcgccaatacgggctgcagtgattggaactcaaacacacacatctctccgcgaatgtgttccatccgtgtaaatatgcctgggtgattgaatggatggctgaatgaacgctgtgtggatagaaatataaatgttacatgtataatacaggcgccggggaaggagagctgtcaggcacccccaggctggagcctcctgcccagaggagccggtggagacaggcggttcgcccagggcggtgttgttagcttgggctttccagttcgatttgtgccactatgcaggatactgtgaagagaagaaaatggagacaactcttggcctctcattttccctcctctctggttcagacactctggmactaaaagttatgattctcatgtgctgttgaacctaca

SEQ ID NO: 251034 - DNA, 616 bp, Homo sapiens
agcacaatttacctgctttaaatcactccatgattacacagtgatttaaagtgcaaactcctttgcctgttcgtgtgtctcaaatcaatgcccaccagagagccagagccttcactgcagaggaagttctgaatgacacaggccaggatggtttgacccatctctgcccttggccaccccagtgcttgcacagtaggtctgtgaaccctcaaccaatgagggatgagaagacatggatattctgggctaattggcataccccacagactcatcaagtttctctacttctttttttaaaattaatttattttttatttcaataggtwtttagggggcaggtggtgttttgttacatgaataagttctttagtggtgatttctgagatgttggtgcacccatcacgcgagcagtgtgcattgtacccaatgtgtagtcttttatctctcaccgcccttccacccttttgcctgagtccctaaagtccattgtatcattcttatgcctttgcatactcatagcttaccttccacttatgagtaacaacatatgatgtttggttttccattcctgagttacttcacttagaataatagtctccatttacatctaggttgc

SEQ ID NO: 251035 - DNA, 600 bp, Homo sapiens
ctgtctttcccaaacctggttcttcatttcttttggkgattgtctttgcttctcctctctttggttttcttccaacctctctcctctctctctttctcactgtctccaacccccgtttctctctctctctctctcacacacacacatacacacacacaaacacacacacacacacacactctttcgtggcctaagttagtctcaggttcattttctgatgtttgcagatcctacactgataacaggacacaaaattagattccaggtctgtgcagtccctttgggttgacacctgagttgtactgtgtgctggcttatcacttattcctggaaactgtctctcaggtcatcttccacagtctgcagcttggagtccagtcctgccccacacctgagaacagcccaggtctccagggccccagcccacacccaggatgctaggcttctctcatcctggagaggagacagttcctgggggatttcaccaacctgaaccctcatcagatttccactgcccacctgcccatgatccaagcagagttctttccatttgctccttttactctaaagagcctcatcaagtgtcctgtttatgtgcat

SEQ ID NO: 251036 - DNA, 600 bp, Homo sapiens
ctgtctttcccaaacctggttcttcatttcttttggggattgtctttgcttctcctctctttggttttcttccaacctctctcctctctctctttctcactgtctccaacccccgtttctctctctctctctctcacacacacacatacacacacacaaacacacacacacacacacacyctttcgtggcctaagttagtctcaggttcattttctgatgtttgcagatcctacactgataacaggacacaaaattagattccaggtctgtgcagtccctttgggttgacacctgagttgtactgtgtgctggcttatcacttattcctggaaactgtctctcaggtcatcttccacagtctgcagcttggagtccagtcctgccccacacctgagaacagcccaggtctccagggccccagcccacacccaggatgctaggcttctctcatcctggagaggagacagttcctgggggatttcaccaacctgaaccctcatcagatttccactgcccacctgcccatgatccaagcagagttctttccatttgctccttttactctaaagagcctcatcaagtgtcctgtttatgtgcat

SEQ ID NO: 251037 - DNA, 600 bp, Homo sapiens
ctgtctttcccaaacctggttcttcatttcttttggggattgtctttgcttctcctctctttggttttcttccaacctctctcctctctctctttctcactgtctccaacccccgtttctctctctctctctctcacacacacacatacacacacacaaacacacacacacacacacactctttcgtggcctaagttagtctcaggttcattttctgatgtttgcagatcctacactgataacaggacacaaaattagattccaggtctgtgcagyccctttgggttgacacctgagttgtactgtgtgctggcttatcacttattcctggaaactgtctctcaggtcatcttccacagtctgcagcttggagtccagtcctgccccacacctgagaacagcccaggtctccagggccccagcccacacccaggatgctaggcttctctcatcctggagaggagacagttcctgggggatttcaccaacctgaaccctcatcagatttccactgcccacctgcccatgatccaagcagagttctttccatttgctccttttactctaaagagcctcatcaagtgtcctgtttatgtgcat

SEQ ID NO: 251038 - DNA, 548 bp, Homo sapiens
ttgtacgtgtctgtgagcaatactatttttctcaatcaaggtatatgcttgtagcatttcaaaatgtgttgggcgtgcttttaaagatgcaagatgctctgttttattctcaggggaattcctgtgtactgttaccctggggatagaattccttaaaataaaacaataataatagcagcgaaaaccctaaatactccaagtgatgctcacacttaagcagagaagcagcctagggtgtacatgtatatacagtgagatcaaaaaaaaaaaaaaaaggaaaaactaattctgtgttgtagtttgtgggacactgaaaagaggtcaagaaatagacggtaaaaaatatatatatagaaaggaataataagtatctcctctatttcttctttcgcagttctgttttgaacccaaagtggatgatgctgtcagagctgaacyactgaaaggaggctgtgaaaatttcccatcttctcattggccatcagttgagataagatggaagactcttacaaggataggacttcactgatgaagggtgccaaggacat

SEQ ID NO: 251039 - DNA, 565 bp, Homo sapiens
ttttacattaaacactttccccaaagcagcaaagaaaaccagtgtttcaatgagtagcagctttcactatatgttgattttgcttaattttcttgtttattttgtaataaaacttctatagttacatcacgtggctttagtgatattattgtttctactaaaacaaaacaaaattctcagtaaaacagtacatcatgactatgaagagcagaaattcaggagccagactgcctgggttgaatcttacctagttccactacttattaattgtgtaattttgagcaatttatttaacttctccatgctttgaattcctcatttgcaaaatgtggccaatatggtgcctaccccataaaggcattgagaggaataatcacctaaggtggttgaaataaygcccaacacatagtaagcatttgatcagcattagcctttgttataaatgctgtcactcatattgtagacattcgttacatactgcccaaatatttaattaatattcatgaaaatgcttagtgttaaagagatgctataaattgtacttggtttcaacgtagggtgatca

SEQ ID NO: 251040 - DNA, 628 bp, Homo sapiens
acaataaatgcttactgagcatcttacaaataaaatattttggccaatttgctgacatggytgtacattcagagactttgggcatgttctaaaaattcaaataagagccagaatttacatctaaccacaactctcagtgttaccacttctgagacatgagaaatctgagcctaaaaaatacactctcagagacacatattagttcttagaattaaacttgaaatggtggatgagaaattcagctcggatgaagagaaggaaaacctggtatgatcagaaaatacaatatgaatccttcttactgttaatagaaggttaagctgaactaccttgaacataaacccaaatgtcctacaggctaagaatgaaaccaatagttagcctgagaagatgttatgttgagaagctagagatcctgattcccagtgctgtcagtcaaagacacagtgaaaactgctatgaaagagaattctgtgttgtcatatgtcagccagactaaaaatcagtggttggttatcctgagagagaaggaaacccttatagcagaaaagtacagtgtgatcagagaaccctgagaaatggcatttaacgatgtcatcatttcctgagtgaagatgttacaactcat

SEQ ID NO: 251041 - DNA, 453 bp, Homo sapiens
aacgatgtcatcatttcctgagtgaagatgttacaactcatcactagcagcaacaggacatgaagacaagacacacacacacacacacacacacacacacacacacgagcaaaagaaagcactaatatggcaaacaggaagtacagtaaaaatatttcaaaaacatcactaggagtctcaggagctcaggtatacattttatagcacttcaatcttaggcaaagatcatacaakttttaaattttgtagtacccaatttcaaaatcgtctagtaagaaaaaaaattctaagccagcagatcacatacagaatgaactgttattttccatcatatctgggacttttattaagtgaaatatgatgttacaccaactgtctgacatgataatcaacatagcaactcatagggtaataaggtaataatatataatatggtaataaggaagtacataa

SEQ ID NO: 251042 - DNA, 544 bp, Homo sapiens
gaagcatgaatgtggcaaacaaacaagcaaaagcaacacaagaaaaaagaataaaaaatgtgtgcattaaacttgttatgtgaatagctgtttctacttggagtgaagcccttaagagcctctgttttagttttgcatatkgcacatcacttgctccgtcatcatccccaaaagcatttattaaagccttctctttgtggggtattgtgttaggtcctactcagagcaaatcaggaagagatggttcctggccactgggagtctacaattcaaataccaaggaagggccccatcgttttccttcttctccggatcccttgtagcagaaatccagtttatattttggcaggaactggattgagatggtcagaaggttaaggtcaacctttccctaacctttcctctttcaaatatcgtgttctgagaacatcaaaatgctatattaactgctaatattttttctattgttaaagtgattttaagatcaaacacatctaaattctaagaacaatgtatttatgaataatcaaaagaacaacagaga

SEQ ID NO: 251043 - DNA, 544 bp, Homo sapiens
gaagcatgaatgtggcaaacaaacaagcaaaagcaacacaagaaaaaagaataaaaaatgtgtgcattaaacttgttatgtgaatagctgtttctacttggagtgaagcccttaagagcctctgttttagttttgcatatggcacatcacttgctccgtcatcatccccaaaagcatttrttaaagccttctctttgtggggtattgtgttaggtcctactcagagcaaatcaggaagagatggttcctggccactgggagtctacaattcaaataccaaggaagggccccatcgttttccttcttctccggatcccttgtagcagaaatccagtttatattttggcaggaactggattgagatggtcagaaggttaaggtcaacctttccctaacctttcctctttcaaatatcgtgttctgagaacatcaaaatgctatattaactgctaatattttttctattgttaaagtgattttaagatcaaacacatctaaattctaagaacaatgtatttatgaataatcaaaagaacaacagaga

SEQ ID NO: 251044 - DNA, 382 bp, Homo sapiens
tttgtgctgttagaaataacactgcattgaacagctttgcgggcaatgtttccttttagggttctactttaggatagactccggaagggggattattgcaccaaacagtaggaatggtgttagagctcttggcatgtgttgcaatttttttccttaacccctcaaatagcagcaycagtttaaaccactttcagggtctatcagaaaggacctttcctgacattttagaaggatctagaactagaaataccatttgacccagccatcccattactgggtatatacccaaaggattataaatcatgctgctataaagacacatgcacacgtatgtttattgcggcactattcacaatagcaaaggcttggaaccaacccaaat

SEQ ID NO: 251045 - DNA, 543 bp, Homo sapiens
gtgcactttttggatgaagaaaatcccagtctgaaaattaggccatcaagtttttattcctacctcactggtaatggcatgtgcctctatgtgaatcatttcctctttatttgacttcagtttttctcttcttcaaatttagggtttttgattctgtgagcactaaatcacctttcctctctaagctctacaactccaagaacggctcagttgatgaccagcttgattttctaatacatattcgttagtttgaaaaaattcaagaccaytgtcaagatcagtagaagatcctcgatgttaaaaccacaatcctagaagatgtagaaccactactaggaaggcagaaagccagcacaagagacaactcttctgtttcccccacactgaactccagtctccactgctgttgtggtaataccactaccagagcctgagtcctggatcctattgcttcctgggggtcaggtagaaatatgtatttgagaggccttgtctggagtgtggtaaggcacatgttttaaggaatgcctgggaagcactgct

SEQ ID NO: 251046 - DNA, 621 bp, Homo sapiens
caagtaagtggcttaaagtctatttgacattttaagtctctctcccatctcattctctctccacactgctgccagaggcagctttctaaaacacaggtctaatgatttcatgataaagtccaaacccctatcttggcattaagrtcttcacaatatatccacaatgtgacctgtcagctccaacactactacgcctaccacagataagttcacataattgcctaccaagtccaggctattgggcaattataacatcttcccgaagtgccatccttccttttatctgcccggtaaactcttgtccagctctcaaaaccctgtttatattttttattttaagttctgggatacatgtgcagaatgtgaaggtttgttacataggtatacacgtgccatggttcaaaactctgtttaaatgtcaattcctagatgagttttcatcagtttccaaaggtaagcctggtagttccctcttctgcaatcctatagcattttattcagtatctttgtcacagaaaaaaaaaacataaagcactaaaatttatcacaagtgtatttgtcacattgtaacaacaaaaaaaaagttcctgaatgacacagatcacaatatactaatcagaa

SEQ ID NO: 251047 - DNA, 639 bp, Homo sapiens
caggcagagagaaagaattcttttttaatcagccttttattctattcaagccttcaacagattgggtgaggcctaggaatctgctttgctcagtctgccaattcaaaaggtaattgcctctagaaataccctcacagacaaacccagaaataatgtttaaccaaatatctggggcaccccatgggcccaatttagtagatgcataaaactaatcatcacaaggcatcacatgtttctgctcacctttcacatacttctgccacctccacgcagaaaacatgaactgggtaatttattaacccaggaggataaaagacctgaattcaaaatgcaacttgaaaaaaccccagccatgctcagtctagaccacctagccctcagccaatttacagatttgtggatgaaaataaatgattgttgctttatgtcactaacttttaaagtggttgatgtaagcagcatgatgtggcaatcaatgtctcatatatcaaatgagacagttttccttttttctcagcataaagaatacaagtattgttaaaagaagaatagggaaagccaataagaaatttatgatgttggacatggaattgatagatattaggaaaaagaagcaatggrtaaaatatagggaaaaga

SEQ ID NO: 251048 - DNA, 273 bp, Homo sapiens
ctggcaatatctggctcagatctccatgaatcaaayattttgtgtcaaatcagttggtaaagacactggctagacaaaaagggaccatggcatggtgaagtttcctaagcccaatcacagcctgagatggtttggcttgtctccacccaaatcttatcttgaattgtagcttccacacttcccacatgttgtgtgagggacccagtgggatataattgaatcacaggggtggttccccccatactgttcttctggtagtgaataagtattgtg

SEQ ID NO: 251049 - DNA, 440 bp, Homo sapiens
gatggggatcttagaaaagaatcacgagatcaatttgcacattccttcatggaaaccagataaatgtagtctgactttataacagagcaagsatgtcagggtgaggtagggactgaacaggaaaaaaagttaatattgagttaatgttgatgcccttgtaggtgtgaagagggattccaggagaatattttgttttgtttctttttgttgtttctcaatagtttgctattcattgaaggtgttttataaatgctaagcctaaagactccataacaaaaaagcaatgggatgatttatacttgacttgaaggagtatctatatttgtttttaatattttttaaccacatggttaaaaatactagtccttagttgcatctcttgcaccctcagccccattccctaaggaaagttctaactcatttaattttttggaatgttt

SEQ ID NO: 251050 - DNA, 591 bp, Homo sapiens
atgaagaaaatgtgtacacttatatatacttagacatgagaaattacccaagaagaaaggcatttccatgtcataactcaagacaaccaagagcctgccaaacaacaggattcaggttaaaatagctcttactatttctcccaggaagttaattcataaaggaacaataataaaaaggctgacaagagaatatttttgtaggatagatgaggcacaaagacgaatatttaamgtgaaaggagttaccaacaactgaataggaacaatgtcagcttgatgaaataaacttctccactaatgtgagggcagaatttgatgttacaatatgattaccaaaaatatgagagggcaaatgtcaagaattttcctgatgtttttcttatggcattctattctattttagtctcatgcatcagttatccaagatgtaataccaactggaatgtacttgctggaaagaaataaaaaattgtatctcacaacattgcacatcatggtaatagaaaatttcctcattaccttaaatttctgttcctagcataataaaagggaacacactgattcttctttaggctattgcatttttctcat

SEQ ID NO: 251051 - DNA, 521 bp, Homo sapiens
tgggcttcttttgtcacatggtcaagagttagcaggggagatttgcagctaaatggcactatatgtgatttaatagatattcctgcctaattctgggaggaagtaatagcaagcaggcccttttggaaatagatctaaatccatgttcaactgcttttatcaataataaggatatattcatattctccatctggttactgtacccatcttccagttaattacaaatttagaaggaaaagagggatatcactgcatggaagcaaagcagagtatgccatgtcctgcacactgaaaatgtgataccaaaaatgaaaaactcaacagtaactttaaaagtggccaaggaaatatccaaacaagatgaattacaaaaaaaaaaaamaacaacaacataggtggtaaatagaaggtaagaaaagtagaagatcaatccaagaggtctagcatccaaataagaaagaaacctagaaataggaaatagagaaaatgaaaaggatacaattatcacagaaataacttaa

SEQ ID NO: 251052 - DNA, 558 bp, Homo sapiens
acataataggtgttcacaactggcttgcttaaaaaaaaaatcagtgtttacttgaagaaaggagagttagcagaaggagaaatgaggacaagggaatagactcattaaagcctactcaactagtttcttctgatattctccaccactactttttatggtatttttaattaaaggattaaagttatcattaacaaatatttttctttgcattagatagacagtatagaaagactcccgtctctatttaaaaaaaaaaaaaawtagtggggcttggtggcgtgtgcctgtagtcccaggggccgaggtgggaggatcaattgagcgcaggatgtcgaggctgtggtgagctattttgccactgcactccagcctgggtgacagagtgacaacttgtctctaaaaaaattaaaaagaaaacaaagaaaaacaaaagaaagtacattagttctagatgaaatcttgctgtaaaaaaaaagaaaagaaaggacactagcaatgttggaagagctagcatatttcatgaaaatgtatgccttcaggatctcaatggtcattctg

SEQ ID NO: 251053 - DNA, 596 bp, Homo sapiens
gattaaacattcaagacatttcacaggagaaatgcctgtgggagaaaacagaggggatgctgggaggggctgagcgagctctcagagagagaaggaaggaaggagggttaagggggaatcctccagccaaattacccatcggaggagcctctactcttccaggaatggctgtgcttagtattcctgccgtgtttagtaattgggaacgggctgtcagaagcagaggctaggtgccaatgcagccgctctrtgtttcagcacagcagccaggagagcagagaggctcctgttcatgatcaccacaaggacacatggcttttattggattctcaaagaggtccatggccaaaaggggttaaaacctttctagaaactgttgaggcaaaactaacaacatgtaaataacttatctgcatatctaggagaatggtgatgatgctacctgttctatgacatgtagcatgaggcactgtgccagggagtgtgttttgtttctgccatgttgtgtttgagatgccagaagctcagaggacacagttcgagttgcagctctgtgaaagagtgttttcatagagaaattgaggtgacaatggaaa

SEQ ID NO: 251054 - DNA, 521 bp, Homo sapiens
ggtggcatatcataatgcagtttaaaacctccaaaataaaagcatttagtatttttggtaatgaagaataaaaatctaattgactgggaaatagcagttaagtgaatttatacactgaatactttgaataattttatgattattcaaagtctttgaacagataggctcataatttttacaagaaaggatttatttaaaatccttggtagtttttcctctgtgtttggtagttcattgatatagaacctactgtttttyagtaataattgctagtaggttgctagtgaaagccttgagatgctatctggtttctgcaggagacgaaaccattgcgttaaatctgagatggagtgacctcagtaccagcatctccctctggaagtacattttccccaaccagagaagctaccaaggattgttaggagattagaaaattctacctggtgccccagccaatgttaagaggattgaaaaactagagggtgggtgctctcacttgtaattatatgtgaaccgaatgt

SEQ ID NO: 251055 - DNA, 521 bp, Homo sapiens
ggtggcatatcataatgcagtttaaaacctccaaaataaaagcatttagtatttttggtaatgaagaataaaaatctaattgactgggaaatagcagttaagtgaatttatacactgaatactttgaataattttatgattattcaaagtctttgaacagataggctcataatttttacaagaaaggatttatttaaaatccttggtagtttttcctctgtgtttggtagttcattgatatagaacctactgttttttagtaataattgctagtaggttgctagtgaaagccttgagatgctatctggtttctgcaggagacgaaaccattgygttaaatctgagatggagtgacctcagtaccagcatctccctctggaagtacattttccccaaccagagaagctaccaaggattgttaggagattagaaaattctacctggtgccccagccaatgttaagaggattgaaaaactagagggtgggtgctctcacttgtaattatatgtgaaccgaatgt

SEQ ID NO: 251056 - DNA, 521 bp, Homo sapiens
ggtggcatatcataatgcagtttaaaacctccaaaataaaagcatttagtatttttggtaatgaagaataaaaatctaattgactgggaaatagcagttaagtgaatttatacactgaatactttgaataattttatgattattcaaagtctttgaacagataggctcataatttttacaagaaaggatttatttaaaatccttggtagtttttcctctgtgtttggtagttcattgatatagaacctactgttttttagtaataattgctagtaggttgctagtgaaagccttgagatgctatctggtttctgcaggagacgaaaccattgcgttaaatctgagatggagtgacctcagtaccagcatctccctctggaagtacattttccccaaccagagaagytaccaaggattgttaggagattagaaaattctacctggtgccccagccaatgttaagaggattgaaaaactagagggtgggtgctctcacttgtaattatatgtgaaccgaatgt

SEQ ID NO: 251057 - DNA, 568 bp, Homo sapiens
attaatattgtttacatgtcattgtaaagtcaaaaaatcgtaagtcttaccattgtaagttggggactgtctgtgttcatttttgtctttgattatctatagctgtatctcactggggatttacactcaattttctgtatccygtggttatgccacaaactggatacacagaattcatttgtttcattttacttttgattttaagagttccattgactgactgacagattgattgagtcagggtcttgctgtgtcacctaggctggagtacagtgacactgcgatcatggctcactacagccttgaacttctaggcccaacacatcctcccacctcagcctcccaagtagctgggaccacaggcatgtgccaccatgcctggctaatttttcaattttttgtagagatggggtctagttttgttgcccaggctcgtctcaaactcctaggttcaagtgatcctcttgcctcggccacccagagtgctgggattacagacatgagccactgtgcctggcctaggttccttttaaaaatgaaagattgttttataattatgtaaaatgtt

SEQ ID NO: 251058 - DNA, 508 bp, Homo sapiens
ctggatctctccatttggatatttgatgggcactttgaagttaacatgtccaaaatgcacctcttgcttttccccaaaacctgctttccttttggtcctcccctccacagtaaacggcaccactcctcacaagctacttaagctaaagcctagccattgaccttcattcttttctttcacttagcttccaaatcccagcgccagctatcaatacttattttcagctgtgtctccaaaatgcatcccaaatgtgactgtttccctcctctccactgtgacctccccagcctaagcctcccatgcaggaaagtctccttgcatctgctgcagcctctccwcagtgcttctctgtcctgcactcagtgtctacacagcagccagtgtggcctgttgaaaacctaaatcacttcatgtcatgtctgtgctcaaccaacggggcagtgagagaagcacattagtactgagagagggtgctccattggcttcactgagacacaggaggaggttt

SEQ ID NO: 251059 - DNA, 479 bp, Homo sapiens
gtgcatcaccacgcctggctaatttttatatttttagtagagatggggtttcgccttgttggccaggctggtcttgaacttctaacctcaagagatccactcacctcggcctcccaaagtgttgagattacaggtrtgagccactgtgcctggccactgtgccaggcttttaaagaagatatatatctctcttttgagataataactaggtggtcttgggtataccacatctcttttgaaactactttttaatcactttgtactctgagatgtgtgtgtatgtatgtgtgcatgtccttctggtgtattaatgttaattcatgtttaaaatcataaaagcaatatttgcacattgcaaaaaaagttaaaaattacagaaaggtattaagtggaaagtcaaagttcctccgcacttatcgtggtaggctgaaaatgccccctcatccaccctcaccaaaagatatccatgtcttcatctc

SEQ ID NO: 251060 - DNA, 352 bp, Homo sapiens
cccacggaatccaagttttcacgtcccgattgggcttagttatgatagctactggctcacacaagctgcmacagcaccccgtcccatggaagccacccgactctctcctccctgagtttcctgtcctgggagcccccatctctgctctcccgggctccgggccctagagccgcactgctgcagagcccagttcccagggcagctccctccacctatccacatccatctccagctctccaccctctctcccaccagcctggcctggaggtgctgcagtgtcattgactgcgagtccctcagctgccacctccaccgcgatctggaagtctttcaaatgcccttaagttatctt

SEQ ID NO: 251061 - DNA, 501 bp, Homo sapiens
attaaaagacataagccaaaaatagatcattgcagactgagtacaaagaaccattctatttcttctcttaaaaaattaaaatttcaaattaagtaccaatgaccaaataagtaacaaacacattcagaaacatactatatgtctacaaagaatacttcaaaatgtgcctccaaacttcaggcacataattccaatttttattgaatrtagagattttatgaaaacaaatccaaagctgtcccatcatggaacagccctctaccatttggttattttaagactgttcaattacttacatggcagaatacatacactatatttagaaaacataaattgggtttgatatgcaattgttttcatcttacaccatttcaataaatttcacaaattataacaggttgccattttattgaatatctgcgacactttacattgttcaggaagtagctacttccagaaggctgatattctcctccaaattgtctttggctaagtactaca

SEQ ID NO: 251062 - DNA, 620 bp, Homo sapiens
aaatcgcaaatgaatcagatagatatgaaaggcttagatgatggaaacatcaataatatatatttcaatgcagaagcaggagctattggggaaagtcatggtattaatataatttgtgaaayagttgataaacaaaatacaatagaaaatggcctttctttaggagaaaaaagcactattccagttcaacaagggttacctaccagtaagtctgagattacaaatcaattatcggtctctgatattaacagtcaatctgttggaggggccagacctaagcaattgtttagccttccatcaagaacaaggagttcaaaggacctgaataagccagatgttccagatacaatagaaagtgaacccagcacagcagataccgttgttccaatcacttgtgctatagattctacagctgatccacaggttagcttcaactctaattacattgatatagaaagtaattctgaaggtggatctagtttcgtaactgcaaatgaagattctgtacctgaaaacacttgcaaagaaggcttggttttgggccagaaacagcctacttgggttcctgattcagaagctccaaactgtatgaactgccaagtcaaatttacttttaccaa

SEQ ID NO: 251063 - DNA, 620 bp, Homo sapiens
aaatcgcaaatgaatcagatagatatgaaaggcttagatgatggaaacatcaataatatatatttcaatgcagaagcaggagctattggggaaagtcatggtattaatataatttgtgaaatagttgataaacaaaatacaatagaaaatggcctttctttaggagaaaaaagcactattccagttcaacaagggttacctaccagtaagtctgagattacaaatcaattatcrgtctctgatattaacagtcaatctgttggaggggccagacctaagcaattgtttagccttccatcaagaacaaggagttcaaaggacctgaataagccagatgttccagatacaatagaaagtgaacccagcacagcagataccgttgttccaatcacttgtgctatagattctacagctgatccacaggttagcttcaactctaattacattgatatagaaagtaattctgaaggtggatctagtttcgtaactgcaaatgaagattctgtacctgaaaacacttgcaaagaaggcttggttttgggccagaaacagcctacttgggttcctgattcagaagctccaaactgtatgaactgccaagtcaaatttacttttaccaa

SEQ ID NO: 251064 - DNA, 614 bp, Homo sapiens
atttatggatgaaataatacaacatatggcatttgctttcaaatcatatgggtatgtaatggaatagatgaaactaggttgtccatattgmagctggattatgggattggctacgaggggattgattacattatttccactttgtaggttttctacttatcttttaaatatacatgtagaaaaatttagagataaaatatataataaatgagctttgcctcaagataatctaattgtgggggagaggggataaaatgggtgggtgtatagataaaaataagatctgtgacaatgaatatagagtaattcacttgcaaaggaaaaacatgccaggaaacaatgctgttgcagatagtctcgttgaagcactctctcagtgtatcaatcagaatagccagccacaaatctcaggggcataacacaaagttccagtttatcttcaaggatagactgaattatgctgcggtactaaagcactctcaaaatcccagggcacaaaacaacaaggttttttttttttcttcctctagatgtgttctgttcattgaaatcccacagagactcaggctgatggagcagtcacagtatcaaatcttgtctattgttatgccaga

SEQ ID NO: 251065 - DNA, 612 bp, Homo sapiens
atgaattcttgagaagtctcatcaagtatttagtggatatatgcctgctccattgatggtgatttgaaaacattatccaattatactatgaagaaaacatttctcagaatgttctaaaggtcwcattggctgatgtacaaggagattcttactctaagtctttctttctaagtcaactgaaaagtatttgacatcacgtgtcggcaaagtcctcttaggggttgccagttgctttctgcggcagctttccgctgtttacccaagcaacaagaccggcagattatggtttgagacatgctccaaggcaggagtggggaatgtgaaacattgaaatccttccacgtgtattcaaccacaccccgttttcattacctccaagcagggaggtgaacagagaactactacatagaacaataggcatgatttgtgcttgattcactctttcccacctcagacagtgtaattatcacatgcatcagagagccgtagacaagcactttcccagttcaggtgcaagaaaccgtcccttttataacaggcctttagggactgaagtcttagcctaatctgtttagtacttttgtgtaaacatcctttgtagcaatcatctga

SEQ ID NO: 251066 - DNA, 612 bp, Homo sapiens
atgaattcttgagaagtctcatcaagtatttagtggatatatgcctgctccattgatggtgatttgaaaacattatccaattatactatgaagaaaacatttctcagaatgttctaaaggtcacattggctgatgtacaaggagattcttactctaagtctttctttctaagtcaactgaaaagtatttgacatcacgtgtcggcaaagtcctcttaggggttgccagttgctttctgcggcagctttccgctgtttacccaagcaacaagaccggcagattatggtttgagacatgctccaaggcaggagtggggaatgtgaaacattgaaatccttccacgtgtattcaaccacaccccgttttcattacctccaagcagggaggtgaacagagaactactacatagaacaataggcatgatttgtgcttgattcactctttcccacctcagacagtgtaattatcacatgcatcagagagccgtagacaagcactttcccagttcaggtgcaagaaaccgtcccttttatracaggcctttagggactgaagtcttagcctaatctgtttagtacttttgtgtaaacatcctttgtagcaatcatctga

SEQ ID NO: 251067 - DNA, 501 bp, Homo sapiens
aagcatcctggcagctaaggtataataggaaatccatctggtatttagccctaccttattaaagaaagaatcatacacatgtgaagagaagctgaattctagaaggaatatatttgctgaataactttaagtctgactcagatgaaggggttggcattgctccagggcagcacatgagctctgtagcagaccaaaacagtaccactgcttcccactactccaagccaccaggaatgtgctgatctccttttctaactagtcaaagtgcaaaattgccatttttccttaagtctcccaaagacagcagtagcagtgtgccaatggtatgtcaatcagtgtgactcagatgtcagtggaaggccccatgctgcttgagccttccacatttcatagtccgtggaattcaaagcctttttaagtgtgtctaayttcgaagtggttttggtttcctcagcctcccttacctctgagatttcctactcatcaccattctcctacacc

SEQ ID NO: 251068 - DNA, 580 bp, Homo sapiens
tgaaattaacttattgcattcaagagacatctataattctgcagttagttggtgagaaagaattaaacaatttcatctttgaccatttcccttttcatttcagctaaacaaacctcgccttgctgaattactcagatcctctcttccagctgataggaaaataaagggcctcatgagtgaggctttatatttataaattttaattcatataaaaacacaaggatcacattaaagtgtcatgaaagggcaaattaaagataaaagtttaaagacaaattaaagactaatgcttcccgcttcaagcggatcatgggggtctgtgccaaagtattgaggcacatgccatgtgagagatcaggaattgagctcatctccctacagttctraaatatgaaggctggactacaagccacctctgaacaactcatgaatcctggggagctaaattcaataggactctattttggatttttttctcttttattttcatttctttttttttttttttaaaggaaaactgtgactacagaaatgagaaagatgcaacccatgtaattgacctagtaccctctgtctcatt

SEQ ID NO: 251069 - DNA, 431 bp, Homo sapiens
ctggttagttgtccaatttagtgcaacctgggaaaccattggacataaactctgactttcccctaagcctagccctccccgaccccgggctcctctagcaaagccttctgaaataggatttatgagatgaccaacaatgcaacgaaactgtggacaaagatactgacattagatttgccatggccactcatgacaaagtttctattggcttttggcccattttcagatgtctgtatgatgagagataaattctcsaatatcccattagagttactaagcagcccccccattcagtggagtatacatatataaagattctatttcttccagtcactgcctttagccatacctaattcattctctgtttcttgtcactttatactatctgggatagattccataaatttccagtcatgctgagccattaaaac

SEQ ID NO: 251070 - DNA, 497 bp, Homo sapiens
tgagggtcagttgaagtttgtaaataacttcactccattccttctaacctcttttggtatccatcaaagaaggccatggattttccagatcaaaatgtgtccaaacataaattgagggcattagatacatgctaggacctgagttgaaggtatgggcttggtaacataatgtagctatttctgggtttcagacgggcataaagattagtaagattagttaaaaatgtagggccttagagtaagacaggcctggatccaaatgattgcttcaccagagcaagaaaccttggataagtacttaatttctcttgagactcagtttccccaattagaaaatgggagtattgagaatacccaaatcattgggttgttaaaaggatgaaataaaatacctggcacaattattatatttcttaatatataaacatatgttatataataaatatgatatattaatatatgtaytattctgttctcatgctgctatgaagaaatac

SEQ ID NO: 251071 - DNA, 555 bp, Homo sapiens
ccatggtctcagtgaattggttttgcctgtgcagcaaacaggaagaacccatcagatgagtacactttagttcagcatatcagagcaccatatttcggggtatcattttctgagccccaacaagggtgaactggagactgtagacctaagctaaggggcagctgctacttaatttcagccatttcatgacaaaagaaaaggcaggcccacaagattttctgatttgttgaaaggaaccaaaaatactagattttctttttatttttaagtgtgaaatcttcccatattaaagtttttgaacaaaattgactttttaaaccacttgatgcaggccaaaaggaaaygcatctgtggacaacatttagcttgcctgctgctaatatgtgatctttaatttagattatatgacagagactggatgaatacttatcaaacctatatcctgttctttctgagcacacagctaaattatatttcccagtctctcttgcagttaggccagaagaatattggtgggaacaatggacactgctgccaagcccaatcctccactcc

SEQ ID NO: 251072 - DNA, 555 bp, Homo sapiens
ccatggtctcagtgaattggttttgcctgtgcagcaaacaggaagaacccatcagatgagtacactttagttcagcatatcagagcaccatatttcggggtatcattttctgagccccaacaagggtgaactggagactgtagacctaagctaaggggcagctgctacttaatttcagccatttcatgacaaaagaaaaggcaggcccacaagattttctgatttgttgaaaggaaccaaaaatactagattttctttttatttttaagtgtgaaatcttcccatattaaagtttttgaacaaaattgactttttaaaccacttgatgcaggccaaaaggaaacgcatctgtggacaacatttagcttgcctgctgctaatatgtgayctttaatttagattatatgacagagactggatgaatacttatcaaacctatatcctgttctttctgagcacacagctaaattatatttcccagtctctcttgcagttaggccagaagaatattggtgggaacaatggacactgctgccaagcccaatcctccactcc

SEQ ID NO: 251073 - DNA, 567 bp, Homo sapiens
gaatagaaagacttttactcttgtattttatttcgtgcctttctatattatttttatttttttggtagtttttatgaaagaatgcattattttcaatatctgcatccccaaagtcagataatcaaaaaattaaacctattcactagttagatagaaatagtaagcaattttccaaattattrtaagaaagaaagaagcaacaaaaatccaggaaaaataagaaacagcaaaaagaaacaactataaaccaaacaaataaaaacaaaaacagaatatctgaataaaaataaacataatagtgttctcaaataatgtaaatggattaaattcccctattaagtataaaaactcccagaatgatttttaaaaagcaaaatacaaatatatgatgttttagaaaacatgcttagaacaaaaggcagaatgtaatgagaaaattaggctaaaaccaaagtgagacagaatgtaagctaccacaactttacaaggtatgtgccatcattgtcctccatatctggtgaggaaactaagacacagctactgcggcagaacagtgattaaaaccca

SEQ ID NO: 251074 - DNA, 567 bp, Homo sapiens
gaatagaaagacttttactcttgtattttatttcgtgcctttctatattatttttatttttttggtagtttttatgaaagaatgcattattttcaatatctgcatccccaaagtcagataatcaaaaaattaaacctattcactagttagatagaaatagtaagcaattttccaaattattgtaagaaagaaagaagcaacaaaaatccaggaaaaataagaaacagcaaaaagaaacaactataaaccaaacaaataaaaacaaaaacagaatatctgaataaaaataaacataatagtgttctcaaataatgtaaatggattaaattcccctattaagtataaaaactcccagaatgatttttaaaaagcaaaatacaaatatatgatrttttagaaaacatgcttagaacaaaaggcagaatgtaatgagaaaattaggctaaaaccaaagtgagacagaatgtaagctaccacaactttacaaggtatgtgccatcattgtcctccatatctggtgaggaaactaagacacagctactgcggcagaacagtgattaaaaccca

SEQ ID NO: 251075 - DNA, 592 bp, Homo sapiens
gaagtctgcttgaatcttctgctaaggatttcactttcttgttaaaagacagacgygtggcttgcaatgctatttaatactttcttttccttccattttcaacgtagaagtgatgcttgaaaccacagcagccattttggggccacgaggcaataagcacaaggataaaaagccaagaaccaaagatggagaatcaagggtgtaatgaacctagatgatatgatatgacagagtcctgaactgctagacttcttactaggtgagatgagtaaatgtattcattgcttaaatcactcgtaatttggatttctgttaattgcaactaaaagcattcttatctaatattccttattgttgaatagcatttctttctgaaatgccatactgcaaccttcctgatagcccaggatctctgctaaggtaccactgaagatcatggtattagctggacttaatgcatggtttcatcaatgaatacttgcattttaacaaataattcctggagacaaaggcataaaactataatggctgaatgacagatattggggttagtactttgcagagggccaggggcctcgatttctgcctcttc

SEQ ID NO: 251076 - DNA, 662 bp, Homo sapiens
tatcactatatccatttcattacacttttataggcttaaagtattttaactgtgcaaagaaatatagtgtgatgacacagtcccatctatgaggacaagttatacacctatttttatgtttgtggtccattttaaaaatctatatttggggataaataaaaggaagcactacattatttgcttattacagaacatacggaacttcttatcccaaaaatgttattcgagttggaattatgaaaagtttaagggcttagatgacttcacaaattgaccccattacaagttatttaaaagataatattcctaatcttgaatcattacaaagataatatcatcagctatctccccaaactgtacatttgtcatctattgtcattaaccaaaaggaatcattgtatcttagttgaaaagaatggtaacgattttcattctcaacttttatatgctactgataggaaaaatatataattttcagaaggttatataattttaccagtgtcaaaaaaatcaccagagcagcataggaatttttttatattcacgtaaattgaatttaaaatctagatggactatgtcrctaaatcagcaagcatgtttcaaaacaaaatggaaataaaattcatagatctcagcagaggaaatggtcttctgaaaggcaa

SEQ ID NO: 251077 - DNA, 470 bp, Homo sapiens
acatataaaaaacaggcatagctggaaggcagagcatccagatctctagaaattaagaatcacatttttatgttgaatttcagatctaccagagtccagaaaaatgtccaaaatggaaagaccacagggatgggctgtgctgtgctctcacagtacacctcaccacaaggatactccccctgagactgaatgggccatccaacatcaatcaatttactttgtgactagcttgccaaccacaggagccccaacctttgatggtaagttttgcaacagcctccaactgcccaatatccattgtcaagttgtggctttggmtctatgatccttttgatcaacatagccaatagttttcttacaccaaagtgccatttactgtcagtttctctttgactcagtcagaaatatgaggctattcttatctaaatttgaaagaaatgggacaaaaagccagagttcaaccactgtag

SEQ ID NO: 251078 - DNA, 595 bp, Homo sapiens
tccctgtcttccaccactggctttcacagatattcaacttcacctaaatgtttagtatggttctaggtgcatcttatataaatctgttttagcatctgtacccttcctatgccctgggctggaaatatmatttccctagactatttctgttttattcagatattgtgtcttctttgaaccttttcctaaataccaagccatgtgagctttcttcctactctaaacacttaacggtcttcttgtcacttacgtttccatagcatttatatagtggcctccctgtattgcagttatgtacaccaggtgctctagaccatgtattttataattcatctttatactgcacaccacacagaacagggcctaactcttcactggaaaaaataattatagagatagatagataattaatatttattacccagaagccatatattttaacccttctcaaaaatatttattgtatcataaaacaatacatatttgcagctccatgttaactaaaaagaagcataaagtacttcaatgtcctaagagctgtatgaaaaccgaatggaaagcacaattaattttatactccagcatacattctacc

SEQ ID NO: 251079 - DNA, 595 bp, Homo sapiens
tccctgtcttccaccactggctttcacagatattcaacttcacctaaatgtttagtatggttctaggtgcatcttatataaatctgttttagcatctgtacccttcctatgccctgggctggaaatataatttccctagactatttctgttttattcagatattgtgtcttctttgaaccttttcctaaataccaagccatgtgagctttcttcctactctaaacacttaayggtcttcttgtcacttacgtttccatagcatttatatagtggcctccctgtattgcagttatgtacaccaggtgctctagaccatgtattttataattcatctttatactgcacaccacacagaacagggcctaactcttcactggaaaaaataattatagagatagatagataattaatatttattacccagaagccatatattttaacccttctcaaaaatatttattgtatcataaaacaatacatatttgcagctccatgttaactaaaaagaagcataaagtacttcaatgtcctaagagctgtatgaaaaccgaatggaaagcacaattaattttatactccagcatacattctacc

SEQ ID NO: 251080 - DNA, 567 bp, Homo sapiens
ctaattttttgtatttttagtagagacaaggcttcattgtgttagccaggatggtcttgatctcstgaccttgtgatccgcccacctcagcctattttgtgttcttgaaatcaaaagcctaatattttagattcctacaagtggactaaacattggcattagtcctggaaacatctcagtaggagaaagagggctgccagtggtgaggtcatcctgaggcatttgaattcagggcttccactatcccaaacttggtggctattctggtaaacatcaaggtcacacaaccaatgctgcttgattgcagtcacttctctgatgtcttcagcaagtgtttgctcctttttgcattttcttggctttaaaattcacacagcaactctatccccccaacccaatcagaaggctttcaacaagccattctgcaaaacacaaaatcagggggaaaagaagctaaatcaaactcaaataaaaagcagtgatagaaggcttcaacaaagtccacacagggaatcaagcctgcttttaaacaaaaatattgacatagcaatttaaaataaataccag

SEQ ID NO: 251081 - DNA, 555 bp, Homo sapiens
tagttgagggcctaatttatagcaaagccccttaacctgtatctcaagtatgagcctacagggtagaaagccctgtccaagatgctgtgtgtaaagaaagacgaacaaaatgtggagcctgccagtaggagatgactgttttataaaacaaaacctccagtgcaagagcgacttgcataccatagtcagtcatcttgaggcaagtagttagagattagagagatgtgtgtaaaacaaacacagtgaatcaaatcagctttctataagcaataactcaaatagtctgagtaggaaaaccatcaacccatttcagactaaactcagacaatttgtttagggtgtaawaccaaaaaccactgttgagctaatttgacagacacctcatttcatgtgttttgctcctaccaagcatcatctagaaagcgggacttggtttatttgttttaaaataatgacttagatcaaacagataggaaaacaagaacaaaaacaaataaccaagctgaatacagacattacataaactataaaggagaagaaaggaacacaagaaga

SEQ ID NO: 251082 - DNA, 611 bp, Homo sapiens
acacataattacttccactgatattctatttgtatgaagtagctcacatagccacacctaaatgcaaacagggttgtaaaatgtaatttctgctagacaaccatgtgtcaaaggtatctctgctcactccccagggatgtctccatgttattaagagggaacataaaacagacagttgactatctctgccatagcagagcacttaatctagcctataattttagcctttgcattttgcttcaccataaggatttgctgtcatcatctttattttctcttggttcataaaaaytatttctttgtcccatttccaatcaagaaattaagaatacaggcagtgaggactattcagaatagagaagataaatatgtcatttagttgtaggagttacatcattgatgacctaacaccagtgtaattgtgggaaaaaattcacttaggattcactagtccatcatttcttgttctgttggcatctgcccttatcctgttgggtgaccttgggaaaatacttgtattctttggacctgtgtttttgtctttacaaaataagggaattatattggatcattgattcccaacctttctactatgaaagacaaactcataa

SEQ ID NO: 251083 - DNA, 611 bp, Homo sapiens
acacataattacttccactgatattctatttgtatgaagtagctcacatagccacacctaaatgcaaacagggttgtaaaatgtaatttctgctagacaaccatgtgtcaaaggtatctctgctcactccccagggatgtctccatgttattaagagggaacataaaacagacagttgactatctctgccatagcagagcacttaatctagcctataattttagcctttgcattttgcttcaccataaggatttgctgtcatcatctttattttctcttggttcataaaaattatttctttgtcccatttccaatcaakaaattaagaatacaggcagtgaggactattcagaatagagaagataaatatgtcatttagttgtaggagttacatcattgatgacctaacaccagtgtaattgtgggaaaaaattcacttaggattcactagtccatcatttcttgttctgttggcatctgcccttatcctgttgggtgaccttgggaaaatacttgtattctttggacctgtgtttttgtctttacaaaataagggaattatattggatcattgattcccaacctttctactatgaaagacaaactcataa

SEQ ID NO: 251084 - DNA, 553 bp, Homo sapiens
gtgttcctaaaccacatttttgccattcacctaagctcttaactagcactactaataagctgcaaatagatagatttgaattttatcactttctctctccaccccctactcttgtctggtttaagtgctagtgggcggtcaaccaccctcttaaagacaggaaaagcagaggctggaccaagcaatcaatagactggataattagcccttgagtaactgagagtwaaatgtcttatatcaacttcaccccattactcccagaatatgaacaagccaaagcaagatggacaagaatatgagagagcagaagcaaaaagaaatatagtaaaggaacagagttctttaccttggggttatcatatgacacaaactccagtgacatgaaaccagatgacaatggcaggttagcagggcaattcaaaacatgacaggatggccacaagagctgtaagatagttgtttcccctcagcaccaaattatttttctctctcttttttttttctgcaacaaaagactcactccaggctttggctgtgttcccaaaagattggg

SEQ ID NO: 251085 - DNA, 448 bp, Homo sapiens
ttcccctgttttagccaagagtggctcctgcctctaaactttcattgcctttccttctgccatcacagctggttgttgtcctagagttttatctcccccactgactaaagtacaagattgatttctgcattgggaggaaagaatttaattggtgaatagcagtcatttttgttcccttgcattcagtgaatttacaagctatctcagtatttcaaaaaataggaccttcaggcaggagtaacatttgaatctgaacatcagccatctatctacctgaagcacttagcacccagtgaagttcggttgttacttggaaagccttaataggcaccatgggaccctracaaacttactctttcatgcacataagcagtctgtcaactattaatatctaaaaaacaaagacataacccagcagctctccccactttcctatcaagctcaattc

SEQ ID NO: 251086 - DNA, 580 bp, Homo sapiens
aaaatattttataaaatatactaaaaagtagtcatttttggagtttcataaaaaaattcaaatttaattggacttcctgtatttttatttgctaaatctgacaatcctggagaataaagctcattccagacaatcctgagaaccatttcttcccaaggacccttccacagaggtagctacagtactcaagctatcgagttcagctaatcctaatttttaattctttttttttttttttttttttttttwtgagttggagtctcgctctgtcgcccaggctggagtgcagtggcgccacctaggctcactgcaagctccgtctcccgggttcccgccattctcctgcctcagcttcccgagtagctgggactaccagcgcctgccaccaattttttgtatttttagtagagatggggtttcaccatgttagccaggatggtatcgatctcctgacctcgtgatccgtctgcctcggcctcccaaagtgcggggattacaggcgtgagccaccgcgcccggccctaatttttaattcttagagaaaacaagtttagcatagattttgtgcaaaagccaagaa

SEQ ID NO: 251087 - DNA, 585 bp, Homo sapiens
aaattcttgtgtgaagcttaatctagtcttagcatctgcttctctaaaagcccagacaaataattatatttgcttcaccctattcccgcaagtaatccatgagagtcagtgttctacttcatctctgctagcacttaatagttttgaagtctttgctactttgaaaaacaaagagaagtgrctcctttaatttgcattttttaatagcaaggttttacatttttgtctcatactttttacccatttggatatctgtaaactgtccttgtggagtccatggaaacacagacttacctggaaaaaggtgctttttgggagatgtggtctccattgtcttttctccattgtagttgccaacactcagcagttggcaggtttcaactgggagatgcagccagctgctacactccagaggagggatgtatggctgcagtgtgagctctatgctgagtgtcactaacatgaactagttagttcctctttgttaagtataaagagccaaccatgtgttccagcacgtggtcccatggtatgtagaggagaccaacatttatacagcatctactatgtgctaggcacattctt

SEQ ID NO: 251088 - DNA, 441 bp, Homo sapiens
ggtttggcaatgattttttttttgtatgacaccaaaaccacatgcaacaaaagcaaaattaaacaagtgggacyatttaaaactaaaaagcatctgtacagcaaaaaaaaaccataataataaaatgaaaaagcaacctatggaatgggaaaaatatttgtaaactatgtatattagtcagggttctccggaggggcagaaccaataggatatagatagatagatagaggagaggggaattattagaggaattagctcccgtgattatgaaggctaagttccttgataagctgtctgcaagctgaggaatcagggaggctggttgttcaactcagtccaagtctgaaggcctcagaaccatggaagctgatggtgtaactctcagatcaaggctgaaggcctgagtgggggaccactggtgcaagtagtgaagctcaaagg

SEQ ID NO: 251089 - DNA, 430 bp, Homo sapiens
ggaccatgtctcctctgtggctccaactcccgtagaacagtctgccatggatctagccttcattgacaagagttaccaaaaatctgagaaacattgaggaggaaaaaamgtcttaaaactgggaaaattcggtccattcacttaatgacttttattcccctgtgaattgggaaggggagaaacaccctttttctattttctttctttctttctttctttctttctttctttctttctttctttctttctttctttctttctttctttcttctttctttctttttctttctttctttcttctttctttctttccttccttccttcctttatttttttctttttgagatggagtctcgctctgtcacccagactggagtgcaatggcgcgatcttggctcactgcaacctctgcctcccgggatcaagcaat

SEQ ID NO: 251090 - DNA, 430 bp, Homo sapiens
ggaccatgtctcctctgtggctccaactcccgtagaacagtctgccatggatctagccttcattgacaagagttaccaaaaatctgagaaacattgaggaggaaaaaaagtcttaaaactgggaaaattcggtccattcacttaatgacttttattcccctgtgaattgggaaggggagaaacaccctttttctattttctttctttctttctttctttctttctttctttctttctttctttctttctttctttctttctttctttcttctttctttctttytctttctttctttcttctttctttctttccttccttccttcctttatttttttctttttgagatggagtctcgctctgtcacccagactggagtgcaatggcgcgatcttggctcactgcaacctctgcctcccgggatcaagcaat

SEQ ID NO: 251091 - DNA, 600 bp, Homo sapiens
aggagatgtggtaatcactagtgtcaatagcaaaagccttctagctatctgcctttcaggtacatggtggggcatacttaactgtttgctctgatgttaggcatagcatggacctacttggttcaataaagagacagcagaagtgatgtgtgtcatttccaagggaaagtctcacagccagacaatactttatcagcctgggcctgggtgactatgaggagcagagcctctgcccactgacaatggacacatcccatgaataggaaagacacacawattgtgttatgccactaagagctttgagctgttagttattgcagcataaactgacctaacctgactactatctgggtggaggagggaccaacaggatctgaaaaccagcgcccatcaactcaggcagatggttcagcattgcaggaatttacctgacctccattgaagagggggtacaaatgagctcagcaaccctaatctgaccagacaaagcagcggacagtcactgctaccactattgccacacgtcaaaataatatgcaaaatgtgtggcttgctgtcaagataattccatttcctgaaagtctctctcgttttggagcg

SEQ ID NO: 251092 - DNA, 337 bp, Homo sapiens
actaagtggattttcccaccactaccaacacacgcacccccaaatggagtaaccaaggtggattatttctttccagggccttagtcctgytaatggtgcatgttttgtggtcagaactcagctattcaaaggttacatcttagtgaaaacatggcatgttcttgttacaatctgaatatttgtgtccccccacctaaaatatattgttgaaatcttaagcccaaagtggatgtctttgggaggtgattaggtcatgagggcagagcggtcatagatataattagtgtccttataaaagatgtctaagggatcttatttcctccttctaccacgtgag

SEQ ID NO: 251093 - DNA, 337 bp, Homo sapiens
actaagtggattttcccaccactaccaacacacgcacccccaaatggagtaaccaaggtggattatttctttccagggccttagtcctgttaatggtgcatgttttgtggtcagaactcagctattcaaaggttacatcttagtgaaaacatggcatgttcttgttacaatctgaatatttgtgtccccccacctaaaatatattgttgaaatcttaagcccaaagtggatgtctttgggagktgattaggtcatgagggcagagcggtcatagatataattagtgtccttataaaagatgtctaagggatcttatttcctccttctaccacgtgag

SEQ ID NO: 251094 - DNA, 564 bp, Homo sapiens
acctgcttcatgtaaaccagcgtccttctgaaccagggcacagctgtcctcctgggattccccatagtccctagatccctttgccttcttattctctttccccatgtattcttctttcttggtttactcccctctcttagtggcccatgttcytcaatagttttcttagaaaatacgtgtggaaattacatttttttagatcttacatatatgaaatgtatttattctatatttttatgtgattggtagttgggcaggatatagaattctagattggaaatcattttgaaggcattatcccaacagggttgcttctgagacatcagaagaaattctgattcctgatactttgtacatgacctatttgttttcctcttctctggagatatttaagattctctccttaccctcagtgcactgaatttcccagtaatatgtcccttgcaatctggaagagcctacctagcacatcctacaataggcaacatagagcaaatagcgtaaattagaatttcagcacagatttttgccaccctctacaggtatttaggaatataccaactt

SEQ ID NO: 251095 - DNA, 539 bp, Homo sapiens
aattactttcgttttctgtagtggagcagctgagaaaaattgctctaattgtgtaattttctgcaactactctgggacaaaaatcttggtaattggatttttttaactaacaagttgtcacaattggatagttcttaaactattttgtgcttatgcttcagaaattttcagtggatgtacagtatattttaaatgttttgcatcagctcrtggtctcaaatttgatttattttaacttcaaattttaaaatagattgacaactctgattatacattgtcttcactaaacggacctttgctaagtttcctagcatgttcgtccccaccccacactctcctgttgccatgggagcagaaatcctggcatgtgcagctccagctcccgagtggctctgtttcccagagtgctttgctgttactatggaaatgactgcccattaatcttgctgtccttttactaccaaagcacctttaactgtctcaagcaatcaagtgatgttacctacagcagggaaaggaaggagaagactgcttcccat

SEQ ID NO: 251096 - DNA, 533 bp, Homo sapiens
tgcacatgtaccctagaacttaaagtataataaatatatataatatataaaaaattgtaaaaagcccatcctactccaacatgatcttagcttcactaaccacatcagtaaccaccctatttccaaataagatcaaattctgaggtacaggtgattggacttcagtatatcttttaggggggcacaattcatgccataataccttatctcataaagattatcaggagagttatacagaaaaattagcgaacaattataaaagtcagctatcgggtatcttaattactttttgtcacctgaattccttcagtttgttggggtacaagttaatagagtcatgtttattaaagcttaatttagtctcacatccaggagtctacccatgacatgacgatgatgatggtgatgatgatgatggggatggtgaggatggtaatcacggtggcagctaacgcttactgagtgctcattatgagccaggtggtattctaaattctttayctgtattaattcatttattccttatgaccacc

SEQ ID NO: 251097 - DNA, 576 bp, Homo sapiens
aagagacccaaaggcttagggagatcggggtggtagagtggattagtcactttaggcctattcatcccagctgggagggtccagaagctatatccttgaccaatgccttgtgaagtagatttgtgagggcagcacctgcatctttgaagagccctgtgattgctcttctctgtatgtcagatctaacagtggaaaccacagtcactcaactacacaacttaaatacagtgggaataattgagtcgcgaggtggcaggggccatgtggcagcactcaacagtcaaaggcaaggtgggcatacctactgtaatggacagcagaggcaaagcagcaatcagaatagtctgactcgtgtagagctgtggcattgtgtagagctgtggcattggctaattaatcacagtgttcctagaagtgaaattgatagacagcctactgcattccgacttaatttatacaaacagaaaacttataggtcaaatggacaaaagaataatttgaattataaaaccagagaacyacagtccctcaatcagtttccagacttgagccaggttacagacccagaagcccttg

SEQ ID NO: 251098 - DNA, 605 bp, Homo sapiens
gggaccttctacctcagtaaaatttctagggrtccagtgatgtggggcctgttaagatattccttctaaggtgaagagtatgttgctgcatttgacccctcctacaaccaagaaagaggcacaacacctagtgggcctatttagactttggaggcaacattcctcactgggccatgttactctgcctatttattgagtgacctgaaaggctgcctgttttgagtggggtccggaacaggagaaggctctgcaacaggtccaggctactgtgcaagccactctgccacttgggccatatgacccagcagatccaatggtgcttgaggtttcagtgacagataggtatgctgtttggagcctttggcgggtcccccataggtgaatcacagcagaggcttctgggattttggagcaaggccctgccattttctgcagataactactcttcttttgagagacagctcttggcctgttactgggctttggtggaaactgaacatttaactatgggtcatcaagtcaccatgcagtctgaactgcctatcatgaactgggtgatttctgacccatctagccataaagtgagtcatgcacagcagcattct

SEQ ID NO: 251099 - DNA, 605 bp, Homo sapiens
gggaccttctacctcagtaaaatttctaggggtccagtgatgtggggcctgttaagatattccttctaaggtgaagagtatgttgctgcatttgacccctcctacaaccaagaaagaggcacaacacctagtgggcctatttagactttggaggcaacattcctcactgggccatgttactctgcctatttattgagtgacctgaaaggctgcctgttttgagtggggtccrgaacaggagaaggctctgcaacaggtccaggctactgtgcaagccactctgccacttgggccatatgacccagcagatccaatggtgcttgaggtttcagtgacagataggtatgctgtttggagcctttggcgggtcccccataggtgaatcacagcagaggcttctgggattttggagcaaggccctgccattttctgcagataactactcttcttttgagagacagctcttggcctgttactgggctttggtggaaactgaacatttaactatgggtcatcaagtcaccatgcagtctgaactgcctatcatgaactgggtgatttctgacccatctagccataaagtgagtcatgcacagcagcattct

SEQ ID NO: 251100 - DNA, 502 bp, Homo sapiens
aagtctgcaggtccccatcacacgttcctctcttttctctagacatgttggggttaggtggacttttaggaaccagctggtgaacaaccaccattctaaacactctttctattaaaaaaaaatcactaacctcaaatttgattcctactgcagttgtaaaagcttggaggagaggattgagctgaatgtgcatacagcctgtggcattacctgggaagttttaaaaatcaatttcatgagtactcatcaactcgtcatttttctctcctccataaaagtaaaaacaagccaaaaagaagggcagtaacttaaactagtagagttccgtgtaaagatgagtttcctctacatatgcaaattttaagaatgctgataagttagaaaatgaytaagttcttttttttttttttttttgcttttcaaggggaaaatgggattcctttagctattagctgaaacatagctaaaatatatttacaaaatttaatatttataaataatt

SEQ ID NO: 251101 - DNA, 624 bp, Homo sapiens
ctgtcttgtcatcaagcagcacacacgtgcatccccttactgcactgatcactcatttttgtaatgacatttgattcctaggaaagaagaaccagtgacagacactaaacaacagacaggacttgaggayggatgggatgactgtagagagaattgttgaaccttcccatttcctattttgtttccttttccatcccccacactatttcagggaaatctgtcattattgcctaactcagatttcatgtccatcagaagataagatctactttataagcactgttcctatcatgccaggcaattggcaagaagctacagagaatggagcctctacttggtttttattgcagaacagcacattcctggagaccatgtcataaagtggatcattgaaaagcaaattacattttcccataggaacaatgttataattagaggttgtattcctgaaaaaggacttggcttcatgtaaatagtagacgtgaacaaaaatatttcacaaaagcaaagattcagtagctataaatccatataattgtttaaaataataaaattttctccaagtattataaaccaggcaggattagaggggcatgtgttgattattgagggactccaatgtac

SEQ ID NO: 251102 - DNA, 624 bp, Homo sapiens
ctgtcttgtcatcaagcagcacacacgtgcatccccttactgcactgatcactcatttttgtaatgacatttgattcctaggaaagaagaaccagtgacagacactaaacaacagacaggacttgaggacggatgggatgactgtagagagaattgttgaaccttcccatttcctattttgtttccttttccatcccccacactatttcagggaaatctgtcattattgcctaactcagatttcatgtccatcagaagataagatctactttataagcactgttcctatcatgccaggcaattggcaagaagctacagagaatggagcctctacttggtttttattgcagaacagcacattcctggagaccatgtcataaagtggatcattgaaaagcaaattacattttcccataggaacaatgttataattagaggttgtattcctgaaaaaggacttggcttcatgtaaatagtagacrtgaacaaaaatatttcacaaaagcaaagattcagtagctataaatccatataattgtttaaaataataaaattttctccaagtattataaaccaggcaggattagaggggcatgtgttgattattgagggactccaatgtac

SEQ ID NO: 251103 - DNA, 606 bp, Homo sapiens
tagtgggtgcttgataccttgttaattcaacagccatgaaaaaagagaaaagcagaggaaaacagagatcccccagatgggtggatgaagagtcaggtacgtcatttctttcaataagtttttttcatactgttggaaacttttcaaaatgttggaaacttttcaaactgttggaatttttaaagggacttatgattcaagaatgaattccaaaataattctcaaaatgagagggcacagtttcaacttactcattctctctccaatttgttcaactaatgtgaaatctccatgcacacacacacacacaaaagagttgagagaggatcaaaaacactttgccctggtgcctaagaggctcagtcamttgtcaataagaactcatgatggacaatctgtggtggaaaagttgaactcataatacagaacttctgcccaactccagatactcaaatcaacacctgctatgtggcagacatgctgctaaacactctaaccctaactcaattttaattctgataaccataatgagtgactgaagcaaagtctcaatcaatcaaggtttattaagctagctttaggccgagtccaggaaagacactagcc

SEQ ID NO: 251104 - DNA, 581 bp, Homo sapiens
catagctgctccaaattgagaagaaccatttcctaaataaaatgtaaactcttgttagaattgctgtcaaaatgaaaaagatgactgacaaaaattttacatttcaaagacagaacattgatgaaaatctytttgttttaaagatgatggttttcttattttaaataaaatctttttaaattcataaggcatatactattaagatataccatgaggcaaaccacattttgtaaatgaaagcttaggagatcagtcaaagaaagacaaaaggaaccagttccaatgtctgttgctcaatattggtgtctgttcaaacgttagcattgtcagcctcatatttctctgcggtggttttcagttactctaaaaggctgtttaagcacccaactgacttgaatcagattttctgggcctgtggcttgggcaactgagtttagaatgttcccaggtgattctaaagtacaatgatgctgagaaccacagctacagagcttgctaattttaaaatttctgaatttttagcaaaaaaagtaatgcagccattcagtggcattgcaataataaatgaacacttaaaagga

SEQ ID NO: 251105 - DNA, 601 bp, Homo sapiens
cctgccagtctccatctgggaaggaggtggaaggaagtgacaaaggaaagcgcaggcatttggagacagaaggagcccagcaggactttgaaagaaaaatattcagtgctggaacatacttcttaccaagtaatgttttcactctctagaaaacatgcttctttccagtctgaaggccaggctggctgccacttctctccgcctgccaactagtcattagcaaacaatgagcaacccagtgactacraaagaaaaaggaaataggcatgcagcagcacaaggtaatgactgctgagtgtctggaggataaagtatccaagtatcaggctggaggctgccctcttcatggggagcttcaggatgagggaaaaagggaggtggggcacagctgaggaatacagtctgcggctggctagggaggagcctcgagatgggtatacttggggaggcttgggacacattcacccagggatgtgtgcagctgagggcgtgcacagctgtggtcatggctggcacaggatatttcctctacctagcccatggtgggaatgtttggagtgaataattcaagaaagtcatttccagaacacccaagttgaag

SEQ ID NO: 251106 - DNA, 623 bp, Homo sapiens
acagctataacctggcatcttaaacaaacagatccaagtggtacatggatccctgcaaacagctgctcgcctgccaatgcttgagtcacttaacatccagtatcattgttttagatttgctgtcattgttttttttgttgtctggggtgagttattggactgaaaacaatttggatattgtctccctccatggggttctgcagccaaaaagagattaatgaaaagcaggagtttggggcaagtgattccgacatatcctttctcwgagcaatacaaatgacaaggctgttacttggggaaacaacaggccacaagagtgatttcactgtctctgatggggaagggtgggcataaacattaagcacagttcatgacattggggaatgactgatgatagaatgttacagtcttgtttcctcacaaggatttctcaatgtttgtagaagctgtgttttcatacagcctaggaggcatcaaagcaacttagtagtagtccttgacattgacagagtattttaaatgttaccaaacacttcaacacacattatcataagtgtgccccaaacttacacactagataggagggcaagtacttctattttactaatgataataagaagtat

SEQ ID NO: 251107 - DNA, 473 bp, Homo sapiens
aacagctactatgatccagcaacatgttagccccttaaattacctaaacaaaggtcacataactggtaagtggctgatatggtttggctrtgtcccaacccaattcatcttgaattgtagctccctcaattcccacatgttgtgggagggaaccagtgggaggtaattgaatcatgtgggtgggtctttcccatgttattctcataatagtgaataaatttcacaaaatctgatggttttataaagggaagtatccccacacaaattatcttctcttgtctgctgccacatgagatgtggctttcaccttctgccatgactgtgaggcctccccagccacatggaactgtgagtccattaaaccttttactcttgtaaattgcccaatcttgggtatgtctttatcagcaatgtgaaaacagactattacagtaaatgagtaccagtagagtggggcactgctgaaaagatac

SEQ ID NO: 251108 - DNA, 316 bp, Homo sapiens
gtatgtatgcattttggtatatttcttgtgatgattgatattttatctcattttagaggcagattgtatagaataaattgaaatttgcttagtgatggcmgaaagctttgcatctcttttaggggtgattagctatgcttacaataaaactgtgcatatatatatttggaacatccttataataaaaaaataagcaacctacatgtccaacaataaaatagtgtttatatgaattatggcataccgtagaatattatgctgtgattaaacatggtatttccaaaatataaaatgaaaaaatgaggacataagactg

SEQ ID NO: 251109 - DNA, 316 bp, Homo sapiens
gtatgtatgcattttggtatatttcttgtgatgattgatattttatctcattttagaggcagattgtatagaataaattgaaatttgcttagtgatggccgaaagctttgcatctcttttaggggtgattagctatgcttacaataaaactgtgcatatatatatttggaacatccttataataaaaaaataagcaacctacatgtccaacaataaaatagtgtttatatgaattatggcataccrtagaatattatgctgtgattaaacatggtatttccaaaatataaaatgaaaaaatgaggacataagactg

SEQ ID NO: 251110 - DNA, 519 bp, Homo sapiens
tcaataggactgatgtccttatataataaaaaagggaaatttagactcagagacagacacacacagaaggaagaccatgcgaagagatacagggaggagatggtkatgtgactggagtgacgcatctaaaagccactggctgtcaaggattgcccgcaaacatgggaagctgggagaggccagaaaggattctccccgacagtcctctgagtgggtgtgccctgccactccttgagcttggacttctaacctccagaattgtaagacaatagatttctgttgttttaagacaactcgtttttagtgtgttgttatagcagccctagaaaataatactgtgttgcattttttttttctcatcatatgaatggagagaactagtgagagtatgcaggtttttttttacttgcctcattattttgagagaagagtcacagtgagtctgatagcttttgaatcttggttttgagtcctttctgagacctaaatgcatgactgtcctttctgtgtattggtttt

SEQ ID NO: 251111 - DNA, 519 bp, Homo sapiens
tcaataggactgatgtccttatataataaaaaagggaaatttagactcagagacagacacacacagaaggaagaccatgcgaagagatacagggaggagatggtgatgtgactggagtgacgcatctaaaagccactggctgtcaaggattgcccrcaaacatgggaagctgggagaggccagaaaggattctccccgacagtcctctgagtgggtgtgccctgccactccttgagcttggacttctaacctccagaattgtaagacaatagatttctgttgttttaagacaactcgtttttagtgtgttgttatagcagccctagaaaataatactgtgttgcattttttttttctcatcatatgaatggagagaactagtgagagtatgcaggtttttttttacttgcctcattattttgagagaagagtcacagtgagtctgatagcttttgaatcttggttttgagtcctttctgagacctaaatgcatgactgtcctttctgtgtattggtttt

SEQ ID NO: 251112 - DNA, 425 bp, Homo sapiens
ttatgtgtgtcttgtgcccagcacacctagaattcactaggggtggggtcttattttgcaaagccaggcataatcrgcaggaatggagcaaacccctgaaatgaacctgtcagaccaatcttttcccagcctgccgctcctcactactggcagcagcccttcagtgaaattgtccaagtgctgctttattttaaggcatctactgtttgttttagatttacattttgatttgacattccttttgctggaggtagttttcatttcaacttgcaatgaattgtactttgagctataattatataaatatttagatattatactttttctttaggatatgaaaaaagatggttagttgcttgtttttgctgtgtacttctaatatacttagcatttaaattagatctggagtttctggagaaatatgt

SEQ ID NO: 251113 - DNA, 520 bp, Homo sapiens
cacccctgaaagtatttataaattttgtcataatcaaaatctcactaagactttttcttgaactcgaaaatatagattcattaatttattttgaaatagaagctggagataatagtaagcaacaaaatacagacacataagacaaggggaacttgaattttcagatgtcaagaagtacttattacaaagttaaaacctgacaacaaaatggatagttagatcaatgaaaatgcataaacatctgaaaaatatgcctaaatttataggtaartagcatgtggcaagtctatctggatagaatttaatacggctatacacaaaaattgagtaactgaaaaatgaaagtttcttcctattgcatatcatacacaaaaatatatttcagatgggtccaaacattatcgacaaaaatgaattagaaccataattctgattctgtaagtcctaaactccagatgagagaaggacttacaaaaggaaaacgcatagaacacaaagaaaaaatatcaataatttaact

SEQ ID NO: 251114 - DNA, 520 bp, Homo sapiens
cacccctgaaagtatttataaattttgtcataatcaaaatctcactaagactttttcttgaactcgaaaatatagattcattaatttattttgaaatagaagctggagataatagtaagcaacaaaatacagacacataagacaaggggaacttgaattttcagatgtcaagaagtacttattacaaagttaaaacctgacaacaaaatggatagttagatcaatgaaaatgcataaacatctgaaaaatatgcctaaatttataggtaagtagcatgtggcaagtctatctggatagaatttaatacggctatacacaaaaattgagtaactgaaaaatgaaagtttcttcctattgcatatcatasacaaaaatatatttcagatgggtccaaacattatcgacaaaaatgaattagaaccataattctgattctgtaagtcctaaactccagatgagagaaggacttacaaaaggaaaacgcatagaacacaaagaaaaaatatcaataatttaact

SEQ ID NO: 251115 - DNA, 598 bp, Homo sapiens
tctcagaattcctactacttttttagtccttacaacaaggcttaacacttcaccatttcctaatggcagactttgtctcatccattagattctaaagtttctgagtgaaaagagtatttttatatctatttttatgcccctggagcaatacatacatagcaaaaaagatcttaaagatccttttctttccttttccttgtaatgtatttgtgaagaaatcagggtatttattcgatagagtatcatacattttaggttttgctgattgcatcactagagtatcatttaacatgttyctctgttctttttcttttttgtgctggtgcatctagaggctagatcagatttagattagagtttttggcaagaatgtttcatagatggtggtatgtattaccagcagaaggtaatctgattgtctctcttcttgtaatgttaatactacctattaatgaggaaatgtgaggttgataatccattataaagtcttttgtcagcttattatctattgcttttagttgccataaatgatcatcattgccgtggttaattagaagttacgtatgataagtattcttctcattccttctgaatttgt

SEQ ID NO: 251116 - DNA, 532 bp, Homo sapiens
caatcaggggaggctttttggagaagctggcctttgtcctgagagaatgagtcaaatttggaattatggagaatgatagaaaagggattctaagcagaaggaagagcacatgcagaaacgtggaaacgggaaatgtataaagtctgagaatagcacagacaaattagaaaatacaagtggggccttatattgacttcttatagtgctttcatcatcaaagaarcttgtatggtattagtgcaggaaaggggaaaaaaagatctaatgaacaaataaccaaacaagctaaccaatcaaaaacaaaaaaaaaacaaaaaacagaagcactcatagaaacattcccatatatatgtggaaacttggtatataatggaggacattacatttcagaggagaaaaggactattcaatcaagagtgctgaaacagttatccaaagtgatggaaaaggatacaattaggtctccatctcatctcacacacaaaaacaaatttcaggtggtttaaagacctaagtgtgaaacacaaactgt

SEQ ID NO: 251117 - DNA, 634 bp, Homo sapiens
gcatataactaagagttggttttcagaatgtgaaaagaaactttaaagtcattgtagaaaacatagtcaactcgagtgaaaaataagaaaatccccaagacgggcagttcacagaggaataaactgaaatagccaattaacatttgaagagcgacctcactagtaaacataaaagcaaattaaagcaatgagatttattttatactgatggaattggaaaaaacccaaacatctgatgactctatgtgtaggtgaaaactacggcaaagtggaactcttacacattgtggacaggagtgtaatgatcaagaactactgaggaatgcaatttggcaattgtyagtaaagttcaagatgtacactccacatcacatctggaaattcccctcatatatataggtgtctctgagcctggctcagacatgtccactagaagagttgaacgaggatgttcattgcaatgccattcataatagtatgattggcctccatatctatccataaacaaatacatacattatgatttagttatataataaaatgcaatagagcaatttaaatgactgtactagatctacatgtgttaaattggacaaatctcaaaaatatactattgattgaaaatatcagttgt

SEQ ID NO: 251118 - DNA, 600 bp, Homo sapiens
gtgcctccaatgtaccctttctcagaaagctatttgagcatatactccaccaaaacagctgaataaacaaagacagaaattttttatctaagcaaggagtatgcagtacaataaagaggctaagaaagtctccaggatgttggtggagagaagttttgaatggcagctgtgcagcaartctagagagcaactgttccagattgaagaagcaggatagaagtttccagaaagaatgtctctccaagtaaaagaagaaactcatagaatgtctgacatgtctgaatatactgaaaagaatcatatttttggcagagaatttggggatattataatgatagatatacagaaaagcaagtcaataacaacaaaaatatgaggcaattaataacttcagaaaaaaggcaattgtacaagaaaggaaatatagtcattctacactactaggctcagatattaataatatttaggtattattacctataaatatatgcatttgtatataatgtataaactgaagatggcttcaacaataacaaacctgtgataacattatattgaaaagacacagagagaatgtgtatatgtctatgtctgagatgg

SEQ ID NO: 251119 - DNA, 536 bp, Homo sapiens
taaaagaagaaactcatagaatgtctgacatgtctgaatatactgaaaagaatcatatttttggcagagaatttggggatattataatgatagatatacagaaaagcaagtcaataacaacaaaaatatgaggcaattaataacttcagaaaaaaggcaattgtacaagaaaggaaatatagtcattctacactaytaggctcagatattaataatatttaggtattattacctataaatatatgcatttgtatataatgtataaactgaagatggcttcaacaataacaaacctgtgataacattatattgaaaagacacagagagaatgtgtatatgtctatgtctgagatgggatggggagaggaaaactatcaaatgcttatcttctaaagtgagaagtcaaaagataatgtctaaattgacaaattcagcaacatcatagtcattattaatatggaagtaattattatactaaagaaagaagttaaagcagctgaaagtgcttcctgggcttgagtcaaggtagaaaggaa

SEQ ID NO: 251120 - DNA, 536 bp, Homo sapiens
taaaagaagaaactcatagaatgtctgacatgtctgaatatactgaaaagaatcatatttttggcagagaatttggggatattataatgatagatatacagaaaagcaagtcaataacaacaaaaatatgaggcaattaataacttcagaaaaaaggcaattgtacaagaaaggaaatatagtcattctacactactaggctcagatattaataatatttaggtattattacctataaatatatgcatttgtatataatgtataaactgaagatggcttcaacaataacaaacctgtgataacattatattgaaaagacacagagagaatgtgtatatgtctatgtctgagatgggatggggagaggaaaactatcaaatrcttatcttctaaagtgagaagtcaaaagataatgtctaaattgacaaattcagcaacatcatagtcattattaatatggaagtaattattatactaaagaaagaagttaaagcagctgaaagtgcttcctgggcttgagtcaaggtagaaaggaa

SEQ ID NO: 251121 - DNA, 548 bp, Homo sapiens
gggagcttgaaggttttaagagatacatttgtatgttcacggtcctaaaagagttatctcagtgtcatatttagtgccatgtgctattgtgtgcttggctggtcctgagcacatttccacactgattgacattgcaaatggaacaaattctgctcttaattcctctgcatgcagtttttcaagagctccatgacaaccttttaacccatcttttgaaaaccagcctgctttgcaagagcaacaactttcactctggcttgaactccctcttcagtctttgacatagrccacaaattacagggttagtttcttacatgtacccttcattttggtgtgaaaactttttcctgttatttcttgctgaactctagaattatccctcagtttaaagtatttgattctattggctgtagaaacatgccaagctaaacagctaaattcttaagcctcccttgccggttttgggtaaccgtatgagagaattccagccaatgagctataaatggaagttgttggggagtctcttcaaaggggaagtatgtgcctat

SEQ ID NO: 251122 - DNA, 471 bp, Homo sapiens
ggtagccgttgctggcttgaatgcctgggtttatatccaatcattgtccctcccactgtgctctcaggcaatagatggttggctatttctttacctcctgtttttgcctaattagcattttagtgagctctctttactctctgattggttgagtgtgagctaagttgcaagccccgtgtttaaaggtggaagyggtcaccttcccagctaggcttagggattcttagttggcctagggaatccaggtagtcctgtctctcagtcctccctctcaacaggaaaaccaaagtgctgtgggggaggttggccgatgaccgctctaactgcttcctgctgaattggagtgtagtaggggttgtgcagttgagatttccttgggaggcatgcctttgatgtcattaacatcagagcatgggctagcaggccggtccaggggtccacagtagatcttggtcatggactgcatcaggg

SEQ ID NO: 251123 - DNA, 546 bp, Homo sapiens
tgtatacctatgtaacaaacctgcacgttgggcacatgtaccttagaacttaaagtatatgtaaaaaaagtcgcttaactaaaaagactccatgcagaaataaaatgacaagagtttagaaaaacaaacaaacaaacaaacaaacaaacaaaaacagaatatatgtgccaccccaaaggggcacgggagggaagagataagaagcagtgcygatggtaaggggctctttcctatagggctccagaggagttattgatttatgacctcaaataaatctctttgccaggagttttgtacctggtcagttctgtaactctagccaaactgagaagaaagtctacacagaaggtggagttgtaagtgtgcttctagtgtatgagactgtattttccttctgtttcctaaagtgacacagaagtgaaaccttgctagtggttacttagcaattaagttcattactttgtgtttttaaaaataaatgaactacattgcaaaaaactactattgtaagcatacttaggatgtttctaagacagcaaaggtttt

SEQ ID NO: 251124 - DNA, 490 bp, Homo sapiens
caatgcactgcagaaacccacagggaactctgcctttgaaagtggggcattgtccaaggtttctccccatgtgatagtctgaaattggactygtgggatgagaaagacctgaccgtcccccagcccaacacctgtaaaggatctgtgctgaggtggattagtaaaagaggaaagcctcttgcagttgagatagaggaaggccactgtcttctgcctgcccctgggaactgaatgtctcggcataaaacccgattgtacatttgttcaattctgagataggagaaaaaccgccctatggtgggaggcgagacatgtttacagcaatgctgccttgttattctttactccactgagatgtttgggtggagagaaacataaatctggcctacgtgcacatccaggcatagtactttcccttgaacttaattatgacatagattctattgcttacatgtttgtttgttgctgaccttctctttattatcaccct

SEQ ID NO: 251125 - DNA, 562 bp, Homo sapiens
cattgcaatcatttggaggagaagaagcactctggccttttgggttttcagtgttttttttaattgattctttctcatcttcatgagtttgtctagttttgatctttgaggctgctgacccttggatgaggtttttgtggaaatattttttgttgatactgttgctgttgctttctgtttttttgtttgtttttctttcagtggtcaggtcctccttctgtagggctgctgtggtttgctgggggttcacttcatgccctattcatctggttcactcctgcacctggagatgtcactcraggagactggagaacagccaagatgggtgcctgctccttcctctgggatctttgaccttgaaaggcactgtcctgatgccagtaggaatgctcctgtatagggtgtctgacaacccctgttggagggtctctccaagttgggtggcacagggagcaggacccatttaacaaagcactttggctgtcccttggtggagaaggtgtgctttgctggggggaaacccactcatctgggctgcccagattcctcagaaccagcagga

SEQ ID NO: 251126 - DNA, 495 bp, Homo sapiens
atttcttaattaatttattaattaaggggttttggggaaaagaagaggaacatccatcagagtggttctagttctgcattagcagtgtgtaatgactggatgtcttcctgggtctgcagtgtttcacctattcttactcctgtcacatagcctgaaaatattttaccattgttctgacttcaaaggacttgactaataggaatacacaactcgatattacccgttcattgtgattcttaatttgcaaatartaataaatggaatctaggacagtatcctcagtctgctttagtatgttcaagattaaaggggaaagtttcctaaagttaatcttccaattctcagtgaaaagaacattaaaaatagagaaaaaggcctttgggtcaaatgagttttgtgtttggcactgacatagagaaacctgtgaatacattaaaagtagaaggcacataaacccagtctacctgaattaaagacatgaataccaaaaggctt

SEQ ID NO: 251127 - DNA, 569 bp, Homo sapiens
ttcctcacagccctcagaaagaacaaaccctggtgtcacctcgattttgaatttctagcttctagaagggtgagagaataattttctgttgcgtaagccacccaatttgtggtaccttgttacggcggccctagcaaactaatacaccaggaaaggagttaaaccttgagattctacttacaggggccagtgttatgactgaaaagaccactactccccagacctgggcaaataaaactgaagaaggaatagtctatggagttgtttcaaatgatgttctcatttagtgatgtctgaaatacagtcttgcctatttacctcaactacagaaagaaaactaagtaaaattgaggagaatgagctttcatttcacacatcaaaaaatgtgttttctgatttcccagtgaaatttaggctgactaaaaaaaaaaaaaagaattcctcatgatattgtcaytctaatttttctaggtcactagagcacggaaaaaaatctgactgctccacacctgaattataccagtttgcataaactaataaaattacaacttaactactatcgtgaggag

SEQ ID NO: 251128 - DNA, 540 bp, Homo sapiens
aaaatcaaaaccctagtaacagaaagtttataaacaactgcttctctccttctctatttttgcatgttctgagagttctgagcaactgtctctccctccctctaatgaagtccaacagaagcttctgattttgtgggtggcaatgtcttccatgtgtggcttcctaagaaaacacccttgggatgaaggtggtgtagtgcagtgtattttccaaagcaatcttatccctgttaattttatcaagaaatttataaagaacaataactgtgagacaaacttagatgcaactaggccctatccaaggctggtttctaaactttttttttttaaattcattgagaatagtctcttcaacctccacctttttagttgcagtggtctagattgtgctagagtgtattgagtgaatrcatgggctataagcagaaattcaaattttctgaagggtgtaggtgcctctatttcaggaacataataagcactctggtatggttgggctctgtgtccccactcaaatctcatgatgaattgtaatcccca

SEQ ID NO: 251129 - DNA, 555 bp, Homo sapiens
tgacaccatacttcttgtacagcttgaagacctgtgaaccaagtaagcctcttttctttrtaaattacccagtctcacatattcctttacagcaacacagacagtctaagacaatgataaacctagaatttgattccagatgattttaacataggagaaaaagggaagtgcagaagggattttaaaatgtgctaatattcttgtctttttctttatgtgtgtatgtaattgtgtgtgcgaagatgggatacagatacttattagcattggagattgataggcaaacgtatttaaatctatatgttaaattttaatactgagaatcttctagttaaagttggcaaatcaaacatagtgaatccactccatttcaaatgtttgttataattacaggaaaaagattttttaaggctatcattcacaaagtaaagagacttggaaaggagaaaacagcaacagtgttctgggagctggaaagtggaagaatgaagggctgctgacctagcaaaacaccgagagctgaattttaaattggccttggggaaagtgaagaag

SEQ ID NO: 251130 - DNA, 558 bp, Homo sapiens
agggaatttcaggcagtactaatagatactgaggatcgcagtgttttgctgacgagcatagttgctatggaaatttaagtaaaccaaaactcccttggggaatgtattagtcttagctggctttcttgaagcagtgagtaggtggsaagtaagtgttaggctaggaaagactagaaaaagcaggcatttcaggagggtaaaataaggccatggttagcgtgcaaaaagcagaaaaaggggaaacgaatcactcatagaggatggatgagcgaccttctcactgagggtgaaagagcatggtagaatcatgtcttcaaaacagaagacagtctcttgaagaatgttgctggcttgctgttttctttagcttaagagaatcaagagacttaagtagaagattctttggtgaatagatgatttgtacaggagaaaggtcttgattgtgattgtcttcaaaccatggaagaaatcatgtggaggagctctgtaatttccaccccccaagataagttaaaataggatagtctctcccttacatagttcagatcaggttttgga

SEQ ID NO: 251131 - DNA, 558 bp, Homo sapiens
agggaatttcaggcagtactaatagatactgaggatcgcagtgttttgctgacgagcatagttgctatggaaatttaagtaaaccaaaactcccttggggaatgtattagtcttagctggctttcttgaagcagtgagtaggtgggaagtaagtgttaggctaggaaagactagaaaaagcaggcatttcaggagggtaaaataaggccatggttagcgtgcaaaaagcagaaaaaggggaaacgaatcactcatagaggatggatgagcgaccttctcactgagggtgaaagagcatggtagaatcatgtcttcaaaacagaagacagtctcttgaagaatgttgctggcttgctgttttctttagcttaagagaatcaagagacttaagtagaagattctttggtgaatagatgatttgtacaggagaaaggtcttgattgtgattgtcytcaaaccatggaagaaatcatgtggaggagctctgtaatttccaccccccaagataagttaaaataggatagtctctcccttacatagttcagatcaggttttgga

SEQ ID NO: 251132 - DNA, 600 bp, Homo sapiens
ctggcaaggagaacccgattggtttaagtgtaatctcatcatgctggctggtgattggttcaagaatgggcatgtggtcctttgtgtttcattgctggccattgagacataaagagagtttgtgggtagccatggagactgttcttatttgcttttaagagatgttgaatgtcactgtctttccctctatggatggaaatagagaagtatgtagctccaaattcttctagtgacaattatataactgtgagaaaacaaaccaaaacaamataccctcctagcattacaaggagcgataaaaagaagctaatgcttgatcacgtgctggactgcatggatcaacaaactctggaacctgctttgtctctgaactttctgttatgtaagtcattcctcaactgtttatgctattccgggttatgttttcttacttgcagctgaaagcatcctaatacctatgcttcaagtagtcattgtggctctaatgtcccctgactagctccaaggcttggcctcctaacttggggaactgtagcttttttcataatctccagctggtatttttgggagttctagatgttcttgaatcaacttgggcag

SEQ ID NO: 251133 - DNA, 587 bp, Homo sapiens
atagggctgcacactggtcaaatcagtactgcccgtccagtccaagacacagattcacccaggcagactctcacggtcttgatcaaagacaatggggagccttcgctctccaccactgctaccctcactgtgtcagtaaccgaggactctcctgaagcccgagccgagttcccctctggctctgccccccgggagcagaaaaaaaatctcaccttttatctacttctttctctaatcctggtttctgtggggttygtggtcacagtgttcggagtaatcatattcaaagtttacaagtggaagcagtctagagacctataccgagccccggtgagctcactgtaccgaacaccagggccctccttgcacgcggacgccgtgcggggaggcctgatgtcgccgcacctttaccatcaggtgtatctcaccacggactcccgccgcagcgacccgctgctgaagaaacctggtgcagccagtccactggccagccgccagaacacgctgcggagctgtgatccggtgttctataggcaggtgttgggtgcagagagcgcccctcccggacaggtaaggtttagcaagtc

SEQ ID NO: 251134 - DNA, 558 bp, Homo sapiens
caggctcaacaaatgcttgagggttattctgatccaggcatatggctaggccatgtcctagagagtactggcctctcagtaagtgcccatagtgatgtcaccatttttgtaagaggtaactatgtggtagacgctgtgctttgtaactgtttygtgaattaaccagagttgtcacagtttagcattgggggcgggtcatgcctatatctgagtaagaaatgaaagtaattggtgatcaagagccaggctgttgtggaagcatgatgatggaatgtgggagcacaggaggctacagtgcacagggtacagtgcaccaggcagtcacttggacaaaggtggctgttttctctactcttcctgaaagaggggatcagattctgaagtaccttaactctaggttaccatttcccaagggattgaggggaaataaaatctttgtctcccagtatctagtacactgtgaagggacctctctatttgaaacatagagacagcagaaagaggagagaactaaaggaatagagaggcacgcatcagagtggtggcatagatcttttg

SEQ ID NO: 251135 - DNA, 532 bp, Homo sapiens
agtttggggaacattctgaagtcatacaagagaaccctcagaagggagtatcactctggttattcagagtataggtagaaatgggcagccagccattacagatgaaactcacagtgatggctgttgttgggccagaatactgagtttacataggctagcatgctctaaggtccccctttccaggctgtggcaggtactacaggccctacagataccactgtattaatagctaagcactggccaaagcaagctgtgttaactccttctgtttacaataatctcaaagtataactatcaaatgggcctacacaatgcaacagccaggaaacagggaacatagatttaagtccctctgaagtagaaacctctaatgatgccttttttwgtaattcccactcttcaaattagtaaagaagccaccactcctagcctcaaaagaccttcactagacacgatagtgcaggtcaactccacatgaggggcagacttgcctataccttcctttgaattagtctcttggccactgtaagct

SEQ ID NO: 251136 - DNA, 567 bp, Homo sapiens
acccagccacagtgagagagaaatcacctgatgcatggggggccaccctcacatcccctttctgctgaaagctgttttgccgcttaataaaattattctctgccctcctcactctcattgtcagcctatcctcattcttcttggatgcaggacaagagttcaggacctactgaacatgggtacagagaacgctataacatcatggccatcttccctccactggcagacagcagctgctccatgtgacagaagtggctgtaaagccaagccagccgcgaagctgcaggccaaggcaggggcaagggcattgccagctgggtgtctccagctggcaagtaatcgagaaaaatcctgtgtcattttctgtgggctcatctgggatctgaggyagggtgagtaaatgtaaactccaaacttcttttacttttgtttctgagccttctcctcagacattttctgagaacagatggcacactgagtctctgttagccaattaagaatgaatggcatggctgcagaggaggctgccacccaccccctagtcactctcaggggttgggaatgtca

SEQ ID NO: 251137 - DNA, 613 bp, Homo sapiens
cagtcttttcttttgcattttccttctctctttcatggcacctatctcttcttcrtatataatattaagggtgttgttgctaactacagagatattactgggtagaatgagcatctgacccagcaatcagctatgcaatttagaacaatgtggtttctgtctattcttagaggcaaagaggatgcagtgattaagagtttttttttttctgttgaagaaacccatttgcatagagcaagacaccagacaccttcccctccctgcacttaagctgttctattttccctcttttctaccatgtcaggagttcacatagtcctgcaaatacagggagattttctatgagaggtccccaattctcaggactccctttctttcccttgttttaagaggacctggttccacagcttcaccttagcattctgattatgatagggagaaagtgtcagctggacctcagcagggggcaccactggtaacttactggagtttgatgagggccacctggaacttaatgagtttatgaaccctcctgaggcagctttttgtcccaaactcaattccaggctttgggttgaaaccctagaaaggaaaactaggtctcagggatcca

SEQ ID NO: 251138 - DNA, 613 bp, Homo sapiens
cagtcttttcttttgcattttccttctctctttcatggcacctatctcttcttcgtatataatattaagggtgttgttgctaactacagagatattactgggtagaatgagcatctgacccagcaatcagctatgcaatttagaacaatgtggtttctgtctattcttagaggcaaagaggatgcagtgattaagagtttttttttttctgttgaagaaacccatttgcatagagcaagacaccagacaccttcccctccctgcacttaagctgttytattttccctcttttctaccatgtcaggagttcacatagtcctgcaaatacagggagattttctatgagaggtccccaattctcaggactccctttctttcccttgttttaagaggacctggttccacagcttcaccttagcattctgattatgatagggagaaagtgtcagctggacctcagcagggggcaccactggtaacttactggagtttgatgagggccacctggaacttaatgagtttatgaaccctcctgaggcagctttttgtcccaaactcaattccaggctttgggttgaaaccctagaaaggaaaactaggtctcagggatcca

SEQ ID NO: 251139 - DNA, 601 bp, Homo sapiens
ttgtaaaaactgcttaccacctcttggaaaataccttgtgtagtcgtggctaagttataaccttagttgaggtttgttgctttcacctgagatgttaattttggtaaagtttaaaagtgagaactattgaccatttgccatggctaaagtcaggtaataagaaatttaggaagattttttaaaagagcactatggttaaaagtcagctaaattaaaagttgatattcaagctatagatgtattttaaagtccttcgttcttctcctcttggatcttktttttctggaaagaggatttttttcttctcaattgaattatttttttccattttgtcttgccactcgtactgcacaccagaggccctaagataattaatgatagcctgggactgcttgcaaaaaaaagagaagacaccacggaccctgttttgggaaaaacaaaaatctgttttccttatggaaccccaataattaaaagtggatagatccctctcaaaattaaggctctgttaaagtgcataatttcctagccctgttttttgaagggctctgccccgaggccaatgatccaattaggatactgtcaaatgaaaaatcttaca

SEQ ID NO: 251140 - DNA, 636 bp, Homo sapiens
ctgcctggtttctccaaaatttggaagctatttgtaagtattcttaacttatggcaatatagtttcttgtttttgtttttgttttttgtttttttgcataaacgcaataagaatccattttcttctgcaacaagatgcaattggagaaactggttgttttaccaacactttgactggaagggtatgcttctctttaaggaatccagcttgacttgcatagccaataaaagccccttgggaaaactggccttataccttgtctacatactccctgtacagggttcctaacctgtggtgcataasgaatgtcactttctaataggcccatgagctccaacttatcttgggacctcaagagaggaatttactcaactcatacatatttgagggtacaaacccatgtctgggcttggctttaaaaggccttatctcagattcattgtggaacagagttccatcagagccaatttaaaaaacctttgtgaaaataattattcttgctgcactttatgcaaataatcaggcaaagtataagactaaagtttattttgcaaagaatcagtcctatcatgatttgtttttaacaaaaatgaggactggagagagaaaaaatatgtttcaaaatgtatcatacac

SEQ ID NO: 251141 - DNA, 636 bp, Homo sapiens
ctgcctggtttctccaaaatttggaagctatttgtaagtattcttaacttatggcaatatagtttcttgtttttgtttttgttttttgtttttttgcataaacgcaataagaatccattttcttctgcaacaagatgcaattggagaaactggttgttttaccaacactttgactggaagggtatgcttctctttaaggaatccagcttgacttgcatagccaataaaagccccttgggaaaactggccttataccttgtctacatactccctgtacagggttcctaacctgtggtgcataacgaatgtcactttctaataggcccatgagctccaacttatcttgggacctcaagagaggaatttactcaactcatacatatttgagggtacaaacccatgtctgggcttggctttaaaaggccttatctcagattcattgtggaacagagttccatcagagccaatttaaaaaacctttgtgaaaataattattcttgctgcactttatgcaaataatcaggcaaagtataagactaaagtttattttgcaaagaatcagtcctatcatgatttgttyttaacaaaaatgaggactggagagagaaaaaatatgtttcaaaatgtatcatacac

SEQ ID NO: 251142 - DNA, 657 bp, Homo sapiens
tatctattttcttgtagcattcatgttgaggaaaagtccaattcctattatttttcagatgatttttttaggctctgactgagtttgagattatcttattttgtctttggtgttctgaaagtctataaagttttaaaatttaaataagtgtattctgagtgttgatgacttttaaaatattacacttacatgtactttccatcttcaaaaatgctttattttcttctaagtttcttctttttcaagtggcttttttatatggctgtaatatctttgcacatattttatatggtacaaaacatatataastattttaagcattctcttctatttcaatatgtctccactttcccaagtgttacttaatccatctgtttatcttgaattttatattttgtgctgcattttttcccagatgactcatggttcttgttttctttttgttttattgatgaatgaatgattaggcttcttagtgttgtttcctccacaattatatatgcctgctttgccagcgagcttccaccctgattgggagcattggctttgaaattagtttcgcaggtagagtttatttcaatactagtcagggtcaaatcaggagacgataacagcctcatttattttaacaaagagtatttaacatcaagaattatt

SEQ ID NO: 251143 - DNA, 657 bp, Homo sapiens
tatctattttcttgtagcattcatgttgaggaaaagtccaattcctattatttttcagatgatttttttaggctctgactgagtttgagattatcttattttgtctttggtgttctgaaagtctataaagttttaaaatttaaataagtgtattctgagtgttgatgacttttaaaatattacacttacatgtactttccatcttcaaaaatgctttattttcttctaagtttcttctttttcaagtggcttttttatatggctgtaatatctttgcacatattttatatggtacaaaacatatataactattttaagcattctcttctatttcaatatgtctccactttcccaagtgttacttaatccatctgtttatcttgaattttatattttgtgctgcattttttcccagatgactcatggttcttgttttctttttgttttattgatgaatgaatgattaggcttcttagtgttgtttcctccacaattatatatgcctgctttgccarcgagcttccaccctgattgggagcattggctttgaaattagtttcgcaggtagagtttatttcaatactagtcagggtcaaatcaggagacgataacagcctcatttattttaacaaagagtatttaacatcaagaattatt

SEQ ID NO: 251144 - DNA, 584 bp, Homo sapiens
cgaggggacacaataaagctaattctgtgttggaaaaactacaaactagaatcaacagctactactggaataaaatgctgctgctgtccaggtaaggaagtgctgctctgatgatactgccaagaasagccatggaatctcccttttgtgccccctactggctgagcctatagggaatatgacaacaaaggagaaatgtggattgcagagtcctagttctatgacagcacaacagggtatagattggtaaatttgaagccaagagataatagcataataacatggacagtttaaagcagctatttcttagcaatcttcatctattttcatgctaaaattaaaggagttcgtttgggatcgctattgctcacatttgggagtctagccctccttatagatgtatctccacttctatgttattgccacatctgtcttctctgtatacacacaaggatgggagtggtggactggattcaggatgtcatagttcagcatatggtcttttaaataattactttcactgtcacaaagcacaatcctactcatcacatttgtcaattgtttgtgatccctccacgacacag

SEQ ID NO: 251145 - DNA, 613 bp, Homo sapiens
cagttagaaacagaacatttgtttgctcctcttaacctacgtcatgggttaatgagaacattgccaggaagcgttcactcttctagaaggacatcattgttaggtccttttccatggtttggagtaaaagatgcaatgattagaaatatattcctcatgatagtctctatagcagattctactgtaaaggttatggttacacaacagactttaaattatcttgtgaatattatgctaaataatagaattactctagattacttactggctaagcgggaaaccatctctgcagctgctggcacttgtggcctatggagaaatacatcacgttaggtattatagagattcagttgtaggggattaatgcagagactgcttagttaagcaagtggattctttagctcattctttgatctatttaattgtaagtggttttgtttacggggaccctgggtaaggaccatactccaaatattatcctcctgayagccataatggtagttccccagtgtgctgtattctctcaaaagttttaaatgtttgcattcagccatacctagaatgtcaaatggtctctctttaactggaatgaaaagagatgaaagaactgtgt

SEQ ID NO: 251146 - DNA, 518 bp, Homo sapiens
ccagtgttagcttactcataggaataaggatgtgaagaaaagcaacacaggtcagaaatgacaaacaggaaagaayaacttgaaacatggcaatattatcttacttcataatataagtagggcaagaaagtttaaaaaaaatcagaaagtaccaagaaggaggaaacaactggaaacagagcaattttatctaattgtgcaatgatacagattttactaaatgttttatagtaatagagttagcacactatattaaaatgggtgtcttgctttcaaaattgtactcacaattacatctgtgatggtttatgttatgcattccctcatctcttgccaaacacatattgtttgaatcattgaccatctgctgctgccttgtaaccacagaagtaaatgggctatagcttactaaatacagtacataatgatatgaaactacattaaaacatgtaataatgttttaggaaaatgtgttaaattattagactggatactgcaccctagtgatcaatgacatg

SEQ ID NO: 251147 - DNA, 592 bp, Homo sapiens
ataattatttattatttcacccagcaaacacttaatgagaacctaccatacaccaagtattgtgctaggctctagggattcaacagtttactaacagacatatattagcattcatggagtttaaatattgttgagaatccagaaagaagtaaaatattccaaaaaatgtggaatatatgttataaaacaaaagtataaattcataaagccaaatatgatgtttrttgtaaaactagttgcactatcaaaacaaatatgatgacaaattaaatgaccatcaattatgaaagagttaaacaaattttggaatatccaaactgtggtatattctgcagccaataaaaacatgatctaaatgtcatgacttgaaaagatgttctgagtatattcatacattaaataataaagcaagttgaaatcacaatgatcatgtaagagttgccttgcctcagtcagtcaagctatatatcatgaaaaatcccgtggaaataggaggaaaatatatgaatacgaatcccttgggaatcactcattatgtgactaaggtgaggaaaagcattgaaatgagcagtcaggtgactggaaaaacatc

SEQ ID NO: 251148 - DNA, 567 bp, Homo sapiens
tctctactatttaaacttggaggaggagagaaatatattgtattagtcacatgatgacctgttctggctcttctctctggcatgaaaggccagtagtttcccttatactggcttaccaaaagaaccaaagaccaagccagagctaggtctcaagacagtgcatgagcactgtctckttgtttttcagtcttagtggagcctttgatacttcttttttccccactcctgataaggcacactctctgattaatattttcttaagaagcatatcaggtatgctacattcaccctctacatttcccctctctaacatgaatatgttcaccacatgggtacattcttacttccaaaccagaacatttcaggatatactgtatttctctatataattaccttcaagatcaaatgcaataaacattaaatatatgccttaggggtagggcagattggcaacattaattctgtaaggtcatgattaaaataagtgaattgtatacctatggtcaggaggataatgattatgatgatcttatttattctattgggtaagccatttattctccacta

SEQ ID NO: 251149 - DNA, 567 bp, Homo sapiens
tctctactatttaaacttggaggaggagagaaatatattgtattagtcacatgatgacctgttctggctcttctctctggcatgaaaggccagtagtttcccttatactggcttaccaaaagaaccaaagaccaagccagagctaggtctcaagacagtgcatgagcactgtctctttgtttttcagtcttagtggagcctttgatacttcttttttccccactcctgataaggcacactctctgattaatattttcttaagaagcatatcaggtatgctacattcaccctctacatttcccctctctaacatgaatatgttcaccacatgggtacattcttacttccaaaccagaacatttcaggatatactgtatttctmtatataattaccttcaagatcaaatgcaataaacattaaatatatgccttaggggtagggcagattggcaacattaattctgtaaggtcatgattaaaataagtgaattgtatacctatggtcaggaggataatgattatgatgatcttatttattctattgggtaagccatttattctccacta

SEQ ID NO: 251150 - DNA, 613 bp, Homo sapiens
actatattactcacaattttactgtttctacatgtagtaccatgctgatttatgtgtgtaatatttgggagattttttgtgtacaggtgtgtgagggctgcaagtaatcctgacctattgctcaaattccgggtatgatgatgaggtgttaggaatagcaagaacacaaactatctcatatcttatttgatatgacctttaagtgggaaagttcttatgaaaaatctttgtttctagacatgctagaataactggtattgagcataaccctcccamcataagcaatcctaaaactgggcaaaatatgggtgacaactgttttcagacagtacagagctatgatccttgagacaagagcaacatacaaggtgagctccatattttctctagctttctgcctaaacacagttttcaaaccagagttcaggaaggtagaagccaattgcagagtggttgtcccattgagttgaaatggcagaggttggagttcagtcaagctgaaatagcaaggtacctcaaaacaggaaactctgaagaggggagttctagaggtctgatgagagctgagttttgcatgcacataagactacataaggtctagcaggaagtggct

SEQ ID NO: 251151 - DNA, 617 bp, Homo sapiens
aggtacctcaaaacaggaaactctgaagaggggagttctagaggtctgatgagagctgagttttgcatgcacataagactacataaggtctagcaggaagtggctaataataggcagagaactgaaaagaaatgccagtggtcatacaatgcttgggaaaatagacctcactgaatacattaaacattcagttgagacttgtctttgattgctaaggatgccatacaaaactatagggatgctacagactggatggcataaacaacagaaatttattttctgatagttctggaaactattaagtccaagaccgagctgctgacagtgttgatttctggtgaggtttctccttctgggtttgcagatggctgccttttccctgtgtcctcacatgggccttccctctgtgcatggacactcttggtgtctcttactattcttgtaaggataccagccctattgtattacggcctcactcttataatcttatttaaccttaattacctccttaaaaccctatcaccaaatacagtcatattgggggttagrgtttcaacatatgtattttggaagaacacaattcagcccataccattctgccctctggtgcccccaaa

SEQ ID NO: 251152 - DNA, 306 bp, Homo sapiens
gcaatcacaaagctacacaaatagaaattattatcatcattatttataaccattgaaaggacaggagacaaagaagtcagtccccaccrtacccctcccaaccccaagcccacaagggtatttgtgccattatgatggcattgatcattgacattgacagttattattaaacgatgtcaacttccaaatgcaaaatgtttaccagatgaactcaaatgggctggcagaaataatgtccaggtgccatctaccttcaactcctcttctcatgaatttctgtggcatttctccagggcccagagtcaa

SEQ ID NO: 251153 - DNA, 609 bp, Homo sapiens
agcccacataattctcttcttttttgtaagcagttgagatctttaggttgaagattcaatatacaatgtaacagagtcagagggtgggtggcaaaaggtacatacatactgcagggcagggacttggagtatggaatggagaaatagcagaggacatcttccagctgcagttgggatgggtgctgagctacaaagctactagagaaataggaaactcaggtctcatcattgcagggacccttgtttcctgcaaagaatccttggagaaatctctcccactgtctctgggcattgtattcagaaatgtstggcctggatgatagtcttcctgcttttggcctcaccctctatccactgtcctctgctgaatctttctaaaatgcttgcttaaaactccttatctccttcaggagaaagttaaatcctttaccacacaagccattacctggggccctttctaactcctcccacctcaattttgtcctctttctgcaggtatctaagtgtcatgatttagatgtcctggcatgcactgtgctctttttctggaagcctcctttctttcttcatccaactacctcctcttcttccttcgagattcagctgaga

SEQ ID NO: 251154 - DNA, 566 bp, Homo sapiens
ataattggagtttctggagctcaaagagcttctttcttattgtttccatcctttggaggaaaaaaaaacaccccaaacaaacaaaacccaaacccccaaagaattgttctttgacttacattctttgcttttgcacatggttcagaagctgctcctgactgtgtttacgactttattaatcaggggaacagcccgaacatcatttaaacaaacaaggccaaaaaaaaaaaaaaaaaaatccatccctaaacagatgatgtgagcttaatagagatggccaagccaaagaccttaaataaataaactgactttaatttgtaggaaggagcatggggtggtcattacttgaggctgtgtgccatgcgatgtaaccaaattyaaaactcgctaatttcattattttaatggaagtctgcctcccattcattaggctgacatatgactagccattagtaacagtccatttccaaagctatggtggataaagggtgattggaaatgagcaagggccaggcctggtggaggctggcaatttcagaagggaactggtgggtgggatttatgca

SEQ ID NO: 251155 - DNA, 566 bp, Homo sapiens
ataattggagtttctggagctcaaagagcttctttcttattgtttccatcctttggaggaaaaaaaaacaccccaaacaaacaaaacccaaacccccaaagaattgttctttgacttacattctttgcttttgcacatggttcagaagctgctcctgactgtgtttacgactttattaatcaggggaacagcccgaacatcatttaaacaaacaaggccaaaaaaaaaaaaaaaaaaatccatccctaaacagatgatgtgagcttaatagagatggccaagccaaagaccttaaataaataaactgactttaatttgtaggaaggagcatggggtggtcattacttgaggctgtgtgccatgcgatgtaaccaaattcraaactcgctaatttcattattttaatggaagtctgcctcccattcattaggctgacatatgactagccattagtaacagtccatttccaaagctatggtggataaagggtgattggaaatgagcaagggccaggcctggtggaggctggcaatttcagaagggaactggtgggtgggatttatgca

SEQ ID NO: 251156 - DNA, 306 bp, Homo sapiens
gcaatcacaaagctacacaaatagaaattattatcatcattatttataaccattgaaaggacaggagacaaagaagtcagtccccaccatacccctcccaaccccaagcccacaagggtatttgtgccattatgatggcattgatcattgacattgacagttattattaaacgatgtcaacttccaaatgcaaaatgtttaccagatgaactcaaatgggctggcagaaataatgtccaggtgccatctaccttcaactcctcttcycatgaatttctgtggcatttctccagggcccagagtcaa

SEQ ID NO: 251157 - DNA, 592 bp, Homo sapiens
ttttgtctctctaaggatatctttatttcatcttcattttgaaggatattttttgctagacatagaattctctgcttccatttcttttttcttgtcrtactcaatgatgtcatttaattgttttctggcttttattctagattctgatgaaaagttagccatcataaatttttttctaatgtatttaatgtgtcattttattcctattgctttttagatttgctgtttattgttttatgtgatttttggttgttacatagctaggtaaggttttctttatatttatcttgcttagggttcactgagcttcttggctctacaggtttatgtctttcatccattttggaatgttctcagatggttattatatcaaatatattatcgatccagtttttctcttctctttctggaacttctgttacatcacttgatatcatgttagattcatttatactgtccaacagatcttgaatattctgttgtattttttccactatttttgccttttgtgtttcagtttggatactttctattgatctgcctttagtccctgatgctttcatctgttttttttccgtgtgctgttaagtac

SEQ ID NO: 251158 - DNA, 592 bp, Homo sapiens
ttttgtctctctaaggatatctttatttcatcttcattttgaaggatattttttgctagacatagaattctctgcttccatttcttttttcttgtcgtactcaatgatgtcatttaattgttttctggcttttattctagattctgatgaaaagttagccatcataaatttttttctaatgtatttaatgtgtcattttattcctattgctttttagatttgctgtttattgttttatgtgatttttggttgttamatagctaggtaaggttttctttatatttatcttgcttagggttcactgagcttcttggctctacaggtttatgtctttcatccattttggaatgttctcagatggttattatatcaaatatattatcgatccagtttttctcttctctttctggaacttctgttacatcacttgatatcatgttagattcatttatactgtccaacagatcttgaatattctgttgtattttttccactatttttgccttttgtgtttcagtttggatactttctattgatctgcctttagtccctgatgctttcatctgttttttttccgtgtgctgttaagtac

SEQ ID NO: 251159 - DNA, 592 bp, Homo sapiens
ttttgtctctctaaggatatctttatttcatcttcattttgaaggatattttttgctagacatagaattctctgcttccatttcttttttcttgtcgtactcaatgatgtcatttaattgttttctggcttttattctagattctgatgaaaagttagccatcataaatttttttctaatgtatttaatgtgtcattttattcctattgctttttagatttgctgtttattgttttatgtgatttttggttgttacatagctaggtaaggttttctttatatttatcttgcttagggttcactgagcttcttggctctacaggtttatgtctttcatccattttggaatgttctcagatggttattatatcaaatatattatckatccagtttttctcttctctttctggaacttctgttacatcacttgatatcatgttagattcatttatactgtccaacagatcttgaatattctgttgtattttttccactatttttgccttttgtgtttcagtttggatactttctattgatctgcctttagtccctgatgctttcatctgttttttttccgtgtgctgttaagtac

SEQ ID NO: 251160 - DNA, 592 bp, Homo sapiens
ttttgtctctctaaggatatctttatttcatcttcattttgaaggatattttttgctagacatagaattctctgcttccatttcttttttcttgtcgtactcaatgatgtcatttaattgttttctggcttttattctagattctgatgaaaagttagccatcataaatttttttctaatgtatttaatgtgtcattttattcctattgctttttagatttgctgtttattgttttatgtgatttttggttgttacatagctaggtaaggttttctttatatttatcttgcttagggttcactgagcttcttggctctacaggtttatgtctttcatccattttggaatgttctcagatggttattatatcaaatatattatcgatccagtttttctcttctctttctggaacttctgttacatcacttgatatcatgttagattcatttatactgtccaacagatcttgaatattctgttgtattttttccactatttttgccttttgtgtttcagtttggatactttctattgatctgcctttwgtccctgatgctttcatctgttttttttccgtgtgctgttaagtac

SEQ ID NO: 251161 - DNA, 492 bp, Homo sapiens
tccttaacataaattctagaaggtagacattgatcaaaatatctaaagattttttatggttcttaataaaatatggtcatattacatctcaaaaaaacaaggaagttatacctatttttaatgagtgcaaataaccattttgcttcataagctttaagtgttataattaatttgactttgctaayttattcaaaaaatattatttcatattacatacctttaacttcaagcactgtacaggatcaaaatcttatgttcattttttagcaggactgactttacctggagaataagtgaacccattaaacatcagaattgtttgagtagatagatggtaatgactgatatttattgagtgctttttatgaaaaaagtggtgttttaattctcacagtgacctgtgaagaaggttatcatttcatcactccagaaggagggtttattccctacagaggagaaaagagaggctctgatataatgggacaggattaa

SEQ ID NO: 251162 - DNA, 492 bp, Homo sapiens
tccttaacataaattctagaaggtagacattgatcaaaatatctaaagattttttatggttcttaataaaatatggtcatattacatctcaaaaaaacaaggaagttatacctatttttaatgagtgcaaataaccattttgcttcataagctttaagtgttataattaatttgactttgctaatttattcaaaaaatattatttcatattacatacctttaacttcaagcactgtacaggatcaaaatcttatgttcattttttagcaggactgactttacctggagaataagtgaacccattaaacatcagaattgtttgagtagatagatggtaatgactgatatttattgagtgctttttatgaaaaaagtggtgttttaattctcacagtgacctgtgaagaagrttatcatttcatcactccagaaggagggtttattccctacagaggagaaaagagaggctctgatataatgggacaggattaa

SEQ ID NO: 251163 - DNA, 550 bp, Homo sapiens
ttctcttggaataatttattaactccctgcagaccttgtggtcaggcacaattagagtcttctcccacagaggctgcgtgccatttagcagcctggggctatggcctgcaacatggtattgaggaggcccaggggacatctgagaattggggctggtgaagatgaaattgaggagacagctcaataaggcaaacaagcaagggatgtgcaggtggacaggcctgggttcaaatccctactctgctaaatgttttagctggggttctttgggtgagtttctttacctctttgagtctccatttccatctctgttagatrgggataaggattgctgtgaggtttacatgagctgaatttctgcccttacagggaatacaagttggcaaagcctcaggcattgaacttaacacagacagacagcaggacagggcaaaacaaagctgaggatgggccttttccatccaagtcaacaaatatttcccctgagcccatgtgtctcagagttttccctaaaaggaaaatatgtaaagcactcagcaccaagtgtcta

SEQ ID NO: 251164 - DNA, 550 bp, Homo sapiens
ttctcttggaataatttattaactccctgcagaccttgtggtcaggcacaattagagtcttctcccacagaggctgcgtgccatttagcagcctggggctatggcctgcaacatggtattgaggaggcccaggggacatctgagaattggggctggtgaagatgaaattgaggagacagctcaataaggcaaacaagcaagggatgtgcaggtggacaggcctgggttcaaatccctactctgctaaatgttttagctggggttctttgggtgagtttctttacctctttgagtctccatttccatctctgttagataggsataaggattgctgtgaggtttacatgagctgaatttctgcccttacagggaatacaagttggcaaagcctcaggcattgaacttaacacagacagacagcaggacagggcaaaacaaagctgaggatgggccttttccatccaagtcaacaaatatttcccctgagcccatgtgtctcagagttttccctaaaaggaaaatatgtaaagcactcagcaccaagtgtcta

SEQ ID NO: 251165 - DNA, 550 bp, Homo sapiens
ttctcttggaataatttattaactccctgcagaccttgtggtcaggcacaattagagtcttctcccacagaggctgcgtgccatttagcagcctggggctatggcctgcaacatggtattgaggaggcccaggggacatctgagaattggggctggtgaagatgaaattgaggagacagctcaataaggcaaacaagcaagggatgtgcaggtggacaggcctgggttcaaatccctactctgctaaatgttttagctggggttctttgggtgagtttctttacctctttgagtctccatttccatctctgttagatagggataaggattgctgtgaggtttacatgagctgaatttctgcccttacagggaatayaagttggcaaagcctcaggcattgaacttaacacagacagacagcaggacagggcaaaacaaagctgaggatgggccttttccatccaagtcaacaaatatttcccctgagcccatgtgtctcagagttttccctaaaaggaaaatatgtaaagcactcagcaccaagtgtcta

SEQ ID NO: 251166 - DNA, 526 bp, Homo sapiens
actacttagtttgggaggaatcttaagtaacatggaataatttggtctatcttagccccccaaaagattgctttcatttatttatttagccacgctttggcrtaattctttaacttgctattgggagatattttggttacccattgtcaataatggggcatagtgaatcttccccaaactctgtggcatgcaacagtgaacatatatttagctcatgcatctgcgactggggggtggctgaacccagctgggcttgcttatgcaactgcaggtcagcagggggtgtgctgagctaggctgggctcagctgtgtggttctgctgtaggctacaggtctgtgggttaagttgaatgagcttgactccaggtatttttttaccttctttgaaccagagggctagccagggcatgctcttctcatggtgatgggagagattcaggaattcacatccagctgcacaaacacatctaaagctcctacttgtatcatgtctatcatcatttcattcaccaaaacaagtcatgt

SEQ ID NO: 251167 - DNA, 568 bp, Homo sapiens
actcgctaataaagcctctctccttcactagaatagaagctctgtaaagacaggcaccttgtctgccctattcatagctgcatcctccatcatatagaataatgcctggcacacagtgataataaaaattatagagcatgtcatatgggcatgccactgttcttagtttatccacttaacccaatgaggtaggcaattattaattataatccccatttttctggrtggagaaaccaaggcactgagaagtcatttagctgataagcagggtaactgggatttgaacctaggacctcttgctccagagtctgtgctcataaccatgctgctatattaactcagtaagtagttgttgattgagtgaatgaataactgactaatgatgaaacttgccagacacagagtattcagtaactaggagtgctgacatttatttgagtggcctctgttttctgtgtcccattagctttgggtgctggtgtcttcatctgcaggattccatatatttagcccagatcaatggagtgctggagggtcaggatgagtcgtgttcaagaaaataaggttg

SEQ ID NO: 251168 - DNA, 568 bp, Homo sapiens
actcgctaataaagcctctctccttcactagaatagaagctctgtaaagacaggcaccttgtctgccctattcatagctgcatcctccatcatatagaataatgcctggcacacagtgataataaaaattatagagcatgtcatatgggcatgccactgttcttagtttatccacttaacccaatgaggtaggcaattattaattataatccccatttttctgggtggagaaaccaaggcactgagaagtcatttagctgataagcagggtaactgggatttgaacctaggacctcttgctccagagtctgtgctcataaccatgctgcyatattaactcagtaagtagttgttgattgagtgaatgaataactgactaatgatgaaacttgccagacacagagtattcagtaactaggagtgctgacatttatttgagtggcctctgttttctgtgtcccattagctttgggtgctggtgtcttcatctgcaggattccatatatttagcccagatcaatggagtgctggagggtcaggatgagtcgtgttcaagaaaataaggttg

SEQ ID NO: 251169 - DNA, 557 bp, Homo sapiens
gtcggccgggcgtggtggctcacgcctgtaattccagcactttgggaggccaaggcgggcggatcacgaggtcaggagatcacgaccatcctggctaacacggtgaaaccctgtctctactaaaaaaatacaaaaaattagccgggcgtggtggcggrcacctgtagtcccagctactcgggaggctgaggcaggagaatggcgtgaacccgggaggcggaacttgcagtgagccgagattgtgccactgcactccagcctgggtaacagagtgactccgtctcaaagaaaaaaaaaaaagaacaaaaaagatcaatgcagcaaattcaggcaataatagggtggtgggaaatgaagtcagagagttacaagacagatggttcctgagacaaccaacttgaatttatccaattggagagtttattgtcatgctcatccttcttatgattgttttccttgttctaacatcttgctgggcactttgatgtgtatattacctgcaggatcttctcaatcctcacaactaccttttgaggcagatagtatattattcccgt

SEQ ID NO: 251170 - DNA, 557 bp, Homo sapiens
gtcggccgggcgtggtggctcacgcctgtaattccagcactttgggaggccaaggcgggcggatcacgaggtcaggagatcacgaccatcctggctaacacggtgaaaccctgtctctactaaaaaaatacaaaaaattagccgggcgtggtggcggacacctrtagtcccagctactcgggaggctgaggcaggagaatggcgtgaacccgggaggcggaacttgcagtgagccgagattgtgccactgcactccagcctgggtaacagagtgactccgtctcaaagaaaaaaaaaaaagaacaaaaaagatcaatgcagcaaattcaggcaataatagggtggtgggaaatgaagtcagagagttacaagacagatggttcctgagacaaccaacttgaatttatccaattggagagtttattgtcatgctcatccttcttatgattgttttccttgttctaacatcttgctgggcactttgatgtgtatattacctgcaggatcttctcaatcctcacaactaccttttgaggcagatagtatattattcccgt

SEQ ID NO: 251171 - DNA, 557 bp, Homo sapiens
gtcggccgggcgtggtggctcacgcctgtaattccagcactttgggaggccaaggcgggcggatcacgaggtcaggagatcacgaccatcctggctaacacggtgaaaccctgtctctactaaaaaaatacaaaaaattagccgggcgtggtggcggacacctgtagtcccagctactcgggaggctgaggcaggagaatggcgtgaacccgggaggcggaacttgcagtgagccgagattgtgccactgcactccagcctgggtracagagtgactccgtctcaaagaaaaaaaaaaaagaacaaaaaagatcaatgcagcaaattcaggcaataatagggtggtgggaaatgaagtcagagagttacaagacagatggttcctgagacaaccaacttgaatttatccaattggagagtttattgtcatgctcatccttcttatgattgttttccttgttctaacatcttgctgggcactttgatgtgtatattacctgcaggatcttctcaatcctcacaactaccttttgaggcagatagtatattattcccgt

SEQ ID NO: 251172 - DNA, 557 bp, Homo sapiens
gtcggccgggcgtggtggctcacgcctgtaattccagcactttgggaggccaaggcgggcggatcacgaggtcaggagatcacgaccatcctggctaacacggtgaaaccctgtctctactaaaaaaatacaaaaaattagccgggcgtggtggcggacacctgtagtcccagctactcgggaggctgaggcaggagaatggcgtgaacccgggaggcggaacttgcagtgagccgagattgtgccactgcactccagcctgggtaacagagtgactccgtctcaaagaaaaaaaaaaaagaacaaaaaagatcaatgcagcaaattcaggcaataatagggtggtgggaaatgaagtcagagagttacaagacagatggttcctgagacaaccaacttgaatttatccaattggagagtttattgtcatgctcatccttcttatgattgttttccttgttctaacatcttgctgggyactttgatgtgtatattacctgcaggatcttctcaatcctcacaactaccttttgaggcagatagtatattattcccgt

SEQ ID NO: 251173 - DNA, 505 bp, Homo sapiens
cgtgtcacatgaccgtgatttggatttcagtgtgtgtgtatgtatatgtgtgtgtgtgtgtgtgtgtgttttgttactgtatcattacctagcctatacagattgacgctgccttattcatcaactctaggtttgaagtcaggcaatgccttgctttttttgctcagcagcctggtgtgaggttagaactgggggtttgcaggcagatagacttgccttttatgagcttgggcaagttactytctccattttctggctttcttttctgtgaatggaagtgactgaaacccacctcccagggttgttgtgagaattaaatgtagtaacacacgtaaagtaggcggcacactgtaggtttttaatgggtgcttattttctttcttcctttcttgcaccatcattaactctaggattatgtgcccatttttttttctcctaaggattccacttttctcattaaccagtgtttcctcgttgccaggatttagtggcaagtaaccgtttt

SEQ ID NO: 251174 - DNA, 583 bp, Homo sapiens
aaacaaaagcagtggcgatgagtggaacaaagatttattgttacagatatgtccaggactgacaaaggtctcatatgattatgtcaccatacaacatctctacgaagtagagattctttagtccccttttattaggtgtggaaactgagtcttggagaagttaagtctcttgtccaaggtcacatggccaggtggttgagagctgtaggcctgacaccagaaagtctgatctcaaccattctgctgccttagtgtcttcatgctgtgtgtccttgggcagctcacctaacctctctgagcatctcagtttctccttccactaaatgggaatgataatacctactaccaacctcacagttgtgctgatcagaaatgcttccagaggtggaagcacttagaaaaaataagtgaaagcagaacatcgtaattaacttggctttgagtaatgatatcttctatttcttactgtgacaacatccctagctctatacagtcccttacctrgctgtcagttttctgttgtagatgataccaccttgggccacatacatactccttcttcttttgtctttagccatttccc

SEQ ID NO: 251175 - DNA, 529 bp, Homo sapiens
gctttggaaagcaaagcccatagaaagatgttccaggtaccacggaaagtaaaagcatgtaggagtgagaattattcctggaaattgggtagggaattatttgataggttactgtatgctygtgacttttggttgcaagcaataggaacctgaaaactggtttaaaccagtggttctcaataggaggtgattttgccccttgggacagttggcaatgattgcagctgtttttggtggccatgactcgtgggtgagaatggctctagaagccaggaacattgctaaacatcctgcaatgtacaagccagcccccatccagccaaacactatcaatagtgttgaggttcaggaactcaagcttaaacagaaaaagtagaatttgttgattcacaactgaaaaatccaggatgaatctatttggatccagatgttcaaactgacatcagaagtggctttttctctcaggcctgctactttccttgtaagatttatttttggggagtttttttccccttgtagtcccaagaca

SEQ ID NO: 251176 - DNA, 507 bp, Homo sapiens
ataatcgtatacttgttatcctatttaacactcatgatcatccagtgaagggttaacactattctacagaggagacaactgagatacagaaaggtggacaaacattgcttcaaaagttatttttatgaaatgttaattgtctcacatatctggattccaacctgagggaaaatgtcaccccagataatagcctggagttccatagccaaagtaattatcgyttctctctccttctcacttaacatactccagccacacaggtattcttctggtttcctaaatactcagcctttgcatgtgctgttttctctgccagaaattctcttccctcccactctttactaggttaacttttccttatccttcaggttttagtgtagacattacttcctcagggagatttttcctgactccctgagtagaatcagtttcaccctctttattctggcttatggcactctgatctcttctcttaatgttttatcagaattttaatcttacaagttt

SEQ ID NO: 251177 - DNA, 535 bp, Homo sapiens
tgggtagttctgcagccattagcttcctgatgtggtgacttctcgtagtgcaggtagcagttttcaccatcatagcagaggcagagtgatttgggggaccagggaattgttcttggaagctccaactctttgggtccttccaatggtttcctaagtcagcttacatctggtaatcacttcccttctgcgtaaggtagctggwgtggtttccattgtctgcaactgaacactcatttaaaaagtaggctttcaggtatattttcccctcactttgagaaactgaggtgagaggatcagagagttcaaatcaacttgacacaggcttcacagcagggaagtgatggagaattgaaatcagaacggactttttccatttgtctatcttcagcactgccaccaacttctcttttctgtggcccctttctctctttctttcctccaagatccttcctccatgacatatgttgtttcaaacagttaggatctgacagtcaaattcaatccaagggctcaggggcttggtgtaaccctacct

SEQ ID NO: 251178 - DNA, 542 bp, Homo sapiens
gctactattaattgtcaagattatgttggttgcaaggagcagaaactcatatggaagtcatttaggcaataaaaggggataatttattgactctcataaccaaatccaggaaggtaggagagcagttgagtggcaggggcaactggaaagagaccattccccatgtctgtctgtctktcatatcttttttattttttatatatgtatttttttaccatggtgggtttttttttgtttcttttctttttttggttgttttttccatccttggctagaaccatggctgccaacaagcttctctgtttcataatgggagaccttctcatgtggttatgatgtgaaaaaaatcccagggaaggactctgattggttcagctcaggtcacatagccacccacgtggccaggtcaggggctggggtgcttaggtggggcagggggttctgggtagataaaaataattaatgccttctgccttatctaaatgttctttgtactatgcctggcacttggtagaaattaaacaaattcccctttttccctt

SEQ ID NO: 251179 - DNA, 537 bp, Homo sapiens
taattgacaagacatattaagagttttagcaattgttcatgctttttgatccaacaaattcacttctagagtgtcaagaactgtgctggtctaagatattatcctacatggaggctagtgagttttatggatgtgggcagaagacatgagactctggattgagagataaaggactttatttttcatggcacaacaggaagcttgagcttcatgtctgcaccagttccctttgacccccaagtccctcaagggtgacacaggttgacatggtttggctgtgtccccacccaaatctcatcttgaattgtagttcccacaatccccatgtgtcatggaagggacccagtgggaggtaatttaatcatgggggcagttatcttcatgctgttcttatgatagtgaatgagttctcacaaaatctgatggttttataaggggctttttcttcttttgctcattcttcccctttctgccgccatgtgaagaaggacatgtttkctttcccttctgccatgattgtaagtttcccgaggcctc

SEQ ID NO: 251180 - DNA, 572 bp, Homo sapiens
ctctgggcaatgagtctaggatcaactgtttttcttcatttggaatttttttttttcagtttttctataatgaacatgtattacwtttataatagaaaataacaagataaattatttctgaaagcagtgcccagcatccagaatttggcaaaaacaggagaagaaagcataaaacaagcagggaaaaaggttttcagttaaattagatgtccaatgaagagatcagcttggctgcaaaatctctttttgacagacaattagttctgggcaagtcaaatgtttcaacagtgcgttcttctggggcaattaaagtaattcatacttgatgtgcggaaatgtggtaattgggaaagttccccaaatggcagttgaaactgggctggttgtgtttggagaagttaagtcatgcccttgacaagccatctatctgagtctactgaagagggcttgggctgggtgattttaagatggaattttccactgggcgtaggaagtgatgttgggaatggactagaagggtcaacagtgacaacattaacagcatttattgtaatataaatacagttggccct

SEQ ID NO: 251181 - DNA, 544 bp, Homo sapiens
tattacatttataatagaaaataacaagataaattatttcygaaagcagtgcccagcatccagaatttggcaaaaacaggagaagaaagcataaaacaagcagggaaaaaggttttcagttaaattagatgtccaatgaagagatcagcttggctgcaaaatctctttttgacagacaattagttctgggcaagtcaaatgtttcaacagtgcgttcttctggggcaattaaagtaattcatacttgatgtgcggaaatgtggtaattgggaaagttccccaaatggcagttgaaactgggctggttgtgtttggagaagttaagtcatgcccttgacaagccatctatctgagtctactgaagagggcttgggctgggtgattttaagatggaattttccactgggcgtaggaagtgatgttgggaatggactagaagggtcaacagtgacaacattaacagcatttattgtaatataaatacagttggcccttgaacaacatggatttgaaccgcatgggtccacttatacatggatttttt

SEQ ID NO: 251182 - DNA, 544 bp, Homo sapiens
tattacatttataatagaaaataacaagataaattatttctgaaagcagtgcccagcatccagaatttggcaaaaacaggagaagaaagcataaaacaagcagggaaaaaggttttcagttaaattagatgtccaatgaagagatcagcttggctgcaaaatctctttttgacagacaattagttctgggcaagtcaaatrtttcaacagtgcgttcttctggggcaattaaagtaattcatacttgatgtgcggaaatgtggtaattgggaaagttccccaaatggcagttgaaactgggctggttgtgtttggagaagttaagtcatgcccttgacaagccatctatctgagtctactgaagagggcttgggctgggtgattttaagatggaattttccactgggcgtaggaagtgatgttgggaatggactagaagggtcaacagtgacaacattaacagcatttattgtaatataaatacagttggcccttgaacaacatggatttgaaccgcatgggtccacttatacatggatttttt

SEQ ID NO: 251183 - DNA, 576 bp, Homo sapiens
cagttagtaatggagctggaatctgaatccatgcaatctgacccttgttcaatgctcctagacttatgtgctggattttttttttttttgaaataacaatgttttatacctctatctttactttcctagataagggcatctgatttccctccatggcaagcaagttatgttgtatttgytacatttgagagggaaaaaagctgaagttcagaacggattagaaatttcccaaggccacacagtgaaagaatagaaagtttccttttttaaatggcggagcttttatatcaatgctgtttgtaaattttagttggcaatgtctgttatattccatgaaactgaatgagaggtgaggtggtatattagccaaaactctctcagctacatcttgctattgttccatgcaacttcaaagcccacagatagactggacttcaagtatggctggatccagatgcttaaatgatatgctttgaaatctgtctgatctctacttctcagctctcttttcatccatgttggcttcattatcaggcccttttcttatgccatcagcagctgctgacttacctccta

SEQ ID NO: 251184 - DNA, 606 bp, Homo sapiens
atctgtactcttcactcatttgtgttacttgtctgcccatgtgtgcatttaagtttgcaacccttgccttaaattcatctgagaaacaaactatggcagtcaggttcagccatagaatctaatgggaaggagcaaagctggagattgagcgactaagctagaggttgataaagcaggaatagagcaggtagctggagtctgagcagacagacttcagggcttgtctgccttcctaagagctcctttgctggctgggtgaagtcactgagaacctaagcagagggtgtsagttctagccttcctggagaaatcttagttgagatggatgtttagagctggtggacactgcctttgtgtcaagccagtctaggagtcacagcaatatttggacactggttgaaagttgttccattccatcccacttgctcagcaatttggacaagtgtgggtttaggttattttaattggttaataccctttgtttaggtgctctcctttcctcttccacatggttcagtaaggctgccaattctagagctctttcttttcctatgaaagtcatggatgtcttaggctgggttttcccagaggcagatcctgtgatgg

SEQ ID NO: 251185 - DNA, 606 bp, Homo sapiens
atctgtactcttcactcatttgtgttacttgtctgcccatgtgtgcatttaagtttgcaacccttgccttaaattcatctgagaaacaaactatggcagtcaggttcagccatagaatctaatgggaaggagcaaagctggagattgagcgactaagctagaggttgataaagcaggaatagagcaggtagctggagtctgagcagacagacttcagggcttgtctgccttcctaagagctcctttgctggctgggtgaagtcactgagaacctaagcagagggtgtgagttctagccttcctggagaaatcttagttgagatggatgtttagagctggtggacactgcctttgtgtcaagccagtctaggagtcacagcaatatttggacactggttgaaagttgttycattccatcccacttgctcagcaatttggacaagtgtgggtttaggttattttaattggttaataccctttgtttaggtgctctcctttcctcttccacatggttcagtaaggctgccaattctagagctctttcttttcctatgaaagtcatggatgtcttaggctgggttttcccagaggcagatcctgtgatgg

SEQ ID NO: 251186 - DNA, 606 bp, Homo sapiens
atctgtactcttcactcatttgtgttacttgtctgcccatgtgtgcatttaagtttgcaacccttgccttaaattcatctgagaaacaaactatggcagtcaggttcagccatagaatctaatgggaaggagcaaagctggagattgagcgactaagctagaggttgataaagcaggaatagagcaggtagctggagtctgagcagacagacttcagggcttgtctgccttcctaagagctcctttgctggctgggtgaagtcactgagaacctaagcagagggtgtgagttctagccttcctggagaaatcttagttgagatggatgtttagagctggtggacactgcctttgtgtcaagccagtctaggagtcacagcaatatttggacactggttgaaagttgttccatyccatcccacttgctcagcaatttggacaagtgtgggtttaggttattttaattggttaataccctttgtttaggtgctctcctttcctcttccacatggttcagtaaggctgccaattctagagctctttcttttcctatgaaagtcatggatgtcttaggctgggttttcccagaggcagatcctgtgatgg

SEQ ID NO: 251187 - DNA, 606 bp, Homo sapiens
atctgtactcttcactcatttgtgttacttgtctgcccatgtgtgcatttaagtttgcaacccttgccttaaattcatctgagaaacaaactatggcagtcaggttcagccatagaatctaatgggaaggagcaaagctggagattgagcgactaagctagaggttgataaagcaggaatagagcaggtagctggagtctgagcagacagacttcagggcttgtctgccttcctaagagctcctttgctggctgggtgaagtcactgagaacctaagcagagggtgtgagttctagccttcctggagaaatcttagttgagatggatgtttagagctggtggacactgcctttgtgtcaagccagtctaggagtcacagcaatatttggacactggttgaaagttgttccattccatcccacttgctcagcaatttggacaagtgtgggtttaggttattttaattggttaataccctttgtttaggtgctctcctttcctcttccacatggttcagtaaggctgccaattctagagctctttcttytcctatgaaagtcatggatgtcttaggctgggttttcccagaggcagatcctgtgatgg

SEQ ID NO: 251188 - DNA, 554 bp, Homo sapiens
ttaagttgctagaaggaagatgagtttatggtggaaatttgtaaccgaccattaactagcaatggcrcagctaagcccctgtgcctgaccaattgttaggacttaaagaaatagcaataaggaaagagcttttagtttcggagcttaattagccattcttttccttcctgacttttagttttatgactctagcttccaggatagaattttattgtagtcagatacaaattaaacccaaacaaggactctcccgtgtttctgtttcttcaatttaaatttattctttgtagggtgacactaagtaccacagtatatgtcacatgtaagaacagtaaatttttaaaaaagagagacagggcaagcatttatcattgtgatctcttctctaaacataatgggaacttaggttaattaaaaaaaaaagttaatgccgttgttttttgccttaagaaaggtagggtttttatctgaagtgctctgagaattggcactcttaaatctgcaatgatgagaaataacagtagctaccatttgttgaaaatctattagtagta

SEQ ID NO: 251189 - DNA, 554 bp, Homo sapiens
ttaagttgctagaaggaagatgagtttatggtggaaatttgtaaccgaccattaactagcaatggcgcagctaagmccctgtgcctgaccaattgttaggacttaaagaaatagcaataaggaaagagcttttagtttcggagcttaattagccattcttttccttcctgacttttagttttatgactctagcttccaggatagaattttattgtagtcagatacaaattaaacccaaacaaggactctcccgtgtttctgtttcttcaatttaaatttattctttgtagggtgacactaagtaccacagtatatgtcacatgtaagaacagtaaatttttaaaaaagagagacagggcaagcatttatcattgtgatctcttctctaaacataatgggaacttaggttaattaaaaaaaaaagttaatgccgttgttttttgccttaagaaaggtagggtttttatctgaagtgctctgagaattggcactcttaaatctgcaatgatgagaaataacagtagctaccatttgttgaaaatctattagtagta

SEQ ID NO: 251190 - DNA, 554 bp, Homo sapiens
ttaagttgctagaaggaagatgagtttatggtggaaatttgtaaccgaccattaactagcaatggcgcagctaagcccctgtgcctgaccaattgttaggacttaaagaaatagcaataargaaagagcttttagtttcggagcttaattagccattcttttccttcctgacttttagttttatgactctagcttccaggatagaattttattgtagtcagatacaaattaaacccaaacaaggactctcccgtgtttctgtttcttcaatttaaatttattctttgtagggtgacactaagtaccacagtatatgtcacatgtaagaacagtaaatttttaaaaaagagagacagggcaagcatttatcattgtgatctcttctctaaacataatgggaacttaggttaattaaaaaaaaaagttaatgccgttgttttttgccttaagaaaggtagggtttttatctgaagtgctctgagaattggcactcttaaatctgcaatgatgagaaataacagtagctaccatttgttgaaaatctattagtagta

SEQ ID NO: 251191 - DNA, 554 bp, Homo sapiens
ttaagttgctagaaggaagatgagtttatggtggaaatttgtaaccgaccattaactagcaatggcgcagctaagcccctgtgcctgaccaattgttaggacttaaagaaatagcaataaggaaagagcttttagtttyggagcttaattagccattcttttccttcctgacttttagttttatgactctagcttccaggatagaattttattgtagtcagatacaaattaaacccaaacaaggactctcccgtgtttctgtttcttcaatttaaatttattctttgtagggtgacactaagtaccacagtatatgtcacatgtaagaacagtaaatttttaaaaaagagagacagggcaagcatttatcattgtgatctcttctctaaacataatgggaacttaggttaattaaaaaaaaaagttaatgccgttgttttttgccttaagaaaggtagggtttttatctgaagtgctctgagaattggcactcttaaatctgcaatgatgagaaataacagtagctaccatttgttgaaaatctattagtagta

SEQ ID NO: 251192 - DNA, 629 bp, Homo sapiens
acttcttggctctcttgagccctgaatctgcttcaaattcagaaagccccaagacttctgggctctataattactctgggctttggagaatggtttctcttatgagcaaaacaatggtggaaacttgtaccaatgaaggaaacacacaagcrtgtagaggaacattgctgtttgctgatgatgctggtggctgcttgggtgagagataaactctccaaagagcgttggcccttttgtggctgcaggatctgggtgaaagagattcttgtagtctatcctatcactagatactatctgtcttagtccattttgtgctgctataacagaataccacagaccaggtaatttacaatgaatagaaatttacttggctcacagttctggaggctgggaagtccgaggttgagagcttacatctggtgaaggccttcttgctgcatcatggtgtgacccaaggcatcacatgggtgagagagagggtgagagagagcacctactcctgtgaaaaccaacccgctcccatgataaaggcattaatccattcagaaagatgatgtccccatgatccaaacacctcttgaaggcctcacctctcaacacggttgcatcagggattaagtttccagcac

SEQ ID NO: 251193 - DNA, 623 bp, Homo sapiens
aatccaaatatattcattagtaagtaatggaaacctgaaattgcttaaacaagatgggacattattctctcacattaaaaggaatttgggggtaggtgagtctagggttggtttattcagtagttcagttgtatcatcaaagacctgggctcttgccatctttgtgctctgacttacagagcaagggcttaattccagtcttttcctctaatgagcacaaaatgggtgccacagtgccttacatcacatcctaacacaataacrttcaatgtccaaaggtcagaggagaaaatgtgtcttccttgtgtccattgttgacagcaaggaggaaatttccatcaactctcattggtcacaatgggtcacgtgcctattcgaaagcaatcactagacagggggtcagtattactatgattagtttaggtcagtcaagattcactccttgaggctcagaagggcaacttctcctaaagcatgtgactgttcaatactttaaaaattggggttctcttagcaacggagaagagaggctctttttttgacaagcaatcgtagcatctatcaaagcataagaaaagcttgtgagtgatgaggttggagactgagaaggttccagaacatga

SEQ ID NO: 251194 - DNA, 623 bp, Homo sapiens
aatccaaatatattcattagtaagtaatggaaacctgaaattgcttaaacaagatgggacattattctctcacattaaaaggaatttgggggtaggtgagtctagggttggtttattcagtagttcagttgtatcatcaaagacctgggctcttgccatctttgtgctctgacttacagagcaagggcttaattccagtcttttcctctaatgagcacaaaatgggtgccacagtgccttacatcacatcctaacacaataacgttcaatgtccaaaggtcagaggagaaaatgtgtcttccttgtgtccattgttgacagcaaggaggaaatttccatcaactctcattggtcacaatgggtcacgtgcctattcgaaagcaatcactagacagggggtcagtattactatgattagtttaggtcagtcaagattcactccttgaggctcagaagggcaacttctcctaaagcatgtgactgttcaatactttaaaaattggggttctcttagcaacggagaagagaggctctttttttgacaagcaatygtagcatctatcaaagcataagaaaagcttgtgagtgatgaggttggagactgagaaggttccagaacatga

SEQ ID NO: 251195 - DNA, 501 bp, Homo sapiens
atttttgtatttttaatagagayggggtttcaccatgttggccaggctggtctggaactcctgacctcaggtgatctgctcaccttggcatcccaaagttctgggattacaagtgtgagccaccacacctggctatcatcaagataactctttaaataagccaaacatttattggccaaaagcaatgcacatgtgctgtcaacaagcaaatttggggaaacacaaagagaatagaaacagaaaataaatattaaccacccagatgtaatcatattagcattttggggcatatgtttctgattctttttaaaaaatatttatgtctctctgtgttttctatttatatatgtattgcaacctgatttttttcattgagcaaatgtaaaatgaacagaaaatgtccaggaaagcaaatgtctcccttctgctggcctggtgtattacacagggttctgtggagggacagaactaataggatagatgtatatacaaaggggagtt

SEQ ID NO: 251196 - DNA, 619 bp, Homo sapiens
ggaggccagggtgcttgcaaattgaaatgcatgttgaagctatagggatggctaattaatttagtttgtatgcctacaagatttttcattgtttcctattcaaaaaaattctcttttgaataggaaacgtgtgcatatggtaaaaaaaaaaaattaaacagtaccagaaaaagtatacagtgaaaattaagtttgttttccatcccaaccaccagttcttcttctccaaggtcacaagtgttgctggcttctcttgaaactttccagagatacaatctttatatagaaaaacatatgtatatatgtctcctcccggttttataaatgatagcccattgtacatattacactgcatcttgacttcattcaacaatatatctttgaggtttttgcatagcagtccatatagacattccttattctttttatcagctgtgtagtattccagtatayggatgtgtataaattaatcagttccctcatggtggacattcaggatattttctgtcattctccacaatttatgctagtatgtccatcttggtgtgtgttcatcagtaggatacaaatctagaggtgggcctcctgggcagataggatgtgcatttaaggtatgatg

SEQ ID NO: 251197 - DNA, 603 bp, Homo sapiens
ggaccctggggagggatgaggtccctgttgttcatctgggtgatcatctaactcctgatgagcccaggagttagagaccggcctgggcaacgaagtgagaccccatctctccaaaaaaaaaaaaaaaagtcaaaaaattagccagatgtggtgcatgcccccagctacttgggaggctgagatgggaggatagcattagcccrggaggttgaggctgcagtgagctatgattgcaccactgctcttcatcctgggtggcagactgagaccctgtctcaaaaaagttgtcatggtcctatgacatttttttaggtcctatgcaggggtgcaggtggaggtggtttctggttctacctgactgtcttcgttcagcctggtccatttgttgactctgctacccagaagtgaaagaatatggcatctttctcatctctatatggtccccatgcagtaaggagttgactcagccggtctggggagttcaaatcctgcacattccaaagaaagctctggcccttaactggctcctgggagataaccgccaagtctttggaacattctgcctgataagagtgtctttgtttacctatggcctcaggctga

SEQ ID NO: 251198 - DNA, 603 bp, Homo sapiens
ggaccctggggagggatgaggtccctgttgttcatctgggtgatcatctaactcctgatgagcccaggagttagagaccggcctgggcaacgaagtgagaccccatctctccaaaaaaaaaaaaaaaagtcaaaaaattagccagatgtggtgcatgcccccagctacttgggaggctgagatgggaggatagcattagcccgggaggttgaggctgcagtgagctatgattgcaccactgctcttcatcctgggtggcagactgagaccctgtctcaaaaaagttgtcatggtcctatgacatttttttaggtcctatgcaggggtgcaggtggaggtggtttctggttctacctgactgtcttcgttcagcctsgtccatttgttgactctgctacccagaagtgaaagaatatggcatctttctcatctctatatggtccccatgcagtaaggagttgactcagccggtctggggagttcaaatcctgcacattccaaagaaagctctggcccttaactggctcctgggagataaccgccaagtctttggaacattctgcctgataagagtgtctttgtttacctatggcctcaggctga

SEQ ID NO: 251199 - DNA, 603 bp, Homo sapiens
ggaccctggggagggatgaggtccctgttgttcatctgggtgatcatctaactcctgatgagcccaggagttagagaccggcctgggcaacgaagtgagaccccatctctccaaaaaaaaaaaaaaaagtcaaaaaattagccagatgtggtgcatgcccccagctacttgggaggctgagatgggaggatagcattagcccgggaggttgaggctgcagtgagctatgattgcaccactgctcttcatcctgggtggcagactgagaccctgtctcaaaaaagttgtcatggtcctatgacatttttttaggtcctatgcaggggtgcaggtggaggtggtttctggttctacctgactgtcttcgttcagcctggtccatttgttgactctgctacccasaagtgaaagaatatggcatctttctcatctctatatggtccccatgcagtaaggagttgactcagccggtctggggagttcaaatcctgcacattccaaagaaagctctggcccttaactggctcctgggagataaccgccaagtctttggaacattctgcctgataagagtgtctttgtttacctatggcctcaggctga

SEQ ID NO: 251200 - DNA, 603 bp, Homo sapiens
ggaccctggggagggatgaggtccctgttgttcatctgggtgatcatctaactcctgatgagcccaggagttagagaccggcctgggcaacgaagtgagaccccatctctccaaaaaaaaaaaaaaaagtcaaaaaattagccagatgtggtgcatgcccccagctacttgggaggctgagatgggaggatagcattagcccgggaggttgaggctgcagtgagctatgattgcaccactgctcttcatcctgggtggcagactgagaccctgtctcaaaaaagttgtcatggtcctatgacatttttttaggtcctatgcaggggtgcaggtggaggtggtttctggttctacctgactgtcttcgttcagcctggtccatttgttgactctgctacccagaagtgaaagaatatggcatctttctcatctctatatggtccccatgcagtaaggagttgactcagccggtctggggagttcaaatcctgcacattccaaagaaagctctggcccttractggctcctgggagataaccgccaagtctttggaacattctgcctgataagagtgtctttgtttacctatggcctcaggctga

SEQ ID NO: 251201 - DNA, 462 bp, Homo sapiens
  misc_feature (1)...(462): n = A,T,C or G
atcattatatagaaaagtgattttattcttgagcctgagatattcacagtgaaaatgacaacacattatttctgagacacctgctgggggcatccaccactttcccccaacccattctctctattcacctccaaccaattttatccaaaagccagctcagctgactgtacaaccacaagggatttggagttagatggatatggcatttatcagctgaatgatcttgggcataatactcaaaccttctgtgcctctgttttctcatctttaaacggggatagcacagggttggtgtgaggaataaatgagttattattgtcatagtaatatactaatatatagttaaatataattctatctgtcagatgtagacaggggtggagaatgccttggaagtcatttcytacagaataagtgatatggttttgccgtgtccccacccaaatctcatcttgaatnnnn

SEQ ID NO: 251202 - DNA, 462 bp, Homo sapiens
  misc_feature (1)...(462): n = A,T,C or G
atcattatatagaaaagtgattttattcttgagcctgagatattcacagtgaaaatgacaacacattatttctgagacacctgctgggggcatccaccactttcccccaacccattctctctattcacctccaaccaattttatccaaaagccagctcagctgactgtacaaccacaagggatttggagttagatggatatggcatttatcagctgaatgatcttgggcataatactcaaaccttctgtgcctctgttttctcatctttaaacggggatagcacagggttggtgtgaggaataaatgagttattattgtcatagtaatatactaatatatagttaaatataattctatctgtcagatgtagacaggggtggagaatgccttggaagtcatttcctacagaataagtgatatggttttgcygtgtccccacccaaatctcatcttgaatnnnn

SEQ ID NO: 251203 - DNA, 562 bp, Homo sapiens
agatccagctagttccagttttgccaacaatattaacgccaccagcacatccaccaataataataataacamtaatggtatgataaataaaataggtgatatggtttggctgtgtgtctccacccaaatctcatcttgaattatcaccaggtgtcgcgtcgagggagggagctgtaagccccatgtgtcgaaggagggatgtgattggctcatgggggcggcttctcccatgctggtctcatgatagtgagtgagttctcatgagatctgatggttttaaacgtggcagttttttcccgtgctctcacttctccctcctatcgccttgtgaagatgtctgcttctccttctgtcatgattgtaagtttcctgaggcctccccagccatgcagacctgttgtgagtcaattaaaccccttttgtttatcaattacccattcttggccagttgtttatagcagtgtgaggatggactaatacaatagacttattgggagcttgtaatattctagctatgttactaaaaatttcacacattatttcatttagtccatccagtaac

SEQ ID NO: 251204 - DNA, 562 bp, Homo sapiens
agatccagctagttccagttttgccaacaatattaacgccaccagcacatccaccaataataataataacaataatggtatgataaataaaataggtgatatggtttggctgtgtgtctccacccaaatctcatcttgaattatcaccaggtgtygcgtcgagggagggagctgtaagccccatgtgtcgaaggagggatgtgattggctcatgggggcggcttctcccatgctggtctcatgatagtgagtgagttctcatgagatctgatggttttaaacgtggcagttttttcccgtgctctcacttctccctcctatcgccttgtgaagatgtctgcttctccttctgtcatgattgtaagtttcctgaggcctccccagccatgcagacctgttgtgagtcaattaaaccccttttgtttatcaattacccattcttggccagttgtttatagcagtgtgaggatggactaatacaatagacttattgggagcttgtaatattctagctatgttactaaaaatttcacacattatttcatttagtccatccagtaac

SEQ ID NO: 251205 - DNA, 562 bp, Homo sapiens
agatccagctagttccagttttgccaacaatattaacgccaccagcacatccaccaataataataataacaataatggtatgataaataaaataggtgatatggtttggctgtgtgtctccacccaaatctcatcttgaattatcaccaggtgtcgcgtcgagggagggagctgtaagccccaygtgtcgaaggagggatgtgattggctcatgggggcggcttctcccatgctggtctcatgatagtgagtgagttctcatgagatctgatggttttaaacgtggcagttttttcccgtgctctcacttctccctcctatcgccttgtgaagatgtctgcttctccttctgtcatgattgtaagtttcctgaggcctccccagccatgcagacctgttgtgagtcaattaaaccccttttgtttatcaattacccattcttggccagttgtttatagcagtgtgaggatggactaatacaatagacttattgggagcttgtaatattctagctatgttactaaaaatttcacacattatttcatttagtccatccagtaac

SEQ ID NO: 251206 - DNA, 572 bp, Homo sapiens
caacactgcctacaacactggttctcaactggggacacttctatcccccataagggacatttggcaatgtctggagacatttttgatkgtcacaactagggtatactgtgctactgtcgtccagtacgtagaggccatggatgctgctaaacatcctacaaggcacagggctgtccccagactccccagtaaagaacgatcaggtccaaaatgtcagtggtgttgaggctgacctagggtagggggctctaatatctctattttatatgtgaggaaacggaagcatggtgaggttgggtaatcctgtgtgaggtcctgcagctggtaggcaacggaggtggggtatagaccaagtgagtctggctctagagtccttgcttttaaccaccatacatgattgcttctcagaagtggaaaacgctgagacaggcacagctttttatacctttactcacttatgttacggcgagggtgaccagctgtctggttgcccaggcctgagcggattcccagagtgtgggacttgcagtgctcaagccaggatggatagtcaccctagtaacctccagact

SEQ ID NO: 251207 - DNA, 572 bp, Homo sapiens
caacactgcctacaacactggttctcaactggggacacttctatcccccataagggacatttggcaatgtctggagacatttttgatggtcacaactagggtatactgtgctactgtcrtccagtacgtagaggccatggatgctgctaaacatcctacaaggcacagggctgtccccagactccccagtaaagaacgatcaggtccaaaatgtcagtggtgttgaggctgacctagggtagggggctctaatatctctattttatatgtgaggaaacggaagcatggtgaggttgggtaatcctgtgtgaggtcctgcagctggtaggcaacggaggtggggtatagaccaagtgagtctggctctagagtccttgcttttaaccaccatacatgattgcttctcagaagtggaaaacgctgagacaggcacagctttttatacctttactcacttatgttacggcgagggtgaccagctgtctggttgcccaggcctgagcggattcccagagtgtgggacttgcagtgctcaagccaggatggatagtcaccctagtaacctccagact

SEQ ID NO: 251208 - DNA, 572 bp, Homo sapiens
caacactgcctacaacactggttctcaactggggacacttctatcccccataagggacatttggcaatgtctggagacatttttgatggtcacaactagggtatactgtgctactgtcgtccagtacgtagaggccatggatgctgctaaacatcctacaaggcacagggctgtccccagactccccagtaaagaacgatcaggtccaaaatgtcagtggtgttgaggctgacctagggtagggggctctaatatctctattttatatgtgaggaaacggaagcatggtgaggttgggtaatcctgtgtgaggtcctgcagctggtaggcaayggaggtggggtatagaccaagtgagtctggctctagagtccttgcttttaaccaccatacatgattgcttctcagaagtggaaaacgctgagacaggcacagctttttatacctttactcacttatgttacggcgagggtgaccagctgtctggttgcccaggcctgagcggattcccagagtgtgggacttgcagtgctcaagccaggatggatagtcaccctagtaacctccagact

SEQ ID NO: 251209 - DNA, 572 bp, Homo sapiens
caacactgcctacaacactggttctcaactggggacacttctatcccccataagggacatttggcaatgtctggagacatttttgatggtcacaactagggtatactgtgctactgtcgtccagtacgtagaggccatggatgctgctaaacatcctacaaggcacagggctgtccccagactccccagtaaagaacgatcaggtccaaaatgtcagtggtgttgaggctgacctagggtagggggctctaatatctctattttatatgtgaggaaacggaagcatggtgaggttgggtaatcctgtgtgaggtcctgcagctggtaggcaacggagrtggggtatagaccaagtgagtctggctctagagtccttgcttttaaccaccatacatgattgcttctcagaagtggaaaacgctgagacaggcacagctttttatacctttactcacttatgttacggcgagggtgaccagctgtctggttgcccaggcctgagcggattcccagagtgtgggacttgcagtgctcaagccaggatggatagtcaccctagtaacctccagact

SEQ ID NO: 251210 - DNA, 572 bp, Homo sapiens
aattgagcacttactacgtgccaggcacaggcacatcctatgcctgcctccctcctcctccggggctgctggctctccttatcctttttatttttgcttttttcyccacagctagtaactgtgttctaaacaccaataagagggcctggcaaatgtggttactcaataacatttattgaatgaatgggtgtgagcgagtgtgtgttaggctccctgctaagcccattacgtgtattattttactcaactctcacagtaatcctatgagataagcttcatctttatctccatgttacaaaggagaaaatgtgctcagagatgtcaagtaatttcccccaaaatgcacagcttgtgtcaatgcaagaatgcaaatttagcagtctccaaattctacctcatttactatctcccaaatagatatgtataaatatcccacatatggagatacattttaaggatttatatgtatctatttccatgtaacacggccacacatatgtatcctatataatatgcacatgtatagtatgtgcacatattcacgtgtaaatgtatcagttacctgtagctgt

SEQ ID NO: 251211 - DNA, 572 bp, Homo sapiens
aattgagcacttactacgtgccaggcacaggcacatcctatgcctgcctccctcctcctccggggctgctggctctccttatcctttttatttttgcttttttccccacagctagtaactgtgttctaaacaccaataagagggcctggcaaatgtggttactcaataacatttattgaatgaatgggtgtgagcgagtgtgtgttaggctccctgctaagcccattacgtgtattattttactcaactctcacagtaatcctatgagataagcttcatctttatctccatgttacaaaggagaaaatgtgctcagagatgtcaagtaatttcccccaaaatgcacagcttgtgtcaaygcaagaatgcaaatttagcagtctccaaattctacctcatttactatctcccaaatagatatgtataaatatcccacatatggagatacattttaaggatttatatgtatctatttccatgtaacacggccacacatatgtatcctatataatatgcacatgtatagtatgtgcacatattcacgtgtaaatgtatcagttacctgtagctgt

SEQ ID NO: 251212 - DNA, 572 bp, Homo sapiens
aattgagcacttactacgtgccaggcacaggcacatcctatgcctgcctccctcctcctccggggctgctggctctccttatcctttttatttttgcttttttccccacagctagtaactgtgttctaaacaccaataagagggcctggcaaatgtggttactcaataacatttattgaatgaatgggtgtgagcgagtgtgtgttaggctccctgctaagcccattacgtgtattattttactcaactctcacagtaatcctatgagataagcttcatctttatctccatgttacaaaggagaaaatgtgctcagagatgtcaagtaatttcccccaaaatgcacagcttgtgtcaatgcaagaatgcaaatttagcagtctccaaattctaccycatttactatctcccaaatagatatgtataaatatcccacatatggagatacattttaaggatttatatgtatctatttccatgtaacacggccacacatatgtatcctatataatatgcacatgtatagtatgtgcacatattcacgtgtaaatgtatcagttacctgtagctgt

SEQ ID NO: 251213 - DNA, 572 bp, Homo sapiens
aattgagcacttactacgtgccaggcacaggcacatcctatgcctgcctccctcctcctccggggctgctggctctccttatcctttttatttttgcttttttccccacagctagtaactgtgttctaaacaccaataagagggcctggcaaatgtggttactcaataacatttattgaatgaatgggtgtgagcgagtgtgtgttaggctccctgctaagcccattacgtgtattattttactcaactctcacagtaatcctatgagataagcttcatctttatctccatgttacaaaggagaaaatgtgctcagagatgtcaagtaatttcccccaaaatgcacagcttgtgtcaatgcaagaatgcaaatttagcagtctccaaattctacctcatttactatctcccaaatagatatgtataaatatcccacatatggagatacattttaaggatttataygtatctatttccatgtaacacggccacacatatgtatcctatataatatgcacatgtatagtatgtgcacatattcacgtgtaaatgtatcagttacctgtagctgt

SEQ ID NO: 251214 - DNA, 548 bp, Homo sapiens
tattataacattgatacattaccaccatctaatccaaaggccccattcaggtttcactgaccatcccaataatgtcctttataatcttgcagggcaagattatcatagcatttaattgtcacgtcttattccggcagattcatcagtctctttgttactttcttgaccttgatacttttgaagatacaggccatttatgttgtataagagctctcaattggggattgtctgatgctttttcgtgactagaactaggtcgtgcaccaattctaggcttcaacaccccatgccagatctctgtcctatyccctctcgttgatgcttactttggttggtgccctttagtgactttaacactgaatatttgaggaagaataaaagatgaaacactgattttaattagggtgacatagactctgctttaaacaacaacaacaaaaccaaaaccctctaatttcccaatctctcatgaagctacccaagccatgtgatttagctttggccaaggaatgcaaagagaagagtaatatggacattttctcagaatg

SEQ ID NO: 251215 - DNA, 457 bp, Homo sapiens
ttcccttttcctgagcctgggctggcctgtgactgctttgacgaatagattgccatagaagtgacaccatgatggttctggtcctggcatttaagggatcatgcagtttccrccttacacctcttggaactcttggttttaaacccctgatccactgtgtaagaaatctgagggcttttgctggagggaaacctggagagactctgagatgacatggaaagggagagaagttgctctgagcccagcttccatcctgtcccactgatatggtttggctgtgtccccatccaaatctcatcttgaattctcacatgttgtgagagggacctggtgggaggtaattgaatcatgggggtgggtctttctcatgctattctcatgatagtaagtctcatgagatctgatggttttataacagggagtttccctgcacaagctctctttttgcccgctgcca

SEQ ID NO: 251216 - DNA, 349 bp, Homo sapiens
ggcttttgctggagggaaacctggagagactctgagatgacatggaaagggagagaagttgctctgagcccagcttccatcctgtcccactgatatggtttggctgtgtccccatccaaatctcatcttgaattctcacatgttgtgagagggacctggtgggaggtaattgaatcatgggggtgggtctttctcatgctattctcatgatagtaagtctcatgagatctgatggttttataacagggagtttccctgcacaagctctctttttgccygctgccatccatgtaagacgtgacttgctcctccttgccttccaccatgattgcgaggctccccagccatg

SEQ ID NO: 251217 - DNA, 651 bp, Homo sapiens
agaatctaagctcaacaaacagaggttggagaggttattataaagtccattgtgggagcagccactcctaaccttgggaccaaagattggtattgtgtgacctgtgagccagaattaccctggattggactgtcctaccaggtgggcccctggccagcaaaagagatgatgggggttgttagaatgtcagagagggccttagacaccccttttccatatagtctccagctctttgactaaaacctgtaccccagtatataatcagtcacccaggcctagagtcaaggtcttttatatcatgtaaatttattttttatttttaaaattttttatttccatagggttttggggaacaggtggtatttggttatgtgagtaagttctttaatagtgatttgtgagattttggtgcagccattatctgagcagtacacactgaacccaatttgtagtcttttatccctcaccccctcccaccctttcccccgagtccccasagtccattgtatcattcttatgcctttgcatcctcatagcttagctcccacttgtgagtgagaacatacgacgtttggttttccattcctgagttacttcacctagaataataatctccagttccatccaggttgctgtgaatgccattaattc

SEQ ID NO: 251218 - DNA, 531 bp, Homo sapiens
cccctgttaaaagattgaacacagataactggcaggctttgtttcagggcaagagttcacaaactggggtccacagatgctcaaacattctatcatgaatagaattcggrgatcccatgatcttggacagttaaaaatacatcttatattcttttatctctacctgaagtttagtctttctttccattgtgaatgaataaagcaataaacaaacaaaaaaacaaaagattgaacacagaacttatttacccaattgcgtggcattcacaagagatgagaaattcaacatgataaatgagatttttcccccccgcaggggcagggaggaggatgaagagggtgaatgaatgctaggaatgtattatttttatttagacagtgatttctatttttctttcaaagattatatttttgtttccaaatgggagaggtgttatggggcgatagagaaaggatccagggaaaattgcatggtaaaattgctcctgggaaagaccagcttagggtatccatgattgtcgcttctgtagc

SEQ ID NO: 251219 - DNA, 531 bp, Homo sapiens
cccctgttaaaagattgaacacagataactggcaggctttgtttcagggcaagagttcacaaactggggtccacagatgctcaaacattctatcatgaatagaattcggagatcccatgatcttggacagttaaaaatacatcttatattcttttatctctacctgaagtttagtctttctttccattgtgaatgaataaagcaataaacaaacaaaaaaacaaaagattgaacacagaacttatttacccaattgcrtggcattcacaagagatgagaaattcaacatgataaatgagatttttcccccccgcaggggcagggaggaggatgaagagggtgaatgaatgctaggaatgtattatttttatttagacagtgatttctatttttctttcaaagattatatttttgtttccaaatgggagaggtgttatggggcgatagagaaaggatccagggaaaattgcatggtaaaattgctcctgggaaagaccagcttagggtatccatgattgtcgcttctgtagc

SEQ ID NO: 251220 - DNA, 531 bp, Homo sapiens
cccctgttaaaagattgaacacagataactggcaggctttgtttcagggcaagagttcacaaactggggtccacagatgctcaaacattctatcatgaatagaattcggagatcccatgatcttggacagttaaaaatacatcttatattcttttatctctacctgaagtttagtctttctttccattgtgaatgaataaagcaataaacaaacaaaaaaacaaaagattgaacacagaacttatttacccaattgcgtggcattcacaagagatgagaaattcaacatgatamatgagatttttcccccccgcaggggcagggaggaggatgaagagggtgaatgaatgctaggaatgtattatttttatttagacagtgatttctatttttctttcaaagattatatttttgtttccaaatgggagaggtgttatggggcgatagagaaaggatccagggaaaattgcatggtaaaattgctcctgggaaagaccagcttagggtatccatgattgtcgcttctgtagc

SEQ ID NO: 251221 - DNA, 543 bp, Homo sapiens
tgctaggaatgtattatttttatttagacagtgatttctatttttctttcaaagattatatttttgtttccaaatgggagaggtgttatggggcgatagagaaaggatccagggaaaatygcatggtaaaattgctcctgggaaagaccagcttagggtatccatgattgtcgcttctgtagccctgagcatgtttctccccttggagcatcctctgaagtcttggtcagagtcgttgaagagacatgaaccttttcagcattttctgctttgctttggcaggattgtttactgcctatcaagctgacttacaaaaaatactagttctgttgtttttcatttttaaaagcaaattgcttcagctcttcgtaaataactccttaaaagaaaagccatggatgacagatgaggaagcatagttgggaacagagcgcggcactcgctcacgatcatagtgtcaggtcacaggaagccctctgagccccaggggtgggggcagcctctttaaagtgattatggagcaagaggagcttgaacagtggc

SEQ ID NO: 251222 - DNA, 651 bp, Homo sapiens
gtcgcttctgtagccctgagcatgtttctccccttggagcatcctctgaagtcttggtcagagtcgttgaagagacatgaaccttttcagcattttctgctttgctttggcaggattgtttactgcctatcaagctgacttacaaaaaatactagttctgttgtttttcatttttaaaagcaaattgcttcagctcttcgtaaataactccttaaaagaaaagccatggatgacagatgaggaagcatagttgggaacagagcgcggcactcgctcacgatcatagtgtcaggtcacaggaagccctctgagccccrggggtgggggcagcctctttaaagtgattatggagcaagaggagcttgaacagtggcactctgagggttgtcttgggccagcttggagatcaggtcctgggctccagaagacatcgaggctggttctacctggatgttgcatccgtaggtatcaaagtaggagatgctttcgaggggtgagtttttcatcagtggcctccaccccaaagcaccatagtcctacctccttgttgtatgtctttcttctcacaggctgcttgtcagacttcagaatttcatgggcatgatgggcaaataagcttgattaatgcttcatgcttgctatccactaaat

SEQ ID NO: 251223 - DNA, 651 bp, Homo sapiens
gtcgcttctgtagccctgagcatgtttctccccttggagcatcctctgaagtcttggtcagagtcgttgaagagacatgaaccttttcagcattttctgctttgctttggcaggattgtttactgcctatcaagctgacttacaaaaaatactagttctgttgtttttcatttttaaaagcaaattgcttcagctcttcgtaaataactccttaaaagaaaagccatggatgacagatgaggaagcatagttgggaacagagcgcggcactcgctcacgatcatagtgtcaggtcacaggaagccctctgagccccaggggtgggggcagcctctttaaagtgattatggagcaagaggagcttgaacagtggcactctgagsgttgtcttgggccagcttggagatcaggtcctgggctccagaagacatcgaggctggttctacctggatgttgcatccgtaggtatcaaagtaggagatgctttcgaggggtgagtttttcatcagtggcctccaccccaaagcaccatagtcctacctccttgttgtatgtctttcttctcacaggctgcttgtcagacttcagaatttcatgggcatgatgggcaaataagcttgattaatgcttcatgcttgctatccactaaat

SEQ ID NO: 251224 - DNA, 651 bp, Homo sapiens
gtcgcttctgtagccctgagcatgtttctccccttggagcatcctctgaagtcttggtcagagtcgttgaagagacatgaaccttttcagcattttctgctttgctttggcaggattgtttactgcctatcaagctgacttacaaaaaatactagttctgttgtttttcatttttaaaagcaaattgcttcagctcttcgtaaataactccttaaaagaaaagccatggatgacagatgaggaagcatagttgggaacagagcgcggcactcgctcacgatcatagtgtcaggtcacaggaagccctctgagccccaggggtgggggcagcctctttaaagtgattatggagcaagaggagcttgaacagtggcactctgaggrttgtcttgggccagcttggagatcaggtcctgggctccagaagacatcgaggctggttctacctggatgttgcatccgtaggtatcaaagtaggagatgctttcgaggggtgagtttttcatcagtggcctccaccccaaagcaccatagtcctacctccttgttgtatgtctttcttctcacaggctgcttgtcagacttcagaatttcatgggcatgatgggcaaataagcttgattaatgcttcatgcttgctatccactaaat

SEQ ID NO: 251225 - DNA, 622 bp, Homo sapiens
atttgtgaggcaggttcactgttcactggctaccaacttgtccagtgagacagaacactcccacacaacaagttacatgaggtaggtttattacttacagataggcagcaagagatggtagaagcctaggattcattgtgagctattcctccaagtccccggaaacctgctgagggtaagtagagtcatatctgtgcatgcctcacttrcacagaagctcagataccccagaaagcagctggttctgtgttttataccccaggatgtgtgatttgctgggctaaagtgtttaagacattttgtttctaggggtggactggaacagaggttgggtcgttctggccagtccctctctatctcaagatgttgcatttctagcacattcttcagttattcttaagaaccatgagttggggaaagagggaagaactgggtaggcccaaggccacccagtgaactgtctagcagcattttgcattttgtaaaagcacattaacaatggttttgagaagctgaagtctgtggactgattctccctgtaaatacaggcctgctttactagcacctgcactttctggttcttatgccccctcaaaagtgtgctgagtcgtttgaacagaag

SEQ ID NO: 251226 - DNA, 622 bp, Homo sapiens
atttgtgaggcaggttcactgttcactggctaccaacttgtccagtgagacagaacactcccacacaacaagttacatgaggtaggtttattacttacagataggcagcaagagatggtagaagcctaggattcattgtgagctattcctccaagtccccggaaacctgctgagggtaagtagagtcatatctgtgcatgcctcacttacacagaagctcagataccccagaaagcagctggttctgtgttttataccccaggatgtgtgatttgctgggctaaagtgtttaagacattttgtttctaggggtggactgraacagaggttgggtcgttctggccagtccctctctatctcaagatgttgcatttctagcacattcttcagttattcttaagaaccatgagttggggaaagagggaagaactgggtaggcccaaggccacccagtgaactgtctagcagcattttgcattttgtaaaagcacattaacaatggttttgagaagctgaagtctgtggactgattctccctgtaaatacaggcctgctttactagcacctgcactttctggttcttatgccccctcaaaagtgtgctgagtcgtttgaacagaag

SEQ ID NO: 251227 - DNA, 622 bp, Homo sapiens
atttgtgaggcaggttcactgttcactggctaccaacttgtccagtgagacagaacactcccacacaacaagttacatgaggtaggtttattacttacagataggcagcaagagatggtagaagcctaggattcattgtgagctattcctccaagtccccggaaacctgctgagggtaagtagagtcatatctgtgcatgcctcacttacacagaagctcagataccccagaaagcagctggttctgtgttttataccccaggatgtgtgatttgctgggctaaagtgtttaagacattttgtttctaggggtggactggaacagaggttgggtcgttctggccagtccctctctatctcaagatgttgcatttctagcacattcttcagttattcttaagaaccatgagttgggraaagagggaagaactgggtaggcccaaggccacccagtgaactgtctagcagcattttgcattttgtaaaagcacattaacaatggttttgagaagctgaagtctgtggactgattctccctgtaaatacaggcctgctttactagcacctgcactttctggttcttatgccccctcaaaagtgtgctgagtcgtttgaacagaag

SEQ ID NO: 251228 - DNA, 622 bp, Homo sapiens
atttgtgaggcaggttcactgttcactggctaccaacttgtccagtgagacagaacactcccacacaacaagttacatgaggtaggtttattacttacagataggcagcaagagatggtagaagcctaggattcattgtgagctattcctccaagtccccggaaacctgctgagggtaagtagagtcatatctgtgcatgcctcacttacacagaagctcagataccccagaaagcagctggttctgtgttttataccccaggatgtgtgatttgctgggctaaagtgtttaagacattttgtttctaggggtggactggaacagaggttgggtcgttctggccagtccctctctatctcaagatgttgcatttctagcacattcttcagttattcttaagaaccatgagttggggaaagagggaagaactgggtaggcccaaggccacccagtgaactgtctagcagcattttgcattttgtaaaagcacattaacaatggttttgagaagctgaagtctgtggactgattctccctgtaaatacaggcctgctttactagcacctgcactttctggttcttatgccccctcaaaagtgtrctgagtcgtttgaacagaag

SEQ ID NO: 251229 - DNA, 671 bp, Homo sapiens
ttatgcctcaggaaacttataataaagccataaactggattcattcatttgggggaatgaattcatttaacatccccaacccccataatagacaaattacagcattattcatttcatatttacagacttagaatcacaggagtcttaaagcaagcagaaaacttagtccaaactcattttccatatgagaaaactaaagccctacaaaattatggatcttgccagcagcaacaaagtgagttagcaccaaaccttaaacccaagcttctcaactcttggttccttttccactattcagagcttcttaacattccacataagttaacaataaccacaatttcaacrtctccttgatagcaaaatgttaaattattagtttagcaactaaattggttattattggctagaaaatgaatattccctgtattagtctgctcttgcattgctataaagaaatacctgagactgggtaatatataaagaaaagagatttaattggctcatagttctgcaggctgtacaggaagcatgatgctggcatctgcttggcttctgaggagaccttagcaagcaaagttagaatcatggtggaaggcaaagggggagcagtacttcacatggccagagaaggagcaagagatagagtgcagaaagatactactcacttttat

SEQ ID NO: 251230 - DNA, 497 bp, Homo sapiens
tgaattcatttaacatccccaacccccataatagacaaattacagcattattcatttcatatttacagacttagaatcacaggagtcttaaagcaagcagaaaacttagtccaaactcattttccatatgagaaaactaaagccctacaaaattatggatcttgccagcagcaacaaagtgagttagcaccaaaccttaaacccaagcttctcaactcttggttccttttccactattcagagcttcttaacattccacataagttaacaataaccacaatttcaacatctccttgatagcaaaatgttaaattattagtttagcaactaarttggttattattggctagaaaatgaatattccctgtattagtctgctcttgcattgctataaagaaatacctgagactgggtaatatataaagaaaagagatttaattggctcatagttctgcaggctgtacaggaagcatgatgctggcatctgcttggcttct

SEQ ID NO: 251231 - DNA, 530 bp, Homo sapiens
ttcagatatctttatagcaatatcccactcctctgtaccatttttatgtattagtttgttctctcactgctataaagaaatgcctgagactgggtaatttataaagaaaatagatttaattggctcacagttctgtagactatacaggaagcaagatgtgggcatctgcttkgcttctggggaggtctcagggaacttacaatcatggcagaaggcaaagggggagctggcatgtcttacatggcaggagcaggagcaagagacaggagggaggtgctacatacttttaaacaactagatctcatgagaacccactcactattgtgaggacagtaccaaaggggatgttgctaaatcattcatgagaaaccacccccatgatccaatcacctcccaccaggctccacctccaacaatggggattacaatttggcatgagatttggtgcagacacagatccaaatcatatcactcccacacacaggtagttttcattctctgcccttagcaatttaaaagaaagcactcat

SEQ ID NO: 251232 - DNA, 591 bp, Homo sapiens
gaggcagaaggatctcttgagcccaggagtcccaggcttcagtgaactatgatcacactttgtactccacactccaacctgggcaacagagtaagtcctcatctctaaaacaaaacaaaacaaaaacagaaacaaaaaacaacaaaatgttttcagagggaataaaaatctttgagatgtctgcctatcacagtgcctactaccaggtagattgcaaatatatattagtttaatttattcacataagatagaacattataaaattcaatgaggattttgttggcaaataggtacttggaaagataayggatggtagtgcattcaaacaatagtagatcctacttccagaatattggacagatgaggaatggaattctgcccaagcttatgactgctgctggagctgaatgaagaaaatatatataaggaagatgggcataaaacctacagcagtgttcgtttctttcagaatgggtcaaagctaaggttactttgtagaaatggattttctggaaaaatggaaataggcaatttctcttaatactcttattgaaaaaatatcctattttattagggtaatgataggtgata

SEQ ID NO: 251233 - DNA, 591 bp, Homo sapiens
gaggcagaaggatctcttgagcccaggagtcccaggcttcagtgaactatgatcacactttgtactccacactccaacctgggcaacagagtaagtcctcatctctaaaacaaaacaaaacaaaaacagaaacaaaaaacaacaaaatgttttcagagggaataaaaatctttgagatgtctgcctatcacagtgcctactaccaggtagattgcaaatatatattagtttaatttattcacataagatagaacattataaaattcaatgaggattttgttggcaaataggtacttggaaagataatggatggtagtgcattcaaacaatagtagatcctacttccagaatattggacagatgaggaatggaattctgcccaagcttatgactgctgctggagctgaatgaagaaaatatatataaggaagatgggcataaaacctacagcagtgttygtttctttcagaatgggtcaaagctaaggttactttgtagaaatggattttctggaaaaatggaaataggcaatttctcttaatactcttattgaaaaaatatcctattttattagggtaatgataggtgata

SEQ ID NO: 251234 - DNA, 550 bp, Homo sapiens
aaaaagataacatcaagaattaagaaaacagatatcaaagataccttaaataaaataaaataaataaaagyaagttacctcttcttaaaagctaataaatttggcaaatcacagcaacactgatcgagcaaaaaaggaaacacaaattatgactgctaatcctatgaatgtttacagaaaataaaatacataattttgataaacttcaggctataattttcaattcaaatgaaattgataatattttagaaaaatgcaggttatcaaaagagaaacaagtaggaactctggttattagtattttaagtaaatatatcaaaatgtataatgaaacacattcctgcaaagaaataaccagatcaagatggtgtcttattcatatcaagaaaaatgtatgaggaatgagcttatgatgtagctaaaatattctctccatcatcagtgacatgcattgattctttattatgtatatatcttgtgtttcaggtatattattttatttaattcacaaagcaaccatactgtatttgtctgctctagttgccataac

SEQ ID NO: 251235 - DNA, 591 bp, Homo sapiens
  misc_feature (1)...(591): n = A,T,C or G
ttttttatatttaaaaacatcatttaaaaagaataagaatgcttaacaagtagaattttcctggctaagttaaaggcaattctccctgaggctttttcacctgaagatctatatttggaccacaaggtaagtcatcaattcaagatcaggtgaccatcatctcttgtggctggacaatagtttgttaatcctttctatacatcaatttatacatacttttggnccctaaaaaatagtctggggccgggcattgtggctcacatctgtaatcccagcactttgggaggccgaggtgggcggatcacttgaggtcagaaaagttcaagaccagcctggccaacgtggtgaaagcccatttatattataaayacaaaaattagccaggcatggcggcacacacctgtgattccagctactcgggaggctgaggtatgagaattgcttgacctggcaggctgagatggcagtgagccgagatcgtgccactgcaatccagcatgggtgacaaagcaagaccctgcctcaaaaacaaaatcaaaaaccaaacaaacagacaaacaaaaaacaaataataatgtttgggaaaactca

SEQ ID NO: 251236 - DNA, 604 bp, Homo sapiens
tttttgttgctgttattcttttctttttttctttccttttttttttttttttcccctaggagtactctactacactagggcctgtgttctcagatccaccttctacccaactgttgactcactgaactggttacacagaactatattatttagatcttcatttttagcatactaataaacagtgaagagacaaaagaaaaattaaactaaaacaagtattaatamgtatcaaactaacttcttcacattcaaagatgtataaactgatcagaaaatcaacaaagagttcttaaaaatatgagagaagtgatggaaaagtcaagaaaatactgaaaataaagaaaatattatgacaactctcagatattaaaatagactataaaactatgatgatcaaaatagtgtggtcatagccaaaggctaaatatcaataggacagaaaactcagaaatagaagtttaaaatgtatatgaatatgtgcatatcctttcatgtaggtagtttttcatatcagttgtgaaaagatggttactgcaagatgctgaatctatgcattagctatttagtgacaaaaatgtttagctaattagctatatataaaaat

SEQ ID NO: 251237 - DNA, 642 bp, Homo sapiens
tgtgaagcatttttagttttctactttcttcccatttaaaaattcttggatgaatactcaatgattttggacgaaatacaaatgttacaatattttacatggcatggaaaatttttcagcttctaccattctggctacctgaagtttcctagcttagggttttctatgctgtttgcttttatatatctgtactttyggtaatactttagtttttacctacaagatagtattccagtctcacttagaaatctttcctaaccaatcccaggatcggatttaggtgtctctattatgcactctaccaataacagcaaatctccactatagcatgtttttctgtgttgaaatcacttaccctcttctgtgtgtctttctttagctgttgagctacttaagagattatattatatatgtatttttattcaatagagcactgtaatttttagacttacattatttgcaaacttaacaactatatatttgccttccctatctaggtcatttataatgactatgtccagaaaaatacaaaaaaattaaaacaccaactctaaaacttttccttaaactggcactgagccattcatcagcagcgtttaaataagtcttttaaatcattattaacaggatcaattttaccag

SEQ ID NO: 251238 - DNA, 631 bp, Homo sapiens
catcatacaacttgatacagaaagctttaaggcttgactgctctccaatgtggcagcactgctcttctaaagagagggctctacctttgggcctgtgtgagtggatgttagttgtggtagtgttggctgctttggtcagcctgacctctagccatgggggaggtgattaggttccagcagaattagaatgtggggttggttgctcctccagttccaaggcccctagatggccttctggacagtgtgtatgaagggactggactagagtcaccctagcccagagtcagatgctggctgtgatgaggagagcaggctggtctgcaagttgctggccaaactctcaggcaggggcaggcaaaatgcttaggtggtgggagcctgagggaacaccttacatggtctcttagatgatacacttgaagaactggtatttattcaccactttatttcctctccattagaatggcatayagtagcttcttctaatcagtcatcttgaacataaccctcagtgattaagtttgaaagtatgcatttggggggtacacagtcagaacataacagtcttcaggactactttatatttgaattgctttcagaagagttggttaaaagtcccccttacaaaagt

SEQ ID NO: 251239 - DNA, 453 bp, Homo sapiens
cccatcttctgtggccatttgtgstttgtagacttttgcaaactccgtaagaacaaagtaagcatgagcagcacacataaaaactacataataaacataattttatgtgtagaaatttttgagatttataaaggaccatatacaaaattgtgttagcccattctcacgctgctatgaagaaatacctgagactgggtaatttataaaggaaagaggaattgactcacagttccacatggctgggaagtcctcaggaaacttacaatcatggtggaaggcacctcttcacagggtggcagaagagagaatgaatgacagcaggggaaaggtcagacacttagataaccatcggatctcctgagaattcactcactatcaggagagcagcatgggggaaaccacccaaatgattccattacctcccactgggtctctccaaaatacatgaggatt

SEQ ID NO: 251240 - DNA, 453 bp, Homo sapiens
cccatcttctgtggccatttgtggtttgtagrcttttgcaaactccgtaagaacaaagtaagcatgagcagcacacataaaaactacataataaacataattttatgtgtagaaatttttgagatttataaaggaccatatacaaaattgtgttagcccattctcacgctgctatgaagaaatacctgagactgggtaatttataaaggaaagaggaattgactcacagttccacatggctgggaagtcctcaggaaacttacaatcatggtggaaggcacctcttcacagggtggcagaagagagaatgaatgacagcaggggaaaggtcagacacttagataaccatcggatctcctgagaattcactcactatcaggagagcagcatgggggaaaccacccaaatgattccattacctcccactgggtctctccaaaatacatgaggatt

SEQ ID NO: 251241 - DNA, 597 bp, Homo sapiens
gagggacatggtgagaaggcaactgttttcaagytaaggagagaggcctcaccagacatgaacaattgctacatcttcatcttggacctccaggctccagagctgtgataaaacaaaagtctggtgttcaagccaccaagtctgtgatacatttttatggcatcccaagaagactaaatccagtttagaaaataaggaatgcatttttaaataacccatgagatttacattttcagtcatgaaaaaacaaaatgatcgaaaattatcctctcaccataaacaaatagaaactggagaaattgtaagaaacaattttcagtcataggcaatagacaatgaaatactgtcatctctgagaaacaggaaacaaattctgtgagtcctaccattatgtagacttttggaagatgatataattctcaatgtcacatgagggaaaaactaaaatcaatacagaaatctctcttgaaagagaacacagatatagagttcaaggaatatgagatagctagaatttgtagggcagataagtcaaattgagggagctacacagaaaggaagatttttagaaatctgcataggaatcccaataagttt

SEQ ID NO: 251242 - DNA, 634 bp, Homo sapiens
actaaatggcttgattatttcctttaaagttaagagcacttaaacctgaatgcaaagtgttacctaatacttgctgcatataataaagtcacattaactataaatgcatagatatttgaaaagtaacagaacaaataaagcatataccatgccaccattaatcaaaagaaagtgagtagctatgttaatattgcataatttagacttcagaataaatattacagtgataaagagcaaattttatatgataaactggtaaaataattaagaatctgtaacaagctcaaatatgtatgcaaagaacaccacattttataggtaacatctattatgactcattagatcaatagaaatatctataaatatatttatgatttcaaaaaaactctctaaaatatgtgaaccaaaatatttgtaaatatatacaaatcttgcttgacattatcaattaagactctatcagacctttgtagaatgctttcctcaataacatyatcatgtgtatcatcacaagtgcaaaagaaacattcactgatataattttctggatcttcttttttgttagttttttttttttttaaaggattaataaattcaaaacaattcaatttatgcaaagtaaattttctgatca

SEQ ID NO: 251243 - DNA, 516 bp, Homo sapiens
aagggcatcctgatgaactggttcagaacctttcaaccatgccargttttaacttgaaaatttaaactagaataaatgacagtcaagttggtatggaacttgatattctagtaatgacatgttcagtttccaaatatgaagtataggatagctttaataacaaaatgttcttgtctttgttaattttacatacattaaataatcatgtttccgaaactttcctataaatattattaaagtttcccaatagaatttcaaaataattcctcctcatatttggaattcttatattctagtattatgacacagtagtggttatttccattgctgctactacatgtacttttagctattgacacttctgccgtttaattttgttttactgtatttctttatttcaagtggtcttcatcaagccaattctgataatgctactctatattatctgaagtgttgatggcagcttaatattagaggatgcttataaaatccctatagccaatgtcactgtcaact

SEQ ID NO: 251244 - DNA, 627 bp, Homo sapiens
gccctagatacaaaggttgaaagacctgtctgtgtttgataaagaattataaaaataaaaataaaaggaaaaatcagttgatctcagcaaaagctgaagattaaatatggcccacaaattcaagaacatgcagtataggakgaagcagctgtttgtcaccataaactcgtaaaaaataaagtgagaagcctttaatagacaagtgcctgataaaaatgttaaatccaagagtatgatgtttatggctattttttaaatacctgaatggattaagatacccagtggtagagttcatctaagagtgtaaaatccactaagacctttaagttaaacaaaacattccacggaaaagactgaatatgtggctactctattaagatctgtgagggaacatacaattatgttgaggcagaaatgtatgatgagatagagggtcagagaaacaaaggaatatagtaaatctagtataaatatccaaaaaataacttcatttatctattaatacatggtatgaattaaattcaaattgataagattattgacttacagagtgctgattttatacacttcctttgtgttgataataaatgaattcataatggacacattatcacagatatttgggta

SEQ ID NO: 251245 - DNA, 553 bp, Homo sapiens
ctctaaataaaaaaggaatcacctcaaaaagaaataagagagatttcttttgctcatttccttgcatttcaagcaattaagagcaatggaaaactactaaggtcttcaaaacctttcaagaacacaaagtgattttcaagacaatgtaatttttaaatattttaaagtgaagcaaaaaacttgtaaggagagaaaaagatgaagggaatgttatcaaagccagtagtaagaaacaatctgttagggrtacagactcttttaaattacacttaaaatatttgggcacaaaattagataaggctttcctgttacttactcttctgtctttttaactctcatctcttgctatctaggacaattaagctggctgaaagaacttctgcttcacatttgagacactttaaattgggaggaccatgacagatctacagaagttacaagtataggaatggaaatagcgaacactagagtttgaaatttcatatcatctaatgtttattaaatgagtgcacccaaaataaatccattagtgattataagctctaaaactgca

SEQ ID NO: 251246 - DNA, 617 bp, Homo sapiens
ttataattatgttttaccccacgtgttaagtttaaaaagcttaataaatgcttaatgcttaatagataatggagtaaagatgtcaagaagacaaacatgtaaatgtggagagagcggcaataaaatgccaacagaaagaaacttctattcatgttaagagaagtgcacatgggagatccccatttttaagggatttctggacaacctygtgtcaatgctcttaccaaaatactaccaaaagcacactgtagtctacaaagttgagtatattactctttgcacatagacaggttgcttactgtagaaaactatgaagtatctaagtaagagagtattagaaagaacttatgacccaacttgggttctggtttcctttcttaaggaaacagggattcattctccattggttgttgtgagaaaatggagcaattctatgagtgggtatctcaagaaatcttacctgtggaaaggacagactagattgaggacaaaacttaactgataaatgagtagacgttactgattttagcagaacacagtgatctcacttttgtcttacttcatcatgttcttagaatgaccttgtctgatgttggttttctgggagatataatgta

SEQ ID NO: 251247 - DNA, 611 bp, Homo sapiens
tgttagctatgaattataaaataattattttaaawtaagttcttaaaaaagagatattgtgatggccagggataactgtacgtccaataaaggattacagtgtgaatttgaacttcttattcacttattagtcaatacgtaaatattgactgtaagggctttttaaaaattctacctaggttttggattccttctttgtctttggcgataatacaacctccaacttgccttagaaacttcctcctagatttttccttcaggtcagggaaaaatatgccaaagatggcttaaactgtaccattacttatacaagtcaagttttttatttaataagaatatgtaaaattaaaatattaattagaaagtgaggaaagatctgtcagaacatttaagcagtgtgttccataaacagcagtgtgcttctcctgccccatgtgtaatctggtaacatggtgtctccttttagcttatgactcaaatataccctttggctttgcaattctttcctcagcaactggcctgtgaatagtcaatctgagtaatgatgtggataagaagtactcttaagttggtatatttagtttcctcataaggagttttaataccacttc

SEQ ID NO: 251248 - DNA, 611 bp, Homo sapiens
tgttagctatgaattataaaataattattttaaaataagttcttaaaaaagagatattgtgatggccagggataactgtacgtccaataaaggattacagtgtgaatttgaacttcttattcacttattagtcaatacgtaaatattgactgtaagggctttttaaaaattctacctaggttttggattccttctttrtctttggcgataatacaacctccaacttgccttagaaacttcctcctagatttttccttcaggtcagggaaaaatatgccaaagatggcttaaactgtaccattacttatacaagtcaagttttttatttaataagaatatgtaaaattaaaatattaattagaaagtgaggaaagatctgtcagaacatttaagcagtgtgttccataaacagcagtgtgcttctcctgccccatgtgtaatctggtaacatggtgtctccttttagcttatgactcaaatataccctttggctttgcaattctttcctcagcaactggcctgtgaatagtcaatctgagtaatgatgtggataagaagtactcttaagttggtatatttagtttcctcataaggagttttaataccacttc

SEQ ID NO: 251249 - DNA, 611 bp, Homo sapiens
tgttagctatgaattataaaataattattttaaaataagttcttaaaaaagagatattgtgatggccagggataactgtacgtccaataaaggattacagtgtgaatttgaacttcttattcacttattagtcaatacgtaaatattgactgtaagggctttttaaaaattctacctaggttttggattccttctttgtctttggcgataatacaacctccaacttgccttagaaacttcctcctagatttttccttcaggtcagggaaaaatatgccaaagatggcttaaactgtaccattacttatrcaagtcaagttttttatttaataagaatatgtaaaattaaaatattaattagaaagtgaggaaagatctgtcagaacatttaagcagtgtgttccataaacagcagtgtgcttctcctgccccatgtgtaatctggtaacatggtgtctccttttagcttatgactcaaatataccctttggctttgcaattctttcctcagcaactggcctgtgaatagtcaatctgagtaatgatgtggataagaagtactcttaagttggtatatttagtttcctcataaggagttttaataccacttc

SEQ ID NO: 251250 - DNA, 595 bp, Homo sapiens
tcaggcatgatccttctcttggatggtgctagagagagcaagcgagagtaagacgtgctaggctcttttaacaaccagccctcaaattaactaatagattgagaactcactctttactgcaggcagggcacgaaaccattcatgagggatccactctccatggcccaaacacctcccactaggtcccatctccaacactgggaatcacctttcaacaagagatttggacaggacaaatatccaaaccatatcaagcagacagagttgaattaaaggaggaggcgagtcatcttgtatctgtggtagatcatggccctgaaattatacttcaaaagagatgaggagcaattggaagaatttggtgaagggagcaataaactatggcttagctctcaaagagtttatttaggactgttatatatttwaaaaaaaaaacaaaagcagaaagatcaataaccaagctttcataatacctgtgaggagaaatgacagtggcttaagccaatgtggtagctgtgaaagtgcgggaagtttttaagtgaacagattttctgtcacattggatgtgtaatgtaagacaaagagaggcagcaag

SEQ ID NO: 251251 - DNA, 346 bp, Homo sapiens
tccttcttgcctaataagttataactactctaaggttaattacttcaacaagttcaagaaatagctctttaaaaattcctgcattcaaatcttttgcctatctcttccattgaaataatgcaagtcggcaagccatctggcaaaaagatcaataaatataatctgttagtcttctatcttgaagktagaaaggaggaagagaggggtggatgtggagctgacagataatacactacttggcactgggtactactttgactacttagcagaagagaatagacatgtttcttcccaatagactggaactattctttgtgccaagggaaactgggttgcgtttttgtga

SEQ ID NO: 251252 - DNA, 622 bp, Homo sapiens
aaatactgattcatgctacaacatggatgaactgtgaaaatagtattccaagtgawaaaagcctgacataaaggaccatatctcatatgagaccattttataaaaaatgcccagaataggtaaatctataagacaggaagcagattagtagcttcctaggctggggtagagagtgagggaaaaggcagagtgaatgctgatgggcagggggcttctttctggggttatgaaaatattccaaaattgactgtgatgaaggtggcacagtcctgtgaacatactaaaaaccactgaattgtacacttcaaatgggtgaattttatggtatatgaattatacctctataaaactatatatacacaaatatacatatatgtatacctatatgtatatatatgtatatatacatacacacacacacacacacacacacacacacacatatatatatatatatatatatatatatatatagtaagaatcactgtcctaaatgaatgagaatgtacgttgcccttagagatttttctgagaaacctcatggccgattggggaaaccattctggtgactggcagaatcccctaccacaaaatggttcccatgctcaacaagaacccttct

SEQ ID NO: 251253 - DNA, 622 bp, Homo sapiens
aaatactgattcatgctacaacatggatgaactgtgaaaatagtattccaagtgataaaagcctgacataaaggaccatatctcatatgagaccattttataaaaaatgcccagaataggtaaatctataagacaggaagcagattagtagcttcctaggctggggtagagagtgagggaaaaggcagagtgaatgctgatgggcagggggcttctttctggggttatgaaaatattccaaaattgactgtgatgaaggtggcacagtcctgtgaacatactaaaaaccactgaattgtacacttcaaatgggtgaattttatggtatatgaattatacctctataaaactatatatacacawatatacatatatgtatacctatatgtatatatatgtatatatacatacacacacacacacacacacacacacacacacatatatatatatatatatatatatatatatatagtaagaatcactgtcctaaatgaatgagaatgtacgttgcccttagagatttttctgagaaacctcatggccgattggggaaaccattctggtgactggcagaatcccctaccacaaaatggttcccatgctcaacaagaacccttct

SEQ ID NO: 251254 - DNA, 622 bp, Homo sapiens
aaatactgattcatgctacaacatggatgaactgtgaaaatagtattccaagtgataaaagcctgacataaaggaccatatctcatatgagaccattttataaaaaatgcccagaataggtaaatctataagacaggaagcagattagtagcttcctaggctggggtagagagtgagggaaaaggcagagtgaatgctgatgggcagggggcttctttctggggttatgaaaatattccaaaattgactgtgatgaaggtggcacagtcctgtgaacatactaaaaaccactgaattgtacacttcaaatgggtgaattttatggtatatgaattatacctctataaaactatatatacacaaatatacatatatgtatacctatatgtatatatatgtatatatacatacacacacacacacacacacacacacacacacatatatatatatatatatatatatatatatatagtaagaatcactgtcctaaatgaatgagaatgtacgttgcccttagagatttttctgagaaaccycatggccgattggggaaaccattctggtgactggcagaatcccctaccacaaaatggttcccatgctcaacaagaacccttct

SEQ ID NO: 251255 - DNA, 553 bp, Homo sapiens
atatttcaaaatagctaaaagagagggttttaaaaaagaggattttaaatgctttcaccacaaataaatgataaatatctgaggtgatggatatgctagtaaggctgatgtgatcattctgtaatgtatacgtgtattgaaacattacattgtaacccataaataataaacaattattatttgtcacttaaaaataaaatgaaactataaaaaaaaagtcaaacttaacctacaatgagagaatgttagaagaatcagtcaggcatcaagagttacgggatcaagaagagggcattctcagtcatctcagctgtcaacmgtggaattcagttctggcttggtgaaacagaggacattattttcagaattctagcagaggttgaaaaactagacttagagcctatacagctaggaactgatcaaacctgcagtcttccccaccaggttggattctattcagttcatccttttgctcttccagcttcagatttaaactctcaggtgggtgcaccccattggtggagcccagttgcaagggaaactgagaaaagga

SEQ ID NO: 251256 - DNA, 553 bp, Homo sapiens
atatttcaaaatagctaaaagagagggttttaaaaaagaggattttaaatgctttcaccacaaataaatgataaatatctgaggtgatggatatgctagtaaggctgatgtgatcattctgtaatgtatacgtgtattgaaacattacattgtaacccataaataataaacaattattatttgtcacttaaaaataaaatgaaactataaaaaaaaagtcaaacttaacctacaatgagagaatgttagaagaatcagtcaggcatcaagagttacgggatcaagaagagggcattctcagtcatctcagctgtcaaccgtggaattcagttctggcttggtgaaacagaggacattattttcagaattctagcagaggttgaaaaactagacttagagcctatacagctaggaaytgatcaaacctgcagtcttccccaccaggttggattctattcagttcatccttttgctcttccagcttcagatttaaactctcaggtgggtgcaccccattggtggagcccagttgcaagggaaactgagaaaagga

SEQ ID NO: 251257 - DNA, 617 bp, Homo sapiens
accatatgacgatgctgatgcagtattgctgtgtgtactctactttgcctgctgacctccccttagctgacttcccctttctgtgatgcatgcaaactcagagggaagatataccagtccttctctaatgcagagcactcttgttggactgatcactcataaatcgctgctgtcttatagatgcaggttccatatagggcacccatccttagtcccatggactatggccaggagagcagggtcacatggaacaaagcataaaaaactccttgaaggaggccacaggggcatggcaatccctttgatacttcccagcaaggggcaaaataatgagcagacaccttgctctggtaacccatgaygaagtctggctgccctctaagatggtttttgaaacttttgggaattaaaaaaataggtccttttaatgattttgatgtctactggggatcaggaaggtgcgtaagtacacttccttaaatacaacacaaccctgaaatcataacacaaccttttaaattctcagaaaaaaaactacacattgatattgacattatactcttgacagtgaaatagcattactccagtagacgtccagcaaggtttccaagggcgtg

SEQ ID NO: 251258 - DNA, 617 bp, Homo sapiens
accatatgacgatgctgatgcagtattgctgtgtgtactctactttgcctgctgacctccccttagctgacttcccctttctgtgatgcatgcaaactcagagggaagatataccagtccttctctaatgcagagcactcttgttggactgatcactcataaatcgctgctgtcttatagatgcaggttccatatagggcacccatccttagtcccatggactatggccaggagagcagggtcacatggaacaaagcataaaaaactccttgaaggaggccacaggggcatggcaatccctttgatacttcccagcaaggggcaaaataatgagcagacaccttgctctggtaacccatgatgaagtctggctgccctctaagatggtttttgaaacttttgggaattaaaaaaataggtccttttaatgattttgatgtctactggggatcaggaaggtgcgtaagtacacttccttaaatacaacacaaccctgaaatcataacacaaccttttaaattctcagaaaaaaaactacacattgatattgacattatactcttgacaktgaaatagcattactccagtagacgtccagcaaggtttccaagggcgtg

SEQ ID NO: 251259 - DNA, 603 bp, Homo sapiens
cagacaggccaatggtacagtgtatccatgatccatgtgtacagtaggcgaatgaagctacagtaagtaatacaaaaagctacttcttttgcagcttgattgaaacagtccactggtggttgcttggttgtcagtttgagcttgtctgtgtgacttcttttctgctccttacttccatccatcattgcagagagcacagaagaaggaatatatatagtgccctgtgcttgcttaggccttagcaaatatcaattcatcaccaacttggctctaaaagagaccattcattggcatgttagaacattacaatttacccagtgttccctggtgttgaaggagtcacatgaccggatctcaaaacaaaaaagaattccatgatatgttcttggagttattaataaaaataactgctggttgacaggaaaggcatatggcaaatttaagatgcatggccacagtattttatttaaaaaaaaattctttcctacaccagggatgagtgtgtgtgtgtgtgtgtgtgtgtgtgtgtgtrtgttttacgcaccagaaaaaccttcaactctgacaagccattgacgaggtgtttcagtcttcactagcttc

SEQ ID NO: 251260 - DNA, 610 bp, Homo sapiens
caggactctgctcacaagatatacatgggtcacattaagtagatttgcactgcagcctgaatatggagttttaagactgcagtaatcagtgttggaagaygattggtttttcttgttataaattgctcaattagtattgaataatctcaacctgtcctggttgaacagcctctactatattttctctgcagaaagtggtttggacagtaatctatttatctccagtacccctcttccctctagttacaaatacaacatcgtagaaacctctggggactccccctgttgagttgtgcttggaaggagctttaaaacagtgcctccaaactgaagtaaatattgactgggtctggggcttgagccctgctcaaagcctcctattgttcctccttagtcagcactccagagcgggctcaagtatgcatgtgttaggaagagaagaaaggctgtggagggaaattaacagggcccacagccgaactcataaatgcaccatatagaggaaagggaagctgactacaaagccagctggagcttacactgggttatggagaacttaggagactgaagtgcagaaacgctgaccagtctgtctgctttagtgaagttt

SEQ ID NO: 251261 - DNA, 634 bp, Homo sapiens
aatttattgtagacagttatacccacgatgcattgtgagatgctgaagaaagtgtatatagtagctacatatttacaccaagaagtttgcttgtctggctcttaaatttccagaattgaatatgatagaaataggttgatattttgttaagatgcaaaataaatcattttacttaaatacatacatatactgcattttacataatcttatcaactatatttcattttcttgtgttttatattgtcagggtgataacatcacagagatgctatttttgaaaaaattttgcattataggggctttatgcatttcayaattgtctttgatatgttatttaaaatatgcttaatagttgcctacaatgtactgacagtcatattcaaaagtctcaatttcagtggaatatatataataaaatactatttctggagaaacttagagaactgacccaaatgtctgtacttttctcatacaggaaaatcccatacaatgaagctttttaaataagctttaaaaaaatttatttgtggtcaaggacattctatattaagaaccactttcagtgatagtacccactgatagtaagtagaagtatccccctcaccatgtaaatatttttttcagaagcagttga

SEQ ID NO: 251262 - DNA, 538 bp, Homo sapiens
aatacctttgggaaagaaggcaggaaagcttaagctgataaaacatgactcttttttgatgggggctctctttggataacttgcccttgtctaaattcttctctcttctggtccttcctgtccccactcccccattcactccccctctcgtcaagcttacttcataaatggtaccagctggagatcttttagtggcattcagggattacttcccttcggggttttaataagccctgatgcttgaaacacagtgaaggtgcttctggagacaaycacctttcaggctgggaccatgggacccttttgggggcccagatggttgtgtctggagagcaccccaggatgtgctgcagatggcagatcactgaagcagggtgtccacgggcctgaatgatcaggaagcaatcaatagagggatgggtttctgtgcagtcaatagagggtgcttcctatgatttctcaacccacttgactcacaacccacaaatcctcctgtaaatggttggatttgaatctatgaccagccagaattgctacc

SEQ ID NO: 251263 - DNA, 564 bp, Homo sapiens
ttttctattttattttttgcactagatttaaaaatttcttgatggaggagtctgtcttctgcacagtaggtactcaacacagtttgatattcacaatggtgagtttactacatattaggaacttttttaaaaaatgatgctcagcttcttttataggatccttcattactttatgtctaattctagttttttttwatgggccatgggaccaagctagaacataccaattatactatacttcaaactttgattctcaagtcaaaatctgttacagaaatactgttgctgtgggtgcaagcaacctaataaatactttcaacttcatttcacaaaaagtgacctagaatgctgatttagaaaaaatataagcttaaaaatgacgctatctgcttgtatgtgagagagagagagatggagagagagacagacgatgggcggaggggaggaaagagctaggtagaatgataaatgaaaatctaaaaaggcgggcttcacttcactggtattaatttggtaaattatccataatttattagagcttgtaaacattgtggcaaaattttt

SEQ ID NO: 251264 - DNA, 564 bp, Homo sapiens
ttttctattttattttttgcactagatttaaaaatttcttgatggaggagtctgtcttctgcacagtaggtactcaacacagtttgatattcacaatggtgagtttactacatattaggaacttttttaaaaaatgatgctcagcttcttttataggatccttcattactttatgtctaattctagttttttttaatgggccatgggaccaagctagaacataccaattatactatacttcaaactttgattctcaagtcaaaatctgttacagaaatactgttgctgtgggtgcaagcaacctaataaatactttcaacttcatttcacaaaaagtgacctagaatgctgatttagaaaaaatataagcttaaaaatgacgctatctgcttgtatgtgagagagagagagatggagagagagacagacgatgggcggaggggaggaaagagctaggtagaatgataaatgaaaatctaaaaaggcgggcttcayttcactggtattaatttggtaaattatccataatttattagagcttgtaaacattgtggcaaaattttt

SEQ ID NO: 251265 - DNA, 540 bp, Homo sapiens
tgccactcgtgcagcaaggtggggcatattgaagttctgctggaagtgaatttggggtgcagcctctttggtggatgaaaacatttcaactaaatgatgaattcaccctgtgctttttttgaactgaaattatcaagtcatgttgctcatttctattattcagacagagagagagaaaaggactataatactattaactgtggcttttattattattattattctggtatggaatrattttattcaagggtggtcttttttttttcttttttctttttaagactgggtcacacaactatatgtttcttggagcctcttgtctgtcatgcagttctaaagagaaacactgtggataaagaaaagacttcagcagcagacctgagttagaatgctggttcagccactagccgttcaaacagtagtaatgattacagtaatggccactattttttgcttattctgtactagctctttgtatatattttacttcattctcttagctctggaaagttgaacctggctccatgtcacacagttggt

SEQ ID NO: 251266 - DNA, 615 bp, Homo sapiens
tggctctggccatgaggaatgagcagccaccttcccaggcctcctatgctgtccagatccttcagcacccatggggttgcctgacccatgcagaaatagcacctctcaaatgtaaaaagggattggttagtacctatggctctctggaaatggaagtcattccttataaggtatttgtctacctttcaacttttggatttttgactgtcaaacacatttttaggacagtaatctgtagtcaagctcattatagggtcttcttagaaaagaaagacattaacaaagaaaactgtaaaatagctgtcatcatgggcaaagtgccctcacatggttccactaaatgcagagatgcttttagatgtgctcagatttctgatgggtacacaaaactgtggtcctgaaacacagggaacractcttgtcagcaatattctgagatgtcaaatgtcaatttaacatggaaatattataacaagttaataatttaaaagttctattttaatatgattgaatcatataatactaatagtaaattgtcattgatataatcaataagtgtttcctcatctttatatgtatgcgagacagtgttaggactacaacactgaatttact

SEQ ID NO: 251267 - DNA, 511 bp, Homo sapiens
gccttgccttctctgtcctctgtgtttgaagttgagagctgggaacagacatgagattgaggtcccagggagaagccaagttcagcctgagctggtgaactcactgagactaagggcagataatgtgaactaaagatactcacttatgacatttgtgccagtaagggaaagacccactgcgcctttacaaacaggtttctttttggktgtcttaacggatggcgcctagctgaacgtcttggcagttttccttaagtaagcgtctccaattgatgatgatgggaatgagcttaacacacaagccagtattacataggattttctgccaaagacattgaatgcaccaattctgaagggaatcatcataagggacagcgggctgatcttacaaaacatcagcatgcttatgcaagaccccaacagcaacaaaaatgacaaagaattaggtgaaaaggaaggcaaaagcttgggaagaaacatgaaaatgtccgtgtgaagacatgtgtaaaaa

SEQ ID NO: 251268 - DNA, 511 bp, Homo sapiens
gccttgccttctctgtcctctgtgtttgaagttgagagctgggaacagacatgagattgaggtcccagggagaagccaagttcagcctgagctggtgaactcactgagactaagggcagataatgtgaactaaagatactcacttatgacatttgtgccagtaagggaaagacccactgcgcctttacaaacaggtttctttttggttgtcttaacggatggcgcctagctgaacgtcttggcagttttccttaagtaagcgtctccaattgatgatgatgggaatgagcttaacacacaagccagtattacataggattttctgccaaagacattgaatgcaccaattctgaagggaatcatcataagggacagcgggctgatcttacaaaacatcagcatgcttatgcaagaccccaacagcaacraaaatgacaaagaattaggtgaaaaggaaggcaaaagcttgggaagaaacatgaaaatgtccgtgtgaagacatgtgtaaaaa

SEQ ID NO: 251269 - DNA, 547 bp, Homo sapiens
aggagtctttttttaagtgtgtgatgtctgtgaagctgcagtaattttgggtgctccctcttgtgaagatctatgtatgcatgacaaggaatgcagcatttaggtatttgcttacgtgttttaaaatatcattaagaaaagcattggaaatgatggctgtgttttgtgttttattttttaagcagactgttttattctaagctccttttaagcgagctggaaaccatctccactgacacagccttttcctttacgtttgaactttcctggcaaaaatgactcgtcgatagagtccaagctagttcattccctttgtgtgtagaaaattagacacatgaatgccacaaattaatcaaatgtaagtccagaatagaaggctctcacccagtaacatgactgtgaaagctgctttgaataagagggaaaggacccatcaaatatacatgaaaaatagtgagtttatgaaggcccagggattgttgggcttgaccggwcctgcgtgccatcacttagaggggggcaggagcagagggtaggagcgagggga

SEQ ID NO: 251270 - DNA, 547 bp, Homo sapiens
aggagtctttttttaagtgtgtgatgtctgtgaagctgcagtaattttgggtgctccctcttgtgaagatctatgtatgcatgacaaggaatgcagcatttaggtatttgcttacgtgttttaaaatatcattaagaaaagcattggaaatgatggctgtgttttgtgttttattttttaagcagactgttttattctaagctccttttaagcgagctggaaaccatctccactgacacagccttttcctttacgtttgaactttcctggcaaaaatgactcgtcgatagagtccaagctagttcattccctttgtgtgtagaaaattagacacatgaatgccacaaattaatcaaatgtaagtccagaatagaaggctctcacccagtaacatgactgtgaaagctgctttgaataagagggaaaggacccatcaaatatacatgaaaaatagtgagtttatgaaggcccagggattgttgggcttgaccggtcytgcgtgccatcacttagaggggggcaggagcagagggtaggagcgagggga

SEQ ID NO: 251271 - DNA, 580 bp, Homo sapiens
gcagaggagaatagaaatgatcacaaaggaggaaaaagaaagaaagaaaaaaatactaattagaagagcacagtgactagaggccatgggctttgggataaaaagccctagatactggcaggaggcaggagacgtagccatctgggaaaaatcataaagaagtcaggctaaacctacagacctcgaaggctcccgagtgcattccggtattaccaaggagttcaataaatggtgttcttaatgagggtcctggttctttgagaaaactcaccatacttagtcaaatcacttcttgtaatgactgtgacattttagaacatttgcaatgagagcagttataactgtttcattgtttaaaggattaagcagatttaagccgaactcctccttcctggacactctagatgaattagctactgtaaggaaggktgtagttcaaggtgcatcaaagagtcactactccttttaatggaattttcccccattccagtcttagcttagaaaggaaagaatatacagaattgactgtagtttctcaaggaaatatcatggcaatttttatccctcactttcatataaa

SEQ ID NO: 251272 - DNA, 507 bp, Homo sapiens
tcctatactgtttgaccggaattcacaagttcacattttcttcaggtatctttgaatctaggagattagtgagtctataatcaatcaatcagcaaaattttaataagatgacttaccatattcatgacctagtatttcattcttgcatccagagacttttttttggatttttgttttctgactttttcaaggccttttggaaaggggtctccaggccttggaaaagcagatggagtggtggatgatttctggggttggggatttgccatccacactgtctccttccctgcctccagccccaggtgcagaacttgctctaggggcaaaagcagtgaggacagaacagaggagtcactgcccagggggcctcctcctcctcctctcatacctgaggctgcagaggaagctgaagggcccaggggagctcctggccttggcctgygaggattcttggtggaagattccaggctggggagccaggccaaagcagacaggcagtactgggtc

SEQ ID NO: 251273 - DNA, 575 bp, Homo sapiens
ccaaaggagtcttggctcatagagaagataaacaggaaagacactatccaatgccacttcctccatgaagtcttccctgattcttgccagctccattggatattttcctgcttagaagcctggcgggggaggagrgattgttcttatggatctctcatgaccttagctttttatgccttggagtataaaggggaaatctgggtgcaaagcctgtatatgcatttgagtggggacaaagcagcagaaagaaagatacagagttaagcacaagatcttagcggaagatgaaaacctcagccaaatataagtgggggactctgcagtgaggcaagtggacacctcagaggacatgggagtgagagtggtgttgaaatcacccagttctaagctacagggagagggtagtgctcttggccttggtgcatatctgtgacccaggtcccctatccaaccatgagcctccaacgcaggcaagaagccggcctcttccttccagcctcctggcaccatcaggaagggttgcttggcaggccacctccggactttgatgcagaatgtccccaggttctataagc

SEQ ID NO: 251274 - DNA, 557 bp, Homo sapiens
gtgaagtatcacgtacctagtcctcaacataaatgcctgagctatataacaatatttattaactgtcrttggctaaagacttactaggctagccaactgaacctacaacaacttactaggtagttgttatgacctgaattgtatccccacccaaaatttatttttttaaatcccaacccccactacctcagaatgtgactatttggatatagagcctttaaagtggtaattaaggtaaaataaggccatatgggtgagccttcatccagtatgactggtgttcttataaggagagattacgacacagatacatagaggaaagacatgtgaagacaccagagaaccatggccatctacaaggtaaggagagaggccttagaagaaaccaaccctactcacaccttgatcttggaattctagcctctagaattgtaaagaaaataaatttcaattgtttaagccaccagtctgtggtacctgtaatggcaacactagaaaactatcatcataaagtagataaattattttatcctacttccggattcttttgaggttta

SEQ ID NO: 251275 - DNA, 623 bp, Homo sapiens
atcatttcaccttataaaagcaaataagtttatatttacagttaataattttatttcaatgcatgctagtttttcattttatttgccatgaggtgtcatgaacctccactatgggctaactaatctgctccatgggccacacatgtaccaaagaattgtgggaaccagagatggtcagaatacaatctcacacaatcttatacctttttttttctcattgtcaagaatacagaagaggccaagcacattggctcacacctgcaatcctggcactttgggaagccaagtaggatcacttcagcccaggagttcgagaccagcatgggcaacrtagtgagacttcatctctattttttaataatttaatttaattttaaaataatacaaaagagccaggggaaaggatctcagtatattagggatcagttgacattaacagtagaaagtaaagtcttctgacttgatatttcaaaacaatattaataataatgatcctaaacattttagcaatgcatttcagaacctactatagctttgtcccatttgatttccataatttgaggtggatataattatccccattctatcagtcaagaaatgaggactcagatgataatgaattt

SEQ ID NO: 251276 - DNA, 563 bp, Homo sapiens
aggcaggctataagtaacgtttttattctaggtacacaaactcaagctttcttttgcttttctttttaacacataatctcttggttgtttaatcttccatcatgtttctagagtaggtggggaggaaaaagaaacagggatgaaaagcagtaagatttggtgatcacgcatgaattctagttactagtgttaactgtacacttaactataatcktttgttctttaaaattttatattagccccagacttaagctcaccggtgaatttttttttttttttttttgagacggagttttgctcttgttgcccaggctagagtgcagtggcacgatctcggctcactgcaacctctgcctcccgggttcgagcgattgtcttgcctcagcctcccgagtagctgggattacaggcgcttgccaccacgcccagctaattttttttttttatttttagtagaaacggggtttcgccatgttggggaggctggtctcaaactcctgacctcaggtgatctacctgcctcggcttcccaaagtgctaggattacagacatgagccactgt

SEQ ID NO: 251277 - DNA, 563 bp, Homo sapiens
aggcaggctataagtaacgtttttattctaggtacacaaactcaagctttcttttgcttttctttttaacacataatctcttggttgtttaatcttccatcatgtttctagagtaggtggggaggaaaaagaaacagggatgaaaagcagtaagatttggtgatcacgcatgaattctagttactagtgttaactgtacacttaactataatcttttgttctttaaaattttatattagccccagacttaagctcaccggtgaatttttttttttttttttttgagacggagttttgctcttgttgcccaggctagagtgcagtggcacgatctcggctcactgcaacctctgcctcccgggttcgagcgattgtcttgcctcagcctcccgagtagctgggattacaggcgcttgccaccacgcccagctaattttttttttttatttttagtaraaacggggtttcgccatgttggggaggctggtctcaaactcctgacctcaggtgatctacctgcctcggcttcccaaagtgctaggattacagacatgagccactgt

SEQ ID NO: 251278 - DNA, 578 bp, Homo sapiens
  misc_feature (1)...(578): n = A,T,C or G
nnnnctcatggcctgtcctttctggtaactaacccccgtctggaagctatccctgatatccagtttcttattccctgatttggagtgaattcactgcaagctttttcaaagaccatacttagtgtcacctctgagcctttgcgagtgctccgctcactacctggtttcttctcccctctcccacgtcgcttagcttctacctttcctaggggaccaagcctcaagacaccctcctgtaggaggtctctgtgacmttcctgccgcctgctctgtcattagccatctcctcttcggtctcctgcggtaccctctgctggtcttcattcatgcccgagcccgacgtattccaattaccattggctcatcgtgtccccagtagactttaagagcaaagccttgattttttaaaaatgttttatatatttgggggatggaggtgcagatttcttcaacacatatattacgtagtgatgaagttcaggctttaacgtgcccatcacctgaatagtgaacatttttcttgatagataattttttagctctcaccctgcttccccgttttccagtctccagtgtct

SEQ ID NO: 251279 - DNA, 574 bp, Homo sapiens
agtaaagaggcgatgtttgagctgaggattgagtgtcagaaaagggcagccctgcataatccggggcagaatgttcccagggaagaaccagcaaagcatctgccctcaggcaggaatgacagagtgttccatgagaaagacactgggcaccaggagatgattcaggaggtgtgggcagggctggttacagaggttcgcatatgccaccttggagtttgaaccttattctcggtcctgtgggaagttgttggagggcttatgctgagtgcatcacagcctatgttttttaaaccttccccttggatgtttgatggaggataatggattgtaggaggtgaaatttaaaagggagaccaaactggaggctattgtggtcacccaagctaaagatgctggtcactttgacgggggaggttagggagaggagaaggccaaagtcggtggatctggcatctatttcggaagtagactctacagatggtgctcgtggttcagatgtgggagattaaacagaaggaatcaaagatacttcacrgacttttggcttgtggatcatctttagcctgagtagagg

SEQ ID NO: 251280 - DNA, 586 bp, Homo sapiens
ttcacacacttgcccactaggagaagatgaaaactcttccacgcccagctgctgctgtcctgctggtccactgagctttcctggtgattttgcgaggtcatggggccatcacatgctgtgttgcttccttytacttctcttgtacagatggtgatttcaaatggtctggtggtggtggtggcatttcccccacacacttgtatattttggagtttgtggggatacctttgtatctagttttattgtggatgtttactgtgtttttctatattaactgtgtgtgtgtgtgtgtgtgtgtgtgtgttgtgtgtttcccgggtgtgttagtggggatatggggagaatagaaaactatgccagtgttcctggcatcttgcttgaatccactgggatagcccccggtagtttttagtttgtatatagtctggttaaattgtgagtctattgctttgtagattctgaatttagcttcatgcttagaagagcttattcactttatgattaaaggaatatatttaggttttttgggattgtttttgtttttgtttcctttcttgcttttaaatctttgacccttctggaattt

SEQ ID NO: 251281 - DNA, 592 bp, Homo sapiens
aaatggttaacatccagactaaagagctacaagtcmacaagaataacacaaaataaagttggggtaaggaaatcaacagctgaactccatacagccagtaaacacagaaaagcaggttcaactttttttgttgttgttgagacggcctcacactgtcacccaggctggagtgcagtggtacagttttggctcgctgcagcctccgcctcactgggctcaagcgatcctctcacctcagccttcagagtagctgctaccacaggcatacaccaccatgcacagcttttttttttatatttttggtagagatggggtcttgccatgttgcccaggctgtcagcttctaattgttaacagattctggctgatatatgcaagttctgagaatcagtgattatgtgctcattagtgaccatggggactacttacttacagagtttagcatgttcacattatagctttgtctagctttgtatgagctttgaaaaaaatgcaagtgtaaaccctccatttacgttctcacacatatacttctaaaggtacaccagctatggaggcatcttatggaaaaaaaatggcattgaaagaaaaa

SEQ ID NO: 251282 - DNA, 525 bp, Homo sapiens
tgcccatagaaacactgagctaaaggctgggtgtggtggctcacgcctgtaatcccagcattttgggaggctgaggcaggtagatcacttgaggtcagcagttcgagaccagcctgaccaacacggtgaaaccccatctctattaaaaatacaatgccaggtgtggtggctcatgcctgtattcccagctacttgggaggctgatgcaggagaatcacttgaacccgggaggcggaggttgcatgagccgagatcacgccactgcactccagcctgggcaacagagcaagactgtctcaaaaaaaagaaaaaagaaaaaaaagaaacagctaagaatcatacattctctgtggggaaaaaayggatttgggtttaaattgggtccacacccctggcctttgaggtaaccttgcagacacagaacatttactccatgtagtctttggtttgggagcatgtagcttgactgtgccaggttgccttcaagaactgcttggttctggggagtaattcatggatgggcct

SEQ ID NO: 251283 - DNA, 612 bp, Homo sapiens
tcctctctcctaatttctctgcctcatctccatcattctcattggctctttagcactaaattcttcttctgttatgcagagaagttttcacccttagagcacttgagcacctacctatagtcagatcctcagggactttcttcctatcccaagggcacgttcaaaatagctcttctaggccagctgcagtgactcactcctgtaatcctagcactttgggaggctgagatgggtggatcacctggggtcaggagttcgagaccagccaggccaacatggtgaaaccccatctttactaaaaatacaaaaattagctgggtgtggcagcttgcatgcgtagtcccagcaactcgggaggctgagctaggagaaccgcttgaaactgggaggcagaggttgcagtgggatgacatcacaccactgcactccagcctggacaacaaagggagactctgtctcaaaaaaaaawatatatatatatatatatatatatatatttatatataaaaatatatatatttatatatatatttatatatatatatttatatatatatatatataaatatcttctagcaaagacatttttcttccttccccaagaggattctg

SEQ ID NO: 251284 - DNA, 612 bp, Homo sapiens
tcctctctcctaatttctctgcctcatctccatcattctcattggctctttagcactaaattcttcttctgttatgcagagaagttttcacccttagagcacttgagcacctacctatagtcagatcctcagggactttcttcctatcccaagggcacgttcaaaatagctcttctaggccagctgcagtgactcactcctgtaatcctagcactttgggaggctgagatgggtggatcacctggggtcaggagttcgagaccagccaggccaacatggtgaaaccccatctttactaaaaatacaaaaattagctgggtgtggcagcttgcatgcgtagtcccagcaactcgggaggctgagctaggagaaccgcttgaaactgggaggcagaggttgcagtgggatgacatcacaccactgcactccagcctggacaacaaagggagactctgtctcaaaaaaaaatatatatatatatatatatwtatatatatttatatataaaaatatatatatttatatatatatttatatatatatatttatatatatatatatataaatatcttctagcaaagacatttttcttccttccccaagaggattctg

SEQ ID NO: 251285 - DNA, 537 bp, Homo sapiens
gagtaagacagtcataaacagaaaatccatcctgtataaggtaggcactgactcaacatgggagggcacatcagtcgattcttgctgaggcttgagagatgaggaggtataaattatccctcataattcaaacttaacccaaggtattgtccctgtatttactgaacaagaatgtgatatagaagaggcagtttagacctccaagcaacctatagttaatgggtaagatctaggttggaastggcctgccactgattaccctaggcaacctggttaaccattcacagctagttgcctaatctgtactataacaatatttattggatacttactgagtgacaggtgttctaagcactagactggttttctcatttaatcttcacagcaaccctatgcaatgagaactatttactgtccctatgttacagatcatggagaggttagataagtgacccaaggttgcacccttagtaagtagataacaagcccttgccacagacttgggggatgattaagtaaaatgatgtctataaaaaa

SEQ ID NO: 251286 - DNA, 622 bp, Homo sapiens
tgctgtcctcttgctctctttctttcattttttttggtaccaatatctaactcagcattactgcctaaatacataaagcctgtattccatgctgaaacttaacagcacaagtgtacatcatttaaaaaaamgaaaacaaaaaaaaccaaaaaacagaaaaaaagagggctatttctgcaagttaaaaaattaaatggaaaaacaaccccaaaattgctctaaggaggttttgccttcaatagcaaaacatgttttgcctcaattgtgatttctttgttcgggagccaaggtggcaattaagctggcacaaggagcaggagccatttatttaatatgatgacagcgtagccctttgtaaatcctggaacaatgagggcccacacacaggctcattccaagttctagttccttctcttccctgttgctcagtgtgaattctcatagccacaaaggaaggggaagattttcaatcctgtcacatcctcccccatttaaaccatttatagtcttaacttataagatatgagtaagaaatcttctttaaacattttgcagagctgatcatcaaatctaacaaactggtggttttgaaatctcctttgctccaaagacattccattaa

SEQ ID NO: 251287 - DNA, 631 bp, Homo sapiens
taatggaatgctatacagtcatacaaaaatgcaatcatgtcctctgcaaaacgtggatggagctagaggcattatccttagcaaactaaygcaggaacacaaaaccaaatactgtatgctctcacttgtaagtgggagctaaataatgaaaatacatggacacaaagaggatcagcatactggggcctaccagagggtggagggtggtatgagggagacaaccagagaaaataactattgggtagtaggcttagttcctgggtgatgaaataatctgtacaacaaacccccatgacaggagcttacctatattaaaaaaaatctccatatgtacccctgaacctaaaataaaagttttgttttttaaaataagatgaaatgcatagggcaaaggtaaatctgtttgtggaaaaacagcaaaaggaagcactgtttcctggcaataagtataactcttttcttaaggtctgcccttctccttaccccgatctccaacttgttggaaagctaagattattgaccttctgtgaactctgtatctagttaacttctttcattcaaccctttagggactcaagcaaacagcatcactgacaccattgacagtttgggattccaaggtggctatgca

SEQ ID NO: 251288 - DNA, 568 bp, Homo sapiens
aaacacagagaactggaacaatgatacttaagaacttaggcttacattttttcccttatgaactgaaaattctttcacattacttaactagacatcaagatattccctcaaaattggtagagatgggtataattatttccattttaagaaaatagaaactgaggcacagaaagtttaaatgactcactctaaaaacacatagtcagccaataagccaagagtgcatcctggcccccaaatcacaaggccaaaaatttacaggattagaggacaaacacaaattatctctataattcctgttatccttaagatattaccaacttaaagagatagttcaggttcctttataagcctttataagttgaggttcctttaagcatttaaaatgcccacaggaaatgtgcacaagtgccttctcaaacaaaacccgtagtcctgactatagtttatttgtataggtatctctctgcctgctcttattagattataagcacctttagggcmcagtgtctcctttagcttgcataaccacttaggtggttttcaaacctgcctgtacattggaatc

SEQ ID NO: 251289 - DNA, 556 bp, Homo sapiens
  misc_feature (1)...(556): n = A,T,C or G
atgtttattctgaatgcaaaattactgagaaacttttcaaaagggtaatgttaaaagcttgccagctgaatagtgtttataatatattgttacgtgaaaacaacaagctatacaatggtacagttagtcagtatttaaacattccatttatcagcattggaaaaaataccaaaaggacataagccacaatgatagcagtggttatcttaagtagaggagttgcaagtgatttggtctyctccctgtaccccatgcctctgtattttgctatgtttccaaagtttctgcattgagcttgtattagctttgtaagcaggagaaaaggccatttttaaagtaaccacaggctgggcgcggtggctcatacctgcaatcccagcacttttggaggccaaggtggacagaccatgaggtctggagtttgagaccagcctggccaacatagtgaaaccccatctctactaaaaatacaaaaaaaattagctgggcatggtggcaggtgcctctagtcccagctactnnnnnnnnnnnnnnnnnnnnnnnnnnnnnnnnnnnn

SEQ ID NO: 251290 - DNA, 564 bp, Homo sapiens
aatatatatcactgcagaaccatctgccacaggcatcatgttattcctgctacatttctatgcctgagggccaggagggcagttcagccctcaaacacaaggagaagaggaatgatgggtctcctgggggttccctagaggagaatggggaccaggcccctcctgggctagtcgggctttggatggcagctcagctccttcttcctgaatagactgccaaagacttgttctccgtggaataacatccacttattcctgtggaaatggagaaacaaggagctttttcttctatgtgctcaaaggctcaagayaaagaggaattagtttaaagaaatgagttttagaattggaagaagttggaatcaagcttctccatccggcctgtgtccttggaatccatgaagaaatttaaaaatagtatgtttcttcaccaaaggggaaggatttaaatttatctggactcaatatatgaagctatatttcagctgtattaacttattagtagtctttttgaagagtgatttagttcttactgatatgatattttgtgtcaaaagtacctct

SEQ ID NO: 251291 - DNA, 526 bp, Homo sapiens
ttcccccacatatggctagaaataagtagaaacaagtacagaatgtctcatgcttgtggttcctttgtgaattggcacacattccttcttcctctggggatacaatttgccccttctctaactatcttaaaatacttcaacataggttkggttttttgtttgttcttttttaaaaaatcaagatcgtgattctgactttctgtatctcctcttccttgggctccatgcagagattgagatcccctgctatgatttgtctattttttttctgcagataatgtcagtttttacatttgaaacttcagatgtttcaaatttttgttgaggaattttagagctatggccaatgtttttgatgtagtttatgcttccagcttaaatttttgctttgcagcaatgaacattttaatcaccattcaataatctcaaccggtgaccttttccaaaaaaatttgttcatgtaaataagttagattttaggtatatcattaaaacagaaagcgaacttttgcatgtgagaagaaat

SEQ ID NO: 251292 - DNA, 533 bp, Homo sapiens
atatactgcttaaatcctcataatagttcacacacacacacacacacacacacacacacacacacacayatatatatatatatatatagagagagagagagagagagagagatgaaaaagctgaggctcgagtcctttatttaaaatacagctctaggaccatctaacttccaagctctaaaatccatgctttgacaagccaaagaaccagacacggtgaagaagggtgagaagacagggacataaaggaaagtcctggagattggggtgagacagtgcacaaggagcagaaattagagaagaggatgtggaagagacatgtggaaagggccaggaagaaagggagaagaaaatgcagggactgccagggctacagttcaagtggataattccagtcctggtagcaattagagctgacccatttggcagtgcctgcccctctgcaggggtttgttgccaccctctttcctgccaagactgtttacacaaccttttttagccctggctagagtagcctggttctatccagcatg

SEQ ID NO: 251293 - DNA, 604 bp, Homo sapiens
atttttatgttttacattttacattttgattattgtgcagaaactgacagaatttaaaaaaatggacttcagaagttcaaaatttatcatttttgaagaagtttatttagaataggattttataactaatttggactcttcatcacattgatggatataatacttagaattataaattgctagatttgataaatacctaacaaaatgtttatttttttcagtcatacttgaccacaaaacaaatattttactaaatttccagagtcatttctctgaaaaatagtataatggcatgataacatttcackaaatcctatttatcttctgggaaatattttaatttagcttttggatttcctaatatgataagcttatatattcatggtatgaattcctttaaaaagagcatctgctcttggacttgtatctgttgcatcttgtcaatgtttgactcatggtcagcatccaatagttgttaaatgaataaataaaatataatacattacctatgtatcaaaaagcatgtgtaagaaagccaaatatgttaactgttctactttatttatgtaattatattttcattagtattttagtagatggggct

SEQ ID NO: 251294 - DNA, 389 bp, Homo sapiens
cttgggagcacaccccttctctttgaacagcaatatgatttctgctcaartaggcacacaaatatttttggtgtccccagaatctacttggatgaataaggtttatttttttttgttttacattcccccaaagccaaatgtggccactgttgttcttccacttatcaaatctttcatcaaatttccatttcagtagtggaagagcagaaagaagaaagtgtgtaaaattggacacatttctatgatcagaatataaagaaaactaagcactacaggactctattgtccaagctgaaacttacatggcatccaattcctttgtgggaggccctgttggctcagagatattatttccttcagtggtattcttatcaagatactttgcattt

SEQ ID NO: 251295 - DNA, 610 bp, Homo sapiens
gtttatatgcatgaactgcacatatttttttcctcaaaaattctttgtcaatcacctgttatctctatatacattgttgtgccaggttcctgcaaggactcattgagagcaagtgccaaataatcttttgaaatgttaataattaagagattatatatttatacacatatacatgattacatatattatatacaaggagataaggcaggaaagatcccatagactctttaatattatttttcattcaaatctgtcattacctgcttctttactgatgcgacacattaaactaattttattctgactcaagtaatttaaatcaatgaacactacctcatgaagtgctgggaaagaaagagataataaaatgtgattattaagccagtggatcctgccactatctttgacagcaataattaacccttatcttatatgagcaggcgctcatctgaactccatacataagcaaagctatgaatagtactgtttaatacacatgaaaactgaggtacaaaggtcagtgaggtgattagggaagttaaaaatagggcctttttyttctgacacttgcttttgaagctagggatctagatttagacttcttcttaga

SEQ ID NO: 251296 - DNA, 620 bp, Homo sapiens
attgactgacatattggacaacgtctttgataagacttctacagctgcttgggtgaatggctgaacttgtgtgggtttggacttgagcacattagtatctttattyatatgtgaacacatgttcatgaacttatgactgtcatgcatgagtttatatatactataaaaactatagggaagttcaatatcatagtctttatacagtgaaccaaagctctgtgtttgattcatattttgccactattaacagttgaaaccatttaactgcattgaaaaggatcattatttgacaatctaaactaaaattaaagtatctccaaacttatatagtcatgaagattggttgaatgattttgcacagaaagatatcagaattataaaagccctgctaaacaaaaatgaaagtcaaaggactattaaaactggcaacacttcaaaccagaaccaaaattacttactggtggtcctctttctccagacaggttccagatagttatccctggtcttccccagcagtaacacaaaagtcaaatgcatattctagttagtttaagtgcaaatagacctcattatatatttgaattaattgtttatagtagactgactcaaacctgaacttt

SEQ ID NO: 251297 - DNA, 629 bp, Homo sapiens
atttataaagctgatctaaacctctatgggggaaaaagccaccaatatttctcctaacttacttggatttattttcagtgtcagacaagacataacatttattatgattcaccttagcatgatgacatttcatttttcttgttgaagaagatgttccagaaaaaagaaaaaaaaagttcaaaatctctttagtcttctggatgtctcataataaatgaggggttctgcttttcttcagtgcttcaatagcaagaagtgtttatatttcaggccaagcccccaccgaatatttacaaaatttgttgtgaggtgttgaaatataaatctaaagtttgaaacctacatcaaatataagagaaaagtccaattttcttaaartgtgaaacaaaaagtcagaagtaaaaatgtaaatattttaaagtcttatttaaatccttaagtgtcttcctcataaataacacataaaacttgttttatcaaatgttctttggttgtgtcattcagaatataatacactgaattatcttagaggaataaaagatacagagtttagtttattaaaactttagagatattagacatatatacatgaaattaatctgtatgaacaaagttttacagttttgaaa

SEQ ID NO: 251298 - DNA, 629 bp, Homo sapiens
atttataaagctgatctaaacctctatgggggaaaaagccaccaatatttctcctaacttacttggatttattttcagtgtcagacaagacataacatttattatgattcaccttagcatgatgacatttcatttttcttgttgaagaagatgttccagaaaaaagaaaaaaaaagttcaaaatctctttagtcttctggatgtctcataataaatgaggggttctgcttttcttcagtgcttcaatagcaagaagtgtttatatttcaggccaagcccccaccgaatatttacaaaatttgttgtgaggtgttgaaatataaatctaaagtttgaaacctacatcaaatataagagaaaagtccaattttcttaaaatgtgaaacaaaaagtcagaagtaaaaatgtaaatattttaaagtcttatttaaatccttaagtgtcttcctcataaataacacataaaacttgttttatcaaatgttctttggttgtgtcattcagaatataatacactgaatyatcttagaggaataaaagatacagagtttagtttattaaaactttagagatattagacatatatacatgaaattaatctgtatgaacaaagttttacagttttgaaa

SEQ ID NO: 251299 - DNA, 620 bp, Homo sapiens
attgactgacatattggacaacgtctttgataagacttctacagctgcttgggtgaatggctgaacttgtgtgggtttggacttgagcacattagtatctttatttatatgtgaacacatgttcatgaacttatgactgtcatgcatgagtttatatatactataaaaactatagggaagttcaatatcatagtctttatacagtgaaccaaagctctgtgtttgattcatattttgccactattaacagttgaaaccatttaactgcattgaaaaggatcattatttgacaatctaaactaaaattaaagtatctccaaacttatatagtcatgaagattggttgaatgattttgcacagaaagatatcagaattataaaagccctgctaaacaaaaatgaaagtcaaaggackattaaaactggcaacacttcaaaccagaaccaaaattacttactggtggtcctctttctccagacaggttccagatagttatccctggtcttccccagcagtaacacaaaagtcaaatgcatattctagttagtttaagtgcaaatagacctcattatatatttgaattaattgtttatagtagactgactcaaacctgaacttt

SEQ ID NO: 251300 - DNA, 620 bp, Homo sapiens
attgactgacatattggacaacgtctttgataagacttctacagctgcttgggtgaatggctgaacttgtgtgggtttggacttgagcacattagtatctttatttatatgtgaacacatgttcatgaacttatgactgtcatgcatgagtttatatatactataaaaactatagggaagttcaatatcatagtctttatacagtgaaccaaagctctgtgtttgattcatattttgccactattaacagttgaaaccatttaactgcattgaaaaggatcattatttgacaatctaaactaaaattaaagtatctccaaacttatatagtcatgaagattggttgaatgattttgcacagaaagatatcagaattataaaagccctgctaaacaaaaatgaaagtcaaaggactattaaaactggcaacacttcaaaccagaaccaaaattayttactggtggtcctctttctccagacaggttccagatagttatccctggtcttccccagcagtaacacaaaagtcaaatgcatattctagttagtttaagtgcaaatagacctcattatatatttgaattaattgtttatagtagactgactcaaacctgaacttt

SEQ ID NO: 251301 - DNA, 494 bp, Homo sapiens
tggtttgtgatggctaataatgggggttttacccccctgatgtttgggggatttgtgcttgttttatgattactatttttcttgtttcctgcagtcaaggaaaactgtctgtgttacaagcraacttactgtcccctgcctcagggacgtgagttccagtcctggacactttactttctctctctccggtcttccctggcccacggtcagtttcttaactctccttgtccttgatcttttcccgaaatgcctggaccctcgccttagcccctcctccgatttgcccctttctttaatttgtcttgtgtgttagcgctgggtcagcgcgccctttgtgctgaggtcctgggccggtgtgtgtgtgtgcgtgcgtgcgtgtgtgttgtagtgtgtgtttcttttgttattttctcccctaacaccgcagaaatgaaacacacatgcagctctgtcgcctcatattttcagatgtttttcacactattgtctgctcc

SEQ ID NO: 251302 - DNA, 565 bp, Homo sapiens
tggtgcacaactatagttctagctaactgggagtctgaggcaggagtattgcttgagcccaggagttagaggctgaaatgagctatgattatgctgctgcactccagcctgggtgacagagtgagaccctgtctctaaaaaatgaaataaaatacatgaaatttaaaaagaaacaagaaagaagaggccagatcatgaaagaattcacatgttatgtcaagaaacttggatttttatcctgggttgtgttgttaaagctaatgaaagattttttttagagagagaattaaaaaaaaattctcattttaagtcaaatcaccatggtttcttaatgaagaactgattataatgaattgagacagacactaacagtttcttacctaaaatcttttctccctctgctccacttttttctgttaacttaaataaaccaagcygtaatacttaccttccaaaactcttgcagctagaaatgcccatgtgacacaattttaactgttcagatacagacaggaattccttggaaagcgcttacctttctaaataaaaaagcaaggcttcacag

SEQ ID NO: 251303 - DNA, 591 bp, Homo sapiens
ttggaaaagtgatttgagtttcagtatttgaaattttaagatttttaagactaggttcttgtttccttccttctttccttggggtaaaatatatgtagtgttatcaataatgataaaaatagaattaatataaaattataattgtgaggagggcaagtaatagcagtccaccactctaaggtggacaccagattcttattgcagtaagttgttggttgactcactttggacaattcttttaatcaagctgtgcctcaatttcctcttccacaaatgaagtgawcccattggataattttaagttaccttctagatttagtgaatgtgtaaacctaaagcactagagaaaacacatgttactaaaaagtttgcagatataggctttatatgttatattcatcctttcaaagaggaattattattataaatccagatttttgaaatgtggccttttctatagtcaaggcatatccagaattttttgtctggtaccaaaaaaaatcatataaacattagagaaatatagcacaaacttacactaaaataaaattaagcaacctatcattactgctccattcatccaaccagtcc

SEQ ID NO: 251304 - DNA, 386 bp, Homo sapiens
ttgttttagggtgtacttcttctactatacaggtgtaccattttttatctaatatgctgtatttttactgtaccttttctgtatttagatatgtttagatacacaaatacttccctttctgctacarttgcctacagtatttagtgtagtaacatgctgtacagatttgtagcttagaagcaatagactatcatatagcctaggtgtgtcgtaggttaccctatctaagtttgtgtaagcacactctatgatgttcacatgacagtgaaattgcctaaggatgtgtttctcagcttgtaaccccattggtaagcaacatattaccatatattgttttcaaccagttgtaattgttttcattaattttcaaattgtgtgttctttga

SEQ ID NO: 251305 - DNA, 502 bp, Homo sapiens
ttttattttggctcacagttctgcagggtgtataggaagcatggtggcagtatctgcttctggtgagggacccaggaaacttctagccatggcagaaggcaaagggggagtaggcatgtcacagggcaagagcaggactgagagagagagaagggggaggtcccagactcttctaaacaaccagttctcacatgaactaagtaagagctcactcatcaccacaaggatcgtgctaagccattcatgagggatttgtcctcatgatccaatactggccactactccaaatctcatattgagaattacatttcaacatgagatttggaggaggaaaacacccaaaccacgccattccacccagtcccctaaatatcgtgtccttttcacattgcaaaatacaatcatcctttcccaatagtcccccaaggtattawcttgttccagcatcaagtccaaagtcctaagtctcatctgagacttaacgctttccacttatgagcct

SEQ ID NO: 251306 - DNA, 560 bp, Homo sapiens
agacttaataccacatagaagccaacaaggcttacagcttgcacccgacaaccccagagtggcaacctgagctgtatctggggccytgtgagcggaggctgaagctagagctgctgaagctgacaggatgcagagagcagtgtcctgaggatgagcagggcagcacaccctggccctgacccctcaaaccattcttacctcctgggcctcttggcctgtgataggaggggctgcctcaaagatctctgaaatccctttgaggcctttttcccattgtcttggatattagcacttggatcccttttagccatgctaatccttctagcaagtagttgcttcccagtctgtttagattctttctctatcacagggccaggctgccaattttccaaacttttacactcgtcctcccttttaaatctaagtttagattttaagtcatttctttgcttcttttatctgactataggttgttagaagcagccaagccacatcttgaatgacttgctgcttagaaatttcttctgccagataccctaagtcatcactcttaagttcaa

SEQ ID NO: 251307 - DNA, 582 bp, Homo sapiens
ttatgtgggatgtgcccccatgaaccaatacttcccattaggccccagctccaacaatggggatcacattccaacatgagatctgcagaggacacacatccaatctatatcaacagactacagaaggacagaagkgttgttaaagttccagttgccattacttaatactttaatgctttttgtgtctattcaaactttatttaatgtcgtatctatcctagacattccctttttctgataatagccctcctacctttgtccctgcagcctagtgcaacgtgatttcctgttcttgctcatctatgagtttatttgcaacttcaggtgggtttttcagttctagctaaccaattctcacatgaaattcccttgttttaaatacagatattggtttctattttctatctggaccctgactcacacagcaccaagccctttggtcatgagatccaccagtggaggtggaaaattgaaatagcccctaaggtattgccatgaaggagtgatggtgaggcaaagggacaagggaagtgattaatggcaagacactgattacagcaacatatcctgcattttcggtct

SEQ ID NO: 251308 - DNA, 613 bp, Homo sapiens
tggctgcctctactgtgcagtagagtccgcatggggagtggggaataactggtagctgtaggcctcactcagctaccaagcagttggcaaggccagtctcacaccaacagcaccctgctaacagtgccgagtttagatccagacaaccttcacaaagaacccagacctgccccaggccataagcttccctgatgagaaagcaagcatggtcttcaggccctgccyctctttgtctgcccataatgccagcatccagctcccacagttgtatctgcagcagtttctatttgctccctgggttctgtttaagggaattcacgcccactcaaaattatcacaaaatttagttgggagcttctttcaccctgcaacccctccttaagttcactggctgccttctccaaggatccctgtgatatataatcaaggatggcttccctgggctccagctggagactgggaatacctataagattctttccactgatgcttctacttttttatatttcatgccactctctaattcattccagctgtaggtaaggttgaaaccttctcctgtgatctggattttcagattcctcagtggggatgtatgttcaagggcaggctc

SEQ ID NO: 251309 - DNA, 613 bp, Homo sapiens
tggctgcctctactgtgcagtagagtccgcatggggagtggggaataactggtagctgtaggcctcactcagctaccaagcagttggcaaggccagtctcacaccaacagcaccctgctaacagtgccgagtttagatccagacaaccttcacaaagaacccagacctgccccaggccataagcttccctgatgagaaagcaagcatggtcttcaggccctgcctctctttgtctgcccataatgccagcatccagctcccacagttgtatctgcagcagtttctatttgctccctgggttctgtttaagggaattcacgcccactcaaaattatcacaaaatttagttgggagcttctttcaccctgcaacccctccttaagttcactggctgccttctccarggatccctgtgatatataatcaaggatggcttccctgggctccagctggagactgggaatacctataagattctttccactgatgcttctacttttttatatttcatgccactctctaattcattccagctgtaggtaaggttgaaaccttctcctgtgatctggattttcagattcctcagtggggatgtatgttcaagggcaggctc

SEQ ID NO: 251310 - DNA, 613 bp, Homo sapiens
tggctgcctctactgtgcagtagagtccgcatggggagtggggaataactggtagctgtaggcctcactcagctaccaagcagttggcaaggccagtctcacaccaacagcaccctgctaacagtgccgagtttagatccagacaaccttcacaaagaacccagacctgccccaggccataagcttccctgatgagaaagcaagcatggtcttcaggccctgcctctctttgtctgcccataatgccagcatccagctcccacagttgtatctgcagcagtttctatttgctccctgggttctgtttaagggaattcacgcccactcaaaattatcacaaaatttagttgggagcttctttcaccctgcaacccctccttaagttcactggctgccttctccaaggatccctgtgatatataatcaaggatggcttccctgggctccagctggagactgggaatacctayaagattctttccactgatgcttctacttttttatatttcatgccactctctaattcattccagctgtaggtaaggttgaaaccttctcctgtgatctggattttcagattcctcagtggggatgtatgttcaagggcaggctc

SEQ ID NO: 251311 - DNA, 473 bp, Homo sapiens
ctatcagcacttcagccaaaaccatttaaccactctctaagaagttttaaactttccctgaactttctatcttcttctgagacctccaagcttctccaacctctgcacattactcagttttaaagccacttccacatctttgggaatctttatagcaatgccccactcttcagtatcaattctctggattagtctattcttgcatcgctataaaggaatacccaaggctgggtaatctatagagaaaakagattcttctttggcttatggttctggaggccgtacaggaagcatggtgttggcatctgcttctgatgagggcctctggaagcttacagtcatggtggaaggtgaaggggagccagcatgccatatggcaagagagacagagggcaagagagagagaacagagaggtcccagactcctaaacaaccagattccacatgaactaactgagcaagaactcacttat

SEQ ID NO: 251312 - DNA, 562 bp, Homo sapiens
tattgcaactgtattaccaaactgagctggtgacaatcaattcttattacatgtaatggtgtgaaacagtatttcctgtaaaagagtggtatagccttttgaaattggtttccatgaagaatttatttttcatctccttatcttgataaaaagatattccagagataagtaaaagttctgcttaaatctttctttttgttgataaactgaaaacttatcctgtaaagataattttcttttttycttaaagactcagattacttattattattttttattaacatataaatgacaaataaaaattgtacatatatggtatataacgtgatgttttgatataatatacattgtgaaatagttaaatcaagctaattgatatatccaagacctcacatactttggttgttgtaagaacatgtaagatctaatctcttagcaactttaaagtatacaatatattgttattaaatgtagtcaccatgctgtataagagaacactcttatttaccctgtctaactgaaactttgtaccctttcaccaacatctcctcattgccccacc

SEQ ID NO: 251313 - DNA, 562 bp, Homo sapiens
tattgcaactgtattaccaaactgagctggtgacaatcaattcttattacatgtaatggtgtgaaacagtatttcctgtaaaagagtggtatagccttttgaaattggtttccatgaagaatttatttttcatctccttatcttgataaaaagatattccagagataagtaaaagttctgcttaaatctttctttttgttgataaactgaaaacttatcctgtaaagataattttcttttttccttaaagactcagattacttattattattttttattaacatataaatgacaaataaaaattgtacatatatggtatataacgtgatgttttgatataatatacattgtgaaatagttaaatcaagctaattgatatatccaagacctcacatactttggttgttgtaagaacatgtaagatctaatctcttagcaactttaaagtatacaatatattgttattaaatgtagtcaccatgctgtataagagwacactcttatttaccctgtctaactgaaactttgtaccctttcaccaacatctcctcattgccccacc

SEQ ID NO: 251314 - DNA, 621 bp, Homo sapiens
tacttttgtttttcttggtcaaatgtttatatttctttttgcaagtaaatatggttgaagacaactgtaggggagcttagctaagaagaaccaagggttctgggtaaggtaccaagtatgacactaataacctggtggtatatgaagcctaggagtataaaactatttctgacctcagaaagaggaagaaccacatacgttgttctttcaatagcagggtctccacctcattctttattgactggacataaaatgtcatattcctaaattgcctagtaactaaggcaattaaataagatattagaatttttaacacagactacatagggactttgacaaattttcagattcaaaatcaggcattgatttatttaagctaatcagcatatactckaagttgattgtctcagagatgagtagttctgtcaattcaagttaactagatacaggcccagaacttctgtttcactgttacagggaaagtgtacctgtcactattatataggaacatgagaggatgtgatacctgatgttgctatacacatccctgctactacatcagaggacccgtttaataacaaagttaacacagaaaagacaacagaattgagtcaagaaatt

SEQ ID NO: 251315 - DNA, 543 bp, Homo sapiens
gccactgtagaaagagcttaaaaatcctttgggattccattgaagatggaaaaccaaagagcaggagaagagaggagagggaaacaggaagagttagggtgaaagggagagagagaattatcttttttagaggaatcctgatttctttgagcaatgggctgaacctgagaacagtttttacatttaatatttttctcttttcattttccactgtacagacatcaggctttaccctggtttcaatatatagatggagggaaatattcacagaacagactagtaatttaagacacaaataaattagttggagccagttagagaaaggacaagatattatcacatagctcatggcaggtggaaagaataacaagtccctgttttgtcaaakccgtattgacttcaatagggatggtaccatgtttgaaaggctgaagaagagacttggtgccagtgaaaacacattgggtttattgagggcacttacatacagagcagttcagtggcagcgggctggacaggagaaccagaacggcttgtaaaaac

SEQ ID NO: 251316 - DNA, 395 bp, Homo sapiens
ctcagcctcgttcctcttatctttgtcttggccattcgctcagaaaaaaagagaaataaargctacattttcagatttaaaaatgcatcatggtttttctcctgaatcaagagcctgaggccaagcctggagcagcttaaggatggagccagcattctcaggttgagtcattcacaacatgtgcccctgtggggacctcctcaaattgtcttgtgggcacatggctttgtacagtcttgagaatttggatgtggggagcatacaaaagaaacttgagataatggtgacaagtggattggctcagcatgcagcaaatatttgaaaggaaagagaacagtggtagaaggtttaacgttcagttcagagtgtccctatagaaacacttacaagtcact

SEQ ID NO: 251317 - DNA, 599 bp, Homo sapiens
atcttcttccccaggaatctagctctctcctccctctcttttcttgtataagcattttatatatttcatgtgaaataagtttcaagtaagctataattaccattttcatgagagaaagtctatccattttcacttccattttatagttttgattatactttgaaaagctctagcattttcaaatatttatagttttaaaatataaagaaaaatgcatgatcctactgtcataggtttaccacggaaggaggcaaaacagggacattctatgctgatttcaattccaggtaaattattttttgaattcaatttctctggaattaggaaagctaccatttaaatgcctagcttttgagacccttttaaaacccgtcacgattttgttaaaaacaaratcataaggtttaaaaatattcaatgaaaaatgatttacaaagattttaagagatttttctcatcagtcacagtgatgcctctttcaagatgtgctttctaatccagttctgtccaaatttatgacctactctacagtttgattttcctatcatttaatgagtgctcagttttttcacttgaatcatgaaaacaagaaaacgtga

SEQ ID NO: 251318 - DNA, 562 bp, Homo sapiens
aggataatgatacccagtggaaatatttatcatcattccttcttcctcaggtttggcagggcaacgatcatctgtggggccaggtacccatacactattattaacgtatacttcaataggattatccatccatgagactgcccgaattaagggcgggaaaggcacataggcccagtaggtataattagctgcagctgctcctgcaggcgtggggagacttaccaccgttgatacaatcatcaaagctgcaagcagcgtgttctctggagtttgtgtcacctttgtgttctctaggcttttttaagctaactgtgtcagcttttaaattgtgcccaagttggcakctccgccttcgtggtggatggcaacttcatctgtttttttgacatcaccattttgtttatcttgtgagtcaatggtgctcgattgcggtgtttccgtctctgtggaggcgcttttttttttgtttgtttgcatctctaatgggttcattgtagaactttaaatgtctagtgggtatctaaacaggaagctgattttctcctggtgaaacacaagcaaa

SEQ ID NO: 251319 - DNA, 576 bp, Homo sapiens
actctaactcccccttttcttaaaagaattttaataaagctgagataagaggcatatttacttttagcttgtcccattgttaccctggcttttttcgagcycaggagcttaccgcaaggctgaccgtagaagtacttgggaatctctcgttgacttgtcctcaataaccacgctcaagcgtaggtttaccctagagaaaagccccacattagacaccaggtgaaggtggccagcccctctacacctgtgagtcttttttgtcaggtgggacgagagactgagaaaagaaataagacacagagacaaagtatagagaaagaacaaagtatagagaaaggaccggcgctcagcatatggaggtcctgcacaggcactggtctctgagattcctcactatttattgatcattatctctaccgtctcagagagggggatgtggcaggacaatagggtaatagtggggagagggtcagcaggaaaacatgtgaacaaagatctctgtgttatgaataagtttaaggaaaggtgctgtgttttgatgtgtacgtacacaaacatttcagtgcattaaatggt

SEQ ID NO: 251320 - DNA, 576 bp, Homo sapiens
actctaactcccccttttcttaaaagaattttaataaagctgagataagaggcatatttacttttagcttgtcccattgttaccctggcttttttcgagctcaggagcttaccgcaaggctgaccgtagaagtacttgggaatctctcgttgacttgtcctcaataaccacgctcaagcgtaggtttaccctagagaaaagccccacattagacaccaggtgaaggtggccagcccctctacacctgtgagtcttttttgtcaggtgggacgagagactgagaaaagaaataagacayagagacaaagtatagagaaagaacaaagtatagagaaaggaccggcgctcagcatatggaggtcctgcacaggcactggtctctgagattcctcactatttattgatcattatctctaccgtctcagagagggggatgtggcaggacaatagggtaatagtggggagagggtcagcaggaaaacatgtgaacaaagatctctgtgttatgaataagtttaaggaaaggtgctgtgttttgatgtgtacgtacacaaacatttcagtgcattaaatggt

SEQ ID NO: 251321 - DNA, 522 bp, Homo sapiens
  misc_feature (1)...(522): n = A,T,C or G
ctgtaattcattctaggtctgcgatatttcctgcctatccattttgttaactcttcaatgcattccacaaatrcctaagtattctttaataatggtgggttttttttttttttgcatctatgaagttttttcaaattctttttaagtgacaaaacttgaacatgtgtatcgctcaatatttctagtcgacagcactgctttcgagaatgtaaaccgtgcactcccaggaaaatgcagacacagcacgcctctttgggaccgcggtttatactttcgaagtgctcggagcccttcctccagaccgttctcccacaccccgctccagggtctctcccggagttacaagcctcgctgtaggccccgggaacccaacgcggtgtcagagaagtggggtcccctacgagggaccaggagctccgggcgggcagcagctgcggaagagcctcgcgaggcttcccaaaacctcgcaggggcgggaagacncaggagtggngaggcagaaccggtaccccccagagcccg

SEQ ID NO: 251322 - DNA, 522 bp, Homo sapiens
  misc_feature (1)...(522): n = A,T,C or G
ctgtaattcattctaggtctgcgatatttcctgcctatccattttgttaactcttcaatgcattccacaaatacctaagtattctttaataatggtgggttttttttttttttgcatctatgaagttttttcaaattctttttaagtgacaaaacttgaacatgtgtatcgcwcaatatttctagtcgacagcactgctttcgagaatgtaaaccgtgcactcccaggaaaatgcagacacagcacgcctctttgggaccgcggtttatactttcgaagtgctcggagcccttcctccagaccgttctcccacaccccgctccagggtctctcccggagttacaagcctcgctgtaggccccgggaacccaacgcggtgtcagagaagtggggtcccctacgagggaccaggagctccgggcgggcagcagctgcggaagagcctcgcgaggcttcccaaaacctcgcaggggcgggaagacncaggagtggngaggcagaaccggtaccccccagagcccg

SEQ ID NO: 251323 - DNA, 522 bp, Homo sapiens
  misc_feature (1)...(522): n = A,T,C or G
ctgtaattcattctaggtctgcgatatttcctgcctatccattttgttaactcttcaatgcattccacaaatacctaagtattctttaataatggtgggttttttttttttttgcatctatgaagttttttcaaattctttttaagtgacaaaacttgaacatgtgtatcgctcaawatttctagtcgacagcactgctttcgagaatgtaaaccgtgcactcccaggaaaatgcagacacagcacgcctctttgggaccgcggtttatactttcgaagtgctcggagcccttcctccagaccgttctcccacaccccgctccagggtctctcccggagttacaagcctcgctgtaggccccgggaacccaacgcggtgtcagagaagtggggtcccctacgagggaccaggagctccgggcgggcagcagctgcggaagagcctcgcgaggcttcccaaaacctcgcaggggcgggaagacncaggagtggngaggcagaaccggtaccccccagagcccg

SEQ ID NO: 251324 - DNA, 522 bp, Homo sapiens
  misc_feature (1)...(522): n = A,T,C or G
ctgtaattcattctaggtctgcgatatttcctgcctatccattttgttaactcttcaatgcattccacaaatacctaagtattctttaataatggtgggttttttttttttttgcatctatgaagttttttcaaattctttttaagtgacaaaacttgaacatgtgtatcgctcaatatttctagtcgacagcactgctttmgagaatgtaaaccgtgcactcccaggaaaatgcagacacagcacgcctctttgggaccgcggtttatactttcgaagtgctcggagcccttcctccagaccgttctcccacaccccgctccagggtctctcccggagttacaagcctcgctgtaggccccgggaacccaacgcggtgtcagagaagtggggtcccctacgagggaccaggagctccgggcgggcagcagctgcggaagagcctcgcgaggcttcccaaaacctcgcaggggcgggaagacncaggagtggngaggcagaaccggtaccccccagagcccg

SEQ ID NO: 251325 - DNA, 589 bp, Homo sapiens
ttttttgtatttgccgattaactttttgaatgcaagtaagggctttactttatcttgtttgatttcatcatttgacttttggtcagcctttaaaatgttgtaagcctttcgctttccatacttggataacctagaaattaatcaacataatgtgtacacttatattcaagttattattaaatatttcgaacaggaaaagtcagtaaatatagagtggctagggtgagatggatgaggtactcacctcagaagcaaaatgtaaggaggtgccaaaaaactcmataatcaggatgaatatttcaatgcaattttaaaaaaatcaaaattaatatgaaatttcatgatgaacacaatattaaaattacaaataaagacaggacccacaagtgatgaatatttatcaatttttaggccagctgcaaattcttcactttatacccccatttaccccatactttccattgattactgaagaatattattttcaaaactttgtcaaatcaaatatctttcaaatattttgatacattttgttctagaatctagaactccaattgataaacagtgtagagatagaaaacaaactcag

SEQ ID NO: 251326 - DNA, 513 bp, Homo sapiens
tacctctaaaaacatgtacatatcttacttctaaaatattttattgttaaaaatgccaatggtcattttagccttcagcaaatcataatcgatttgctggtacaggatttcgttttatgttgatggctgctgactgatcagattggtggttgctgaaggctggggtggttgtggtaatttcttaaaataaggcaacagtgaagtttgccacatcggttgactctttccttcatgaaagaaaaatctttcgtcaaagagatttytctgtaacatgcagtgctgtttggcagcattttactggcagtagaactttcttcaaaattgaagtcaatcctctcaaatcccactgctgctttatcaaataagtttatgtaatattctaaatcctttgttgtaatttcaacaacattcacagtatcttcaccaggaagagattccatcttaagaaactactttttttgctcatctataagaagcaactcctcatctgttcaagttctatcatgagattgc

SEQ ID NO: 251327 - DNA, 597 bp, Homo sapiens
atgggatcagtatgttagaatataaccaaatgttgagattctctctaatttattgacctgaaattccttcagggtcacaagaaacttgccctacagacatttggtgtgttttagtatcagactggtactacagcaatagtgctaggtcaaatatcagkatgtgtaatactttttctgaaaagctcattgtgcttcactgaaaaagtcactcaaacacatagagaaattaagacactgcctgtgtaactgaaataaatgattttttttaaaaaaatcagttactttaggcatttcaatgctgaactcactaatggagcagaagaatgagagcttgagtctgctttacaggaatctggggtactgtgatacaacctatagtatctgctattttttaaaataacaatttttttttaattttcaataaatatattgacatatcctaaagatacttaagactatatttttgattattaattcttggaaatctttaaatacatacaatgaaagtctcattttaagttattaaagctcccagtcttcatttctgtttttgtttttctcacaaataaaattaaaatgtggcttcaagaaatcata

SEQ ID NO: 251328 - DNA, 522 bp, Homo sapiens
tactgtttacaagcaacattaaagaggacaaaacaacacttatttaatagggacaaatacaccacaaggtacaggatcagtgcaataaattcacaaaactatattacagctagttaatcagtttaagaattgttcccaagtcagtcacatttttggccctcagaagtgcattcctacagatttcaactactctaaacttttagctacaaagaggttaagaatgattataagaggctttccaaggagttwcaaaatctttgtagaccagactcaactattatcactgcaagcctgctctcaccaacagctcttgcatttttcaggaagaaatctccaggaaaagagtcacacaccagtgtagtcactatctcctatgccaaacctagggaactgaaatggatgatattaccccaaaatgagaattctgaggtttatctttaaaaggcttattccaaatctcaaagattagtcagagaagattatcttctactgataataaatctatggtctaacatatagaaa

SEQ ID NO: 251329 - DNA, 522 bp, Homo sapiens
tactgtttacaagcaacattaaagaggacaaaacaacacttatttaatagggacaaatacaccacaaggtacaggatcagtgcaataaattcacaaaactatattacagctagttaatcagtttaagaattgttcccaagtcagtcacatttttggccctcagaagtgcattcctacagatttcaactactctaaacttttagctacaaagaggttaagaatgattataagaggctttccaaggagttacaaaatctttgtagaccagactcaactattatcactgcaagcctgctctcaccaacagctcttgcatttttcaggaagaaatctccaggaaaagagtcacacaccagtgtagtcactatctcctatgccaaacctagggaactgaaatggaygatattaccccaaaatgagaattctgaggtttatctttaaaaggcttattccaaatctcaaagattagtcagagaagattatcttctactgataataaatctatggtctaacatatagaaa

SEQ ID NO: 251330 - DNA, 617 bp, Homo sapiens
tctcatgcttatttgcacttccttttcccattcatttttaacaagactaaagaaatactscatttgagttatatttgtccacatccctatactctatcatcttgatcaggtgtccctgagtatctctgttatagtgtgttcatggacaggtgtttgttgcccattctcctttcctaccctgctttaggttgtgctctgatctaccctaaaaccttttatgcgtttctcattctttctcaaatctgtcttcatttaaacatttttccttgtggctaatgggttttttatgttttattttttatgttttttatttttttatgttttatgttttattttttaatgggtttaaaggccctggttctataatccatgtaaatgcctttgttatttttccatcatacaccctttcttgattttcctttctaagttgcttatctttctcctccactttgccatctttatttaccatgtgcctttccaaaaaggccatataccataaaagaaacaaaattctgggttccagccttgactcaattagatctgaagcaaattacataacctcttagccccagcctcctcaactatgaaatggaaattgaaattgcaaagccaagttc

SEQ ID NO: 251331 - DNA, 514 bp, Homo sapiens
ggcatttctcctttgtttaaccctgtgatgccatttcaggctatgtgcagaggatctcaaccctggatgcacatcagactcactggggatcttggaaaatatgccagttccaagcccaccccttagagattctgatttgagactgaacacaaaagtaaaagttaacaaaagttaacaaaagttaaatagaggccagagttggtctttcaattaagtgattctaaagcacaaactttggattagaaatactttgctctgggagatggatacataaactctaagagtttcatagctttttcttatcttattttaccttgctttgaatactcatgacacatctcccattgacrcacctgtttcaagaatcagctcctatacgaaattttctaatcactccctgccttcattccctaagcaatttcatatttagtttggcccagatactggtgtagtaaatgccttgtagttagattttgatcaatttatgcagcggcatcttccgacccagttaatt

SEQ ID NO: 251332 - DNA, 257 bp, Homo sapiens
cttaagtatgtcacttacagagtcccaatcacagagcataggaaagcctgttattcaaacaaaacaagattctaaactttgcagaaacattgcacattagccttccactcccaccttctgtattcattcctaatttcaggcccaccctcctacttactaactaccactaccgccccccaaaaagaaaagaagaasaaagagaaagtcctgataaagcttttccagtatttaagaaggtcaaggggagtttagtgagt

SEQ ID NO: 251333 - DNA, 582 bp, Homo sapiens
accggtatctgtcatgaacatagatcaaaaattctcaacaaaatattagcaaattgtatccaacaatgtatagaaagaattatacaccacaatgaagtagaatttatcccaggtgtgcaaggctagttcaacatttgagaatcagttaatgtaatccattacatcaacaggctaaagaagaaaaatcacatgattatatcaatatggacagaaaaagcatctgacaaaatctaacacctattcataatgaaaaactcagtaaactagaatagaggggaacttcctcaacttgatttaaaaatgtctacaaaaaccctacagctaacatcatacttcaagtttcttcaagttagaaacttgaaactttcttaccaagatcaggaacaagacaaagatatcccctctcagcgctgcttttcaacattgtgctgaaagtcctggctaatataagacaagaaaggaaataaaaggtgtacaaatggagacggcggaaaaaaaaaacaaacctgyctttgttctcagatgacatgattgtgtagaaaatctaagagaattgaccaaaaaaaagtcagtcacttttct

SEQ ID NO: 251334 - DNA, 557 bp, Homo sapiens
ctaagagaattgaccaaaaaaaagtcagtcacttttstatatatcagcaataaatagaatttgaaattaaaaacatattaccatttacattagcatacctcaaaatgaaatacttaggtatatatgtaacaaaacatgtacaagatctatatgagggaaatgacaaaactctgatgaaataaaccaaagggcaactaaataaatggagggatattctgtgttcatggataggaagactcaactgatctatagattcagtgtgatctcaataaaaatcccagcaaattatttttgtggatattgacaaactgatcttaaagtttatatgagacacaaaagatccagaataatcagcacaatattgaaggagaagaacaaagtcggaggatagtcactacttgacttcttatcatactataaagctacagtcaataatcaagacagaaatggtgctggaacaactggatgtccaaatgcaaaacagtaaataaatctagacacagaccttataccctttatgaaaattaactaaaaatggattgcaaacctacacgtaa

SEQ ID NO: 251335 - DNA, 600 bp, Homo sapiens
tgtacctttggtgagaatactactttctccctgaggtctatgggctgtattatcattaaaattatcatgatatttatattaactggctcacaaagtacatcacccatcaggtccagtttgcttcttaaagctggaagagtgaagagtccccctgaaattcttgggctctgtttctttccattaagttcttttgtrtatggtgtatattcatgatcatattttaaaccagataattttttcatgcctcgtttaacttgtgtgtcttttcagagcctataccttggtcaggtttctaatcaaagccagatagcataggtgagtgttgggatgtgagggtagtaggggttttggtgaccagtactcagtgggtagaaaaaggtgaacagtgtagtgctgggaatgctggggtcagaagatctcggatcaagaaataactcaaacaggtattagctgaatgaccttggatctgacttaaaactttctgaacatcagcttcttatctgtaaagtggagataatacttaccttgaaaggtattgggaaggctcaaataagataaggtatggggaacggctttgggaactatacagtcttacatatg

SEQ ID NO: 251336 - DNA, 600 bp, Homo sapiens
tgtacctttggtgagaatactactttctccctgaggtctatgggctgtattatcattaaaattatcatgatatttatattaactggctcacaaagtacatcacccatcaggtccagtttgcttcttaaagctggaagagtgaagagtccccctgaaattcttgggctctgtttctttccattaagttcttttgtgtatggtgtatattcatgatcatattttaaaccagataattttttcatgcctcgtttaacttgtgtgtcttttcagagcctataccttggtcaggtttctaatcaaagccagatagcataggtgagtgttgggatgtgagggtagtaggggttttggtgaccagtactcagtgggtagaaaaaggtgaacagtgtagtgctgggaatgctggggtcagaagatctcggatcaagaaataactcaaacaggtattagctgaatgaccttggatytgacttaaaactttctgaacatcagcttcttatctgtaaagtggagataatacttaccttgaaaggtattgggaaggctcaaataagataaggtatggggaacggctttgggaactatacagtcttacatatg

SEQ ID NO: 251337 - DNA, 550 bp, Homo sapiens
actcagccgtaacatttatcataaaagtctgacatggttaagtgaagtgattgatattggcccatcttgctctaaaatgtaggctttcatctgttttagttgggaaaagagtaaaggacctcactcatggaattaaacatcttccttttctttatttttccttaatctattaatggttatccttaattcagcataatggcagaaattctagagtctgtgaaacctaggttcatatcctagggtcatcacttatcagctgttgagcaaaattttaagctcctctaagggaaagtttccttatctgtagaattgggagaactgagtgagataatgtagttgaagcaatcattaaagtacctaggcacacacttaagaaatgttaatcatattattattataataataatcattattataatttatkttgactcctgacttcattattctgtcacccattatgctattagcacagtaataataccaataacaacaatacctattatagataccttttgttgatacctactaggtaccagacactgtgctgaat

SEQ ID NO: 251338 - DNA, 558 bp, Homo sapiens
tatctctctggacctcgggcttttcgtctgtcaattgaaaaagttggagtggattacataagacgttttaggactccaggattgtagtggaatcagttgttctcaagaaagacaagcttagaaatgtgtaaataggattttatacgtgtttgaaatggagattgtgtacaggtatggcttgttctgcatggtcactttgtgcaggcaggctggaaggaggaaggttgctgtactttttataatggcttaattctttcttcccaagctatcataactctgctatggaggaagcagtccacttaccccaacatgcttgttttcagtatacatggttgtaataaattagcacaatctttaatttggataagtcttcacttcctgctcccaaatcttgattcttctgagatacttaacaataattccttcttcccaaatccyaaaattaaattctcctgccattctggaaataatgttgtgattaaaaatctatttacatttggtcctcacacttcagtgttgacataaaataaaaccactgatcactgttgtagcgttagg

SEQ ID NO: 251339 - DNA, 565 bp, Homo sapiens
tgtgcagcagtggggagaagaattccagcatcaatggacagggtggattgcgctttaaaacagtccrtgagtgatacagtgtcatgtgaatggaagttttctgccatgtctacactaagaaaggaattgatcacttggccatttaaggtgggtaactgtaataaccaataatttttctcacagtggtggggcgggggtgggattttaaaacacctgtatgttaccatttatgcaatgactgtggttacttgctatcttagtatacatgatattttgaatatttcttatagcataagcatttttccatttagattcttttcaactataattttaatggccacataaaatctctcaaatgacacattataatttacttaactattcccttattggacatttggatagtttttatttttgtaattacaaataatgccatgataaatgtcttggtaaataaatttttccccatattttggattgtttccttaggacaggttcccagaagtaaaattactgaataaaacactaactacatttttatgcttcttaatacctattgtcaaat

SEQ ID NO: 251340 - DNA, 651 bp, Homo sapiens
cacagaatttctaacacactgtgagtagtgctgcccctagaaggggcattttgaaatatatgagttgttttttgttgtcacaatgatggggtgtagcattgctgacatgtgtgagaggggaccaggatgctaaatgttctgaaataaaagggcagtcctaaacaatgatgtgtgccactcaaaatgccaaccaattatgttgccattgggaaacactggagccttggaagggagagggtgcagagtgagcagagaagaggccaccgttaggacaggagaggacctaggaacagaaagtgagaagactgaggaagaataggcaacragtagtggcatagaagccaatgaaaggggagagtttcaggaagactcagcagtattaaagacagagaggttaagaggcctagcagagcaagccctgaaatgtaaagtagattgcgccagtgtcagtgcttttctatgggaactgagcagggcaaaggtgaggaaagctgctggcatgctttgggctatttgcaatcactcccataattatcaagtgttttttgatcagaaataaaaaggatacattttaaactgcgataagaatttgtgaatctgcctagataaatagtagtgacaaatgattctttcatttctataattagcata

SEQ ID NO: 251341 - DNA, 651 bp, Homo sapiens
cacagaatttctaacacactgtgagtagtgctgcccctagaaggggcattttgaaatatatgagttgttttttgttgtcacaatgatggggtgtagcattgctgacatgtgtgagaggggaccaggatgctaaatgttctgaaataaaagggcagtcctaaacaatgatgtgtgccactcaaaatgccaaccaattatgttgccattgggaaacactggagccttggaagggagagggtgcagagtgagcagagaagaggccaccgttaggacaggagaggacctaggaacagaaagtgagaagactgaggaagaataggcaacgagtagtggcatagaagccaatgaaaggggagagtttcaggaagactcagcagtattaaagacagagaggttaagaggcctagcagagcaagccctgaaatgtaaagtagattgcgccagtgtcagtgcttttctatgggaacygagcagggcaaaggtgaggaaagctgctggcatgctttgggctatttgcaatcactcccataattatcaagtgttttttgatcagaaataaaaaggatacattttaaactgcgataagaatttgtgaatctgcctagataaatagtagtgacaaatgattctttcatttctataattagcata

SEQ ID NO: 251342 - DNA, 533 bp, Homo sapiens
tttttcccagccctggccatttcgttcagggagctctggataaaaagatgccctaggcttatygaataatgctgctcattctccccagtaccatggactgctctagcaggcatcctgcttctacagaaggacactagacaacatacacctgctgggcagagacagtaatgcaacagcacagtgtttaagaactgtatttttcagcaggctctggagggctttttaaagcccacttgacagctctttaaaatgggcttagtatagcatctctcagggttgtggtaaaggatccttcacatggcttcatgctgattttcattttgcctagtgataggaacttttctttcaattcttttctttctctttcctacctacttgctggcctccgctccaatttaaagcccatgtgttttcaaatttccagtgtagaaagtcacgtaacgtgtctagcaaaaaaaacaaaaaataaaaaataaaaaaaacaacaacacctcaattcgtgggagctactgtcaagagatctggagaaagtc

SEQ ID NO: 251343 - DNA, 479 bp, Homo sapiens
ttcagcgatatttctcccatttgcttttgaaagaagagaaatatggctctgttccacccggctcactggcggtcagagtttaaggttatctctctttttccttgaacaattgctgttatcctgttcttttttcaaggcgcccagatttcatattgttcaaacacacatgctctacaatttgcgcagttaatgcaattattacagggtcctgaggtgacatacatcctcctcagctgacaggattaagagattaaagtaaagatgggcatataaaatcacaagggtattgattggggaagtaataagtgtccatgawatctttgcagtttgtgtgtagagattgcaataaagacaggcataggaaattataaaagtattaatttggggaactaataaatgtccatgaaatcttcacaatccatgttcttctgccatggcttcagctggtcccttcgtttgtggttcctgacttcctgcaa

SEQ ID NO: 251344 - DNA, 511 bp, Homo sapiens
tcagaagtcctgggggaacttttaattctgccacttaataacaatgaccttgagctcttcactaaacttctctgacatttactcttcttatacttaaaataggaattattatgtctacttgaaagcattattgggtagactaattaagaatatgtttttaagagccatcrgtaaactgtaatatatatgttctatatgttgaaggttcaagcgttcatgctgaggagttttccatgacagcaaaatatcaacaagtgcaacataaaaaccaaagttatcatttggcaaaaagcctcctttgccaccaaaacaatcctctatgccacgtcatattatcttctcaacatctttgggagatgagcttagtttggctagttttaaaggtgaagaagctgaatcacagataagcataggttgattttatgttgttgtctttgaaaatggtcataaaaatatagatgggaacattagactttatttttcttcccgaccatatcatgccagaaaaaaa

SEQ ID NO: 251345 - DNA, 547 bp, Homo sapiens
ttatcccttcaatgaattagccccattgagggaacagaattcttcatcatagcgaaaacataaagtcctttatgaatatgtgtggatcctggagtttcaggcaatgtgacagctgtgggagactctagaaattactccatataggcctcctattcccttatgtcttggttagcccagtcagtgaatatgtgatggattttttttgtttttggtcatctctacttcagactccctatataattttattattttatatgaacttcaatataatccccttcagattatttatgaaatatcttccaaaggaacatactaactctgaaacattctgtgcatagggcagctattagcaaggtcctggttgatrtggcatggattataagtgtggtggcacctgtgccttggatggtaaaattagagtagatactgggggttatcttgttttttcattattgataactaaatgtagttaacttgagcttgggttaccccaatcccaaaggctaataggctactgaacttcatgtacaaaaggattgtccttctg

SEQ ID NO: 251346 - DNA, 557 bp, Homo sapiens
gtgccaaaaaaatctgtccagctcagttatcccctggggacacacaaatgccaagagccactgcagcttgttccaaaccactaacagactataagaaacaaagtcaatgtaacacttaccaaatgtaaatcctatgctaccagttcaaaccagggcctagaatataaaattcaaaataaaagaaaaggtaaatgtaaacatgaagtaagtcttygtccaaatcctaaatttgtgatttctccctttctccctttttttattaggttacctaagattttatctattttatttttttttattttgaaaactaggtcttgaatttattgattagttaattttctattatctaattcattaatttttgctactgtctctattaatttttcttttttgcttttagatttagggctattttgttgtcaaactcttatttcactaattgtagtctattttcttcattggtatcaggatttaggaaaatgaatacagctttagtgatattctttagttctgttattgatattatttcattctaggctaattctgcagtttcagtt

SEQ ID NO: 251347 - DNA, 613 bp, Homo sapiens
tgaatatgacattactaaaatccctttttctagcagtcatgatagagacaaatatgccatttgtgtgagctggattaaactgtccaagatgatgaggtatcttgtggtcctctcagccaacccatggcagaacagatcaagaaactcatggtctagctaaacacaacaaaagcaaagcattattcacccagatggcagaagakagtagctcagatttcagtacaattgctacatgacaggcatgtcaggaagcagtgaggtccaagatatatgtgggttataaatactatgaaactcaaaatagtaataagttcacatgcccaaatgacattataaactaacatgtgaaaaaatactttatgcttttaattgagaataaatatgtcagaaataatatgattaggtagatatagtagcactgatatttgacaatattttcctttttattttacacacacacacacacacacacacatacatacacacttaccccatggtatattttaacccaggattttgcttctactttactctataaagaatatagtcccaggtgctacacatcagttttcattatctaaaagttatcatttttcattatgcataaaaatga

SEQ ID NO: 251348 - DNA, 602 bp, Homo sapiens
catcagtagttattcattaatggaaataattattacacctgactacatctgactaattcaagaagatgtagaatatgaaaacgagagtaagaggaaaagtctaggagggagaatagagtccatttcttcctacaaatgctttttccaaaatgtaggtagcagctagataattaaccagtttttgtaggtgacagtgatttatctgtgaccataaacatatcaaacctgagataggaatgccggattccccagtggctgatgctcagtccagtcgtctttcaaccaagtctcagtgcctccaaggacatctaatcagattcctgaagaatagaggtgtttatctcactatctggcacctacaactgtatctgactctrtgggctttaaagataccctcataccccagggaaggcttccttggctcatttagcctaattttctctagactctgagagcacatcacggttatagtttcctcaagaaccaagttcttcccaaatgaggttcttgaggccatagttccgttagctactaggagttcctcattttttatgttacattagtcctttattccctcgcacacctgtggagttacaaagtga

SEQ ID NO: 251349 - DNA, 362 bp, Homo sapiens
attcaattttttaactcacacatacacaaaaggtattcctggatagtaataccatcctctrcatcaaatttggatgccattcctcgaagtgccatgaccaaagaagcaaaaaacaggttatttacctcttcacacccgaagaaaatgatgaaacagaaacgatatttgtgatagaaactcccctctcagaaaaggcagaatgggagacagtgatgcctgtgatccacagcattgatgacatgaagattgccccagcagtgcttccattcctttattgactctgatcctgccttagaggactcgaccagtgtttgcacggggtgtattatttcattgtttcagcatgcttcctgtttatacaa

SEQ ID NO: 251350 - DNA, 628 bp, Homo sapiens
tatctcattgtgattttaatttgcatttctctgatgattagtgatgttgagcacttttttcatatgttttttggccacctgtatgtcatcttttgaaaaatgtctgttcatgacatttgcccactttttaatggggttgtttggtgttgtggtggtggtggttgttgagttgagttccttatagattcttattattagccccttgttggatgctgatatggtttggctgtgtccctacccaaatctcatcttgaattatagttacaattcaagttaaattttgatattttgatattgaattatagttctcataatccccacatgtcatgggaagggccaagtgggaggtaattgaaccttccacttccggtaaatggtggcttcccccatactattcttgtgacagtaagttctcatgacatccgatggttttataaggggcttcccccttcactcggctctcatttttcttcttcctgctgcaatgtttgcttctccttctgccatgattataagtttcctgaggactccccagccctgtggawctgtgagtaaattaaacccctttcctttataacttacccagtctcgggcagttctttatagcagcatgagaacatactactac

SEQ ID NO: 251351 - DNA, 610 bp, Homo sapiens
attagcctgatggagtttcatttgtaggtgacccactccttcttgctagctacctttaatattttttctttcatgctgaccttggagaatctgatgactctctgtcttcaccatggtccttttgtataatatttcacaggggttctctgaatttcctgtatttgaatgttgacctctctggtgaggttgggggaattgtcatggacaatatcctcaaatatgttttctatgtttcttgctctctctcctgctttctcagggaccctaatgagtcataggcttggtctctttacataatctcatatttctttgaagttttcttcatttttaaaaattcttttttcattattgttgtctgactgagttcattcaaaaagccrgttcgagctctgagattctttcctcatcttgtcctattctgcagttaatacttctgatggtgttatgaaattattgtagtaagttatttagctcaagatcaatttggttctttcttaaaataatcatttcatgttacatcccttgaattgttttgctgaattcctaagattccttgtatcagatttctactttttcatagactctatttgactttcattggtaaacagat

SEQ ID NO: 251352 - DNA, 546 bp, Homo sapiens
aatcactctgcatgatgaaagaaaaaatggcttacaataaccagatatttttatgccacaaaaaatcacatggaaatgcccttccaatggccttctctttcctgaccaggggtacccctgctggttgctgctaacgggcttcagttgcccctagtatcattagaagtttctacaagtgccctaaagcctgaagcccttgatgactttgtgtgacctgtgccctgggagatgcttacatatatgttaggaggacaaattttggagccagacactacttattcctaattaacctgattaattaatgttgtagaatctcagtttmctcatctataaactatatacttcgtaaactggtgtgataatgtgatataataagaaattatatttatttgggttcttcccccaactcttgatataaatatcttgaaactcttataaataggggccctatgagagtcttttgttatatttggtctttgacacccccaccagcccagtttttgacatagagctcctaacgcttttataattttctgagttatagga

SEQ ID NO: 251353 - DNA, 546 bp, Homo sapiens
aatcactctgcatgatgaaagaaaaaatggcttacaataaccagatatttttatgccacaaaaaatcacatggaaatgcccttccaatggccttctctttcctgaccaggggtacccctgctggttgctgctaacgggcttcagttgcccctagtatcattagaagtttctacaagtgccctaaagcctgaagcccttgatgactttgtgtgacctgtgccctgggagatgcttacatatatgttaggaggacaaattttggagccagacactacttattcctaattaacctgattaattaatgttgtagaatctcagtttcctcatctataaactatatacttcgtaaactggtgtgataatgtgatataataagaaattatatttatttgggttcttcccccaactcttgatataaatatcttgaaactcttataaataggggccctaygagagtcttttgttatatttggtctttgacacccccaccagcccagtttttgacatagagctcctaacgcttttataattttctgagttatagga

SEQ ID NO: 251354 - DNA, 546 bp, Homo sapiens
aatcactctgcatgatgaaagaaaaaatggcttacaataaccagatatttttatgccacaaaaaatcacatggaaatgcccttccaatggccttctctttcctgaccaggggtacccctgctggttgctgctaacgggcttcagttgcccctagtatcattagaagtttctacaagtgccctaaagcctgaagcccttgatgactttgtgtgacctgtgccctgggagatgcttacatatatgttaggaggacaaattttggagccagacactacttattcctaattaacctgattaattaatgttgtagaatctcagtttcctcatctataaactatatacttcgtaaactggtgtgataatgtgatataataagaaattatatttatttgggttcttcccccaactcttgatataaatatcttgaaactcttataaataggggccctatgagartcttttgttatatttggtctttgacacccccaccagcccagtttttgacatagagctcctaacgcttttataattttctgagttatagga

SEQ ID NO: 251355 - DNA, 489 bp, Homo sapiens
tgttatgaactattatgagctagacattctgctgggtgctgggcagataatgacacagacttggccttcaggaagcctacagcctgatggacagctacgcacaatgatttttgatctttgaaaggaaagtgacagaagtttgagatcactgcccaggttcatggtgcagttgggagaagkggggagtcagggttctaaaagatccttgagatagtaatgtctgcaggtcatgtcagagatttgggttattagctaaaagcaatagaaagactgaccaggggaaagttattgacaagaggaggtctgaggtttgtgaagaccattctagcaacagaatggagaaatgtttggacaatgctaatctaatagaatttcttccttctttcctttcaaaggatctcttcatgtttatatttaaatcctggtctcttagattaatattcaaagactctttgtgaactgtctctgcctctcctaccactttagtca

SEQ ID NO: 251356 - DNA, 476 bp, Homo sapiens
cacatatgtacaatatacaatcccttgtaaatttgcgagggaggtgcataggactgtaagaggaacacagcatgtcagtaatttctctggatttctttcctccctgcaggactaccaacaagtagggaggtaaataccaaatgttttattttagaaaatcagtagtgaggtgtgaacaatattaatgtaatctcaagaacagaatggatactttgtctttcttataacaggaatgtgctgaatcatactttatcaccaccaaatctgatgttttaaaataccccatgtggaggagatttsaccaaggtttgtaattcattctccctacactgccagctgtctctgaaaccctcacctcaaagacaaggttttcctaacctcggcactgttgacatcttgcacctgataattccttgttgtcaggggtggtggcgctgctgtcttgtgccctgcaggatgttaggtagcatccctgg

SEQ ID NO: 251357 - DNA, 665 bp, Homo sapiens
ttgcaaatttcaaactcttaactttaactgtggttggttcaaacacccctgcttgtttgttgtgtctaggtttaccatttctcaaatcaagaccaattcattttagatttttactttctgggttaacttgagcctcattatgaaaagcccttaaactatgcaaccagatctgtggagttctgggcagcattaactgtcagtgaataacaggaagaggtcttgcagactctgcaatagcaagctgttcctgagactccatgctggtttcacagttttcggggtatatggaaaaggctgcttctacagcayccccaactagcatcatggattttgactccaaaactttcttcactatgcaaagagcatcatgtagagtgctccatctcatcacatacgaaatcatttgccccatgtaagataattgatgcagatgcacaagccttactggttttgattaagatcagctcatcatcacaaattctctcctgtaccacttcttccacctgtcccgacactgcagtttcaaaagtttcttcacccttcaaattggccagggttgacagaacagtccctccagaagtttcagcaatgcatttaaggtccctttttaaagctcttctaattgccatagccccaacctctacaaaatactttgacacatatca

SEQ ID NO: 251358 - DNA, 586 bp, Homo sapiens
  misc_feature (1)...(586): n = A,T,C or G
cacacagtctctttcttgccttcagtttttttttttaagagtcagggttactttttaagtagctggaagtataaacatgtgccaccatgtctggctaacttttttttccttttgcaaagatggggatcttactatgttgcccaggctgatcttgaactcctggactcaagcaatcctcctacttcagcctccaaaattgctgggactacaggcatgagccacccactgtgcccagccttccctccaatcttgaagcagtgtctctatttcttcctgagaccaatccctccagccatgctcctgattctatccctgccagctctctccatcgtccccaccatttcctgcatcttcaagcctttgtcctttacctcctnnnnnnnnnnnnnnnnnnnnnnnnnnnnnnnnnnnnnnnnnnnnnnnnnnnnnnnnnnnnnnnnnnnnnnnnnnnnnnnnnnnnnnnnnnnnnnnnnnnncacacatttataaaatccaygtctttcttcccattcttcctgagaccccataaataagcatctgtcctcaccaagccaatgaaccattctcactatggtcactaagaaac

SEQ ID NO: 251359 - DNA, 484 bp, Homo sapiens
acatgccactaagcctggctaattttttttattttttgtagagacagggtctcactatgttccccaggctgatctcaaacccctggcctcatgagaccctcccaccttggcctcccaaagtatttagattacagtgtgagtcatggggcacaccagccacytgtaattctttcagaagtcaattagtcctatcctctttctacttttctatcaaaatctgactccaaaattaattgcaagtgctttctcccacccctacctgttttctcattgtctgagctctgcaaagctgatgtgctggtatattacagactttgatctattgccaggaaaactttggcaacatattgccagggcgattagtcaagttccataacatatgttccaagaaggaacactggttaagtctaaagaatagaaatccataaatttctccttggtcgtctgcttcagaaataggtcatcctctgactatcagcagttg

SEQ ID NO: 251360 - DNA, 288 bp, Homo sapiens
aagtccctaccactccttacggttttttaaatctctctctgcatcattcatttacaacacctgcccaacctgtgcaagcaagccttttttggtactaaagaaatagcacagataaatagatggatggatgaatcaatagatagataaatatatcacacctaaattatcaagtttccctgaacagcraaggcttagagcaggcactcttgtaccaagggcgctgagattacaacatttcttgaactttgtattcctcagattaaccaaatcaaacaacagacttacata

SEQ ID NO: 251361 - DNA, 602 bp, Homo sapiens
attcaaatgcttatggtattgcttattaattataacatagtggcctacatctatttgaaaaggaatatttgctgggtataaagcagatacttctactgagtataagccagatactttaccaaggttattataatatgttaatctctaaaacaccatttctagatagtgattattattcccaatgtatagatcatagattattgaagttaagtatcttgctcaagaacacaaaggaaaaacatagaacgtggactcaaaaacaagttgggcttcaaaacccaagcactttccaccatatcctgccccttcttcctgccccaattacacccacaggggttccttattctatccaacagatgggctctgggtggctctctgtgcaatagatcatcttgcacttttttttttctttcctaaatcatagtttcagacttaactaattacaacatttccattctcatcattggaaaaaaaataataaagatatttcytgctaaatcaaaacaacaataagacaaaatttcatatctgcagtgacatagaatggataagcatctcctatccaaatttaccccattcctgatgcctgtcagcagtggatg

SEQ ID NO: 251362 - DNA, 580 bp, Homo sapiens
catctcagggtagccatgatgtcaatgaaccttagtggcaatcaaggccacttactagccctttgtgtgaaagagaaaaagatatccctccctctgggctggcacagactcacatcacactgcatggcttggccaagccaagtgtggctgccgttctgcacttactcaccccctgcagcccagccaacttgtgcagtgaagaatctgcaaaaatagttgcagcmgtacagccctgggagaatttaaacttcatgcaaatgaaataaacatgcacatgaaattcaaccaggagatttacctggcaagtcaagagattaaaagggcatgaatatctgaatttttttatcagttacttgttttttaatctcttaaatgaaacagattctagaacttttgaaaaagggaaataagtgagtgtcacaccagaccaagagaggagaaaattaaatccaagctccaaccactcatcctaatctttgagatcactctgtcctggtgaacatgccttccgggtgggtggatacacagtctctttggagaaccaatttttttttgttgttgttgggagataaaaagcaat

SEQ ID NO: 251363 - DNA, 595 bp, Homo sapiens
tgagaaagaagcagggagaagtacttggaaatgcctttcctgttaacctcatgtaaaagagcagctctcctatcttcaccatctaaacccttactctgctttattcttctgtgtggtactattaccacttgatatttatatttttagctaatttattttttgtatgcttccccctttaaaatgtaagctctatgagggtagaatattgtgtgtattttgttcattgactgtaccccttgtgtctagtactgagcctggcatatayatgcttcaatacgtgtgttcatcaacagaagagaggccattacctgagtaacccaagtcagtctacacagacctggaaattaggacgtctattcagggccttgaaagatgtcagaaaaaatgagcaattttttttttgacagtcattactttctcataattgtagaggttgaagaatggttaaaagtgagaagaggaaataaacatattaataggaggaaggtgcttgattgtactcctgacaaaagaaacatgaattaaaattaaaacaaagtagcattttttttcctatgagattagcacctgtgttggtagggtggtaagaaaagca

SEQ ID NO: 251364 - DNA, 607 bp, Homo sapiens
tgctgctataaagacacatgcacgcgtatgtttattgtggcactgttcacaatagcaaagacttggaaccaacccaaatgcccatcaatgatagactggataaagaaaatgtggcacatatataccatggaatactatgcggtcataaaaaaggatgagttcatgtccttttcatgggacacggatgaagctggacaccatcattctcaaacaaactaacataagaacagaaaaccaaacaccacgtgttytcactcataagtgggagttgaacgatgagaacacatggacacagggaggggaccatcacacaccagggcctgtcagggggtggggggactaggggagggatagaggaaatacctaatgtagatgacggttgataggtgcagcaaaccaccacaacacgtgtatacctatgtaacaaacctgcacgttctgcacatgtatcccagaaattaaagtataataataaaataataaataaatagccaatacaatattaaaggccaaaagtaagggtttagataagcactataaaagtgggaatgtaaagcaaagcctgggtaacagtagaaatcagagaacattgaaatggttggctatg

SEQ ID NO: 251365 - DNA, 586 bp, Homo sapiens
tatataagaaaaaatcctgtttgctcgaattgatatattttgtaagatgatagaaattgggtgtgaatgagatacaaagttacatgaatgtcagatatttacattttcattaactgaaaatctctattttcacctatgggcaagaaagtttgaggctactctggtagggagtgaggttatttaaagatctgccctcttggtttgaagcccgggccacagtccaaatgcttctttgaggaagtgtggaaaaagagctagactggagcaggactggcctctgtttctggtgctgcagtaaccacctgtgcaatcatgggcaataaaatcagatgaaagtgggcccatttgctctgagtggcaggcatgttttctagctgcccagctttatggtgctgggggctcttcatggttttcaccccaaaagctagtacctgtctaycccaaattgctctgtagtcttaccactaatcttcatagccgtggtctccaaaatctttggatctgtacacccctgactgcacactttgctagtgcaaaatttttttgagcatgtaatttcaaactatatacacactatcgtattaat

SEQ ID NO: 251366 - DNA, 605 bp, Homo sapiens
catatactgagttctggtcattggtcaggtagtgtggctgccagaaggagtgcacatcatctttcttgactataccacaatcagagtgtggactcctagattttcatgactcccctctccctaatttgagagcagctgttttttaaagtaatacytttatcagatttccctaaaacattcaccttaatattcatggaaataacaattctcttgcattgctagcttactgatgtatgtaatatttaattaagttatataacagtgataactgcacaaacaggtttgagaacaaatgcagcagactcagtatgcttttaaaatttttttaatggacacatagtatttgtacatttttatggggtgcatgtgatattttgctacatgagtaggaagtgcaataatcaagtcagggaatttagggtattcatcatcttgagtgttgggtgcatgtggtattttgctacatgcatagaaagtgtaatgatcgagtcagagtatttagggtattcatcatcccgagtgtttatcatatttatatgttgggaacatttcaaatcctctcttctagctattttgaaatatacagtacattattgttaactgca

SEQ ID NO: 251367 - DNA, 562 bp, Homo sapiens
acacttccctgtgtgttatttttagtcttctattcctgccttttattttgggacttggcccgcttcctttgtagtttccccttaagttgctcatacctttctttcttatataatgcattttaagctacccttttattttttttttcacctctcaaaggaaattcaaggaatgttggccagttcaggaactcctgctagtcttggcaccagtaaagttcttggtttgaaaacaacctaggaaatccaggatcgtggttgactttccagttatttaatgcatcagagctgctgacagatctgagmctggagacacgttgattttgaataccatttcatgaaattgttttatggcttatagaaactagaggaatttgaaactggactcttttcaataaattgatataaaagcaatatccagttttaaaaattaggagaaagtcgagtaagtctagttcagggctatttaatcttttaccaattagcacttagttagacagtcttggtggaggaacatttattctgcactatgtcaatggaagcagcgtgagaagatgaaaagtta

SEQ ID NO: 251368 - DNA, 562 bp, Homo sapiens
acacttccctgtgtgttatttttagtcttctattcctgccttttattttgggacttggcccgcttcctttgtagtttccccttaagttgctcatacctttctttcttatataatgcattttaagctacccttttattttttttttcacctctcaaaggaaattcaaggaatgttggccagttcaggaactcctgctagtcttggcaccagtaaagttcttggtttgaaaacaacctaggaaatccaggatcgtggttgactttccagttatttaatgcatcagagctgctgacagatctgagcctggagacacgtwgattttgaataccatttcatgaaattgttttatggcttatagaaactagaggaatttgaaactggactcttttcaataaattgatataaaagcaatatccagttttaaaaattaggagaaagtcgagtaagtctagttcagggctatttaatcttttaccaattagcacttagttagacagtcttggtggaggaacatttattctgcactatgtcaatggaagcagcgtgagaagatgaaaagtta

SEQ ID NO: 251369 - DNA, 562 bp, Homo sapiens
acacttccctgtgtgttatttttagtcttctattcctgccttttattttgggacttggcccgcttcctttgtagtttccccttaagttgctcatacctttctttcttatataatgcattttaagctacccttttattttttttttcacctctcaaaggaaattcaaggaatgttggccagttcaggaactcctgctagtcttggcaccagtaaagttcttggtttgaaaacaacctaggaaatccaggatcgtggttgactttccagttatttaatgcatcagagctgctgacagatctgagcctggagacacgttgattttgaataccatttcatgaaattgttttatggcttatagaaactagaggaatttgaaactggactcttttcaataaattgatataaaagcaatatccagttttaaaaattaggagaaagtcgagtaagtctagttcagggctatttaatsttttaccaattagcacttagttagacagtcttggtggaggaacatttattctgcactatgtcaatggaagcagcgtgagaagatgaaaagtta

SEQ ID NO: 251370 - DNA, 623 bp, Homo sapiens
caatacctgttaattccagagctcccactgtgacacaatcagctgtacccgggtatgaggtagggcacagttcacatggtaccaaataaatttaggacaagaagggctatagccaggaggaaaagtcgaccataagggggtatgggtggggcaaatgtgtgaaaacatgcctatcacagctggcatggatgtatccaaataggtgagtgctgggaagtacattgtggcacctgaccttaggaggaagaaatacatagttactaagaggcagaaatctggtctgtgttgcacgactaactaggggtgtgacattgggcaagcagctcaatctttttgggcctcactttggttatctgtaaaatgaggggcgtggttaattgacctcagaggaccccttcagttacaaaactctattattctatcatgtaggtcttgaattatacttcgttcctctgagctacagtgatcatctcattattcygattgaaaggctgagtccagggaggacttgcggggtggggtggactcatgagcatatcatgtagttggcttcacatgtagcacaatttgaggacaacacaatcgtcacctgtccttaaaatttctccctctgtctatcacag

SEQ ID NO: 251371 - DNA, 541 bp, Homo sapiens
aagtggtaagtgtaagtaattatttccttgagttctgtgaatcctttcagccaattaatcgaactccaagaaggagttttgggaacctcaacttgaagccagtttgtcagaagtttcagaggcccagacttgcgactggtgtctggggggtgtggggagcaatgttggggactgagcccccaacaggccagatctgacactatctctgggtaggtagcatcagaactgaattggaggacacccakctggagtctgctgcttggtgtgtagggaaaaactccacacattctgtgttgggaagtcttctgtgttgatgattgttgttgtggtggtgtcagagtagagggaaaatgcagttagaaagagagtttttccccatacacccttcagtagaaacccctaactgtaagcatattgcaagacccaaagactctattaagagaccccatatccaaccttcctttggcaagatctgaaaaccaacctgcctcttctgcagaaggctaactttcacagtaccagggcatgcttccgaattagc

SEQ ID NO: 251372 - DNA, 622 bp, Homo sapiens
cccttcaggaatgaacgacttactttcctatttgctgggagagcttccagcagagatgccctcggttgtcccttgtaggactgccactgctaaagagagcctttctgctggggctgactgtgtccaaagactaaccaacatggggatctaaagggccagtccccttgttccaacttgagacagttctgaatgattttctcatctcagaactctcagtagggtcccctgaggtctctgtggaaactgtatcacagctcaacttcttcccccgcccaatcctgcttctttcctttccagtccctttccttccacaggtgttactcyaggagcacatcctgataaaccacctgcatgctaatctccatctcagaataggaaccagggaactggcctgggggctggtgggggtttggatacaaccctggtttgcttgaaaacctgtatgccagtggggatgaacagctgccctttttgtaatcatttgcctggagtgggtaccttttttacaactcctctgcctggagggggcgcctttgtgtaattcatcagctgggaggaaccacctttgtaatttatctgcttagcagatattctctcgcaatttgcattaagctactagaaa

SEQ ID NO: 251373 - DNA, 455 bp, Homo sapiens
gttggaagagagaaggaaatatgccaatacaagaatattttaattactactacaggtggctggggattaatccaattgtcgttgtctgaggagatctatgaaatgtgcctccaacctgtccatccaggggacaaggtagaaagaattgatccattagctcctggtcccattggtcaaggatgggtttaatttgcattagttctgcagccttcccagttgtgccagcctgagtgctaagaatgtcctgcagcatcaaagatgccccatagcaaaagcagaacactgggataaatctgagggaggagtctgacaaggtgcacctgcatgaaacagtgacggttcygtgaactggtttttgcaggagtagctggagtaagaactggaacaaatctgaagtagtacatagttggctttgaatacactagacaaagccagtcctgataccctgagctggc

SEQ ID NO: 251374 - DNA, 455 bp, Homo sapiens
gttggaagagagaaggaaatatgccaatacaagaatattttaattactactacaggtggctggggattaatccaattgtcgttgtctgaggagatctatgaaatgtgcctccaacctgtccatccaggggacaaggtagaaagaattgatccattagctcctggtcccattggtcaaggatgggtttaatttgcattagttctgcagccttcccagttgtgccagcctgagtgctaagaatgtcctgcagcatcaaagatgccccatagcaaaagcagaacactgggataaatctgagggaggagtctgacaaggtgcacctgcatgaaacagtgacggttccgtgaactggtttttgcaggagtagctggagtaagaastggaacaaatctgaagtagtacatagttggctttgaatacactagacaaagccagtcctgataccctgagctggc

SEQ ID NO: 251375 - DNA, 577 bp, Homo sapiens
ctgtctggaatttccatcagaaatctcaaagtctcttatgataatgcttagtataagtggcaaaaatgtaacttacatgagttctattatgccactttccaaatagttaaaccaaaagaatccagagaacattatataatctattgatagcaggctaaataattttcaagtgacatgcaacacatacttatatttagtctttgttgtttgatgtcttaataggtaattttgatatcaaaacaaattaacaaattgtctaaggaaagcttgaaatgattkgcaatgcatttaataacaatgaaattcttaaagattaatctaatttggaacaatgatataaactgagatgagatgtaaaattaataggtgagaagtcatatattttcattgcaaattatcaactgcatataaccagaattggggagtattggcttaacagttgggcataaaatccaagaataactgactgaaatctcattatttgccaacaacaaaattcagttgccaaaaaaaagaacttgtgccattttaatatgataagggattaattgtgtctagatcaattattctgtactta

SEQ ID NO: 251376 - DNA, 589 bp, Homo sapiens
tcttctttcagtggataattcaaccaatatgcttttctgagctagggctaattatcattctttacttatctacgaatacaccactgcctgagtctatcagttctattggtcaaacgtcatctaacrtaacaaacatgtcttcataacaaatattcttatattttttatgtcctttaaacataccttctaacaattccctagtttaggtcaccataatcttttacctacattcttgccataattttctatcatatttccctattttgagacagaaaaattattttccacatggcagccaaagtgatttttctataatacaagaataatcacatcactccctcccatcaaactcttcaaatgccaacaattccttccaggttttaatacaaagttcttcatgatttggaaattatttatattcctagaatcatttctccttaaggtttacctcttactctatgtaaaagccccacctattcttctctatgagtcttagaaaacaccatgcttattctcctgtctagaactttatataagaaatctctctacttgaatttctcctcctcttctccttcatattgctaactcc

SEQ ID NO: 251377 - DNA, 532 bp, Homo sapiens
aattattttccacatggcagccaaagtgatttttctataatacaagaataatcacatcactccctcccatcaaactcttcaaatgccaacaattccttccaggttttaatacaaagttcttcatgatttggaaattatttatattcctagaatcatttctccttaaggtttacctcttactctatgtaaaagccccacctattcttctctatgagtcttagaaaacaccatgcttattctcctgtctagaactttatataagaaatctctctacttgaatttctcctcctcttctccttcatattgctaactccttaactcaggtgccacttagtccagaaagttctccttgtcctacctccttagttgcccttagttgtccctttagaatcctcattacaataatttgtaattgacaaaatagtgacttctttttgtctcccttagattataagcactgaaaatttggccccttgatactgaattcaacattatcttctyactgctccactgacaagcccagtgactgaca

SEQ ID NO: 251378 - DNA, 538 bp, Homo sapiens
acaaacaacaggctaaaaccggatatggatgacttctatttaaagctattattttgctagttacacttctttagtataagattcatcatgcggcaatgtcttcatatgtttcttctgcaggagcctccaaaggcacaatggagtaggtgaagaaaataatataaactgtttcaattttcaaagtaagcatccttatggccagtttgttgtacatggaacaatttagttgaagaacaatatattacccagataaattaaagagttattctctctcttgggcttaatagtttacttatatgtagagacaaaaaagttcttcactaaaattatttggttattgtattgataggtgtgtgtgtgtatgtgtgaaattttgcacagtttatagcttttaagctagatrgctatttttaaatgcttctaaatattttcatcaaatatatacatataggaatttaaaattgaaatccattcataaatgctaatatcaaatccttatgaatagttattctttatccaacatatttgaatgttcact

SEQ ID NO: 251379 - DNA, 565 bp, Homo sapiens
gtgtgtatacatacgtatatggggaactcatacattgtatatgagttcccttttatcyacatccaacatttgtatatactacatgtatgaatacacatacatacatacatacatacatatatagtggaatactactgagccataaaaagaataattttttttcattggcagcaacatgaatggaactagagaacattatattaagtgaaatgagccaagaacagaaagttaaacactgtgtgttctgagttatatatgaaaactaaaaaatgttgatctcatagaagtaaaaagtagaacagaggacaatagagactgtgaagggtagggagaagtggccatagggagagatttgttaaaggatacaaaatcgcagctacataggaggaacaatttctagtgttctatagcactgtaggatgactatagttaacaaaaatatttcaaatagctagaaggagaatattgaatgttcccaatacaaagaaataataaatatttgggatgatacagatatgaattaccatgatctgataactatatattatacatacagaaacatcac

SEQ ID NO: 251380 - DNA, 565 bp, Homo sapiens
gtgtgtatacatacgtatatggggaactcatacattgtatatgagttcccttttatccacatccaacatttgtatatactacatgtatgaatacacatacatacatacatacatacatatatagtggaatactactgagccataaaaagaataattttttttcattggcagcaacatgaatggaactagagaacattatattaagtgaaatgagccaagaacasaaagttaaacactgtgtgttctgagttatatatgaaaactaaaaaatgttgatctcatagaagtaaaaagtagaacagaggacaatagagactgtgaagggtagggagaagtggccatagggagagatttgttaaaggatacaaaatcgcagctacataggaggaacaatttctagtgttctatagcactgtaggatgactatagttaacaaaaatatttcaaatagctagaaggagaatattgaatgttcccaatacaaagaaataataaatatttgggatgatacagatatgaattaccatgatctgataactatatattatacatacagaaacatcac

SEQ ID NO: 251381 - DNA, 597 bp, Homo sapiens
agttaaacactgtgtgttctgagttatatatgaaaactaaaaaatgttgatctcatagaagtaaaaagtagaacagaggacaatagagactgtgaagggtagggagaagtggccatagggagagatttgttaaaggatacaaaatcgcagctacataggaggaacaatttctagtgttctatagcactgtaggatgactatagttaacaaaaatatttcaaatagctagaaggagaatattgaatgttcccaatacaaagaaataataaatatttgggatgatacakatatgaattaccatgatctgataactatatattatacatacagaaacatcactaggtagtccataaatatgtacaattattgcatgtcaattaattttttaaaaattaaaacaagagtgctctaaggcactgtgtagataaggaaattaggctctgggaaggtgtgtggccacgctaaggacaggaaacaaggtgttctgactcacaaatcagactgttaagttttctctggggtgtggaccttctttctcagagggaataaatgagtaaggcaggtgacaagggcaggtgtaggtcacataacatatcc

SEQ ID NO: 251382 - DNA, 536 bp, Homo sapiens
ttctgcagttccctcgcattctgaataaaaaaaggccatcatgcttcacatcaccactctgtccctcagccagccaataataaaaggaaaactacctccagtcttttcataattaaataaaaaacttatatttgtttagtgtactgttagttgagttttccgwtactgtgtgtgcttaaacacatcaaaaatgctacaacttcataattaaaacctatgctgccagggccagaggttatattaatagtagtcttagcccctaaatatattgccctatacagactaatgtgcaaacagaagctacagacaacttaactccaagtgataatggaatagaaatattctccaaacaaaattttctgtaatatgtgaatatcagtttattcaaatgacattaattagtttgataccaattataatgaagaggcagtgccaagcttttattcatagtaattgagttcttttgtttatttggttttggtgcaatacaattctactaagattaagtagtggctcttctttgattgttggggaat

SEQ ID NO: 251383 - DNA, 579 bp, Homo sapiens
tggcttgaagcttttagcatggatttttgcaggccaataacttttatacaggtaaattgttatcattggtcactattgcttcagaagaaaaaggaaatatgagaaaaatttgaaaaatcatctgttatttttttaaaccagcctataattcttctagaactactattatttgtatgattaaaagtgacatatttgactctgttcctagaaagttcccttttatctcrccagaggaaggcttgttcctagatctaagaaatgtatgatagtgatatacagtaataaaacacattatccaaaggccaggtgggaaaatactgaatgctttgtttcctgcattcttccttttaatcaatatcaacttgcgaccaatgatattgaaaagaaggtacacccgcacagaggccatctgtatcagggatttcctccctgagctcagggaatccctggcataagacttactgcattcaatactacatagtcgtctattctttcaagagtattctacatcaaaccaggaatccatatcagggatccactcccagagctcagggaacccctgggacaagacttgctata

SEQ ID NO: 251384 - DNA, 591 bp, Homo sapiens
tatgatagtgatatacagtaataaaacacattatccaaaggccaggtgggaaaatactgaatgctttgtttcctgcattcttccttttaatcaatatcaacttgcgaccaatgatattgaaaagaaggtacacccgcacagaggccatctgtatcagggatttcctccctgagctcagggaatccctggcataagacttactgcattcaatactacatagtcgtctattctttcaagagtattctacatcaaaccaggaatccatatcagggatccactcccagagctcagggaacccctgggacaagacttgctatattcaataccacatagtcatctagtcttccaagagtattctacatcaaaccaggaatccagataaagattttgagttgaatctatagaataaaaatgtttctataacttatgtatcactaagattcatgggcatttsagaacaaattaagtaattgcaatctgaagaataaggtaagaagtaaagaaaaaactcaaggtaaagttttctatctccacccaacaattacccatctcctcttaatttgaattttcattatttgattatacttattg

SEQ ID NO: 251385 - DNA, 564 bp, Homo sapiens
agggagatggaaaaagtatagtgtgctaattttcttgtattcaaagcagagagaaaattgatataaattagtttttaatttttggaagataaatagtatttctaaaatgtccattttttcttatttaaaaaaattgtaatagcttccatctcatggtgttaaaaacaatcttaacttcaccatttccttcactttttaaaatttmtcttacccctctgctaaatataataaaaataaatcttaatacattttattaaaaatagcatgatatatgattttatttttataaaaatactttattcacatatctatcctctatttttaaagggatacttgggataataatgtctattcaatgtttactataattatttctgttagagaaatgtgggaattttttaaccttttatttttatgtattgctgcaattccttgtttgattatattgtgataaaataatgttagataatgaaacaacagaaatgaccatttgtgtaggagactaaagagttgttagataccagtaacaacttcctattcatttcaacagtcaggctccttcct

SEQ ID NO: 251386 - DNA, 603 bp, Homo sapiens
ataaaaaaaaccaaagttttaatgaagcagtgtaaagaaggtttctgcatgaatagagaggacaattattaagggaatactgcttactactttttcaaaattaaaaagtactaaagtttccaggcctaatccaaattctatgtgtagagttttttttcctaactttttatttcaagtcttagtaaaatgtttatttagctctggttgaaccagaattgattcaatgtttataagtataagcttgacaatgcaaaagcttatctttccttccatttttctcagacttggagtagactgtcctgagcaaacagcagtgtaggtatatatgaggtcagtttgtacttctggttgctaragagctggccacccggtaagtaacctgattaatctttccataggtgttggatagtcttcaatgcattggattttatgtagagtcaataaaaagaagttctgaacatccaatatgcatacagtttcaggctaaggtggaaaagtatttaaagataaaggctagattgtctcaatttagattttatcttttccataatctatacacagacacacacacagacacacacacaggcacacacacacacacac

SEQ ID NO: 251387 - DNA, 395 bp, Homo sapiens
aagacatgctaccttgccaggctggctacaactgatgacttaattgatgtgagggtgtgaatgctgactgcttttcccaacttkgtaattccctgtaaagttaacagaaacctccattgagaatgaatcatagctgaacttctgcagctgccttaattgctgtctcaatctgcttcctgaaaaacaaactctgtaagactttaaattttgaaacgggatagaccatttgcccgctggtaatggggaccaggcgctggtggtaggtggagcacaggtagtccctagcagaaagtagtactgtaattattaaaatgtccaccatgggttaattgggattagattgtggtggaaggaaattcattagctggtgcagtatatcaggcttttgagaaata

SEQ ID NO: 251388 - DNA, 395 bp, Homo sapiens
aagacatgctaccttgccaggctggctacaactgatgacttaattgatgtgagggtgtgaatgctgactgcttttcccaacttggtaattccctgtaaagttaacagaaacctccattgagaatgaatcatagctgaacttctgcagctgccttaattgctgtctcaatctgcttcctgaaaaacaaactctgtaagactttaaattttgaaacgggatagaccatttgcccgctggyaatggggaccaggcgctggtggtaggtggagcacaggtagtccctagcagaaagtagtactgtaattattaaaatgtccaccatgggttaattgggattagattgtggtggaaggaaattcattagctggtgcagtatatcaggcttttgagaaata

SEQ ID NO: 251389 - DNA, 395 bp, Homo sapiens
aagacatgctaccttgccaggctggctacaactgatgacttaattgatgtgagggtgtgaatgctgactgcttttcccaacttggtaattccctgtaaagttaacagaaacctccattgagaatgaatcatagctgaacttctgcagctgccttaattgctgtctcaatctgcttcctgaaaaacaaactctgtaagactttaaattttgaaacgggatagaccatttgcccgctggtaatggggaccaggcgctggtggtaggtggagcacaggtagtccctagcagaaagtagtactgtaaytattaaaatgtccaccatgggttaattgggattagattgtggtggaaggaaattcattagctggtgcagtatatcaggcttttgagaaata

SEQ ID NO: 251390 - DNA, 568 bp, Homo sapiens
ttatgggaaggatgggaagttccatttgattttcaaaaattcttcaaaacaatttacaaaaagctttaatgcattagatttctaatgctcagttataattttggaaagctgttaaaaacaatamacaaaaaaatgtaaccaacataacctgatagattttctggatctgacttagagttgatctgtgtagtggtaaaattttaaaaatcctatggatataccaatacaaaagagggtgggaaatacatatattcaggcaattccttttaaccatcttcttcaattactcaggaagctgtgcagtatacggaaatatgctctatggagaccggagtcctaatatgaattacatttgctttgggagtcaggcaagccacttcaactttctgcacgagtattctgttaaaacttggtgtgttacagaagagagatgatatgggtttgaggtaggagtgtttagtgaacacagcagaactcagagaacaataaccattacagatatgttagttgttgcttcttcaactcgtttgactttatttagtcaaggactatcttgtatgtaaataat

SEQ ID NO: 251391 - DNA, 596 bp, Homo sapiens
ctatttattcactgtataaaaatggcaccagcaaatgcagtatgttgcaaaattaagattggattgttttccatctgacattgtacaactaactcccaattatttccagtggaaaggtcattcagtattttgatccaaatctatggatggatgtcagcaagttataatataatataaggcttaagataataatgttatccttgaattacataatttctataactagttttcaccaccaataattacatgaattctcaatactagaccctagtctaaacaccatagggtattttgaaaaagatgcatattgtgtttatccacaatcattggaaagttaaggtgtattttctttcaccagcagtgttgagagtagtttcttttcccatcacattgccaaaagttgctatttaaagtcttctatccaccrttactttaattcaactatgctggatgaagttatctcatactggtttgtttaggaattccactttcagtcttcattagattttgtgtatttctcatacacttcactcgttagtccatctagttctgaagggttacttagtgtcatcttgatcagtcagccactttcataa

SEQ ID NO: 251392 - DNA, 467 bp, Homo sapiens
taactaactgttgtcacattagcacaatgtgtgataactaattttggagataggtcaggaaactagattcacagaatgattagaagctagagggccctcagattaggcaagcattcaaacatcagtaatactcaagcacaagagagtggggagatgcartgggtcagaaacaggcaagaaatccaaacagcaaatacagagacacctgcaacagagagaactagaaattaaacaatcctgctccatgtagaaatctcttgaagtggttcgagagaggaaggtggtatccaaggagagtgcaggccctgatagaggagacactaaggggacatggagagaggctcaaggaaggatgggaaactagagaatcgggtgatggtctgaagctgtgggtgtttacctgaaaaattcttggtggtaaatcaatatttggaaatttggggggaaattgattagagtgcagactg

SEQ ID NO: 251393 - DNA, 498 bp, Homo sapiens
attactgaattctgctatgcacctattagttgcatttgctgtatccttgcacatatttttgagccccaaacatagtcacttgcatatgtttatcmaaatactcccataaatataaaatgtggtgacaataatattgtcgaattataactagatatttttctattctgtaatactatgaaaactcatgactgtgaatgattagattaaaattgttcttgtcttttgtggatgtagaaaaccactctagttgagaaaatctgattaaatggtaagaggaagaagtcccatataagagaccaagggatgcagtctgatgagggaaaataaaagagagagagagaagtctagagtatcaactgcataacccaatccctgtctctggatagttcactgattactacagctccttgcagtgggagaatattttcagtgatattatttaaaagaaacaacaaattattacaggaagaagacaaactaaaagtgaattcacccagt

SEQ ID NO: 251394 - DNA, 626 bp, Homo sapiens
tcttcaattactagttactacttgataccaccacaaggttaataataatgagggtgctatcattgattactgaattctgctatgcacctattagttgcatttgctgtatccttgcacatatttttgagccccaaacatagtcacttgcatatgtttatccaaatactcccataaatataaaatgtggtgacaataatattgtcgaattataactagatatttttctattctgtaatactatgaaaactcatgactgtgaatgattagattaaaattgttcttgtcttttgtggatgtagaaaaccactctagttgagaaaatctgattaaatggtaagaggaagaagtcccatataagagaccaagggatgcagtctgatgagggaaaataaaagagagagagagaagtctagagtatcaactgcataacccaatccctgtctctggatagttcactgattactacagctccttgcagtgggagaatattttcagtgatattatttaaaagaaacaacaaattattacaggargaagacaaactaaaagtgaattcacccagttgaaatcccaatttagttacttactagaaatgtactcttatcctcagtaacttcataataata

SEQ ID NO: 251395 - DNA, 626 bp, Homo sapiens
tcttcaattactagttactacttgataccaccacaaggttaataataatgagggtgctatcattgattactgaattctgctatgcacctattagttgcatttgctgtatccttgcacatatttttgagccccaaacatagtcacttgcatatgtttatccaaatactcccataaatataaaatgtggtgacaataatattgtcgaattataactagatatttttctattctgtaatactatgaaaactcatgactgtgaatgattagattaaaattgttcttgtcttttgtggatgtagaaaaccactctagttgagaaaatctgattaaatggtaagaggaagaagtcccatataagagaccaagggatgcagtctgatgagggaaaataaaagagagagagagaagtctagagtatcaactgcataacccaatccctgtctctggatagttcactgattactacagctccttgcagtgggagaatattttcagtgatattatttaaaagaaacaacaaattattacaggaagaagacaaactaraagtgaattcacccagttgaaatcccaatttagttacttactagaaatgtactcttatcctcagtaacttcataataata

SEQ ID NO: 251396 - DNA, 562 bp, Homo sapiens
agaatttgtataagtaaaatatgctttattatgagattaaataacattcgactgtcataagtgatatttcaatgaaattatgataattggagcagaaggaagtgagaaaagttacagaggaaatattccccatgttgatgctgcataatgagcacatgggtttactgccatattctatatttatgaatgttttaaatgttctttaaagatgttgaatgtgacatttgttgataacattagaatatatttataatatggtatacaaaaaataaaaacacaaaatggcaaatgtaacaaactccacgtagaaaacataagaaggaaagaaaaccaaagtagtccaagatataaataataaatgtctcttgaaagtgacataatgggtcattattttttttctatatagttacctataaattttctaacattaaccaaaaaagtgcaaaaacataattatwagcattgaaaacattttagcatgcattattcataagaaaaaaactaagaaagtacccacatattgatatgaaaattcaatatttaaaaaatcaacaaaagacat

SEQ ID NO: 251397 - DNA, 366 bp, Homo sapiens
tgtgaggtgacatgtagattgattttaaagtacaaaccccctttgaaatggtaaggggatctctgaactttcatgccttctggtaaactttgattttatcaaccagctgaaatcattcactgaagtayatgttattttgatctaggcaagttgttaggatcctggaaagagatcttagatttctttaaacttggtaagtgtaaaactggaaggcccaagagtgggggctacctgagaagtcccacatcaggtacttctctctcagttgttttgaccctgaggacattttttattgaatgaaaacaaacgttttcatcagaattattccaacatttctggaaatattatcaagaaattattttctag

SEQ ID NO: 251398 - DNA, 366 bp, Homo sapiens
tgtgaggtgacatgtagattgattttaaagtacaaaccccctttgaaatggtaaggggatctctgaactttcatgccttctggtaaactttgattttatcaaccagctgaaatcattcactgaagtacatgttattttgatctaggcaagttgttaggatcctggaaagagatcttagatttctttaaacttggtaagtgtaaaactggaagscccaagagtgggggctacctgagaagtcccacatcaggtacttctctctcagttgttttgaccctgaggacattttttattgaatgaaaacaaacgttttcatcagaattattccaacatttctggaaatattatcaagaaattattttctag

SEQ ID NO: 251399 - DNA, 608 bp, Homo sapiens
acacagcagtatgcaggaaggtttcatgagaacaaggaccaggttcaccttgctccccattgtattctccatatcatcataaacggcacataggaggtattcagtaaatgtttgttgaataaatgaatgaataaaatgatacaaaaataaataagacactaggcatactgcaataggactcctgtccctacagtcycctaatatttacaactagggctgtctaatgaccttcttccacagcctctaatttcagtgctgttgttagcccaggagactaaggaacaccaggtcagttgcttaatgtcaaaaaagcctttctgattgttctgcaattatcataatgtcttggctttttcctctacaatgcagctctttctggatatcccagaacctaccactaataaattaatttcatggtactgaatttcaacctgcctattgctggaagttaacactgccatcagacctccccagaggtagcagcatatggaaaacgcaatgccctcagacaggagcatgtcttaaaaagacacctgtctggaaggtggatggttgatctagaatgttcactctgtacaccaaaatcatacttatagttgtcagttcag

SEQ ID NO: 251400 - DNA, 611 bp, Homo sapiens
tttttaaaaactttacagagttagatttatattatacggtttttgttttttgtttttttgagacagggtctcactctgtcacccaggctggagtgcagtggcatgaacatggctctcactgcacctctgcctcctgggctcaagggatccttccacctcagcctctccagtaactggaaccacaggcatgagccatcacacccggctaatttttgtatcattttggtaaggttctgccatgttgcccaggctggtctccaacttttgggctcaagcaatcctcttgcctagactcccaaattgctgggattacagacatgagccgctgcacccagccagatacatattaaacagtcttatgtcctcattttttcattttatattttggaaataccatgtttaatcacagcataatattctacrgtatgccataattcatataaacactattttattgttggacatgtaggttgcttatttttttattataaggatgttccaaatatatatatgcacagttttattgtaagcatagctaatcacccctaaaagagatgcaaagctttcggccatcactaagcaaatttcaatttattctatacaatctgcct

SEQ ID NO: 251401 - DNA, 595 bp, Homo sapiens
tggggagggaaatcagctttactcaatctactgattcaaatgctaatctcttccagaaacaccttcacagacacaccccaaaataaagtttaactagatatgtggacatcttgttgagaggtgaagctggctgggcttctgagtcgggtggggacttggagaacttttctgtctagctaaaggatgtaaacacagcaatcagtgctccatgtctagctaaaggtttgtaaacacaccaatcagcactctgtaaaaacgcaccaatcagtgctctgtgtctagataaaggtttgtaaacgcaccaaccagcactctgtaaaaacagaccaatcagcactctgtaaaatggaccaatcagcaggacgtggaccaggctaaataagggaataaaagttggccacccgagccagcagcggcaacccactcgggtccccttccacactgtggaagcttwgttctttcgctcttcacaataaatctagctgctgctcactctctgggtccacactacctttatgagctgtaacactcactgcaaaggtctgcggcttcactcctcaagtcagcaagaccacgatcccaccagaaggaagaa

SEQ ID NO: 251402 - DNA, 676 bp, Homo sapiens
tttcattttagctttatgatttattgttggacatcatcctgccatcattttatttttttctttttatttatttttattttttgagatggagtttcgctcttgttgcccaggctggagtactgggataacaagcgtgagccactgcgccyggcgcctgccctcattttaaacctgggctccctttgtctcaacttcagagtggtctatgatttaagtacaaaataattcttctttttgtagtgcttttttttggtggggggtatgtttgttaaattatttatagtgataggttctacagaaatagatgttttttactgagaccatcaaaaccctcagtgctttaatgattctgctgattaagtggaaaacacatgaaggcttgtcaacctgtcaacccaaagaaaatgctatctctccctaatgtaaatggattacataaaggcctgctctcccactgcatcaagttatggggtttcatgctctaaagaccaggtaggtattacttcacacagttcttgcggaatgttgaacttttaagatgaagaaccaaattttaaaactgtcataaatctaagtctggctttcagaaggcaagaatgctatttttagtgtgtctggattgcagtctttccctttggtagttgatgatgactgcacagtaagaatgaaaaatgaa

SEQ ID NO: 251403 - DNA, 485 bp, Homo sapiens
taggttctacagaaatagatgttttttactgagaccatcaaaaccctcagtgctttaatgattctgctgattaagtggaaaacacatgaaggcttgtcaacctgtcaacccaaagaaaatgctatctctccctaatgtaaatggattacataaaggcytgctctcccactgcatcaagttatggggtttcatgctctaaagaccaggtaggtattacttcacacagttcttgcggaatgttgaacttttaagatgaagaaccaaattttaaaactgtcataaatctaagtctggctttcagaaggcaagaatgctatttttagtgtgtctggattgcagtctttccctttggtagttgatgatgactgcacagtaagaatgaaaaatgaaacttctggagattggatagctaaggagattgaaaataacacccagacagtggagcctttgggtcactaatttgaattcagctcagatcagtgatg

SEQ ID NO: 251404 - DNA, 485 bp, Homo sapiens
taggttctacagaaatagatgttttttactgagaccatcaaaaccctcagtgctttaatgattctgctgattaagtggaaaacacatgaaggcttgtcaacctgtcaacccaaagaaaatgctatctctccctaatgtaaatggattacataaaggcctgctctcccactgcatcaagttatggggtttcatgctctaaagaccaggtaggtattacttcacacagttcttgcggaatgttgaacttttaagatgaagaaccaaattttaaaactgtcataaatctragtctggctttcagaaggcaagaatgctatttttagtgtgtctggattgcagtctttccctttggtagttgatgatgactgcacagtaagaatgaaaaatgaaacttctggagattggatagctaaggagattgaaaataacacccagacagtggagcctttgggtcactaatttgaattcagctcagatcagtgatg

SEQ ID NO: 251405 - DNA, 575 bp, Homo sapiens
agaacaaaaattgacaagtcagacctaattaaactaaggagcttctgcacagcagaartaaatacacagagtaacagaaacctaaagaatggaagaaaatatttacaaactatgcatccaaccaaggcctaatatccagaatctgttaggaatttaaacagatttgcaagcaaaaaaacaagaaaccccattaaaaaatgggcaaaagccatgaacagacacttctcaaaaggagacctacagccaacaaacatatgaaaaaaacactccacatcactaattatcagagaaatacaaagcaaaaccaaaatgagataccatctcatatctgtcagaatagctagtattaaaaaatcaaaaaataacaaatgctgatgaggctgcagataaaagggaatacttattacactgttggtgggaatgtaaattagttcagcaaatgagaaaagcattttgaagttttctgaaagaacttaaaacagaaataccatttgaaccagcaatcccattacttggtatatacccaaaagaaaacaaatcattgtaccaaattgacacatgtaataacatgttca

SEQ ID NO: 251406 - DNA, 524 bp, Homo sapiens
atcttgtggagaaaaatacatagccatgctgaactggttccacttcatattcaaaagtataaacctcatagcaggtccttaacactctcmgacagtcattttagtgttctctaatccattcagtctcttattctcttaaatgactatttgatagcttgtcatttctctggaaactcccaagaactcattcctattctcactctcagctgatgaccttagttcctatttgcctgagaaaattggagcaatcagataaaccacatttaccctctcattgtcatctgtactcagaatctcagccatccaattggcaaactacccataatcctgtctaaagccacttcttgaaatctccatttctgccaccattgtctgagccatcatcaccatctggattccagcctaacataccttatctcccacatttatcctcacaatccacctttgcctagtttccttacaaattggtgacacatccagtgtatgtgcatgtcaggtcatgtaacattcctgctaaaatcatt

SEQ ID NO: 251407 - DNA, 556 bp, Homo sapiens
accatgctggcttggacagaattaatttcattcatgttatggagaattctatattacaaatctggtcccctataatatgaacagtgagcagtcagaaatatacaaagggttaaatagggtaaagactttggccaagaaaggaaaggccttagttctaccatagagtatcttctctaattaaaatgactgggaaatatatggaagcagaaaccagcacaaagcactacccatctagaaataatctttcagttaaaaaacaactctcaaaaccagcactcatttctctaagataggttataagtattttacgatttcttgttatattaaattgagttaaaggtactgacaagtcaatatgcaaatgggtttaaacactaatttgatttctcttctgactagctctggagagctgtgacatctggatgttggtgtcactcacacaggtaggtggtagagaactttcataacaaaactacacactccayaccaactgggcaccagcttccaaacccaactccacttcaggtcaaacaaccttaaggaactacctatagtc

SEQ ID NO: 251408 - DNA, 648 bp, Homo sapiens
atgtatgccaactaggcgctgagcgtgcacacccagtaagacagcctgatgaatacctacctacagagtaaattaagacttgttcacaaagttacagcactttagaactggggaaagttttgggaattaaagagtaacgttagggccctcaaaagatatttataaaatagataaaaacacagaaacttgtgccaggagttgtctctaatttcaaatagggagtcaaagatagtttaaattcatggatgatggaggctctatggagtattatctatctatagtatctttggtgaaatttgaccttttaaagctctatacaagtcrtctgaatctcctttcaaaaaaaacatttttctttgatttattacttcttgttcatttattccttcaacaaatatttattatatgtctactatgtgccagatactacaattgtctcccttcttacctttttttctttttacctttttccagggttgggaggaagggaaggcaggaattggtgactgcagttctttcctataggtcaaggtttgggagacttttagattgagcaattcagtggttgcaggttatcttgcagggcagagcaaaggcaggaatcatacatgcctttgcccatgcctgtgcccattcatgagtgtgagt

SEQ ID NO: 251409 - DNA, 566 bp, Homo sapiens
gacctacagaatcatctctgtaggctgcagaccctgtttctgtaaacatgaggatgtataatggcatcttaggacagcagtttttacctgtgaatgcaattatggcattaaccttatgctgttactctaagaagttcaaaaatactgctctaagaagcaagaattaaaaygaaatgtgtttttttattataagagccaaagattcggatatggactcttatctcagagattgcttcaatatatagaagctatttagaagggggtcatgtaagccaaagacaaaacttgtattgctcaaaagaggaagagctttttacaaattcactaataactctttcataagaactgtaaccatttgctactttgaaatgaaaagggttcctcttataaactaatagaaactattgagcagaagtgattactgacacttaaaggtagaaaatggaaataagaatctggtaagttataggcatgtttgccagattccttgaattgtttggtcatttaaatgctgcgaggatgtatatatcaaaagggcttaggtctaaaatgattttcactagaaa

SEQ ID NO: 251410 - DNA, 476 bp, Homo sapiens
gtatgaccccaatctctcctgtcttctaaaagacttaagtgcgtattttcactagatcctacatagacccactatataaaatgggcattgatatttttatttttaagacctagtaggtgctatgtaaccaaattctcctaaattgtaagatggagttgacacaccaaggcagaagcacctgtggacawtacgcccataggagtcaacttgggtgggtacatggttgctgcgctggttggaccatttctgctctaagtcacaccagatgaggttgagaaggttaggagttgacttagcagctgttagttactaccaaatgctgtgtgagcactagatctcaaaaaactttgaaatatatatgtgtgtatatatacatgtatgtatatagttgtgtgtatatgtatatgtatatatacagtgtatatatacatatttgcacacaaaataaaccaggtagacagtgtacatctcttaaa

SEQ ID NO: 251411 - DNA, 478 bp, Homo sapiens
gctccacttcctgttttagttggttaggagggggacttgggatctacaattcttaaaagctctccagggaatactagtgagcatagaggattgagaaccactgatctcaataaataaccactggtaagttatttttaccttaactaatatttcaggcaaaagtaagttctgcacttacttatctggagaagtagcccaattcaccattaaggccagaatattgataccttagagaatttcatgatctctattaatgtgaagtgacactgatacttttaaataatttttacatggcacaaaattatctgtgagtgccaactccaagatgtggttgcagggcaaagcttaaatatggattaatcttattttttagactagtttttaatttgaattagctgccacccaatagaagtagagttctatagtctcagggtgcctakacaaataaatgaaataagctggcaaatcaaattcctca

SEQ ID NO: 251412 - DNA, 538 bp, Homo sapiens
aaaaaattttgctacaatgtttacaagctctaataaattatggataatttaccaaattaataccagtgaaatgaagcccgcctttttagattttcatttatcattctacctagctctttcctcccctccgcccatcgtctgtctctctctccatctctctctctctcacatacaagcagatagcgtcatttttaagcttatattttttctaaakcagcattctaggtcactttttgtgaaatgaagttgaaagtatttattaggttgcttgcacccacagcaacagtatttctgtaacagattttgacttgagaatcaaagtttgaatatagtataattggtatgttctagcttggtcccatggcccataaaaaaaaactagaattagacataaagtaatgaaggatcctataaaagaagctgagcatcattttttaaaaaagttcctaatatgtagtaaactcaccattgtgaatatcaaactgtgttgagtacctactgtgcagaagacagactcctccatcaagaaatttttaaa

SEQ ID NO: 251413 - DNA, 556 bp, Homo sapiens
tctactgtatccattactgttttttatttgttgcccttgttcattgttcttctttttgtcttctacttttttctgccttttgtgggtttaattgagcattttattattccatttcctctcttttgttaccatattaaactatttttcatcttttttttagtgcttaccctggagtttgcaatgtacatttacaactaatccaaatttagtttcaaataatgctataacacttcacaagtaatgcwagtacctcataataaataaataattctcccatcacatttatattatcattgctataatttatcttgcttatacgtagacatatatatacacacacatataatctaatacattgctactattattttttgaaaaagctgttcaatctgttgcattaagaataaaaaatatgggtggttccaagatggccgaataggaacagctccagtctacagctcccagcgtgagtgacgcagaagatggatgatttctgcatttccaactgaggtaccaggttcatctcactggggattgtcggacagtgggtgcagga

SEQ ID NO: 251414 - DNA, 429 bp, Homo sapiens
ttccatattcatgcatagaaagactcaatactgtcaagatgtcagttcttcccaatttgattcaatggaatctcaatcaaaattccagcaagtcactttgtggataatgacaaactcattccgaagtttatatgaatgggcaaaagacatagaatagccaacacaatactgaaagagaagaataaagttggagggctgacactacttgacttcaaaasatactataaattatagcaatcaagacagtgtagtattggtgaaagaattgacaaatagatcaatgaaacagaatagagatccctgaaattgacccaaatatagtcaactgatctttgacaaaggagttaaggcaatacaatggagaaaatttttttttcatcaaatgccactgaaacaactgaacttccacatgcaaaaaaggagtataga

SEQ ID NO: 251415 - DNA, 593 bp, Homo sapiens
agggtttggggatcttaatctcgtctagagcaaatcctctcgaagacttttacttggctagacttcttccactttacactgttgaacttggtggagtactagtcctaccaccataatccaccaaagccaacacacctttgaaagactgcttcctacagatgaggaaactgacaggtggtttcacattttgcacatctggctttaaaacaaaggactgatacaacagatactcagcatcagcctctttacttctgctagacactgctcctactaacagctcacgtcagctgtacatttcagtgctgtgttatttatgtgacagttccttgtagcccgttgtacaacaggaatccaagcacgtatttcccaaatttcaagttttacctgtcaatctttttagaaacttactcaccttgcaaaaaaactatctgaaggtatatctacagcattcctttatttttagttattgctcttataaaaataatcatattaaatgtgaagcaaaatttcaggaaaaaratattttgaccattaatgtagcattgcatatgtgatatccaatttttccatactgttctggtgtgaaaggggga

SEQ ID NO: 251416 - DNA, 309 bp, Homo sapiens
ggttgtggtcacagggcaaaccactgctcctaaattggagagcccaacattcaaattcagagaattgtggcttgctagaacagaaatccataagcacaaacttccgctgaaatcagtgccaaggtggagaaacctgaactataagkgataaattgctggaggcttagcatggacaagtctgacagataaaaaattccaggggtacccagtcatcagagtctcctcgcacttttgtaagtttgacctccaggagctcaatcagtgtattagtccattttcacactgctgataaagacatacccgagactg

SEQ ID NO: 251417 - DNA, 482 bp, Homo sapiens
gtccattttcacactgctgataaagacatacccgagactgggaagtttacaaaagaaagaggtttattggactcacagttccatgtggctggggaggcctcacaatcatggcagaaggtgaaagtcacatctcacatgrcagcagacaagagaagagagcgtgtgcatggaaactctccttcttaaaaccaacagatttcatgagacttattcactatcatgagatagtgaatgggaaaggccttcagtatgggaaaggcctgcccccatgattcaattacctgccaccaggtccctcccacaaaacatgggaattatgggagctacaattcaagatgagatttgggtgaggacacagccaaaccatatcattctgctcctggcccctcccaaatctcatgtcctcacatttaaaaaccaatcatgccttcccaaccatccctcaaagtcttaattcatttcagcattaactcaaaagccca

SEQ ID NO: 251418 - DNA, 612 bp, Homo sapiens
gtttttctgagaaggtgatattgagcagaaagctgattgaattgaactctaattgattgaagcaaaaatctggagaaaaaatattccataatccaggcagattgaatagcagttgcagtrcccaaagctcagggtaagatatgcaatttttcaagaagcacaaagaccagtatggttggtttcattgtgacattaggctagacaaagatctcttagacataaaaagaattatctattttaaaaaaggataataagttggacttcatcaaaacttaaagttttgatcttagaaagatatcattaagaaaataaagtgttgcatatcattctaaatgttgtgaaaaagaaatttttaaaaaagaaaaagaagtgttaagctgcagaccagaaaaaaatatttacaaatcatattgacaaggaccttgtatcaagaatagaaaaagaactcctacaaattaatgatcaaaagacaaatagctcaattcaaaaatgggcagaaggtgtaaacagacacattacaaagaagatggtgaccaatggaaacatgtaagatgctcaaggtcattagttatcagggaaatgtaagttacatgcacaaggatatattactac

SEQ ID NO: 251419 - DNA, 572 bp, Homo sapiens
aaagaattatctattttaaaaaaggataataagttggacttcatcaaaacttaaagttttgatcttagaaagatatcattaagaaaataaagtgttgcatatcattctaaatgttgtgaaaaagaaatttttaaaaaagaaaaagaagtgttaagctgcagaccagaaaaaaatatttacaaatcatattgacaaggaccttgtatcaagaatagaaaaagaactcctacaaattaatgatcaaaagacaaatagctcaattcaaaaatgggcagaaggtstaaacagacacattacaaagaagatggtgaccaatggaaacatgtaagatgctcaaggtcattagttatcagggaaatgtaagttacatgcacaaggatatattactacccattcactaaaatggccaaaattaaaaggaatgacaaaaactaagtcttgtcaaaaagtgagagcatctggaacattcatggatttatgttgagagtataaaatactatatctattttgggagaacgtcagtagtttttaaataaagttaaccatacactactacttgtcccagtaattct

SEQ ID NO: 251420 - DNA, 570 bp, Homo sapiens
tgattagttagaatgactacaggggctactaaataaggcagtggtattttaatagcagcaggtgtaaatacatgcaagaaatcacaatgattacaattgggaaatcatcttctgctacccccatttcaccatttcacgacagagataagtaaagatggattaaacagaactttaaacgtggaacaacaggataggagtgattggagatttcctagaacctcagtccacattatagctcaaacatagcaattagactggttggaaaagagcttcagcaactgtggagtgttatgaagacagggagaaagagttttatttgctatttataaaacacttctctctagacttgtactgttcartacagcagccactaataaaatgcggctgtttaaatttaaatttgtattaaatattcagtagaatttaaaattcagtcctcaattgcattgtttcaagttctcaatagccctgtgtagccagttactcccttgttggacagcaccaaagtggaacattttttttttttatcacagagaagttctatcgggtagctctgctctagattatatc

SEQ ID NO: 251421 - DNA, 463 bp, Homo sapiens
ccacagagataggtgaacacagaaggaaagaagagggaggaacaaaacttagaagtacatgcctggctcaaaagaagcctctaaatcaaaatttaaaaacatattggtaaatctatagaaaagttattataggcagtcaataactgagaagttattagctacagaaaaaaataaaaatgatggaagaaactaaaaattgaaaagtgtatgggaatctatctaaactgtgtatctgtcatccatacatctatctatctatctatctatctatctatctatctatctatctatctatctatctgcacacacattttcccccaaggaattagaaagcaatacaagtagtaaaaaagctagaatagttgacggacacgaactttyttcacaacaacgttccattacccattctttacctttcaagaatttgagacatcattaaggcagcagcaatagcagagaaata

SEQ ID NO: 251422 - DNA, 481 bp, Homo sapiens
tggttgtttttctgttttctttttgggaaaggtagccctttgatagttattttattccttccattttaattgctctatttagattttctagatattctttattcctttttttaaaaaatacaatctttttattttgaaataatttttgatctacaggaaaattgtgaagacagtacagaaaattctcagatattctctaactagttcccctcaatgccaactaacatcttaaataaccaaggtacatttycaaaaataagaaattaacgttagtacagttttattaactaaaccgcaaactacatttggattttgtctatttttgcactaatatcccttttctgttctaggatccattccaggatcctacattgcatttagtcagcgtgtctcccgagtctcctctgatgtagaacagttggctatctttccttgttcatgaccttgacaattttgaaaagtactgattagatattttgta

SEQ ID NO: 251423 - DNA, 638 bp, Homo sapiens
actctcagaagcataaagaccaggatagaaataaagttcatcccgaaatgacagtcaagggctgtccaaacgcaagtgagaatcagagaggaaactaaagcaatattcgaagtccctttgcaatagtcttctccaaattctcccagtaccaaaccctgagaatttgcaaagaaaaaggaagaaggggcaggtggctaacatgtatcttgtcctttgccacttttaaaatcatagcaccaaggcaaagccagatgcctctccayctcgtgcaatattgagaatcctgaaaggtgcagatattgcataccaacgagggttgccttccctatgtcttccttgatcatcagggttgtaaagaaccctaagcaaatttgcatccagacgtacgcagaggaaatctaatgtgataatcttgggtcaaaaggaataataggacaacattatgtaaggtatggacacgatattatgctttgagagattagcagatgtcgaggatgatttgaagaacatgattcaaaataaaggtaaggaggtaggcagaagtgtgaccatggaggaccttatcagctatatttaaaattctggtatatatcttaaaagtcatttaaaaattctttaataataaatgtctatcatat

SEQ ID NO: 251424 - DNA, 590 bp, Homo sapiens
ttgggggcatctcccctttgggttcaaacttatgtatatgtgaacatttaaaatacattaacttactcattcaatattttttattttatagtaggtgtwtcagttttttttcccctggttcatcatccctccctttttcttttggcaaagagtttccagtttcccaaaggaaatttgcaaaattatattttctgccactgtggcttggcttggggctgactgcctcattgtaatctcagacattagtagattattcagccaataggtatatcccatctccttaaccatacttgttagttcagtgatgaacatatgacccaagtaaagccaataaaaatcagccctaggactttcaaagacacattgagaataaagcagtatctttcccctgggattcgtgagatgagacaatacaagcctgaaatagctatctttgtcataaaattgggagaattaaaaaagtgaagatgaggaatatcagaaaaacttgaagaaaaaatgtaagtctagtaatgcttttacaggcatggggaaggagggataactcttgttgagtttgtttattataaacccaaagtcatttaatagtc

SEQ ID NO: 251425 - DNA, 602 bp, Homo sapiens
atagtagtttgtataacacttaatgtagatgttagataacagtccagagtcagggagagagttgctgcagatatttagtgacacagtgatttaagaatactgaaggagactatcagtgatttttctggggtttcttttatattgttgagatggctaatgttactccaagatttattgtcacgtgattgagttcaaagatagaaaacaggcaatagttttccaacaatcatactcttacatcaccttgaccagatgtgggtcacaatytcatgcctgagatcaaaggatctccattcactatccagtcaaaattggaatttgattaggaagaaggtaggcagtagttttggtgtaaacattaaatgctatacatgactccacctcttcattgtaatgtagacactaaaattttgatggaattgactttatcctcagtggcccttgattagtgaaagccaatatgagttgtcccattcttctctccatagtgattagttcaggaatttaggactaagacaattggtagatggtatgactgtggccacgagtaatgtgtttgggatttaatttggcaaaattaagctgacagcctttgtgagatt

SEQ ID NO: 251426 - DNA, 555 bp, Homo sapiens
gtaatgtgtttgggatttaatttggcaaaattaagctgacagcctttgtgagattttccaggagacagaatctctctcctcctgaagaatgccttgtgcagtaaaagttctttgactattttgtctcaataagtaagaagggacttaggataattctgaccctacaaaaggctgagtagagagaagaaaacaagttaggttcagtgttgatattgttgagctgctgaatcaaaccaacagtaaaggccaccagttaggtgactcagtcaattccttttatgttggagttaatttgtttaggtgcttctactaattgttggtcctaaataatattgcagggatttgatttattgttaatttaaaaaaataaaaattatatgaaaaataaatttcaattttgaaggaagattgctctagcaaatctattgtaaaaattttttaaaagtctactgatatagtttggctgygtctccacccaaatctcaaattgtagctcctatagttcccacatgtcatggcggggacccagtgggaggtaattgaatagtgagggct

SEQ ID NO: 251427 - DNA, 572 bp, Homo sapiens
catcttcccttttcataagaaaattaaaaatatatttagctgtaaatgatgataaattttttagtgccaagttagacagtcaacatctaagtaaagcatttattttaggatttttaaaagagagatgctatatatttccttgttagtattttatgctatttttagcaatattttaaaaagttttgttttaccatacacatagtataagcatgtttgtactatgtccagccaaaaattttgaagtttattcctctgaagtttatagataccataaatgtgattctaacatagcacatattgaatatgtaatttgaacctgcctaatggtaatagtcatctgctgcataatgctattttgatcaacaaaggaccacatatacagtagtggtcccataagattacaatgctatatttctactgtacctttttcatgtttagatatatttagatacagaaatacttatcatggtgttacaattgcctatagtattcagcacagaaacrtgctgtacaggtttgtagcctaggagtaacaggctataacatacagcctcagtgtatagaaggctgta

SEQ ID NO: 251428 - DNA, 517 bp, Homo sapiens
cctctaatatttgattcattaggatctttctgtgtccaaaatataccagtatttcttgtgttctccacttttcctaggcttcagtctcaggcttttcctctccttttttatgaacttggattctgtcaggggtaagatacaatgtgagtagtatagagagccctggaaaatttctgcaagagtaacttgaaagcaggaacacttaccataagactcaacatagcctggtctcatgaagaargcacatccctttcattaatgtgactttgaccctactccttgaaaaaatccattacttcacaatagagtatgtattttactaatttctaagccagtttatacaaataggctgctgtataagctgagaagaactttgtgtcactcgatttacagtgcaatctgactctctttgtctcccaagcagaatggatcactttgaattcatcccattatacaaggtggggagcagacactccagctttcttaaataacaccttgaagaccaatttagtgtctt

SEQ ID NO: 251429 - DNA, 574 bp, Homo sapiens
tgagtcttaaccatcagtacatgcctgtgctaggccaggtttcatttctagtttatttcaattaagtgtctgtaatgtaattacatggcacaggaaggatctgttgawgttgtgaatttgatttttaataagattactctaaactataatctgcctttataactttgaaaattcctgttaggtaattatctttctatcaactgttaggaaaatacccatttacacaattactgggcaggatttcctttaaggtgggttacagtggtgagggtattagaatcacttcttggtttattaattgcaaacactttctaaatacaactggcacttttggggctagaggtaatttcaaaatatcatatgtggagaagtactgttatttagagtaaaaactccccattatttggatttttaaatattttcttaatttttctcctaccacctctattacccacccatattttccttaccctttcctcgattttcccagatatctcttgggaaatcaggttttaggggctggcagttctcaatacttaagttgctaaagagtacttggcttttagtttgggga

SEQ ID NO: 251430 - DNA, 623 bp, Homo sapiens
gagcttaccttattcttgtcttcttatacttaaacataatttaaagatagaacagaatctaattaagtaaagtatttctatggttattgatagcgtattcaaagtagacttttttgatataaaattttaggaagctaaaataggttatataattggaacaatttttaatttaacktatttattaagttcttaccataatgcaaatgtctagataacaaacttaaatcttttgcattacctatttgtcactgtgacttctttcagcttgaggattgaaattgacctctaagcactgcccccgcaataagaaccttggctgaaatctctgacattggaactctgctcactctttctctgggacctttgagactgaaagctgctgtatgatgtgaactagagtcagttatataccaaccagtttttttcaccagggatcaagactgagtagctttgtagacttctgaaattaatagccaccttgacaagggttgtttatctttttctcttattttaattgatgaatgcttattggatctttagagaactgtaagtgactggctgaggctggttggcccataatacaagatttagccactgcgttttagcacttcagttttcttttc

SEQ ID NO: 251431 - DNA, 621 bp, Homo sapiens
attgatggcatgtttatggatagtggagtttcagaggagcattttggagatatcaagtaggccactctcaatggagttctctgggtcaggtgcatggttggtataataatataaatttgagaatcatttgcataggaagagagatggatggagtgagttaccatgtaatttattgcccaaaccagaacactttagaaagtaaaagtggtgtttttaaaaatcctactgagacaataggcaactgaggacgtcctagaaatgccaggaagaaaaactagcaaaataataaaggaaataccagcaaagaaagaaacctgagatttgaatgatcttgtcataaatttctttaccaatatttcatcaatggaaactggcattgttttggattaacatggccatataaaaatcactgttatttgcaacccattcaggtaggaaaaaaatcaataacattgctttaaactaaaattgaaagccatccttttttgttaggattgaaacaaatattgtagagtcactgtttrgatatttttgtcaagctttatttaatttttttttttagttttgaaaggctctttgtaattataactatagaaagtgaactgattttagatgagatat

SEQ ID NO: 251432 - DNA, 579 bp, Homo sapiens
aactgagaatgcagacagaaacaggtaaacagcactctttctatgcagcatttaatcactgtcaacagcacgtttttgtgagtagtaaatttacttacagattaagcacagtgaagaaaaagaatattatgctggaatttgaataacaatatatcacctgactggttgtcatgcataaaacagaatcaggagattctattggccctgtgataggactattaactgacctacaagaataaaagcacaaacgtagacatctaattcctttgctccttgcccaagtgaacatttttcaaaagagctaaccagttagaatcattgattttccactctgctattctaatattctcaccaagatactagcttatttytattagcatgactccattaaatcttatcatctaacaaagaggtaacatgcttggtaaagaagtaaatagaagttcaggaataccacaaatcataacttgccatttctgtagttatctaatttgttatgtctgacaaaatgatcttagaactttcatgttagacatagaatatttttctgaacctattttgtttctttccttaccactg

SEQ ID NO: 251433 - DNA, 592 bp, Homo sapiens
tgtgtgactttttcacaaaattaatcattataatcaaagaacaaaatactgcagtagtcaagtatgtttgaatcttagggtttcagaccattttcctttctcagttttctatctcagagtgtaagagtacatatagcctggaaacgayataaatacaataaaaagaacaagatataaaaagtctttactaattgattaaaaagaaaaggttaaggaccacgtggaaatcaagttatgtttatgagttctgagaatgacaacatgttcagaaggaaatagttttaattctatgaaatttaagtttctatttctagtttttgaatgtaactctttgaatattgtccttagttttgttttcttgttcttttattttatttttaattgacacatcagaattgtacatagtcatggggtacactatgatgctttgatataggtatacaaagtagatgaagaagacacaagtaaatggaaatatattccacattcatggattgtttttcaaacgctaattgtatttattttagaaatgtagaaatagtcacaaatagaaattagtatttgataagtgctgagtctctgtactaaatta

SEQ ID NO: 251434 - DNA, 545 bp, Homo sapiens
atgaataagaactattaaccgttactgacaattaagtattattttagtaaatgaaatttattttataaattcactactacagaagtattcagcagcagttttttgtcattttacacataaatatttgtggaatgactttattttatttcactattttttagaaataaccattgctcagggcttttctggcttttattgtctttagcttggtgtgcagtatttgtttatgagtaaggatccaacaattatctagttattaatgtatattaaaatgtagataytgaaactgctttgaaaatcaccattggaagtaaactcttcttaatgggacagaaaattatttccactgtgtggaactagaaatgctagatctctacaatttagaatgtacattcataactagtaccacttctggatgaattaggtgcttgttttccccactacttgccacacactattaaattcagaaagagcagttttctgttttctggaaacattttatttacaaatataaaaaatgtactcaaaaaaccgtaaatttttct

SEQ ID NO: 251435 - DNA, 556 bp, Homo sapiens
taaattaagaatcacacaccggggactgttgtggggtggggggagcggggaggatagcattaggtgatatacctaatgctaaatgactagttaataggtgcagcagaccaccatggcacatgtatacatatgtaacaatcctgcacattgtgcacatgtaccctaaaacttaaagtataataataataataatcaaaagaatttaaaacatactttgtgtagataatttttaatatttaattggaatatagtataaaaacacyctgtagtcaattaattcaagcatcaaaaggtctatcctgtttatccatatttgtttactaaaaatgtaatgaatattttaggtaacattttatttaataaatactagagccattgcaatgagtctccacaacataaacatttgtaccctcagacacaagtatcttggaaaacactcacaactttttgctaagaaaactctggattccaatcttgagcaacttcttagacaagttttctcaactttcaaagtagtgtgattatatttgtacaagttagtacctgcttattactt

SEQ ID NO: 251436 - DNA, 584 bp, Homo sapiens
gcatgtggtctctgtgacccccaccctattcatacaatccctcccctttgaaaattgctaataaaaacttgctggttttacggctcagggggcatcacaaacctgccaacatgtgatgtctcccctggacacccagctttaaaatttctctcttttgtgctctttccctttatttcttaaaccagcagacacttagggaaatagaaaagaacctacgtgaaataacattgaattgtcaggggcaggttccccygataattaagctaattttttaataggttctcaaatcacttttaatgtcctgatataaattctgtacgacatatagccctacatacactttagcaagcccaccaaacaagatttgtaatgatgattcaaccaacttcagggcacctaggaggaaaaaaattcaggcttatgtctaattaatgctgatagtaaaacgtttaggggtaggaagattgctctttatagctagcttttaaaatgttctttttcttctctgatattattttatttcagatttagttatatttatttcataattttactcaaaaatgagaaaagaaagatgaaataac

SEQ ID NO: 251437 - DNA, 598 bp, Homo sapiens
tctgttcctcctcaattttacaacatatgttattttcatccttggttataccaaatacttttgtagtctacacattgttatccataaagttatgaatataccataagttattaatagtttcatatatgtttgccatgacattgaacaaatttagcgagaactcaaaaacaaaaaagcaatctttctaagayggtgattttaatgctcctactattattacaatattaaaacaaataaataaatatgtagttaaatgaattaaagcgtaataaatgtaactctattagagaaggaaggcagaaacttcagattagaaaccaaccacctgcacttcatatagtacacattgctactgaagtaaatatccatatgtatttttttcaaagtgtcctagaaggaagcacagcagccataaggccaattgatttaactatattggaagcggcagaaattaatgaaagtcttgttttggaagaattattatttcttttcattactgagcagaaaggggagctgcagtggcaagatgatgatctatgtaagaggaatcatctgctcatataggaatggggccaaatactgatgtcaactagaatgc

SEQ ID NO: 251438 - DNA, 551 bp, Homo sapiens
ttcatagttatctggtccacaattattatcccatatatyatgtttattgccttacaaaacaatgtaaaataatgaatatcttctattttgaatgtatctcaatttattttcataacatttaagtgacattgctgtaattgtaagcatatatggtataacaagctttgaaagaaagacacctcagtttttctaagtaaaattcaagtggtggaagctgaagttaatggccatccagggagggaactgacctgccatgggcaagtgatatgccctaggcatcaatcagtttgatttacagaggcaacggggctcatcgactggtccagcaagtggttaagtgtagaaggctggccgataaagtttgtaatgtttaaagcaaactctgctgaggaagatcgttcttattgaattatctagaatggttaaatctattaagtaaatatcccaggttgtatggtaatattataatttaccttacactggtacagcatggcatcgttatcagcatctttcttgtagtaataattagtctatctattaggataaaataa

SEQ ID NO: 251439 - DNA, 587 bp, Homo sapiens
gctcaagccatcctgccacctcagccttccaagtagctgggaacataagcacacaccaccattcctggctaagtttttttgtatttttattagagacggagtctcaccatgttgcccaggctagtctcagactcctgagctcaagcaatctgcctacatcagcctcccaaagtgctgggattataggcgtgagcaactgcaccgggctccaataatattgcatgtattaattttagtacattctctatagatgcttttcctctcagtttttgtattcaaatgtgtgtgataaatataataattcatgatacctaaattgaattattggattaaattcaattgcaaatataactacacttaatacacatgtaattccatatcaatatctaagagctgacttatgtattataaaaattcttaartttccttccatagcaaaacatacaaagaaaaagagaatcagtactgaagcaatttttcttggtgaattctaagaaaatttcaaaaagatactgctttacagataatatggtgctcagaacgggatttagcatggaatgcataagccaaaataaataccacacaca

SEQ ID NO: 251440 - DNA, 341 bp, Homo sapiens
tatcaatatctaagagctgacttatgtattataaaaattcttaagtttccttccatagcaaaacayacaaagaaaaagagaatcagtactgaagcaatttttcttggtgaattctaagaaaatttcaaaaagatactgctttacagataatatggtgctcagaacgggatttagcatggaatgcataagccaaaataaataccacacacagacacacacatacacatgctgactaaaaaaaagtggagacatatctgcaagtatagctcagcagcataaaaaatatgttaatgttggtaaatatgttgctaagctataattctgtttttatttgacatatg

SEQ ID NO: 251441 - DNA, 341 bp, Homo sapiens
tatcaatatctaagagctgacttatgtattataaaaattcttaagtttccttccatagcaaaacatacaaagaaaaagagaatcagtactgaagcaatttttcttggtgaattctaagaaaatttcaaaaagatactgctttacagataatatggtgctcagaacgggatttagcatggaatgcataagccaaaataaataccacacacagacacacacatacacatgctgactaaaaaaaagtggagacatatctgcaagtatagctcagcagcataaaaaatatgttaatgttggtaaatawgttgctaagctataattctgtttttatttgacatatg

SEQ ID NO: 251442 - DNA, 589 bp, Homo sapiens
ctattggtttttgatatgaagtttctttggatgcaaagtacctcatcagtatgtgaagcaaaccttctattttctgtcagttccatagatctgttaaaggtaaaaaaaaactatcatcaatacatataatatattcatacaaagttttttctaggtggaaagtataaaagatgaacaacccctgccctgtggttttgaaaaagtatctggtgctcttaggcatctttatgaacaatccaagtacaactgcattgcaaaattaatgagccaagaaaatgagtcttgttagttttccactctttgacttctaacattacacttgttcctacagttaacattaaaagcactacattaaatttacatgaaacatagctttgtcttctgatctattggaagttgactaaactcttataataataatcttayctggctctatgtcattatttataggaaaataataaagattaaaaaataaatgaatctggaaactacaagccacaaggatggctgtggaaatgagtgagagtataatcttgagtttcaaaaacatgggctctatgatttgtaaagttatttcaatcttgtagat

SEQ ID NO: 251443 - DNA, 578 bp, Homo sapiens
tactacagacaaatgggctatacatttctgtcactgcatcttgttatattgctggcacacagatgaagtcagaggcagcagaaaccactgatggggagagcacaaatgaagcagtgctgaggaaaactacctcttgccaggaaagagaagcttgaagatgacattgattgtgaacacagatttcaatttcrgttcacaaggcagagattgcacaatatggcagcttaaaaatatatacaattttgcattgaaaaaacaataaaatatatgtttacaggcaaacacacacatatatcataatgtgtgtgtgtgttgtatgtgtgtcacctatagaaagagcactgaaactcttaatatccttatttgaataatggcaaataaaaggaaaccatttcagctactttgtacctgaatcatatactactttgggatgccatatgcatcagacaaactggagcataagatgattttgaaaaatgacactagacatgtctagaaccttcctttttatcatctgacaacatacgaatctcattactgtgttagtttgttcaggattcttctaggcaaaaaaataa

SEQ ID NO: 251444 - DNA, 578 bp, Homo sapiens
tactacagacaaatgggctatacatttctgtcactgcatcttgttatattgctggcacacagatgaagtcagaggcagcagaaaccactgatggggagagcacaaatgaagcagtgctgaggaaaactacctcttgccaggaaagagaagcttgaagatgacattgattgtgaacacagatttcaatttcggttcacaaggcagagattgcacaatatggcagcttaaaaatatatacaattttgcattgaaaaaacaataaaatatatgtttacaggcaaacacacacatatatcataatgtgtgtgtgtgttgtatgtgtgtcacctatagaaagagcactgaaactcttaatatccttatttgaataatggcaaataaaaggaaaccatttcagctacyttgtacctgaatcatatactactttgggatgccatatgcatcagacaaactggagcataagatgattttgaaaaatgacactagacatgtctagaaccttcctttttatcatctgacaacatacgaatctcattactgtgttagtttgttcaggattcttctaggcaaaaaaataa

SEQ ID NO: 251445 - DNA, 475 bp, Homo sapiens
ctgtaagcccctcaatagactgaatggtccttctcttagccaaaggggatccccagagaaacaaaactgagttcaagaaatgacagaaagttgtgggttggggtgtgggtcagacatacctcataataccctccctcctcaggaatttaatcacaactgaccagcattaacagtaaaatagaggttgcaggactgacaggatctttacaataagaatgtactgcattataaacactttctaagaccatgctaggcaagcgttaagkcacacccttctaaacttaaaaagtaaactatgttccaactgccacaaggtttttctttttctctagcagccacacaagaaccagccttgaaataggctgactaccagcccctgttctaacagccataactacagctttaattagacaaaagactgatttcagtaactttctcctgaaaaaaagaccaccaaacatcaactagttctgca

SEQ ID NO: 251446 - DNA, 547 bp, Homo sapiens
gagtaatgaaagtcattaaaagcagttgagtgtcctgctgtagcctggccaataagggtataaagaatgagagacagwgcaaggcattctgctatattacaactcagcagggctgtgtcttcaagatacacacacacacacacacgcaaacactcacatgcaaatgtgcgtgtatttttcttcctctaaggtatgcttcatgtaaagcaaaaaggtattaaatttttgataatagtaccaagtgccattcataaaaatgttgactaatctaatataaatataattattcttaatttttaaggtactgagaagatcacatactgcatgtcctcctaaaacctggtcctggcataaccttctaagctgttttattcaggtaaagtttgatgatagaagatacagtttattgtattataaataacaagataatatgttttttctttaactactacccactactgccaaaattgtttttcctatagactgcctatagatacacctcaacctaccccaggaaactctgaattggctgatttaaaactcactc

SEQ ID NO: 251447 - DNA, 547 bp, Homo sapiens
gagtaatgaaagtcattaaaagcagttgagtgtcctgctgtagcctggccaataagggtataaagaatgagagacagagcaaggcattctgctatattacaactcagcagggctgtgtcttcaagatacacacacacacacacacgcaaacactcacatgcaaatgtgcgtgtatttttcttcctctaaggtatgcttcatgtaaagcaaaaaggtattaaatttttgataatagtaccaagtgccattcataaaaatgttgactaatctaatataaatataattattcttaattttyaaggtactgagaagatcacatactgcatgtcctcctaaaacctggtcctggcataaccttctaagctgttttattcaggtaaagtttgatgatagaagatacagtttattgtattataaataacaagataatatgttttttctttaactactacccactactgccaaaattgtttttcctatagactgcctatagatacacctcaacctaccccaggaaactctgaattggctgatttaaaactcactc

SEQ ID NO: 251448 - DNA, 605 bp, Homo sapiens
tatacaacttgattatttgatatatagatacattgtaaaatgattatcacaatcaagctaattaatatattcataacctagcagtaacctgcatgtttgtgtatttgtgcatgtgatgagaacacttaagatctactctctaagtaaatttgaagtaaacaatatggtattattagctatagtcaccatgatgtacattacattcccagagcgtatccatcttttaaatgaaagtttgtgtgctttgaccaacatctccccatccccactccccaatacccttgcaaccacctttctaacctctggtactatgagttcaacttttttagatttcacatatgagtgagatcacaygatatttgtctttttgtacctggcttatttcacttaacataatgtcctcttggttcatccctgttgtcacaaatggcaggaattttatatggccaaataaaaatacattttattatatgtatatgtatatgtataaacacaatatccatacacatatatcacaaaataaagacttaaatataagatcagaaactttaaatctcttataataaaacataagggaaaagttccttggcattggttttagcatg

SEQ ID NO: 251449 - DNA, 563 bp, Homo sapiens
cattctaaagtttatctggacaggtaaaagacccagaacagctaccacaatattgaaaaataagaacaaaatttcaggactgatttcctactgccagacttaatataaagccacagtaatcaaaaaagtatgacgttggcaaaataatagacaaataaataaatgaaacmcaatagatagcctagaaatagcttcacataaatatagtcaactgatctttgaccaaaaaaaaaaaaaaaaaaaaaaaccgaaggcaatacaatagagaaaaaaaaaccagtcttttcaacaagtgttgctgaaacattagataagcagaaaattcatctaaaataaacaaatgaaaacagaaacaacaaatggtgctggaactcctggatatctacatgcaagaaagtaggtttaaacacagaccttatacccttcacaaaaattgtcccaaaatggtttacaagcctaaatgtaaaatgaaaaactataaactcctggaagagagcattagagaaaatctagttgaccttgggtatggggatgatttttaaatacaagaccaaaggcatgat

SEQ ID NO: 251450 - DNA, 643 bp, Homo sapiens
ataaatagtagtccattgtgtatacgtacaaaatctcttgacaaaagattaataaccagaatatataaggagctcaacaactccataggaaaaaaaatctaataatccaataaaaaatgggcaaaatatttgaatagatatttctcaagagaagatatacgaacggcaaacagggatataaaaagatgctcaacatcattaatcatcagaaatgcaaattaaaactacaatgggatatcatcttaccccagttaaaatggcttacattcaaaagacaggcaataacaaatgctgacaaggatgtggagaaaagggaacmctcgtacactgttggtgggaatgtaaattagtccaactactgtggagaacagtttggagcttcctcagaaaacgaaaaattgagctaccatatgatccagcaatctcactgctgggtatatacccaaaagaaaggaaatccagtctatcaaagagatatctgcactcctatgtttgttgaagcactattcatactagctaagatttggaagcaacctaagtgtccatcaacaaaggaacagataaaaaaattcagtgaaaaaaattttctaattttattacttacaacatttataataactaagatactcaagccttatagaag

SEQ ID NO: 251451 - DNA, 643 bp, Homo sapiens
ataaatagtagtccattgtgtatacgtacaaaatctcttgacaaaagattaataaccagaatatataaggagctcaacaactccataggaaaaaaaatctaataatccaataaaaaatgggcaaaatatttgaatagatatttctcaagagaagatatacgaacggcaaacagggatataaaaagatgctcaacatcattaatcatcagaaatgcaaattaaaactacaatgggatatcatcttaccccagttaaaatggcttacattcaaaagacaggcaataacaaatgctgacaaggatgtggagaaaagggaaccctcgtacactgttggtgggaatgtaaattagtccaactactgtggagaacagtttggagcttcctcagaaaacgaaaaattgagctaccatatgatccagcaatctcactgctgggtatatacccaaaagaaaggaaatccagtctatcaaagagatatctgcactcctatgtttgttgaagcactrttcatactagctaagatttggaagcaacctaagtgtccatcaacaaaggaacagataaaaaaattcagtgaaaaaaattttctaattttattacttacaacatttataataactaagatactcaagccttatagaag

SEQ ID NO: 251452 - DNA, 643 bp, Homo sapiens
ataaatagtagtccattgtgtatacgtacaaaatctcttgacaaaagattaataaccagaatatataaggagctcaacaactccataggaaaaaaaatctaataatccaataaaaaatgggcaaaatatttgaatagatatttctcaagagaagatatacgaacggcaaacagggatataaaaagatgctcaacatcattaatcatcagaaatgcaaattaaaactacaatgggatatcatcttaccccagttaaaatggcttacattcaaaagacaggcaataacaaatgctgacaaggatgtggagaaaagggaaccctcgtacactgttggtgggaatgtaaattagtccaactactgtggagaacagtttggagcttcctcagaaaacgaaaaattgagctaccatatgatccagcaatctcactgctgggtatatacccaaaagaaaggaaatccagtctatcaaagagatatctgcactcctatgtttgttgaagcactattcatactagctaagayttggaagcaacctaagtgtccatcaacaaaggaacagataaaaaaattcagtgaaaaaaattttctaattttattacttacaacatttataataactaagatactcaagccttatagaag

SEQ ID NO: 251453 - DNA, 572 bp, Homo sapiens
aacattctagttgcacaggagaaaatgtactaaattaaattaatgagctgaaatgtaatagaaaataaaagcaaatacatatttaaattagacaagtatgcgtttctgcttgccttaaccatccatttgtaccacaataaatttaatactgtgaatataaagaaggccataaaaactcaacaaatagacaaacagacaattggttactgtgtgaacacaatcaggattttttaaccctaagttataaaccaagatttgcttttactgtcatacaattacaaaacctctacataagcttcaaaagaaaccayaagtagtcatgaaaaaatacactgggaagaaattacattctatttcttttctgattacccaattgcacattcatttctcagttatttcttcttgaaataccttgtttggtgcagcaataccttgctgtttaccatacttaatgaaatacaaactagagtagataaactcagaaacaaatgtaaaatagagtactcagatatgaaatagaatattgtcaaatattgttttagaaagactcacatacaaacatttcaaaactg

SEQ ID NO: 251454 - DNA, 493 bp, Homo sapiens
tgtttgcctagacatgctaggcttgacagagatgatttatgattctgaaaataaaactaaattgcacagagcccttgaggaacctaaaagcagaatgtgttagagaagtgagggatacattgtgaagcaggaaggctcaagagcagttccagttccattcttaattaacagtatggtttaaataaaaataataatcataatcataagccacattgtaaagcagttttcatatcacatattattgaatcctcacaacaatgagatgataagcrttcctttactattagttttgtagaaatcacaaaacaggctcagagatacaaaataactttgccaagtgcaaacaactagtatatgccacagatggaacattcaggcagactactgggattcggcttgctcattgaaaaataatattctgtgaatcctatttaggattttagttttctatgcaggtgaatcataataggtttactttattacagaaccaatt

SEQ ID NO: 251455 - DNA, 450 bp, Homo sapiens
gcttgattcaaagtggtcttacatccctagtgaaagtaataagtaaaaattattctctaacccagtttccctgaaactgtatttatctttctctaaaccaacttttagaaaaaataagtaaactaataaattgttggtttgtaggaggtaagacaaaatgttttgacacattttttcttttctttaatgatagaatcaaatarttatttttgatgctcaatggaagcaacctgaatatatcacaaaacttaatccaggctcaatttcactttatgtaaagaaggtctagtctaagccacacctaccacctacaaatcaaaactcagtattcaatatttgggcaggaggaaagaaatttccgataaaaattctgaggtagattaaacaataaaaaaacaataaaagtgggacatatggataatggttaataagccttgactattaaaatca

SEQ ID NO: 251456 - DNA, 605 bp, Homo sapiens
caaccttggaggtcatcagcatattgatggtattaaaaaccatggaactggatagaatcacctatgaagtttgtatacagacttttaaaaatatgttaaaaaaagagttgagcccagtgcaacattaacagtcatgccaaaaggagaattcagtgaagaacactgaaaattagtggtgaaagaggagaaaaacaaaagaggtgtgtggtgtgaaaaccaagtgaggagagtgtttcgagcggaagaatgtgtgatcatctctttcaaacgctgatgatgactgaaatgaagcctgggaaatggccactggacttagcaatgtggagggccataaggtcattgacagagcagttgcagggaaatggagagagacaaaatcccttcactgaaattggttcaggagggaaagggagaaaagaaattgagcccttcacaaatagacaactctttcaaggaattttactgtaagaggatttgtgtaataagcagtacctagaaatgacattgaggtttgtttgattrtttaaaagtagaaaaataaaattacctgccatgctaataacaattgtgaaaggaacaaaacaacaacaacaaaaaacaacaaa

SEQ ID NO: 251457 - DNA, 495 bp, Homo sapiens
gtgtttccttgctgtgtggcttcccagtcacagatacagaaatgcttgtcagagcttggtcccttgagcttaagtccaatgaggccaatgggtacatacaaactaaaaaagcaaatactgttatgcagttggaggtgtacttggaacttactggaacatggtttctttgaacagaaattttatttcttccctctgccttcacatcatcaccatagttattcatgatcatcatctcacactaattcccatgtgttcttaggaaaaaatggcagcagtgactcacaagttttgcttttatttcatggtgacttatttatagctattgtwcttctggaagatcaatgactagagagaaacaaaagcttccctggaatctatgtgaacaagagagatgatattgactgaatttaaaaagttaaagatagaggaataagcaagtggcttttttccccttcactttttgatttcaggccatttgatttcaggccaattgtt

SEQ ID NO: 251458 - DNA, 508 bp, Homo sapiens
gatataaatggaagcaaagtatgggttatagttaaagaaggggaaatccagctctttgtaaccatcctttcaaataaagcaacattgcattattgtccccaaaccaagccgcatcaagggaaaacaccaccaccccgctagtgcctggtggaaattctctctctgagcatgcgcattgccagatggtagaaattgtacacgttttgctgagtctttaatgtctaacacatttacttgcacatttgttgaatggaactcgatttaaatctgagtacaagaagagggaattcaattttgtgcttgagactattccaattacaatgattattttcagttttcatatagtgactttaagtagatgtactgtgcccatatccaaagggtttttttttcctcacaaaatgttcagttatttattgggttgttctcattgcaaagcaaataggtagaacctgttcatayagtacaaatgaggaaactgaagcatagtaagcttgtggacttcgat

SEQ ID NO: 251459 - DNA, 560 bp, Homo sapiens
ggaatattttgtagcagttagaaggaacccactagatatgcccacagcaaatggatagatggtaacaaggtatatttgagttttttttataagacaataaatagcatagtatttatgacacaatactattgatataaaataaactacattagcaaacaaaaacattctatctatctatctatctatctatctatctatctatctatctatctattttkttttctccaaggacatatccaaatgcgaggatacatgtcaaagcacaacagagtggttactatttttttattaacatgtttttttaatgggtgagtaagacagggaagtggggataaaggaaatttgctgaggtgatagctttctattgctgcataataagctaccacaaacttagaaagtttggaacaatacctgtttattagcttacaattccgtaggccagaaatctggcacagcatgactgggttcttggcttagggcagcacagactgaaatgaaggtattaacgggctgagttctctagagactgtggggagaagtccgtttctaagctcagttct

SEQ ID NO: 251460 - DNA, 560 bp, Homo sapiens
ggaatattttgtagcagttagaaggaacccactagatatgcccacagcaaatggatagatggtaacaaggtatatttgagttttttttataagacaataaatagcatagtatttatgacacaatactattgatataaaataaactacattagcaaacaaaaacattctatctatctatctatctatctatctatctatctatctatctatctattttgttttctccaaggacatatccaaatgcgaggatacatgtcaaagcacaacagagtggttactatttttttattaacatgtttttttaatgggtgagtaagacagggaagtggggataaaggaaatttgctgaggtratagctttctattgctgcataataagctaccacaaacttagaaagtttggaacaatacctgtttattagcttacaattccgtaggccagaaatctggcacagcatgactgggttcttggcttagggcagcacagactgaaatgaaggtattaacgggctgagttctctagagactgtggggagaagtccgtttctaagctcagttct

SEQ ID NO: 251461 - DNA, 470 bp, Homo sapiens
acattgctttgcgtaggagctgatacaggaagtccacctaaccattgtaatcggatgaaaggtagagaatctggcaaattgaggtattgttaggtatcgtagggttggaaaagtagagggggtcatttgattatttctgctgattctgtggcccaggaatgcaagtttttgatctatattcaaaataatttcctggcacgctcatcaggtgttagtcatacttcctctcctctgggttcaaatccagaaagaataagaatagggagccaaatgggaagagaagtatcagctttattctttcaagcagtaaaaatytggtaaagttgtacagtatatacagttaaatatttgaatctcaaagaagagtatgagatagagttcaagattttagagtcagtggttaaagcctgggatttgaatgaggtcatctagggagagaatatggtatgataaaagaagaaggctggaaa

SEQ ID NO: 251462 - DNA, 546 bp, Homo sapiens
tatgataaaagaagaaggctggaaatgaaacaccgaataaaatgcatattttaagtgcaagccaaaaaacaaaaaaggctactaacaagtaaccagaacatttagtatcttggaatccaacattctgagctatagtgtcaaataacaaagaaaaagtcaagtgagaagagatgaagatagggtaataggagtatcattagtgatcttaacagagatagtttagtggaatagatctgaagttggattctactggattgagtactgaaaggaagaaaggaaatgtggttatcctgaggttggtctattatttcaagactcttgactgtaattgggcagagagggaaacaagagtaactacggagagtggacatttcgttgtgcaggttttrtatattattaatggtagagacttaggtaagtttacttactaagagcaaagtagcaagtaggagcttatagacagagagagagtgagagggagaataatcaatgaaacaagtacctcagagaataagaagcatggtggccatagcaaaacatggcaga

SEQ ID NO: 251463 - DNA, 581 bp, Homo sapiens
gaaatcaaagacaaaaggcaaattatgctaaattatctttaatatattatggaagctgtaatgtcctttcattagaatatattttatatgggggaagaagagggctctgagacttactaaatgtctcttttaagctacttctgctgtgcacacacaataacttcgatttttaaaccatttaactraaataatgaatttcttccccttgaatcaatcagttattttggccccattttggcaatggaatgggaaatgactagaggaaaagcaggttaaactttgagcattttctacttgagtagttttgttatcatcttttgtctaaatggcatgccaccattgggatttgctttcccaaagtgattaaagaaatgcagagatagaaggaagggagctggttacactagtgataacaggctatctctatgggttatatttaaagttgtgatgacactaagttcctccctcaaaaatacattgttctttgtgatgtggcttacagacttgaagattgaccaaaaaatatacaatatgatgaatttcttatgtatttgtaaattaatctttttcaatgaaaatca

SEQ ID NO: 251464 - DNA, 549 bp, Homo sapiens
atatgtttagtacaaaaccaaaagcacatagtgagtgctcagaaaataatgttcttatgttgtgtagctctgggttccctgccatttattagaactattgatttttattatgaaaagygttttggaaaatgaaacaataaattactgtttagtgaatttattaattagaaataatatagaacatatacaatgtaaatgatcatttaagcacaaactgcagaatttcatttatttatttttgagaccatttattaattcagtatctggaagtaggtattcaatgtgagtgctttagaagataactgtaggttatcttaatagttataatatcttttggccatttggtatgaaaaatccttgtaagagtatagtcttccacattttcatagtaacagagtcaaaataatgaattggagtgactgttttaggggaaaatatagtaatgctataaatgctacagattactaccatttgaaagttttttgtccgatttcaggattttttcctgtctttcatccttgcatcccaccaatcattaatactggttag

SEQ ID NO: 251465 - DNA, 596 bp, Homo sapiens
gcttagtttcctgaacgctctgatagccttttgccgccatgcctttaaccatgtagggtcctcttcctagaattcccttcctcaacctctttgctaattctgttatgctctgcttctatgtccccaggaactttgcaactgcctggctattttctacttgtcttttgagtattaattcggatgttgtatgttctaggaaggctttctagccattcccaatttgtagtttgattcgggaatcctcttatattctccaataatttcttatgcttacattcatgctacccttaaacgatatagtacagtctacttctctttactggcattttctctattaaattacgaatgtgctgcagtcgagattatattttagttgtcttaatttttctaacactatgtgctgtatagtagatgctctataaacttctgttaattttgtgagtgartctagaagaaaagaggtaatgttaaaggcagttaaagaagtcttttatttcttctttcttattcctaacatttttctgaaacaaactagcgtataaattactgtctaaattttatattttatttggaaaggctaataggcatcgactccc

SEQ ID NO: 251466 - DNA, 486 bp, Homo sapiens
  misc_feature (1)...(486): n = A,T,C or G
gtttatttatatatctttatatttagaaaggcctctgttattatgaattttcttagatgtggacatttgaagacatatttttctaatttctgtttaattcattactgtactacttgaatcttcctttcttgctcacagatnggccaattctttgatcatttgctttatttttactgccttgtataatagtttcattgcagagaaagaatgagataatttgcatagcttttactaagtggttttttttttcaaaagagatctatatatttctggttaatgtcattattattaaattctattaacttgtttactaatgctacacactccatggattcctattctactgtggtcgctttggctttgtttacaaaacaaccacagaaraacttgtgggtgatcttagcagatacatgagttaaccacttaacttccatttccactaaatgcttcaggttcagtgattatttcagtcagaagtgatgcttt

SEQ ID NO: 251467 - DNA, 478 bp, Homo sapiens
ctccgtctcaaaaaaaaagaaaaaaagaaaataaagaacttacatatatctgtctcaagattatgtacttatagaagatgaaagcagactgtgcgttctttacctttaagaaatgtacagcctcaccacacagataaacagcatgttatttatcaaaaatctttcaagacaaaatttgaatraagagaatatgtttggctcataagcgctgccatattgaagctattcaggcaattattttggtttccaagtagaaatatgttacaagaaaatgttggcattctcactgataagaacctaataggttagacatctcctctttctttttcaagcctttcatgtatttttttcttagaaaagtagttcaaatactgttgcagattaatattttgatatattagccaacaggatttctgcttgtttctgccaactttgtcttagtcttagcaaagtaaaaaaggaatgatagcagagaaag

SEQ ID NO: 251468 - DNA, 478 bp, Homo sapiens
ctccgtctcaaaaaaaaagaaaaaaagaaaataaagaacttacatatatctgtctcaagattatgtacttatagaagatgaaagcagactgtgcgttctttacctttaagaaatgtacagcctcaccacacagataaacagcatgttatttatcaaaaatctttcaagacaaaatttgaataaagagaatatgtttggctcataagcgctgccatattgaagctattcaggcaattattttggtttccaagtagaaatatgttacaagaaaatgttggcattctcactgataagaacctaataggttagacatctcctctttctttttcaagcctttcatgtatttttttcttagaaaagtagttcaaatactgttgcagattaatattttgatatattagccaacrggatttctgcttgtttctgccaactttgtcttagtcttagcaaagtaaaaaaggaatgatagcagagaaag

SEQ ID NO: 251469 - DNA, 625 bp, Homo sapiens
tcttgtactaaaaaaagttattctttatccagaattcaaatttaattaggaatcctatattttatttactgaatcaggcaaccatatttactgtcacatttttaaatgatgaatttatgaattctttgtgatttttacttattaatatttatgattgatgtagattggctgtgtccccactgaaatctcatcttgaattgtaactcccacaattcygacgtgtcgtgggaagaatccagtgggaggtgattgaattatgggggtgggtctttcctgtgccattctcatgatagcaaattagtctcacaagatctgatggttttaaaaaggagcgtttccctggcacaagctctctctttgcctgccaccattcacataggatgtaacttgctcccccttgccttctgccatgattgtgaggcctccccagccatgtggaactgtaagtgcaatcaaacctcttcctttagcagcatgaaaacagactaatacaatgaactttctcaattaagggtatttctcttttttccatcatctttctgtaatgaatggatctcagaccccattatagtacctatgctgtttgttataccttcctcaaattataacctctacacttagagac

SEQ ID NO: 251470 - DNA, 606 bp, Homo sapiens
gcatacatctattttaaaagtgctcttggagatttcttcaaaatttgtttcatacagactttgtggaaagcgattttgttttctttcagtgtaatgaaattatacagcaaacctaaaacttggtgaaccaaggagtacaaacaggaatgtggattcacactgaaacaacagcagcaaaggaaaaaaaggcaggaggtggggagtgagagcgtgggcggggagaaaggagggaggagatyctattaagacaaaaacaaaaaaacacaagaacacacacacacaaagtaaaaacaaataagcagaactgaagattctgttcttctctcttccaagggcaaaaaaaaaaaaaaaaaaaagaaagaaaagaaacaagaaaaggaaatgcaggacttgaggctgcatccctcagagccataggtacaaatgggtgacaggaaggcatagaccctttgaccctgtaattgcacttcagggtactctagacttacaactgatgttaagtaaaagatggttgcaaattatttactatgtttatggagaggtagaatctaattctcctctcttggactttgggctggtgttagtggagttcttgaccagtagaaa

SEQ ID NO: 251471 - DNA, 589 bp, Homo sapiens
ttgttggtttatgaggtttaggaaagaatccatctccataataaaaaagtaccaggtgaagcagcaaatgcaaatgtgcaagctgcggcaagttacctagaagatcaagctaatataattgatgaaggtggctacagtaaacagattttcaatgtggatgaaacacccttatattggaagaagatgccatctaggactcataactagaaaggagaagtcaatgcctggcttcgaagaacaggctgactcttttgttagaggctgaagtatcaggtgactttaagttgaagctaatgtttatttacgattcagaaattctagaagccttaaaaatgtcacaatatttactctgcctatgttctaaaatgatccatcaaagcctagataacagcacatctgtttagagcaagttttactattttatgccttctgttgagacctactgctcagataaaaagattcttttcaaaatattactgctcattgacaatgcacccaagaactctgatagagacggacaggaagatgaatgttgtttgtatacctgctaacasaacgtccattttgtagcacatgaattaatgagtaa

SEQ ID NO: 251472 - DNA, 574 bp, Homo sapiens
catccagccctaaagattctgtttcttcgaaagtctgttrcccaagctcttctgttctgtttcaataagaatacgcaaaactgatctctttgtaaagacaacaaaaaagttttgttcacaatgcttcctactaaagagagttagtaatcagagtctggaaggctcttgctatcgcttatcctgcctggcaacaggtggtagatgaaccattaaacagcacttccccttccatcacagtattaaaagacacagccttgagctgggctaggggtgggccagctgcgacccaccctgctccctgcatgcaggccacctttctgacaccaggatgaatggttacatatggattctagctgttttgcttcttcttgactcaggtttggctgtaattccacgcttttagtacgtccttctacacacaccacatgagtgctgctcaggacctagtcatcaattgacccgcacacggtgtcttcccttcattagtaaaaacattcagcatcgtgcacacttaatcttacattaaatttaagtgaataaaagtttgtaccttaatttatccactgccgtgaac

SEQ ID NO: 251473 - DNA, 583 bp, Homo sapiens
tatgcaaaataaataaataaataaaatgattaaatggaggtaatagaaaggcagagaattacaagtggtgaaaatgacctatcgattaaggaatatgcatcttttctataagcaacatattttaaaaatgatatttattaccaataaagtgagcaaactgatatatgtgttgattttcattggttgccatgttttggaaaatgacatagttttcctttttctgtttcttctattaaatattttgttaagaacatgtgccagcaaattcttctaactacctgctggttgtaagttaaatacttttgcagactgccttgattctstttcaggtcagcagggtactacttaacaaatggaaattaattctataatagtccagatgtattcaagcattatacagttgtgatttaaaggtatgaaaagaataatatcatgggtattttatatatatatatatatatatatatatatatatatatatgttctccattaacattcatccatgtaagaagtatatctgttaatcaaggaagcttctacatacaagtacgtaaggcagattttttgtattgtctgtgtagat

SEQ ID NO: 251474 - DNA, 626 bp, Homo sapiens
ttaaaggtcattctaaaaatgcaatattctaagtggatacacagttgtgctgacaaacaacaagtggtactgtggcttcatataaartgtccagcgagagcatcagacacagattcaaaaagcaaagttgtcttcgccaatttgatataagtgaaggcaatgtgctcaagtaatgagaagatgcaagtagttcctctaagtgttgacaggcactgaaaaagtttgaataaaaatttcctgaattgcctgaacattaaagtatgtaacaagtgattttaaactatgtatgtgtacctaaattgatatatattttaagaggatatttgaccttcatctgtgtccctgagtagtttgaagtctgctgaaaaacttcctggatcttcattgggaaaaaatgggggattaatagctttatatatatatgagatcacaatttatttggacatatgatttttactgtttgtctccataccctcaaagtaccaggtcaccaatccttgggaccctctgtaagcagagatacagtattgatacccccacttaaaaaccaaggaccctaatttcatgctgacaacacaatcaagtaaaattaggctgcaaatgaaaagactgaatgtgctatgggt

SEQ ID NO: 251475 - DNA, 520 bp, Homo sapiens
tttaatgcactgctacagtgagatggtgccagcacctctaagtatcattgccagtgctctaacctttaaaataaygaattaattgagttatatgtagtaatatatcttggctattactgccaaagtaatagatatatactgaagtcttaggagagatagagggataaatgttagttataaaaagttgttaaagcagagggaaaaagaagtgaaaactgaccaaacatatacgtaattcattgtttctatgacaagcctgctgcaattcgaactctaggactttgtgctaatatttagcataccattttattttctagatttcctttatactcactatgttcctcagtatttgcactcacttcttttgtttgtttgttttgagatagagtctcactctgttgcgcaggttggagtgcagtggcacaatctcagctcactgcatcctccgcctcccaggttcaagcgattctcctgcctcagcctcctgagtagctgggattacaggtacctgccaccgtgc

SEQ ID NO: 251476 - DNA, 520 bp, Homo sapiens
tttaatgcactgctacagtgagatggtgccagcacctctaagtatcattgccagtgctctaacctttaaaataacgaattaattgagttatatgtagtaatatatcttggctattactgccaaagtaatagatatatactgaagtcttaggagagatagagggataaatgttagtyataaaaagttgttaaagcagagggaaaaagaagtgaaaactgaccaaacatatacgtaattcattgtttctatgacaagcctgctgcaattcgaactctaggactttgtgctaatatttagcataccattttattttctagatttcctttatactcactatgttcctcagtatttgcactcacttcttttgtttgtttgttttgagatagagtctcactctgttgcgcaggttggagtgcagtggcacaatctcagctcactgcatcctccgcctcccaggttcaagcgattctcctgcctcagcctcctgagtagctgggattacaggtacctgccaccgtgc

SEQ ID NO: 251477 - DNA, 620 bp, Homo sapiens
tgtctctactaaaaatacaaaaaaattagccaggcatggtgacgggtgcctgtaatcccagctacttgggaggctgaggcaggataattgcttgaacccgggaggtggaggttgcagtgagccaagatcatgccactgcactccagcctgggtgacagagcaagactctgtcaagaaaaaaaaaggaaagaaagaaaacttataattctatatctaagacctsagagagaggtgaacagacaaaatatggcataacaatgtaagtaacatcatcaaacatagaaccaatcattccaatttgagttcattcaagtagctattcttgtttctaaccaaatgatctaggtattattataagaaaaaatatatataaatatttaataacaaatgaaaaaaggtctgtgtatgatatatggtcttttacatcaagtaatatttattaagctgcaacaaatagattagtaaattggacttgaaccctgccatcagtgctcttaaattccaaggaaatctagtcttttacctgattagatattttctgtagtgtacctataatctccaaggaaaaaaaactaatggaatttcaagatattgggaaatacacacatatatgtaattta

SEQ ID NO: 251478 - DNA, 531 bp, Homo sapiens
atttactaaactacaatatttggatgtgggggtctagatctgaactgttttttttttkttgttgttgttgttttaaacggagtctcactctgtcacccaggctggaatgcaatagcgtgatctcagctcactgcaacttctgccttccacctcccaagttcaagcaattctcttgcctcagcctcccaagtagctgggactacaggcacatgctaccatgcccggctaattttttgtatttttagtagagctggggtttcaccgtgttagccaggatggtcttgatctcctgaccttgtgatttgcctgcctcggcctcccaaagtaatcctcacgcctgggattacaggcgtgagccactaggctcggcctacctcaacattttttacaaggttcttatggcttttacacacactaaaattttgtgtgtgtaaaatttgggtttaaatcactgatttagaaaatccagagaatttacaataggtatagttgttgcagccaggcaaaaaaagccattgattgattaattac

SEQ ID NO: 251479 - DNA, 388 bp, Homo sapiens
aaatcaaaatccagttgtgcaaccaatctcagaggtcttgtttgactgaaaaatgatattgtaaacagcctatacccaaagtttgtcaggatagtcaaattaatttatgagtgcagaaagagccttaraacaatcactaccatcaagattgtagaaatgtttaggtttatcctaaaatctttagttgcagaagaggaaacctccaaattaaatattgatacatgcaggaccatgctaagtgtaagagacccttttcagtagttgtttgacttctaagcagacttttgacattgctgaatactccttttcgaaacagtctcttctgttggtttctgtgatttaacattgtgtacgtgaaggtggctgcacttggtggcttaacataatt

SEQ ID NO: 251480 - DNA, 388 bp, Homo sapiens
aaatcaaaatccagttgtgcaaccaatctcagaggtcttgtttgactgaaaaatgatattgtaaacagcctatacccaaagtttgtcaggatagtcaaattaatttatgagtgcagaaagagccttaaawcaatcactaccatcaagattgtagaaatgtttaggtttatcctaaaatctttagttgcagaagaggaaacctccaaattaaatattgatacatgcaggaccatgctaagtgtaagagacccttttcagtagttgtttgacttctaagcagacttttgacattgctgaatactccttttcgaaacagtctcttctgttggtttctgtgatttaacattgtgtacgtgaaggtggctgcacttggtggcttaacataatt

SEQ ID NO: 251481 - DNA, 534 bp, Homo sapiens
tcatatttgagtagagaaaatagacgtgcacctgatatatgggcataaattgccatgtcgcaatgaaaggtaaagttcagaaaaggtcagaatatttctgtcctaagatgctgaagaagtcacttttgccatctttctttccttggaatccctatggcatatgtcaactacagataattttagtacacagttgcaagcaatgtctcatgccattctctaggtttgccttttataaaaatctcacactccaaggagattgtcctgtaactgaaggactgcctctccagtccccactctaagcccacagcacattctatgttcttgttgcctaagtgactggccaactcaataaatggatggattcttgtttctatccctgggtaacctgaagagtgctgggacactgggaaacactattttggtctacttcaaagaaattaggattctctaaagtcataccataaataccatcctagtatcaagyggattatattactttcttccccacctcaattttttttagtattgtatctg

SEQ ID NO: 251482 - DNA, 603 bp, Homo sapiens
aatatctcaagcggaaccctttttgtaaaatagagttttgaagctattctttgtccttgttctcaataggtcaccatttatttatttatttatttatttatttatttatttattttattatactttaagttctagggtacttgtgcacaacgtgcaggtttgttacatatgtatacatgtgccatgttggtgtgctgcacccgttaactcgtcatttatattaggcatatctcctaatgctatccctccccactctcccagccccacgacaggccctggtgtgtgatgttccccaccctgtgtccaagtattctcattgttcaattcccacctgagtgagaacatgcgccccacctcaatttttaagaagagtcatagctatacaaaagccccccaaatatcacagagataagccacacaatgttggaaacaaaatacaacttttgaaactacaatgccaaagaaatccttcaagaaaagcactaaaggaaarcatgaggttcagagcaagctaaaagaatgtaaatgcatgtctcctaggacaatcatgaacttaggtgaaaaagtaccacatggggtatctgagcactttcaggagaccat

SEQ ID NO: 251483 - DNA, 592 bp, Homo sapiens
tatttatttatttatttatttatttattttattatactttaagttctagggtacttgtgcacaacgtgcaggtttgttacatatgtatacatgtgccatgttggtgtgctgcacccgttaactcgtcatttatattaggcatatctcctaatgctatccctccccactctcccagccccacgacaggccctggtgtgtgatgttccccaccctgtgtccaagtattctcattgttcaattcccacctgagtgagaacatgcgccccacctcaatttttaagaagagtcatagctatacaaaagccccccaaatatcacagagataagccacacaatgttggaaacaaaatacaacttttgaaactacaatgccaaagaaatccttcaagaaaagcactaaaggaaaacatgaggttcagagcaagctaaaagaatgtaaatgcatgtctcctaggacaatcatgaacttaggtsaaaaagtaccacatggggtatctgagcactttcaggagaccatcatttatatcttcaattgggagataagatcacactgcatgtgaaactcttctttccttaataagcaggaagaaag

SEQ ID NO: 251484 - DNA, 509 bp, Homo sapiens
aaggcaaatgcttccagcttttgcccattcagtatgatgttggctgtggatttgtcctatatggctcttattattttgaggtagattccttcaatacctaatttattgagagcttttatcatgaagggatgttgaattttatcaaaagccttttctgcagctattgagataatcatgtgctttttrtctttagttctttttcacataaacattttcaatctacagctgaccaccctttgctaactggagtagaaaatggtggaccattgaaacagcctttctataaacaacccgcatcaggagacatggaaatgtcgttgctcatggtttacgatattgaaaagcctctccatctttattacttgtaagagttctcagccatattgtgtttggggtcttgttggtctgtggacacatgagtgatgtgttgaagtatatgtatacagtggcaataagttgtgtgtgctgcaagggtgtggaattctccttatgtcatggaagaccatgta

SEQ ID NO: 251485 - DNA, 583 bp, Homo sapiens
aattgtgatttctgcaaaaaaatgaattatgacaatcaagtctctagccattcttgtctaattattgttaatactttaaaataagttaattagcaataggctacaatcccagacatacagagcaagagccagaagatctgtgctgtaatcaacaaagccaaatattagtgcctgcaattgatgcatgcagtattttctgtaaaatcctccaaggtcaggtattctgagaaaattttatagttttaacttttttattgctgttgttacactgaaaatattatagaaaacatcattttatcaaccaaatgtggtaagttaaaagctgatatctcattgcctagagtgatgttagttagttatttaatatttctattaaatttggttaggtaggacacgcttacagcaactccttgcccttttatcttttttgggggagaggatttggcttatatcacctcactcgactagccatttatacttgtcagagtcacccttgtttatcagtaggtcagtctstgaaaactgtgtctatcaagtacactcaacacaaacatctggatcgcaagccctcaggggcacccat

SEQ ID NO: 251486 - DNA, 563 bp, Homo sapiens
gctttttagcccagggtaacaaataatttctcaccaaaggtgagaaattgtttatgcttattagtgcaataatcctagggtcaaactaagtaacacaagacagaagatgccaaaagctgagtgctactttttggaaatcattgataggtagttctacctgagtgatacagcaagcaaatatgaacttgaatctggcaggccctgtgggtagaggagytgtagcttagatttaaggaagaactaactgagcctagggaggagggcaccaataaatattggggtttatgttctttaggttaactaaaaccaggttattttgtcagtagggatgattaaggtgcagcttgtttgtgagtatgagcagtgctacttgaagtggggctcacttgagtctgttaagaatgaaacactttgagccacagactattaaatcagaatctctgaaagtggcatccaggaacttacattttaacaaaatttccataagagcattccagtttgccaagtcctaggctgggaaagggttgctttctggagcttccttttgatttacaagccagaat

SEQ ID NO: 251487 - DNA, 558 bp, Homo sapiens
ttcttcttaaactttctttcatttctatctgtagacacacttctttgtatatattgagttttagcatcatttgtttagctttcacttcaattagcagtcaaatgaatagcaactaataaatcagtatgcagcaatttaaatgcttattaaaatttgccaatcagaacctaactcccagctttgcttattcagaaaggactgacattttcttgccacaccatctactaaagataaggcatgcagtttcagattaaattaaacatggcatttctgtatatttgggttatcttttatagtttttgaaaaaggaaatcattctgagaacttatctaaattttaaaggttatgattttcagggtatcaaaatattttacaaattattttctttaacaacttaccacagtgtctgaaatttaggcacttgtgattcttatgggctgttaaagctggatagagagatacatggatatatatacataaatrtagaaatatacatagatatggaatatagacgtaggtatatattgcatcactgaaaaaaatgcttcaaatagctta

SEQ ID NO: 251488 - DNA, 323 bp, Homo sapiens
tttcctctgccctctatttttcattatattctttcccagatacataatcagacactcctttgcatatgcaagaaaaaggcctaaattgggaactacactttaccttctgttgtgaaaaaagtaaatcatagtatttagaatgccttgcctgtataaagtatataaattttatacatgcattatttcatttaatagtcacaaaaactttaccaaaattggatactaagtaaagttctagtgtccaattttggtaaagtttttgtgactgttaaatgaaataatgcatrtataaaatttaaatactttatacagggaaggcattc

SEQ ID NO: 251489 - DNA, 674 bp, Homo sapiens
  misc_feature (1)...(674): n = A,T,C or G
aataaaaggtcagaagcccaagaataccaagtcaatgtagaagcaaaatatcagaccagatatagccgaaaagttcaagatcaaagaggactcctggctttaaagacacgaggttaggcttttcctctcaattattgaatggttatgaagtcctgttgtatttttgctttacattcaaacaaatagaaaacttactagttcagtgaaaatgttgaaattgggaagtactattccaaataaaattaaaagtcatcaaaatattcattttttagccaacactatattatatatttcttacaaaatgcatagatactgttttgtatctattggttttattttcttktctaataatatttacagtgtgaagcaccattttatacgaggtgctgtggctacacctcagagtcatgtggctcaaaacacatactggtgaagccaccattggtttctccttctgcctatttttatttttaacattcccttattttgaccttaagaagctactttccatgaagatcaagaaatcatgtgctctagcnaagtataatatcctttcacagtgttttcaaaagtggtgatttccttgcctttaaaattttatttttacaatttttttacttgccacataaccatgtgatagaaaggtgaaactaaagccatattgnnnnnnnnnn

SEQ ID NO: 251490 - DNA, 537 bp, Homo sapiens
  misc_feature (1)...(537): n = A,T,C or G
actggtcttttttttttattcctaacactagaagtagattttgctcatcaaatgggaaatgaaatatttatagtaatgaagagtatgattgtaatcactgaagaaacagtttttccccttttcccacccactaccagccctattcccttcagagactcagtggaataggaagatcagagtgtttacagatagtatgccctaatacaatgagctttctccatcttattcwtggaaactccaagtagtgctatcaagtgttggcttctccttcatcaaagacatagttgagctttatgacagtgctgataaagtcaccaagttctacaaaatcggcagtgacaatattgatgccactctctcctggcttctgcgtgcggacccactgcatcatggcaggaagagctctgagaaaggaaacanaaagaaaagtcacagaaggcagatactatttttcaagctctacaattctcagtcttccctttagtttctagcttattaaaataaatgtttcacgtataggtacaggaaggggaaaag

SEQ ID NO: 251491 - DNA, 577 bp, Homo sapiens
gactatgccactgcactgcagcatgggtgatagagtgagacactgtctctaaaaaagaaaaaatccaacatctaatgaaaagaaagattaaagaatggtgggggacatttttaacatcacagtaactatataatcacatccttctatactaaagtagaccattctataaatagatgttaaaatgttaatatacaaattcaaagggaatttaattatctcttcagattacataactcacttaraaatattttccttcatgatacttgtggataatattaaaatttccactagtaacatcttggctataaagaaaggtaggggtaatatgaatgaattaaagcttttttagactctcacagcaatctgagaagtttcaaaggaagacagtgagctctttatttataggtgaagaaaatacaagtttgaatgtctcaggagcctttggatggaattaatatcaaattctttgcaggagaaaattttttaaaaatttctttaattggacaaacctttatttgcatataaagtcaagcttagactccacagcatgtcaaaggaagtccttaacgacctggcc

SEQ ID NO: 251492 - DNA, 580 bp, Homo sapiens
ctgcaaggaaggagacattcacacgaggacacattgcagctctaaggtgtcaatacaaccccccttcttgaatgagtatggctgttttaaattctatcagtaaaaataaaacattccacttgtgcatgtgggacttaagtcactttgacacagagaagcagcctcaattcacagcccaggagcagagctttagataatgagcttctgcacacaacattccatagctacatcactttgtagggtgaaaagaagcaggactctgagtccgctttgcagtctagactccactagactttacaaagccctactttgctttgagtctatcaaaatactgttttgtttaaatttcatctaaactccactcttacacagaactctgtaacaacctatatttttctttggtgagatgaactttgcagtgggtaaataaacctgattttgttagacttcaagtagttactggtggttttggtttgactaggactggaaacaaargggtttttaattattatagctctctctcccacaataattgttgcattcaaactgtttttataattagagatctggtcatttattc

SEQ ID NO: 251493 - DNA, 560 bp, Homo sapiens
tatctctctgaaagaaaaaagaaattgaatttaaaagaggtcctggtactgagttaggcggtgttgccacttttcaggagcatttctaatatgtcggtgtgtttttggttgtcccagttactgggaaatgctatataagggattaatggggaaacttggacctcacaacaggctggcaaagggaagtgttgaacatggtggcattgatcctatgaagatatttacttgattatcccatctgtatttgagttcgtccttcaaaaagcatttgcaggacctagagctgaccaatgttttctttcttgaaggacattatgactgcagatattcataaggtgtctgaacacaagggtatggagggaggtagatctcgccccttatagatagcccagctgaaaaagatagaaaggcagtgtggatagaattgtgagatttaggaaaaaatatataggacatacccagttacatttgaatttcagataaactttttttaaagtgaaagtatgtctgatwaaatatatgagaaatatgctaaagaaatactgtttatctgaaattta

SEQ ID NO: 251494 - DNA, 478 bp, Homo sapiens
aagttctttctcttttttcttttttcttctttcttctttttctttctttttctgtctctttcccttctttccttctttctttcctttcttctttactctcaaaatccacttttcctaaagtatgttctacaaaactggaattgagaattaaggtgggcagggaggagagggaaaataaaaagataaaataaagacrgataaaattatagcaaacaattggtaaaggctacagtcacactccaggatggtaggcactgcttgaagtaatttaaaatggagcaaaagctcagatttgtattgtagtatgaggatcaaggaggaatttaacacctgaaaccattgtgcctttttattgtaaatgctgcttcctccttcctacctccatagaaaggactttttatttcgctatttcttcctctttgaggtcctctaggtgtgcatagtgagcaggaagtttgtgtcttctgggataactcaa

SEQ ID NO: 251495 - DNA, 597 bp, Homo sapiens
aatattaacaaaacctgttaaagtactctttgggagcatcaataggttggtgtgtgtgtctctccgtctrggtaacatccttatgttttcatagaggtcactggaaccagaacacttaactcaaatatagactgtactctcttccctcaatattatggcagaaataggtgccattggtctcaataaggaccaacggatgcagtatattaatagatggttcccatcacccataagtagcatgaaatacctgctttttctgatgtatgattgttaagttatgggatagggttcagcaaaagcattaatagcaacagaaagcaaactatttattcctctttcataacatgaaccagaatcaaatagttggaagccaatttttgaatctgaagcagataatgtttcctgtatcctgctattatttttctccccagcatgtgttcaatgaagataagtcccgtgaatagttatctgactccataaaaaccattaggccagagtccaatgagatatcacagctgtgctacggatgagataatagaaaaagaacagcattcaaagcttttcatagtatccatgtataccttgaagagggtagtg

SEQ ID NO: 251496 - DNA, 597 bp, Homo sapiens
aatattaacaaaacctgttaaagtactctttgggagcatcaataggttggtgtgtgtgtctctccgtctgggtaacatccttatgttttcatagaggtcactggaaccagaacacttaactcaaatatagactgtactctcttccctcaatattatggcagaaataggtgccattggtctcaataaggaccaacggatgcagtatattaatagatggttcccatcacccataagtagcatgaaatacctgctttttctgatgtatgattgttaagttatgggatagggttcagcaaaagcattaatagcaacagaaagcaaactatttattcctctttcataacatgaaccagaatcaaatagttggaagccaatttttgaatctgaagcagataatgtttcctgtatcctgctattatttttctccccagcatgtgttcaatgaagataagtcccgtgaatarttatctgactccataaaaaccattaggccagagtccaatgagatatcacagctgtgctacggatgagataatagaaaaagaacagcattcaaagcttttcatagtatccatgtataccttgaagagggtagtg

SEQ ID NO: 251497 - DNA, 612 bp, Homo sapiens
aattctattacaggagaaaaatatattaatgcacagtgtccacagggtacaataagtataaaattgaagtaagtgcaaaggtgaatgagaacttagtgcctacaacagtaggggaagttatcccacagaaggtaaagttgggtcttgcaagataaattttgcagacaaaaaacaatagagacatttcaggcagagagaatgacatctgtaaaagcatgagaaagtaaggcaaaaatggcaaaacttccattgttaatatagcaaagaattgacaggagggcaggggaataataagagataaataatgggctacaacagttgtgggctgagggcaaagagtgaagaatgcatgccatgagctgacagtcaattaatgtttacccagtgctccctacagggcctactaagtgggtagcatgcccaccaccacctccaactgattagacctggcctgcagctagttcatcttttggcttgaatgtgaccaagcagtttctcctgctygggcatttgtcttactagataaggtcaatgactgtacctggtcatatagtatgcttaattaaatggttatgtaggcatgacgtcagttctggtgtcatggcaagccag

SEQ ID NO: 251498 - DNA, 596 bp, Homo sapiens
gaatctttacatgttcattttagtcttgtttaaaacacaccaggctttgtctagtttcctcttctgggtggggaggttgttggcagtgataaaatttttcctttcaggaattctgtaaataaaccgttatgtttatgactacatgtatagattctgattaggtgctgtattagtccatactcacactgctgataaagacatacctgagatggggcaatttacaaaagaaagaggtttaatggacttgcagttccaagtggctggggaggcctcacaatcgtggtggaaggcaaggaggagcaagtcacatcatacgacgatggcagcaggcaaagagagagcttgttcaggggagctcctctttataaaatcatcacctctcatgagacttattcactatcacaagaacagtacaggaaagacttgcccctatgattcaattacctcaygctgggtccctctcacaacacatgggaattcaagacaagatttgggtggggaaacagccaaatcatatcattccacccctggctcctcctaaatcttatgtcctcacatttcaaaaccaatcttgccttcccaacagtcccccaaag

SEQ ID NO: 251499 - DNA, 596 bp, Homo sapiens
gaatctttacatgttcattttagtcttgtttaaaacacaccaggctttgtctagtttcctcttctgggtggggaggttgttggcagtgataaaatttttcctttcaggaattctgtaaataaaccgttatgtttatgactacatgtatagattctgattaggtgctgtattagtccatactcacactgctgataaagacatacctgagatggggcaatttacaaaagaaagaggtttaatggacttgcagttccaagtggctggggaggcctcacaatcgtggtggaaggcaaggaggagcaagtcacatcatacgacgatggcagcaggcaaagagagagcttgttcaggggagctcctctttataaaatcatcacctctcatgagacttattcactatcacaagaacagtacaggaaagacttgcccctatgattcaattacctcacgctgggtccctcycacaacacatgggaattcaagacaagatttgggtggggaaacagccaaatcatatcattccacccctggctcctcctaaatcttatgtcctcacatttcaaaaccaatcttgccttcccaacagtcccccaaag

SEQ ID NO: 251500 - DNA, 557 bp, Homo sapiens
ctttacttatatacttaggtgagggtgaggcaagggttaggtggcccactagaaagaaacttctgtgagattcttcattatgcatctattattctaggattgtctcacttgttgagttccatagtttttatttattcataaatgtcaggaacaggaacaacaaagccagattcaaagagcctaacaaggragaagataaaacagcaaaagttgaaaatgaaatgtagatgatgacacataaaattaaggcatcactgattcattttaaaaataatttttaaaaagtctttcttttgtgaaaatccaaagaaaaagctcccggatagagtagggggaagaaaatggcattttcttggtatccttcatctcagccaagaaaaaaatcttatgttaaaaatgagtggttgcattaaaaactttttttttctgagtctttaatatcatcagaataaattatccttctgtatcaaattcaaatgaaatttatttggagcatttaatgtaggtgatatggcttggctctgtgtccctatgcaaatctcatgttgaattgtaac

SEQ ID NO: 251501 - DNA, 623 bp, Homo sapiens
gccgtcttgttaatctcatcactttctcattagtacaaaacattttycaacttcattcttttctgggtgagggccaataaaactacagaaaaaatctcccatttaagaaaatatctctaatgtctttttcaaaattaaagaatgcccagaagtttttgaaataaggtatgctcatcacatcctaaagagcatttttgttttaccactctttcttatgtcagtacttattaaaatctacctagagtgtggtcgatttccagtggaactttgagtcttctgggttacaagagataagtgaaaaatatttaaagaattgttttttatgtgctatattggtaattactatatcactatatattttaaatttaaaaacattcaattccacttccattaatggtgccatcaattttcctacttttccaggtttggaacatcagagtcatgtgtgtttcaatgtcttctctactagactctgagtagtcttgtttatatcacattaacccaaagcgttaccatctcacacctgaaccacagccagagcctcaaaactgatcttcctccaactggtctttgctacttacttcacttgtagagtgcttttcacttatctttttactttgctt

SEQ ID NO: 251502 - DNA, 587 bp, Homo sapiens
atgtctgactctaatttgctatcttgatttccaaagtgcttgcttacaagatgaaatgagctactcagtactgggctcagctgtgtggatcggagtcacatatcagtttcaaggattcttaacagaccgttggaaagctataatagacgactgatgctacataaagaatatctaaacagtatragaatcgctaaatcaaaatcccacatgggggaggtaagaagagaaaagaaaataaattgctttatttacaataaaaagctatcttgtttgcagattacaaggaccaataggcacaaataagtgctaatattggattttttattgaacttgaaattattttctccttatttaaaataaaaaaccctttctgtgacacaattaatttagtcaaacttatcgatagtaggcacatctgtactttctaaaattccaatatttcaatctgtttccattttatgaagataactacagatgttgtaatgcctacaaagatgcaagagatgagttggtactcctaaagtcacctggaaaacctttacaaacacccatgccagaattcaatgttatagcagaatttctgcaag

SEQ ID NO: 251503 - DNA, 597 bp, Homo sapiens
tttctaatttaggaaggactaacatctgtgacttttatgcaagaccaagtatttttcttactttctatctttattggtcaaattctacttctttactcgacattgttgtcggtttgcacatacaatgtcataatgtaatttgtattacattataacacacaattaaaataaaacagtactgaaggctcatatttaaatgcaaaacttcatggttctaccttaatttagccccagttactccccaaagattaaaccaatttcaactgtctagatttttatggtgtttaatctccatattctgaagtaatatgcttatattgctattttggacttaycaattttagagagcatatttgcctgctctaaagtacactcataggggaaacagaattccactgactaacataatgacttgtttctcaaataatttctagactaaacaatcatgacaattatgtacaccaaagttttttcttctgtaccattttcttatataataggagaacaaacaaaaaaaatcaatgacagggagaactttccacatgtctggaagtagagacgtgacttacagtgcttttgctgaaaatggtaagagag

SEQ ID NO: 251504 - DNA, 608 bp, Homo sapiens
gttcctaatctgagtgcagagccagtggcaaatgtgtttttagtcaaatataattactaaagaatacaaacataacgtttgccatccaagacctctgcaacttgaaaccccagattaacttgcactgaaggccttttgagtgaagatcagtctggaaagatttttcaggaaagatggtttagctaaccagatagaggaatctgactccagatctagtgggcagcccctcttattcacaggcattagccacagcaattacatgttttcctcattgatatgacagaggtgagccaagacatagaggagggtattatccctatcttcactataatatcagtgttgtgtttaatattcggagacaaaggattagcttcgttttcagggagagatttatagaataatgagctaaatctgtgtttaataaggtttttgttcttttgtgttcactgtaatgtggaagtaatttcagtctttctacacagaggtcccgactgactcccatcacagtatcgkcagagctccagctacacagtggaatacatcatctctggttgcacatggctggcagcctctgaagattgggtttaaactgatggggcaggtctttc

SEQ ID NO: 251505 - DNA, 556 bp, Homo sapiens
tatctttcctacctgagccacttatactgtattgtcaggtttggtttatttcattttctgagcttatttgccagttaatcatttgtttttatattacaaagtggctcatctctgcctcattacacactgaaagtaatgcctgacaagcgattgtccaacgctcaccaaaccgtgcttgtgcaggttggcaaaggatgctctcagcatagacaggctgacttacatacagccagcctacctttcctgtctcactatcagatctgttcataggtcccgacacaggggaaaaaaatcagaatgatatatagaattaaaggataatggaactggaataatgttgagcatcttaattagagactttgggcaggatataatcatrcatgtgagttgaatacgtaattagaagattagaatctttgaaaaagaaggaagcgttagtattctttagttagcaaaatgcactgttttatagaatgtaaaacaaacagcaccaaagaagacaaagttttataaaatgactttcccaaggtttactcatttcttcatataagagaat

SEQ ID NO: 251506 - DNA, 556 bp, Homo sapiens
tatctttcctacctgagccacttatactgtattgtcaggtttggtttatttcattttctgagcttatttgccagttaatcatttgtttttatattacaaagtggctcatctctgcctcattacacactgaaagtaatgcctgacaagcgattgtccaacgctcaccaaaccgtgcttgtgcaggttggcaaaggatgctctcagcatagacaggctgacttacatacagccagcctacctttcctgtctcactatcagatctgttcataggtcccgacacaggggaaaaaaatcagaatgatatatagaattaaaggataatggaactggaataatgttgagcatcttaattagagactttgggcaggatataatcatacatgtgagttgaatacgtaattagaagattagaatctttgaaaaagaaggaagcgttagtattctttagttagcaaaatgyactgttttatagaatgtaaaacaaacagcaccaaagaagacaaagttttataaaatgactttcccaaggtttactcatttcttcatataagagaat

SEQ ID NO: 251507 - DNA, 651 bp, Homo sapiens
aatctttcatgacaatatttgaagactgccatcactgtcatcccttcaacaaatattcactgagctgtgacaagcacagtgcttggggctgtgaatagcacagtggtatataacagagactatgacatcaggaagttcatggttggtgtcacttatttaacaagcatttattgagcactacctatgtgataggcaccttgctaaatataccmtggggattaaatagaacatatgacatagtccttgtgctcaagatttacctaaccactccacgtactgatttatggaaattctgaaactaggtttgttatttacccaaaaaagacactagctaactaattgatagagaaattttctgcaatattatctctcagccttcaggcaactgcatcttttttgctacctcacctctatattcttaactgctctgctctggtttttgtaagcagtgttccttgtgcggcctgtattttggaacctctgctcatgtaatggtgtttgccacacagttgaactgttgaactaattcttctatattttgaccacacagttttcttagatacattttgtacctggttctcaatttccccttgctttgacccttcatgtgtatatcctgtaactgctgttacagatatctggtatctgaaa

SEQ ID NO: 251508 - DNA, 651 bp, Homo sapiens
aatctttcatgacaatatttgaagactgccatcactgtcatcccttcaacaaatattcactgagctgtgacaagcacagtgcttggggctgtgaatagcacagtggtatataacagagactatgacatcaggaagttcatggttggtgtcacttatttaacaagcatttattgagcactacctatgtgataggcaccttgctaaatataccctggggattaaatagaacatatgacatagtccttgtgctcaagatttacctaaccactccacgtactgatttatggaaattctgaaactaggtttgttatttacccaaaaaagacactagctaactaattgatagagaaattttctgcaatattatctctcagccttcaggcaactgcatcttttttgctacctcacctctatattcttaactgctctgctctggtttttgtaagcagtgttccttgtgcggcctgtattttggaacctctgctcatgtaatggtgtttgccacacagttgaactgttgaaytaattcttctatattttgaccacacagttttcttagatacattttgtacctggttctcaatttccccttgctttgacccttcatgtgtatatcctgtaactgctgttacagatatctggtatctgaaa

SEQ ID NO: 251509 - DNA, 607 bp, Homo sapiens
gattaggttaaaagcataagtatgtaatttgtggatttaacacttttacattaatcacatggaatattaactacccatttatatatttctatttccataagttgcatatatatgatacatctaattatatttactgaaacaattaaattctcctttttacctaaattacacatatttaaatgctactataaaaaggatatttctttttcattagcttgacttcctgaggttattttggtcgtgttttgaatttcattatcattayactttacatatttataatgtattaatggttgctttcagtttcattaaacttcattatataattcaaaattttaagtattataacttacaatactacataagtgttttctgtgaaatacctcataatgctttcctatttattgccttacattcttcatctgtccctgtcttagccaagcaaataatgttctctattctgaatacatttgaataaaacaactcattaaaatgcgtctgaatgcttgaatttaatgagcattattagtctttataatattcctaaaaataataaaaacagtcctcagaaactaaagtgctgtggcctactttcaaagcaacatta

SEQ ID NO: 251510 - DNA, 557 bp, Homo sapiens
gtgagtgcttaccagtgggtgacctcagaagaggattttaataatgaagtggagaggatgactcgttctgtggacacgactcagcctgtttccccagccaccccgtcatcgcccaatgggcccatgaacaaagtggccatggtggcagggatggaggttactygtgggctcagcaacatggatttccactcaccaaggctgacctggctatggccactgctgagtgcccaatttgccagcagcagaaacgaacattgaacccttgatatggcaccattctttggggtgatcaggcagctacctagtggcaggtagattatattggaccttttccatcatggaaagggcagaggtttctcctcactggaatagacacttactccagatatgagtttgcctatcctacacgtaatgcttctgccaagactaccatttgtggactcacagtatgcctcatccaccatcatggtataccacacagcattgcctctgaccaaggcactgactttacagctaaaaaagtgcagcagtgggctcatgctcttggaattcactgg

SEQ ID NO: 251511 - DNA, 532 bp, Homo sapiens
ggactgggtggcccatgtcagtttactgcagtaaagacttttatgctgagatcagataatactaggtaaattgcactcaacacagaatgttgctttaaaaggtcataactccatctgaaagcaatgaacttatttcaaatatagattacaggaatatctagatccatggcactcaaaatgttaaatctgcaggccaagcgaggtggctcacacctgtaatccctaaactttgggaagctgaggcaggaggattgcttgaggccaagagttccagagcagcctgggcaccacagcaattctctgtctctaaaaaaaaatattaaattagctgagcatggtggcatggacctgtagtcccagctactcaggaggctgaggtggaggatcacttgagcccaggactccaaggctgcagtaagctgtgattacaccactgtacttcagcctcggtgacagaatgagaccctgtctctaaaayaaataaataaatagacagataatgttaatttttgcaaacaagagattatgtaaa

SEQ ID NO: 251512 - DNA, 482 bp, Homo sapiens
tgagtctcaagttccatacaaaagtggccccatgtgttagtccattctcatgctgctatgaagaaatacctgtagaactgggtaactttataaagaaataggggtttaattgacgtcacagttccacatgggctgcggaggcctcagaaaacttacaatcatggyggaagtcatctcttcacagggcagcaggagagagaatgagtgccagcaggggaaatgtcagatggttataaagccatcagatcttgtgagaactcactatcatgagaacaacatgggggaaaccacccctatgattcaattacctcccaccaggtccctcccttgacacatggggattagatacaattgaagataagatttgggtggggacacagccagaccatatcatccctcttctatgaaagtttccccagcttgaaagtcaagattaattattataattcatttctaccatttttatttggtacacccatgta

SEQ ID NO: 251513 - DNA, 531 bp, Homo sapiens
tagactcttctctgagtgccatgcttcttccccagcatcctacttctccagcccccctaccattctagctgtgtgggctaccccatcctgctaactggaagatggatttctattatcaaacrtaatttatttcaaggaagatagggtaccatttagaaacctatctttttggttatactgcaaatctcaatttgttgtctattaactgccaggagtatactcatactgcaaatctcaatttgttgtctattaactgccaggagtatactcatctctctaaaaggttattattggggaaaggggtctttcctcttcaggtccacacagcagcagctctctaatgaagttttgaaatatgagctgtgaaggagccagaggcagtgatggtgctttactggccagcagttgttagtttctcagtggtctaaagggaaatatccaaaaaccaacctgacttatggagaactgtgagaaaaatactcttaacactttaaggtggcaatgccaacattcaatggcctctccctcccc

SEQ ID NO: 251514 - DNA, 229 bp, Homo sapiens
acagtttttgaaagccttagcttattctatttagttataaattcctactagacatatattttctatgaaatatattcttggtattattgaaatagacatacatataaaattaactctaattattttatggwttgcacaattactaaataatttcatgtacaatattcgtgttaagaacttaagaaccactccaccaaatcagtttttaataaagaaacatcattactat

SEQ ID NO: 251515 - DNA, 558 bp, Homo sapiens
atgaataccctggggggttcattcttcctcaagagtacacaaaaagtgatgttttaaaggaatcgagtttcagatcttcaactctcttaagtgcacagaaacaaaattgatctgctgaagaaggaacatgtagttgagttctgcctcttttcctaacttttcttcttttttcttccccaatttacatcttatttcatgcctcctagattttrccatctttcattactctaggaggtaaaaaccccagaacagccaaaatgtagcaatgattttcaaaatactacttttgattttgaaaaggtgaatgattctgatgaatgggaaagaaatgataaatattttgtgattcagtgttttccaactatttgcatataacaaaagttacaggagcacataattaagctgtcagttgataagtcattagtttttagtgatagatcactattttgctttgtatacgtgattacaaaataatttaaagaattgagagatattgctataaccgctttcttacctatttgtgtgaacaagatttcttaaacttcgcacctgtaaaaa

SEQ ID NO: 251516 - DNA, 558 bp, Homo sapiens
atttcttagaattaagaattggctcattatcataaaataaaagcaaagcagaccagaaaatggcatggtgctattgttggtggtgtttctgtttgtttgttttagtttcatttgacccaaattttcatttgcttgtttacttgctatgattttaaattattttaaatctaataagaagaccaaagaagatacaagagtcaattataaaatgatgtgtgaaaaaagagaccagaattcatcagatcatattctgctgctgtcatttctgtgaaaaataaaatttagatgaaaaagaacaaaaagaaagcaatgagaggaagataccatccaatataaataaattctgaaaccaaccaattcttctcagggtgtctcctgcccacatgatgataatgatgccaaaaggtggcagaatcaattaatatgatgataagattttgatcatgattatgattattatttggaatgatgaaaaggggagaagtcccaaaaaccgtagttatcattaggatttaagctggaaataagwgggcaatgaaaggaagaggtagcagactt

SEQ ID NO: 251517 - DNA, 526 bp, Homo sapiens
gtcctccagttagtttcactcatgttgtaacaaatgacaggatttctagggatacaataattttaaagccgggagtggtagttcatgcttgtaatcccaacactttgagatgcagatcactggagcccaggagttcaagaccagcctgggcaacataaggagatgcaatctcttattttaaaaagttaaaaaaaaattaactgggtgtggtagtggcatgcacctgtgttcccaaccacttggggaccactaggacccgagatgtcaaaactgcagtgagccgtgatcatgttactactacacttcaacctgggcaacagagtgagaccctgtctcaaaaaaacaaaaaacaaacaaacaaagaatcttaatgtcgcacttttgagctaataattgaatatcttttctttwtttatatatagttgcagctacagtggctgttaccctcatccaggttagaagtcataataactttagaagaagaaaacttatttaaattcagcttagtttgacttatcattttttt

SEQ ID NO: 251518 - DNA, 552 bp, Homo sapiens
tcttaagcaagtatgtaaaaataacattatgaattgttaatttatcttacagaaattttcagacaacctaataaaagtagttaccaattatgtgccaagaactatatatatatatataattacaawtaatttttattaataagtcccattttatggctgaataattcatttatctgtgaaatcaacaaatattactagactgcagtgtacctaacaccaagtattcagtggtgaacaagaatctcatccagcttatcctctgctttaggggttcagcgagctttcctgtaaaggaccacatagcaaatatttttagccttgtgagccatatagtttttgtctcaactactcagctctgccctagtagtctgaaagccgtatgcagtatgtaaatgaacctgtgtggctgtgctccaataaagctttactgacaaaaacagggcgtttggatttcacttgtaggctacagtttatggacccctgattgagttaaacagacatgaaatataaaaatatataacaaaaatttcacttatatgtgctatgaaagaa

SEQ ID NO: 251519 - DNA, 379 bp, Homo sapiens
aatgctcagatgtatgtttaacagctgtggcctcaggccattcatttccattttatcccttagcaatttgaaaagaattcacaaataatctccccaccatgtagtaggatcacagcaacagtgtgccacacatattactatttatcctgttcggtgcatgatattttatatttatgtcagctagatctactcctttactgccagaaagatattgctccaactcccgtcaatctcattcattcactttccttkggtaggaaatctgagagaggccaacattttcataaggaaaagaataattgtcacttctagaattctgtcactcttctttgaacttgagggcctcaagggtttttattgtttccagttctaatttgta

SEQ ID NO: 251520 - DNA, 619 bp, Homo sapiens
tgaatttaaaagaaacaacagtatacattgatgaagaatgctataaattattatggataaaatcaattttctgggctgtggggggtagaattggtgcttaagaaagaaaagactcctaccaatataaattactaatactatgaggcarttgttttattctgatgatcccataaataactttaaatctacatccttaacacatgatgtatagtggaaaaaaaataaggtctgacttttttaatgaccactgtacctgaaatgatttttaaatcagtgacgacatggatatgccacaaatgtataactaacatactcttttaaactgttgtaattgctgttgaaaattatgaaacatttgtggtttaaaaaattatcagaaatactccacccaaacaaaatagctaatattttaaaaacataacgttacccacaaacattttaatgaacccctattttaaaacattaaaacccaaatatactttttattataaattgttacatatatatttcaaatgattaaaacatttaaaaatatatgtgtatttattgcgatttcaagctgctactttcatatatattttgtcatgcttcattatgtttcattatattgattcagaca

SEQ ID NO: 251521 - DNA, 492 bp, Homo sapiens
ggctaactttttttttttttatgaaatcagatattccagagccacctttatcaccaaacataaaagcatcccactgcatacytcaacagaattgcctgcatatccttaatgtctttccaagcaattttatgcagtcagcaccctatacattagggaaggaatggatgtgtgctctatgggttcttataatagcaatgaaccttcataatcagactcattccttaattttgcttactttttcatgcagctgcattaatactacattgtcaaagacaaagacgaacatgagacatgagatatgagttttaaaaaaaagagagaagagcaaaaaaacaatacagctatccaaggagcaagtgctgagcttgtgtaaaaacagctcctattttattaaataatagtgttcctgcagggatgtctgaagtactctgcaaggctaattaggacagatcaatgtacacttacctctccagaaggctgaaaggtgtgtag

SEQ ID NO: 251522 - DNA, 619 bp, Homo sapiens
tgaatttaaaagaaacaacagtatacattgatgaagaatgctataaattattatggataaaatcaattttctgggctgtggggggtagaattggtgcttaagaaagaaaagactcctaccaatataaattactaatactatgaggcaattgttttattctgatgatcccataaataactttaaatctacatccttaacacatgatgtatagtggaaaaaaaataaggtctgacttttttaatgaccactgtacctgaaatgatttttaaatcagtgacgacatggatatgccacaaatgtataactaacatactcttttaaactgttgtaattgctgttgaaaattatgaaacatttgtggtttaaaaaattatcagaaatactccacccaaacaaaatagctaatattttaaaaacataacgttacccacaaacattttaatgaacccctattttaaaacattaaaayccaaatatactttttattataaattgttacatatatatttcaaatgattaaaacatttaaaaatatatgtgtatttattgcgatttcaagctgctactttcatatatattttgtcatgcttcattatgtttcattatattgattcagaca

SEQ ID NO: 251523 - DNA, 601 bp, Homo sapiens
ttaactactttgtggattactcatgaataattttaaatctcaggtgattttctaatgtatatttcttcatatctcttctgcttcaactgtaaaggctcatgggaagaaaactaatggtaatattaacttaggtcacacataattaagaagctaaatctgctgaggggaaaatcctgtattttaaaaggccaactgtgatacattccagatccaaattattttcaaattatccagtgtgsggttatacttatttttgaatgcttgcagtatcattaataattatgggtttgttataatgggtattattaaataattatttaaaatatgaaaaggtaaaataaaataatttctttttgaaagaacatctaaaactgaagtgtactgtggtaaacagaaataccctctataattcattaaaaacagcagggctgaaattcatgtattggctatgtgtttgctcatgtcaatagactgttgtaactcactgcattaattttaggtattatggcaataaacttagatggtccttcaaatgctttgctttttcaggaccttcgtgaatcttgaagaaaattaattttatttttaccaccatatatag

SEQ ID NO: 251524 - DNA, 588 bp, Homo sapiens
cagtagtagcagggccactatatgtacccaatgaggaaaagagagtcaaaggctccaaatatgcttcctattgttgctgagtttggtccagggactgataggtttgctgcaggtgggagtagattcagcacacttttgttcaggcagaagcagaggagggaaggaagatgtggcaaatgccttctctttataaactggagggattatagtggtgcctatacaactcttgtttcaaaatcaacgctttaagaactttaaaagaaatacttcttctgagcctggccaacatagtgaaaccccgtctctactaaaaatacaaaaaaaaattagctgggcatggtagcgggcgcctgtaatcccagctactagggaggctgaggcaaggagaattgcttgaacctgggaggcggaggttgcagtgagccaagatgacgccattgcactccagcccgggtgacagtgygagactctgtccaaaaaaaaaaaaaaaaaattcctcttcggtggctttccaaatctatggaaaccgtactgcttcctgttaattcctattcctctccataaatgcttgtaatatttttaatagta

SEQ ID NO: 251525 - DNA, 612 bp, Homo sapiens
cttaaaggtttataatataggataaatatcctgtatgaaaatggctttcattttattcatagtaaatgagattttgaaacacatccaaacattttaacattgtgctgacaacaacaacaaagaaaacacccacacaagatattaataacttaaaacatataggcaaggactatcggttaattcataccattttaaatctgaatttgataaacatagaggcagatggtgttataatttttttctagaatgccaatgataatgtctgtgtgatacaattaatctgttgtgaagactttacacattcaaatgctcagttyggcattaaagacttgtatatcatgaatgcctgcaatttgactctatttttcttcacactaggggagagtggatttagttaggctatgtaaggacagctgggtagtttgtataacgttaaatatcaaataatggtcctgggagaaattatagtactgctgggtcccaaccatctcatatggatcatggaacctgcagagaagacgtttctggactgtggaagagaagagtgttttgcctacttttcggttacactgaagaaggctacacagtagccctggggacaaccaccagact

SEQ ID NO: 251526 - DNA, 517 bp, Homo sapiens
gcaatagatgctcaaagcccatgctccaaagtgagctgtggatgtctagcaaatagccttctcttacctgtagcgtggaggtggtgatgggcattgctggagaactggtcggagtgagggttcaggagcatgaagaggctggtaggagggtcttcttcagagagggccggaccatgtcaggagctgtctcctggggtgggaagagtcaaagtgagggcgctttcaaagaaagcactccagaggagtgtgatttgtgtctgcggaacttagactgagctcatgcctgcytctagatgggccccaggaaaggagccggcctgaggaaaaggcaggaagagagggagagactccaacagaggaatgggcttctggcccccagaggtgtaagaaacaccccaagaaatcattgccacggcaagtcactgcaaatgagagacccccaggtagtggtgagtatccaaagaacccacaaaagcatcccatttgggcctccctgagggccctgacccagattaca

SEQ ID NO: 251527 - DNA, 517 bp, Homo sapiens
gcaatagatgctcaaagcccatgctccaaagtgagctgtggatgtctagcaaatagccttctcttacctgtagcgtggaggtggtgatgggcattgctggagaactggtcggagtgagggttcaggagcatgaagaggctggtaggagggtcttcttcagagagggccggaccatgtcaggagctgtctcctggggtgggaagagtcaaagtgagggcgctttcaaagaaagcactccagaggagtgtgatttgtgtctgcggaacttagactgagctcatgcctgcttctagatgggccccaggaaaggagccggcctgaggaaaaggcaggaagagagggagagactccaacagaggaatgggcttctggcccccagaggtgtaagaaacaccccragaaatcattgccacggcaagtcactgcaaatgagagacccccaggtagtggtgagtatccaaagaacccacaaaagcatcccatttgggcctccctgagggccctgacccagattaca

SEQ ID NO: 251528 - DNA, 583 bp, Homo sapiens
tgtgggccagccacaacatggctgggtgctgcagcactggaaggaaggggtggccagcgtcctggagcacactgtggtctctccaaatacttaggagcctgcccagaaactgtgtaattggacctttgggaatgaaggggagaaggcagtgcagggctttccagatagaaaattccagacctcagaactaagcctgacaccccatggccctctgtggctgcagcacagcaaggcccaccgggagaccctcacccaggcccactgcctggccaggatgtttgccttgcatcatcccctctcacatggaggcatgggggctgcagtggaaatggccttgctctctcccagagtgcggatgagagcgttgactgtgagmcttttcagcacatttccttcccaggaagctgctgccttcacaaatgaattcctccccttgacacagaggatagctgtcgcctgtctctcctcattgaggccccgtcccttctggatgttatgagaacaatgcctagggccacttttgtcccagcaaagcaggaactggccacctcagtgctcggggactgggctggcataggtggaa

SEQ ID NO: 251529 - DNA, 557 bp, Homo sapiens
accagaggcagaatgacagtgtttggatttgtgtccacaaccaaatctcatgtcaaattggaggtggggcctggtgggaggtgactgatcatagggtcagatgtcctcctgtctgttcttatgrtactgagtgagttctcatgagatctgatggtttaaatgtgtgtggcaatttcccctttactttctctctctcctgccaccatggtaagttttgcctggttgcctttcaccttccactatgattgtaagtttcctgggacccccccagtcatgtttcctgttaggcctacataactgtgaataaattgagcctctttatcaaatatatagtttgcaaatatatatgtatatatgcctagactcttgtaaatacaatactcttgtaaacacaaccaatatatttctggtatggttcttgtttacaggtaccaagacagacctgatcataaaaccaataacaaagaatgtcagaagtcttttacatggaagaagaaaaaaatgcgagcaagaaggcctaagaaaggagaggtttcaatagacggtacactcggttg

SEQ ID NO: 251530 - DNA, 247 bp, Homo sapiens
tagttgtttagaaaattttgatcaatgtttacacctactattttataataaagtccatgaaagaaaagraaaaataagttgcatttgttaagaatttgtttccagttttgatcagtgttattacactttctaccttagcaactaactgttttggaatcaatatgtgaagttttgttgacaggtaacagagaaaaacaacactaagagccacagcctggctgagtacaatctgcttgtccttcatgtt

SEQ ID NO: 251531 - DNA, 247 bp, Homo sapiens
tagttgtttagaaaattttgatcaatgtttacacctactattttataataaagtccatgaaagaaaaggaaaaataagttgcatttgttaagaatttgtttccagttttgatcagtgttattacactttctaccttagcaactaactgttttggaatsaatatgtgaagttttgttgacaggtaacagagaaaaacaacactaagagccacagcctggctgagtacaatctgcttgtccttcatgtt

SEQ ID NO: 251532 - DNA, 623 bp, Homo sapiens
gtttctttgctaatttcatttggcctcactctaatcctctttccttctagatacacattattgttattcccaatctaaatttactctcgcttccgaacaacacataaactataggcaagctatgcttcctctatcactcccaaatcacctaccacaagtttaaatcttatacatcctttctaagattccctaaatgagaagcctcattattccytgtggagtgtttcttacggtctttggctggagagtattggcagaggcaacttaaaaacctgtatggatttcaatcacagtacaaattccacttgtgctttaagtatactgacacacacacacacacacacacacatatccatatttgaatgatacaaaaccaaattgacttgatgtaaaataataaattaacaagataataaaaactgtctttataatgtattatacttaaagcatgctagcctcttacctgcttaacctcgttcaattcttaaaacaatggtataagggagatgtttaccatatttattttatatatgaggaaatacaggttttgctgtaaaatctgaaatttttgacacatttggaaattgtatattgactgtcagattcttgaaacagtcttaact

SEQ ID NO: 251533 - DNA, 623 bp, Homo sapiens
gtttctttgctaatttcatttggcctcactctaatcctctttccttctagatacacattattgttattcccaatctaaatttactctcgcttccgaacaacacataaactataggcaagctatgcttcctctatcactcccaaatcacctaccacaagtttaaatcttatacatcctttctaagattccctaaatgagaagcctcattattccttgtggagtgtttcttacggtctttggctggagagtattggcagaggcaacttaaaaacctgtatggatttcaawcacagtacaaattccacttgtgctttaagtatactgacacacacacacacacacacacacatatccatatttgaatgatacaaaaccaaattgacttgatgtaaaataataaattaacaagataataaaaactgtctttataatgtattatacttaaagcatgctagcctcttacctgcttaacctcgttcaattcttaaaacaatggtataagggagatgtttaccatatttattttatatatgaggaaatacaggttttgctgtaaaatctgaaatttttgacacatttggaaattgtatattgactgtcagattcttgaaacagtcttaact

SEQ ID NO: 251534 - DNA, 569 bp, Homo sapiens
aaaacaaaacactgtgtaatcaagtctgacaactaacaacaaacattactattttcctaagcataaaaataaccaaatgatagttaatagcttgaaagctgtttctttgctaatttcatttggcctcactctaatcctctttccttctagatacacattattgttattcccaatctaaatttactctcgcttccgaacaacacataaactataggcaagctatgcttcctctatcactcccaaatcacctaccacaagtttaaatcttatacatcctttctaagattccctaaatgagaagcctcattattccttgtggagtgtttcttacggtctttggctggagagtattggcagaggcaacttaaaaacctgtatggatttcaatcacagtacaaattccacttgtgctttaagtatrctgacacacacacacacacacacacacatatccatatttgaatgatacaaaaccaaattgacttgatgtaaaataataaattaacaagataataaaaactgtctttataatgtattatacttaaagcatgctagcctcttacctgctt

SEQ ID NO: 251535 - DNA, 623 bp, Homo sapiens
gtttctttgctaatttcatttggcctcactctaatcctctttccttctagatacacattattgttattcccaatctaaatttactctcgcttccgaacaacacataaactataggcaagctatgcttcctctatcactcccaaatcacctaccacaagtttaaatcttatacatcctttctaagattccctaaatgagaagcctcattattccttgtggagtgtttcttacggtctttggctggagagtattggcagaggcaacttaaaaacctgtatggatttcaatcacagtacaaattccacttgtgctttaagtatactgacacacacacacacacacacacacatatccatatttgaatgatacaaaaccaaattgacttgatgtaaaataataaattaacaagataataaaaactgtctttataatgtattatacttaaagcatgctagcctcttacctgcttaacctcrttcaattcttaaaacaatggtataagggagatgtttaccatatttattttatatatgaggaaatacaggttttgctgtaaaatctgaaatttttgacacatttggaaattgtatattgactgtcagattcttgaaacagtcttaact

SEQ ID NO: 251536 - DNA, 616 bp, Homo sapiens
agggtgagcctctaatccattatgactactgtccttataagaggacagcctgaagatagtcatacagagaaagcaccatgtggtgacagaggcagaaacattagagcaatgaaggtgcaaaccaaggcctgccaattgccagccactcaccagaaaccagaagagacaagaaaggatttccctacaggtttcaaaagaagcatgggccttccaatgcgttgatttcagacatctaacccccagagctgtgtgataatgcatttctattttaagaaatasaatttgtagtgctttgttacagcagccctaagaaacaaatacagaaacttatattcttctgttacaaaaaaagaggaacaaatagtatgagaaagatgatgtgtgccaaatgacatgcaatcttactgacgggaaccaatagaaatatatgggaattacgacaaccaagggaacaaattccacgtctgaaggatacagcttcctttattaatctcttggcgcattgaggtttgagtgtcaaccttctatttctttaagaaaaactaaaaaataggattttttaggattttaatgagattttaaaatttcaaattaataacttaaaatatgactaccc

SEQ ID NO: 251537 - DNA, 523 bp, Homo sapiens
gtctctgattatcagtatctataaaatgacttttgccatataatttacaatactgctttgttttgattgcaaaaacacatcaatggagatcacatccttctaaaaattattgcttatgtataccatgggttcacgaatatattatcgctacaatgacaagaataaaagagacatctttctcagaattctatgccattcaytctctttccatgctgattcttcccaacccactcaaaggcacagctgtctcctagagaagagctgcaacctgaagtatctccagagattgactactgtcatctaacagtgcctatcacaagagaattctaggggatcatttgttcctgcttagcttctcaatgactaggagcttacaattgaaagcactttatgctatgaaagtacagaaacattttattctactaagttagagtttaatatttagagattcaaaatatataaatgtggaaaaacaagaaacagagctaggctatagacgtaactcttgtcttgttgcattact

SEQ ID NO: 251538 - DNA, 523 bp, Homo sapiens
gtctctgattatcagtatctataaaatgacttttgccatataatttacaatactgctttgttttgattgcaaaaacacatcaatggagatcacatccttctaaaaattattgcttatgtataccatgggttcacgaatatattatcgctacaatgacaagaataaaagagacatctttctcagaattctatgccattcactctctttccatgctgattcttcccaacccactcaaaggcacagctgtctcctagagaagagctgcaacctgaagtatctccagagattgactactgtcatctaacagtgcctatcacaagagaattctaggggatcatttrttcctgcttagcttctcaatgactaggagcttacaattgaaagcactttatgctatgaaagtacagaaacattttattctactaagttagagtttaatatttagagattcaaaatatataaatgtggaaaaacaagaaacagagctaggctatagacgtaactcttgtcttgttgcattact

SEQ ID NO: 251539 - DNA, 614 bp, Homo sapiens
aaaatttttagttattctatttttgaatgctgctttttcatcatgctctctcttcttatcctatggaacttgcatcagatgatttttagattctcgactttttctccatagctcttaactgctctttttcttgttttgctacattctgggtgaattcctcagcactcttttggaattcacttggtttttggcactatcctttytagaatatacctagtctatcgaatttcttataaatataaattttcatttccaggaacttttgttttttcaatattcatttgtcctttttcataatttcttattcttttattgtgaggaataataaaaggatcatctctgaggtttctaaaatatttttaaaatttttttcagattgccctattattttagtttgatattgagtgaattcctcatccatttggtgatttgattagcttccttttctggcattagtttttgttatgtgttttgcaattttggtatgcagactcatctggagtggaattccccccttctcccttttctccctggacattcctattcctgttttgtaattttctggttgtatccaaccagcttcctaggaaaacctttaccccagctaagaaccc

SEQ ID NO: 251540 - DNA, 614 bp, Homo sapiens
aaaatttttagttattctatttttgaatgctgctttttcatcatgctctctcttcttatcctatggaacttgcatcagatgatttttagattctcgactttttctccatagctcttaactgctctttttcttgttttgctacattctgggtgaattcctcagcactcttttggaattcacttggtttttggcactatcctttctagaatatacctagtctatcgaatttcttataaatataaattttcatttccaggaacttttgttttttcaatattcatttgtcctttttcataatttcttattcttttattgtgaggaataataaaaggatcatctctgaggtttctaaaatatttttaaaattwttttcagattgccctattattttagtttgatattgagtgaattcctcatccatttggtgatttgattagcttccttttctggcattagtttttgttatgtgttttgcaattttggtatgcagactcatctggagtggaattccccccttctcccttttctccctggacattcctattcctgttttgtaattttctggttgtatccaaccagcttcctaggaaaacctttaccccagctaagaaccc

SEQ ID NO: 251541 - DNA, 643 bp, Homo sapiens
ttattgtgtgggtatcaaactcctggttgcctctgcctatttctagacacagaacgcagcaagactgctgcctctgccccacagaattgtttgtgcttctagtccagagagatgattaccttgctatgagctgaacctaaatttttaaactttctctccttatatttttatctatcatttttgtgtgtttgaattagtagagggttgtccaagtatgacttaacagtgccattttagtgaatttaccaagattatttcttaaagagaaaaacagcaaaatttttgctgatactaaacttttacaggatgtacaaatgtgatcaagtctgtggttaaaagtgtattttgatcaagtctatggttagaagcgtattttgacatcctagcaaactaatacgtttactaataaacacaagagactaactccaatccaacaatgttcttgcagatatatattcagtttattaaatgcatagtacaacaaaaagaaaaaattcaagcatagccacataatgtagtcrattattttccagtctgaacaactggagtacaaatcatttttaaaagtctgaattatttatgccaatcgaggggaacattgacaaggatagtaaattgcaaatcatttgtgttttgttttgcg

SEQ ID NO: 251542 - DNA, 614 bp, Homo sapiens
attaaaaaacaccaaaaaatgcattattgaaattttttttacaacttaaaggataattcacatgatttgaaaaatgactgcctaacggcatctatgttttccccagtgttgattaattctaacaattaattcartttggcaaatatggttttgtacgctaatgttagatttaagctttcaaaacaggaggctattttcctttgacttgtatagcaaaaaggaaaggacctctagcttacacagttgacaaagtgaaaagcttataattcatttgtgtttttagttaattacattcctttgtaacccaaatgaatcttagagccgcaggtagcacaatttccagagagaattatattcaaaaaagaaaaaagtgtttggccaacaaatacaattaaaagtgaattctaacgtgtacctacctccttcatagagtgttaaagggagtttctggcttgggtttttcaaaagtccctcctaaactctccagttcttctgctatcctaaagttgttattgaatattttacatcataaattataaactccctccccactttcactttggctatcttttttcctcttccctctcaatcctctctattatttagagagatat

SEQ ID NO: 251543 - DNA, 596 bp, Homo sapiens
atggttccctgctaatgagggtgctcaagattgttttgtggataatactttctgacagttgtcaattgtcagggaagtttaaatagctggagaactttctgtgtaggccaacttatatgtcagaggcagggttgtaaatggcacttcaaggcacctaaacatgtcaatgaaatggaattggaaatgatacttgaaaaccttggctggctttatgttctgatagcatttttgccttawtgttcttctttggacagtgtgttggctagctgtaattctaaccctctactttcactgaatcatatgattatattgtctttagttacatatataacttggccaaaacaaaaatatttacataaataactaaaattgctctgtgaaaataggaaactcaacatttacaaaacccaactaggtgtatactactagtgggtatacagttggcttgtcaagaatatcaattgagtgtacagtgcctgtatttaatgaaagaagaaacatggggtcttgcaaaataacgttgatgtgaggagggtcctataaacatgtatgatgactttttcaaaggtgataagtgttattacaataagacaaag

SEQ ID NO: 251544 - DNA, 571 bp, Homo sapiens
  misc_feature (1)...(571): n = A,T,C or G
taccagggtcagctttagaaaaccactaagtaatccagggcnattgtttaatgggaaaatcaggttcacatggacgtttaggaaagcctcagccagttaaaggaagaatggcatttatcaaataggacagcacacgggctgaaaagtgcatgcagatggaaagaatgggctgataatcagactttgagccctgctaacatgctaattgtatatgatgtgtgtgtgtgtgtgtgtgtgtgtgtgtgtgtgtgtgtgtgtgtgwgagagagagagagagagagagagacattcgtggtaagcagcttttccttcttagttcctttttgttatgacctttgtgagcttggtgatcttggtcaagtcccttaatctttctgtattgaagcatccttagctttaaattagaggggaaaaaatggtgtcttattaggtggctgtgtgctttcagtgagccaatgtatgagaaagtgactagcagagtgtctgacacattttattactctgagttccagcaggtcaccaagcgggtgaagatctttgcctgttttctgctcctactgatcactgcttt

SEQ ID NO: 251545 - DNA, 612 bp, Homo sapiens
tctcatggctagctctcaaagtattttttaaatgactctgagctgagcaaggacaagccaaccatgtaaggttttaaaaaggtacctgacagacacagatatcacacatctgtttgatagtcactagaacactaggaagaggtctaattccactgatcacaaatatatttcacaggacttatacttgaatttttttcatgtctctcatgtagtctatggaaatatattgcttttgaaattttgatttccttgataaaaaaaagtaagtaaaaagagaccctagatctcttaaaaaaaaaaaaaaaactagcatggattccaaaarcacttataagcataataacaatccaaacagagataatgttataaggattgctacaaatggatgcttgcttatttctgactacagtcaaaagatgccaactaataatccccaaatggccttgccagaacaagtttatttttattctgggaacgtttagagtttctacatcaggctgtggcaaaatacgctttatttttttgaacttgagatcagggcaaaaccatatgcaaatgacaaaacccacatccttgaatgatcagaatacacgtagcatttaggtaggagct

SEQ ID NO: 251546 - DNA, 594 bp, Homo sapiens
ctcatggctagctctcaaagtattttttaaatgactctgagctgagcaaggacaagccaaccatgtaaggttttaaaaaggtacctgacagacacagatatcacacatctgtttgatagtcactagaacactaggaagaggtctaattccactgatcacaaatatatttcacaggacttatacttgaatttttttcatgtctctcatgtagtctatggaaatatattgcttttgaaattttgatttccttgataaaaaaaagtaagtaaaaagagaccctagatctcttaaaaaaaaaaaaaaaactagcatggattccaaaagcacttataagcataataacaatccaaacagagataatgttataaggattgctacaaatggatgcttgcttatttctgactacagtcaaaagatgccaactaataatccccaaatggccttgccagaacaagtttatttttattctgggaacgtttagagtttctacatcaggctgyggcaaaatacgctttatttttttgaacttgagatcagggcaaaaccatatgcaaatgacaaaacccacatccttgaatgatcagaatacacgta

SEQ ID NO: 251547 - DNA, 612 bp, Homo sapiens
tctcatggctagctctcaaagtattttttaaatgactctgagctgagcaaggacaagccaaccatgtaaggttttaaaaaggtacctgacagacacagatatcacacatctgtttgatagtcactagaacactaggaagaggtctaattccactgatcacaaatatatttcacaggacttatacttgaatttttttcatgtctctcatgtagtctatggaaatatattgcttttgaaattttgatttccttgataaaaaaaagtaagtaaaaagagaccctagatctcttaaaaaaaaaaaaaaaactagcatggattccaaaagcacttataagcataataacaatccaaacagagataatgttataaggattgctacaaatggatgcttgcttatttctgactacagtcaaaagatgccaactaataatccccaaatggccttgccagaacaagtttatttttattctgggaacgtttagagtttctacatcaggctgtggcaaaatacgctttatttttttgaacttgagatcagggcaaaaccatatgcaaatgacaaaacycacatccttgaatgatcagaatacacgtagcatttaggtaggagct

SEQ ID NO: 251548 - DNA, 609 bp, Homo sapiens
cctttgcctactatagttacctgcttgatgccttaggatgtttgcgtttgtgttgccagccttcaactcgatgtgaggcacaggaatgtcagtcagaaagcgagagtgtcccctcatcaaggaactcaggcaatagaactcaggcaatagagcctgttggatttattttgtgtggtttgtttttgtaaaattctggtgtttgaatacttgtggtgtcaggagtaatgactatggtagatgcaaaagagaaactttgttattcctgttagacataagtgattccagtggcagtaatgcactagggttsggggagagtctgagcggtcacagggctgtggaaagcttaagtataatgaactgtgaattctttgaagaagaaaacaagctcttcatatccttccctatgttggaaattacaaaagaaaacgcaggcttgaaccctaccgccttttgagactgcatcaaagaaggaaatgtgagagccattatgtattgtcttggagctcactggaggacagacttcccagctgagttctccgtgagtttgtgggaagagtaccatggatggaagatctgttgaaaaattcattcattttattatgtgctcct

SEQ ID NO: 251549 - DNA, 456 bp, Homo sapiens
aagagaaactttgttattcctgttagacataagtgattccagtggcagtaatgcactagggttcggggagagtctgagcggtcacagggctgtggaaagcttaagtataatgaactgtgaattctttgaagaagaaaacaagctcttcatatccttccctatgttggaaattacaaaagaaaacgcaggcttgaaccctaccgccttttgagactgcatcaaagaaggaaatgtgagagccattatgtattgtcttggagctcactggaggacagacttcccagctgagttctccgtgagtttgtgggaagagtaccatggayggaagatctgttgaaaaattcattcattttattatgtgctcctcgaatttggggcattctatgtccatccagtctctttgtaggaagaggcacatcaaagggaaaccacacaaaatatcctgagtgcttaata

SEQ ID NO: 251550 - DNA, 622 bp, Homo sapiens
taggctaacaaagaggacagggcttggacataaccaacgtaagtaggtaactgtgaggaagattgcattttaggaggtgaagcaggaacccctagtcatcaacacttggttgagtttatgagggaaaaataaacacaatgcttagttacctagacgataaacattctcaactttttaaaataatatcaaaatccctggctggggacggtggctcacgcctttaataacaacactttgggaggccaaggtgggcggatcacctgaggtcaggagtttgagaccatggtttcaccatggccaacatggtgaaaccctgtctctactaaaaatacaaaaattagccaggcgtggtggttcacgtctgtaatcccagctactcgggaggctgaggcaggagaatcgcttgagcccaggaggcggaggttgtagtgagctgagatcatgtcactgcactccaggctgggtgacagaaccagaatccgtctcaaaagaaaaataaaaaaatcaaaatccttgaatttatctagggcagagataattcctaagccagaagttatggtcaataagatgtargcaaaaattgtttagagagctgaggaaataccataaaagggtaacagtc

SEQ ID NO: 251551 - DNA, 576 bp, Homo sapiens
cataaagttaaaaagcttttgcgcagcaatagaaacaatcaacaaagtgaaaagacaacacacagaatgggagaaaatatttgcamactctccatttgccaagcaattcataacctgaatattaaacatgctcaaacaatttaataggaaaaaaatttactaatctgatttaaaaatgggcaaaagatctgaatatacatttcttaaaagaagacatgcaaatggcaaacaggtatatgaaaaggtgctcaacatcactgataatcagagaaatgcaaattaaaactccaatgagctatcttcttaccccatttaaaatggcttgtatccaaaagaaaggcaacaacaaatgctggtgagtatgtggagaaaagggaaccctcatacactactggtaggaatgtaaattagtacaaccaccatggaaaacagtttggaggttacacacacacacacacacacacacacacacacacacacacacacagaaaaagaatgatcaggtgatccagcaattccatggctaagtatatagccccaaagcaaggaaatctcagtatgttgaagagatagctg

SEQ ID NO: 251552 - DNA, 537 bp, Homo sapiens
ttgcacactctccatttgccaagcaattcataacctgaatattaaacatgctcaaacaatttaataggaaaaaaatttactaatctgatttaaaaatgggcaaaagatctgaatatacatttcttaaaagaagacatgcaaatggcaaacaggtatatgaaaaggtgctcaacatcactgataatcagagaaatgcaaattaaaactccaatgagctatcttcttaccccatttaaaatggcttgtatccaaaagaaaggcaacaacaaatgctggtgagtatgtggagaaaagggaaccctcatacactrctggtaggaatgtaaattagtacaaccaccatggaaaacagtttggaggttacacacacacacacacacacacacacacacacacacacacacacagaaaaagaatgatcaggtgatccagcaattccatggctaagtatatagccccaaagcaaggaaatctcagtatgttgaagagatagctgcactttcatgtttattccagcactattcacaatagccaaga

SEQ ID NO: 251553 - DNA, 598 bp, Homo sapiens
ccaatgagctatcttcttaccccatttaaaatggcttgtatccaaaagaaaggcaacaacaaatgctggtgagtatgtggagaaaagggaaccctcatacactactggtaggaatgtaaattagtacaaccaccatggaaaacagtttggaggttacacacacacacacacacacacacayacacacacacacacacacagaaaaagaatgatcaggtgatccagcaattccatggctaagtatatagccccaaagcaaggaaatctcagtatgttgaagagatagctgcactttcatgtttattccagcactattcacaatagccaagatttggaaacagcctaagtgtccatcaacaaatgaatggatataaaaaatatgatacatatatacaatggagtactattcagccatcgaaatgaatgagatactgtcatttacagcaacatggctagaactggaggtgattatgttaagtgaaataaactaggcacatagagacaaacttcatctcttttcactcatttgtcagagctaaaaaagttaaaacattcgaacttgtggagatagagagtagaatgatagttacctgagaaa

SEQ ID NO: 251554 - DNA, 576 bp, Homo sapiens
cataaagttaaaaagcttttgcgcagcaatagaaacaatcaacaaagtgaaaagacaacacacagaatgggagaaaatatttgcacactctccatttgccaagcaattcataacctgaatattaaacatgctcaaacaatttaataggaaaaaaatttactaatctgatttaaaaatgggcaaaagatctgaatatacatttcttaaaagaagacatgcaaatggcaaacaggtatatgaaaaggtgctcaacatcactgataatcagagaaatgcaaattaaaactccaatgagctatcttcttaccccatttaaaatggcttgtatccaaaagaaaggcaacaacaaatgctggtgagtatgtggagaaaagggaaccctcatacactactggtaggaatgtaaattagtacaaccaccatggaaaacagtttggaggttacacacacacacacacacacacacacacacacacacacacacacasaaaaagaatgatcaggtgatccagcaattccatggctaagtatatagccccaaagcaaggaaatctcagtatgttgaagagatagctg

SEQ ID NO: 251555 - DNA, 603 bp, Homo sapiens
gaaagaactaagactcccatccaccaccagcccctactcccagagcagaacctccaacccaggtgtggcaggctgagaatatatgtgcccctatcgctcatgccctagcaatgtggaagttttgtgcttagatgggtaagctgagatcaggggctaccacctcctattccagcacccaccagtagagcaaggttgtcaatccaggagaggygagccaccatcccttctcccagctcctatgctgggagattgtactcagtgggagaggcaggctgtgaacagctcagctggagagaactgagtttatttgaaacagaatatggaaattccaggtcgcagggagtgaaaaaccatggaaatcttggtggagagcaattatgaggctgttggtagctccatgatactggtagcaacaagtcaaaaagcaaaacagccagaagtctagtagacagaaccatagaaagaaacagctaagaatattcctctggattcacagtcaactctgtggatcagaaagggccgtgcatatgtgttagggatctactcaggagtgttgcaggaagtcagggaccctgaacggaaggactggatgaagccacagca

SEQ ID NO: 251556 - DNA, 603 bp, Homo sapiens
gaaagaactaagactcccatccaccaccagcccctactcccagagcagaacctccaacccaggtgtggcaggctgagaatatatgtgcccctatcgctcatgccctagcaatgtggaagttttgtgcttagatgggtaagctgagatcaggggctaccacctcctattccagcacccaccagtagagcaaggttgtcaatccaggagaggtgagccaccatcccttctcccagctcctatgctgggagattgtactcagtgggagaggcaggctgtgaacagctcagctggagagaactgagtttatttgaaacagaatatggaaattccaggtcgcagggagtgaaaaacmatggaaatcttggtggagagcaattatgaggctgttggtagctccatgatactggtagcaacaagtcaaaaagcaaaacagccagaagtctagtagacagaaccatagaaagaaacagctaagaatattcctctggattcacagtcaactctgtggatcagaaagggccgtgcatatgtgttagggatctactcaggagtgttgcaggaagtcagggaccctgaacggaaggactggatgaagccacagca

SEQ ID NO: 251557 - DNA, 548 bp, Homo sapiens
ctttgaattttaggcaatagctgtatttatttttattgtatttttttatgaggagtctttggaaaagcttatgttccatgatctgatgtttatggccagttcaatcttcctttgaagatgagctrcacccataaaataagctgtgactcatccaaatgcttatgactacatgatgctcatttgtaaggttcaaatctttacaaccttatggacacacctctttttgacaagcctgaggtgcctggactcggtagggatgtaagtatgtgtcactacaggctcaggaatgagcatgctcttccattatccaggctgacctcagtgtctctggctatataaactagtctgtctgctctgaatattaatcatgttggctttaaacttgggagtcttttaaaagagaagcttcccactcctcaacaataacaaacagtttaacattgtgtttagcaacttgtcagctactccatctctgtcgaaggcatttctttggtgattatatctcaatcatgactgggccagtttgtgatctgcattatagaaaaatg

SEQ ID NO: 251558 - DNA, 597 bp, Homo sapiens
ggagaatagtaattgtaackaacactccttgcactctgctttccagaaacttctaagagcttcctatggattgactcattaatccttatgaaaactcttattagataatagtactattttgatttttttttctgataaagaaattaagggataataataagtacagatttaagacttgaacccaggcagtctgacaccagagcccaatttttcaacttttatggcatatttctctgctacataacaattgctgactgctcttggcaaagagtaatttaattttaaaaatcgtcataacacaaaataagttgggatttgaattttctatttgttaaggcatagttgcacaaaatgcctagacaatctattgaatgctgaactatttcaccagtcacttgatcttgaatccatgaagtgcagctctctgttttgttaatggtgtgtagaatgatctgacaaaaagttttcacaaactgaggagacaatgagcatcatttcaaatctcataatgactaagaaatgcatctatttcttaaatccagttggcttcttttcattatcttattcttaatcacttgcccaattttattttagagt

SEQ ID NO: 251559 - DNA, 597 bp, Homo sapiens
ggagaatagtaattgtaactaacactccttgcactctgctttccagaaacttctaagagcttcctatggattgactcattaatccttatgaaaactcttattagataatagtactattttgatttttttttctgayaaagaaattaagggataataataagtacagatttaagacttgaacccaggcagtctgacaccagagcccaatttttcaacttttatggcatatttctctgctacataacaattgctgactgctcttggcaaagagtaatttaattttaaaaatcgtcataacacaaaataagttgggatttgaattttctatttgttaaggcatagttgcacaaaatgcctagacaatctattgaatgctgaactatttcaccagtcacttgatcttgaatccatgaagtgcagctctctgttttgttaatggtgtgtagaatgatctgacaaaaagttttcacaaactgaggagacaatgagcatcatttcaaatctcataatgactaagaaatgcatctatttcttaaatccagttggcttcttttcattatcttattcttaatcacttgcccaattttattttagagt

SEQ ID NO: 251560 - DNA, 597 bp, Homo sapiens
ggagaatagtaattgtaactaacactccttgcactctgctttccagaaacttctaagagcttcctatggattgactcattaatccttatgaaaactcttattagataatagtactattttgatttttttttctgataaagaaattaagggataataataagtacagatttaagacttgaacccaggcagtcygacaccagagcccaatttttcaacttttatggcatatttctctgctacataacaattgctgactgctcttggcaaagagtaatttaattttaaaaatcgtcataacacaaaataagttgggatttgaattttctatttgttaaggcatagttgcacaaaatgcctagacaatctattgaatgctgaactatttcaccagtcacttgatcttgaatccatgaagtgcagctctctgttttgttaatggtgtgtagaatgatctgacaaaaagttttcacaaactgaggagacaatgagcatcatttcaaatctcataatgactaagaaatgcatctatttcttaaatccagttggcttcttttcattatcttattcttaatcacttgcccaattttattttagagt

SEQ ID NO: 251561 - DNA, 558 bp, Homo sapiens
tatacaactttgcatttttcacttctgttttctggggtccaggtgattgaatagctgtcttctctcaytgagcacccactcaggaaatagctccatgagtgtagtgctccagcaacaagatttaagtaatgacaactcctactgattttctgccagagtaaatagctgtaagtaatttttgaaataataatgttggactaagtgatgatcctcagttaatcaatgtgaaaacatcctaggacttattcaggtctaaaaatccagaaagtatcaatcttgaaagaaaggttttttttttcaggtaaaatgctaatttccttctatttttgtcattgctgacagcaatcctatggctactacaaacaagacattgtttattgacagataaaactagaatcttctataagggaggaaatgtgtaagaacacaataggctctggagccagaatgtctgggttcaaatcccatcttcactactatagggagcatgtccttgggcaaattattgaacttctttgataccagcattcataaaatagagataataataatacttac

SEQ ID NO: 251562 - DNA, 558 bp, Homo sapiens
tatacaactttgcatttttcacttctgttttctggggtccaggtgattgaatagctgtcttctctcattgagcacccactcaggaaatagctccatgagtgtagtgctccagcmacaagatttaagtaatgacaactcctactgattttctgccagagtaaatagctgtaagtaatttttgaaataataatgttggactaagtgatgatcctcagttaatcaatgtgaaaacatcctaggacttattcaggtctaaaaatccagaaagtatcaatcttgaaagaaaggttttttttttcaggtaaaatgctaatttccttctatttttgtcattgctgacagcaatcctatggctactacaaacaagacattgtttattgacagataaaactagaatcttctataagggaggaaatgtgtaagaacacaataggctctggagccagaatgtctgggttcaaatcccatcttcactactatagggagcatgtccttgggcaaattattgaacttctttgataccagcattcataaaatagagataataataatacttac

SEQ ID NO: 251563 - DNA, 490 bp, Homo sapiens
tcaacaactatttataaaatggtcctgaaatttagaaataagcattgagaaaccgtcgcaattctgcactccccagccaaagaccaatcatttgatagccatactatcagacgaaataggttattgtagaactcttagttgctgagagaaacatccaactattractcatagcagattttaattcagagaaatttaaatctttgtaacaaaggtttacatgtcttatcccttctcaaatttcctatccttttgctggtatgcaagaacaaacatgcaatagtgattacataggtaataataccacagccctgctgtgtttcaccagtgtgaatgcaagcagctgcaccagacttgctcagcttctttcctataggttttccttttacttttctctatggcaacagcccccaaaagttaacccccaccccttttatttagaaaaatcaatttgatttgaattataaaaccctgaatacatttagtcttaga

SEQ ID NO: 251564 - DNA, 532 bp, Homo sapiens
agtgggagaaggaataaccagctggtcacatggtgattgtgatcccaaagccttcagctttaaagacaattttacggttttaagaagcattttttgaacattcacacttaatttgtgaatcttattagtttctgattagccagaaatatagagtgatttaaacagactgcatcagtaggacactttctattgcaagtgggacagaaccaactgaagccagcttaagaagggacaaatgactaacctgagctcaaatcatgccagcagtttctctccgtctcccagctctgcctcttcaatgctgcttcctttttcagtcctggtggtggcaagagactgtactaactccagggtctcaagcctctgaggataaaggcaataagaaatagtgagctctttcaagtaccccccacaacagrtctaaaattcactgatttagcacttttgctcacattccaccctggaaccaatacttgtggccagggaaggataatgggctgataggcttaaagtggtttagagattgagggag

SEQ ID NO: 251565 - DNA, 592 bp, Homo sapiens
atgccataagctcagtagagtaggaagggtagagattgtaagggccttctaggctatggtaaggagtttttattttatcctgtgatcaatgggaagcattcgagactaagcaggatcataacgcattttgctttacattaaataattttttttctgattgttacgtgtgtgtcctgaaggcggcaggaatggaggtcttcctaatggaagaccagttgggaggttattgcaggatagaaggatttgccaagggtcgcttgccacggtgagagcagtgatgatgggcagtggggagattcaggttatgttttggagaaagaggtgccagaacttgctgatggattgtttttggtgtggggaaaagagaaattatcaaayagagttttgacttcatcaaggcgaatggtgatgctactttctgaaattggggaagaatcactttgttggcagaggggaagagaagtcaagacttctgttttcactgcgatagctttgagaaaatcctatgacacatttaaacagagatctcagtagcgatagaaacaagataaggcaagctgataacatgaaaaggttagttttaggtcacttt

SEQ ID NO: 251566 - DNA, 592 bp, Homo sapiens
gcacattggtaagaggacctctattacatctattaatgagatttataagaacactaataggtaaatgcaaacctaactccatcaatagtgatgcaaattagtgtaattctaactattcaactcagggttgtaaatattcatgcaaattgtctattataatgaatacagactttgcatgttctaaatacaaaagaacatgatgtatatgttgacatcatgacagaaagcaaactatcaacagggtgagtagtctgatttcagttaaacatataaactctagcaacacatctgctctcattgttgaagaagaaatgtatactaccaactagagattttaggacagagggtttaaatattttccaacaactttcaatgccattgacccatagttttcttcatcagcctgagtagtacttgtaagaccatctgctgggttccgaggaacaccagtaatttgctgaagagtgaaggagattaaaacttaatactggagaacagttcaggcatggagaaactggaaaaatgtatcgtggcagcataattarttaacattctgtatgggtctgaagggagaaggatttctatgtaggtg

SEQ ID NO: 251567 - DNA, 618 bp, Homo sapiens
ttgatagtttaagtgttgagttgcttcgttgcatccacattttctgatgttaagtgaagcaagagtcctctagtagtttggcagcgggtggggaggaaagtctctttcaatataatggccatatgttagttaacrtgttgtcagtctttaatgactagtggtgtaacagctggttttgatgtaatttcttttgagaccactagattacaagcagtttattgcattcttcctctctgactgctccctggatacaacctaaagtcaaaaggttaaaggtctaaagccataatctaaaggatttgtcatcatttaacaggtcacttgttgctatgtactgtgcaaactgaaaattttttagtgaggctgtcagaatggcttagccttattattattattattattattattattattattattattattattattttcttatttcaacaggaaggaattgagaatatccagcaggagacaagttctcagaaatctaagaccatgctttgtgtatatctgtgaaaatcttcacagggtgaagaaaaagggtgaaagaatatgttaaaaattaatttaactttcactaaaaggatgtgcaattgagaatttaacttccacaga

SEQ ID NO: 251568 - DNA, 566 bp, Homo sapiens
cttatacatgacctgaaggttggagaattaccaggccccatgtagtttacattgtccaaaaccaccctgacgagagttacaaggggagtcataggggaagttctaactctcagacaaatgttgcaggaaacactgactgctacttatagagaggtccaggaaataaagtattcctgttaagtttggaaaagctgcacaaatgtgtctttacttagcaactcacaacacctttgaatacaggaaagactcctgactttaaagaaagctacctgactttattaaccccagtgttaacattctgtagaacattgttcttaaacaagcttttaatccggtggtcctgtaaaggctcaaatgtcctaatccctttgccaacgtggaggagtactgtatgtcttcaagagcccaggagttctatctaggaaatatcctctttccccgggtctagattataccagccaagttagcytcatggcaggcccatgtgggacctacagaacttcctgatatttatgaggtttatagtttaaaccccaaattggagtctaacttagagggtggggtaa

SEQ ID NO: 251569 - DNA, 566 bp, Homo sapiens
cttatacatgacctgaaggttggagaattaccaggccccatgtagtttacattgtccaaaaccaccctgacgagagttacaaggggagtcataggggaagttctaactctcagacaaatgttgcaggaaacactgactgctacttatagagaggtccaggaaataaagtattcctgttaagtttggaaaagctgcacaaatgtgtctttacttagcaactcacaacacctttgaatacaggaaagactcctgactttaaagaaagctacctgactttattaaccccagtgttaacattctgtagaacattgttcttaaacaagcttttaatccggtggtcctgtaaaggctcaaatgtcctaatccctttgccaacgtggaggagtactgtatgtcttcaagagcccaggagttctatctaggaaatatcctctttccccgggtctagattataccagccaagttagcctcatggcaggcccatgtgggacytacagaacttcctgatatttatgaggtttatagtttaaaccccaaattggagtctaacttagagggtggggtaa

SEQ ID NO: 251570 - DNA, 566 bp, Homo sapiens
cttatacatgacctgaaggttggagaattaccaggccccatgtagtttacattgtccaaaaccaccctgacgagagttacaaggggagtcataggggaagttctaactctcagacaaatgttgcaggaaacactgactgctacttatagagaggtccaggaaataaagtattcctgttaagtttggaaaagctgcacaaatgtgtctttacttagcaactcacaacacctttgaatacaggaaagactcctgactttaaagaaagctacctgactttattaaccccagtgttaacattctgtagaacattgttcttaaacaagcttttaatccggtggtcctgtaaaggctcaaatgtcctaatccctttgccaacgtggaggagtactgtatgtcttcaagagcccaggagttctatctaggaaatatcctctttccccgggtctagattataccagccaagttagcctcatggcaggcccatgtgggacctacagaacttcytgatatttatgaggtttatagtttaaaccccaaattggagtctaacttagagggtggggtaa

SEQ ID NO: 251571 - DNA, 541 bp, Homo sapiens
taaattttccatgaaaccaaatttattttcagccartatgaaccaatcatcttagagatttctcaattactttgtacaaaaataattcttacatgtgaaggattgaagaatatgccacttcaaaatatgccactttgacataagaattattttgaactgaagtcaattaaaaagaaacagacacaagaacagctctctgccctcccctttctaccagggagggcaggataattcttatttgtccaagacaactctagatttagtccagcgatggcaccagaggaagctacataacacaccaatccaacaaaatcataatataataaaatcactaattattgaaagctactaatctaagtatttaatatatggaataggcatcatttaaaaaaatttaagtgatgtgtttccagatgttaaaaaatatacagtacatacagtatgaagtctttataccacatctactgtatacatgcatgtgacaaaggctactatatttcaatatgaatttctgtatctcatagtgctattataaatacta

SEQ ID NO: 251572 - DNA, 574 bp, Homo sapiens
cttctgtcttgctcgctctttctctctctgaatccccatctctctctaaggaaaaccagctaccatgttgagagctgtcctatggaaagatccatgtggcaaggaaccaatgtctctggccaacagcaatgaagacctgggtcctgtcaatagccatatagtgagcttaaaaacagatcctcacccrgtgaagccttaagatgactgtcaccccactgacacttaattatagctttgtgagagaccctgagccagagatacccaactaagctgcacctggactcctgacccacagaaacaataagataataaatatcaactgttttaagctgctaaatcttgtggtaatttttacatagtaaaataaaactaatacaattcatttaaaactaacaataacattttctatgaaaaataactattttctaaaataaaaaatgtagtaagctgagtggtactgtttgcatttttgcaaatctcttcaatgtctagtaccatagaaaacatttgttttctatatctgcttctgaatttaagctgttgaagtacattgttttgggtgaaatacataaag

SEQ ID NO: 251573 - DNA, 559 bp, Homo sapiens
gccatagaaatgaaatagaagggacaaatataaaggatatttgagaggaaaatggacataagagataactgcttagacatatatggtaaataaaagtgaaggaagagtccmaggcagcttacattttaaaggcttagttggattggaaaatagtagaaatgggagaaatacggaaattgccagagtgagcaagtttggtgggtgagcatagtgggaagaaatactggttttgttttgctatattttgaatttagaagactctgagagtttcaagtacaaatatcttatagttatttgaaaagttattcattcattcatctaatatttcttgaaagcctactttgtgtcagacaccatgcaaagatctagcaagagcaatctagtaacgagttggagtttgaatgggacatctgggccagacagaaagatctggggactccaacatagagctagcccctgaaaccatggatattaattagttttctatgaagagcgtcaagaagaaaaaacttatgaaaatattaacagggagtcatgaggaatgatcaaaggggtgaaa

SEQ ID NO: 251574 - DNA, 561 bp, Homo sapiens
gatcaaatcaatcatagtttaatgtattaatggtgatacgtcatttgataacgatacatacattatgaaattttcctctcaaaagttattgtgaataaagctttacagggagaaggataaytgaatatgtctcattttaaaatcttggtttatacttcatgacacagcaatacagttatctggttttatgattagtttatttaaaggctctctgaaaagaacttaaaaagatatgtggaatttaatgaagagctgcttcatgactctcatttttcagtcccattatgcaaaggtttttgttgatatttgatgaatatatttcccgcttgcaaaatgttactcatctgtttctgaaactaatcagaagtgtaatacatttttacatgtttaacacatagtttcagaactgactgaaattatatttggaaaatgtttggggagttagaaaattctataagatagaagagtttttgtaggttacatgcattgttttcaatcacaaacattacataatgaaggagttagtttcaaacactgggtaagggcacagacccctggggc

SEQ ID NO: 251575 - DNA, 561 bp, Homo sapiens
gatcaaatcaatcatagtttaatgtattaatggtgatacgtcatttgataacgatacatacattatgaaattttcctctcaaaagttattgtgaataaagctttacagggagaaggataattgaatatgtctcattttaaaatcttggtttatacttcatgacacagcaatacagttatctggttttatgattagtttatttaaaggctctctgaaaagaacttaaaaagatatgtggaatttaatgaagagctgcttcatgactctcatttttcagtcccattatgcaaaggtttttgttgatatttgatgaatatatttcccgcttgcaaaatgttactcatctgtttctgaaactaatcagaagtgtaatacatttttacatgtttaacacayagtttcagaactgactgaaattatatttggaaaatgtttggggagttagaaaattctataagatagaagagtttttgtaggttacatgcattgttttcaatcacaaacattacataatgaaggagttagtttcaaacactgggtaagggcacagacccctggggc

SEQ ID NO: 251576 - DNA, 559 bp, Homo sapiens
tagtttcaaacactgggtaagggcacagacccctggggccaattgtctgaattggaatcccagctcctctactccctacttgggtagctgggattacaagctcccaccaccacgcccggctaatttttgtatttttagtagagacggggtttcaacatgttggccaggctggtttcgaacgcctgaccacaggtaatccacaagtttcttgcctcttttttcaggtggccaagtttcttaacctctttgtgccccattttctctccagtaaattaggataataatagaacctactccatagggtggctgtgagaattaaatgartcaaaatttgcaaagcacttaatgtaatgcctggtacatggtaagtatacttaagtatataaagaattatggagctgggcatggtggcatgcacctgtagtcccagctacttgggaggctgaggtgagagaatcaattgagtctagcctagtcaaaaaagtgagaccccatgtcttaaaaaaaaaaaaattatgtgtagaaccctggacatacacatgccatgtgacctagcaca

SEQ ID NO: 251577 - DNA, 620 bp, Homo sapiens
agcaaatattgttagagtgaaagagtgagatagatcccaatacaataatagctgcacacttcaacaacccactttcatcactggacagatattccagacagaaaatcaacaaggaaacgtcagacttagtctgcactatagaccgcatgaacctaatagatatttaccgaatatttaatccaaaggctgcagaatacatgttctttttctcagcacatggatcattctcaaggatagaccatatgttaggtcacaaaacaagcctgaaaacattcaaaactttaaaataatgtcaagcatcttctctgaccacgatagaataaaaaaacaaaaatgacaagaggatttttgcaaactatacaaatagatgaaaattaaacaatgtgctccagaataaccagtgggtcgataaagaaatttagaaaaaaatcaaaaaaawtatagaaacaaattataatgaaaacacaacataccaaaacttgtggaatacagcaaaagtggtacaaagaggaatgtttatagctataaatacctacatcaaaacagaagaaaagcttcaaataaacaacctagcaatgcatctttaaaaactagaaaagcaagatcaaacctaacccaaa

SEQ ID NO: 251578 - DNA, 588 bp, Homo sapiens
tacatttaatgagtacttatatgtcactatgaaaatctcttaaatttttttctgtataaaaaatccttattacataagcaaatgctgccttactatcctgcactctgaaacatccactaggaaactggccaatcaaattggccgagaaagtactatgcaaaaaaatagctttatattaagacaaataatttagtaaccactgaataaacatgtatgcatgtatgaaaatgtaaatgtatgcattaggcattatctagcataatttttttgataaagatgtttaatattgaagattatgaagccttattctttcttccaaggcattaagtttatataataaatacctgtcactagcagtactcagaatttgaataataatgagatgtgcttacatgcttcagatgcaaaagattaaaacatgatgtaacatacccaacatttacttgaaattccttaaacaaaagctattctacgtatacaccctgaatttgtcaggtgcagaaagacttraagaattccattgtggacacttcatttggagtgaagagttaagtattaggtcagcttttacttgacctaatactaaat

SEQ ID NO: 251579 - DNA, 493 bp, Homo sapiens
atcaaagtcaaggagccacataagcaagacactgacgacacagtgaaatgggtgctgatttgttccaactgagggcaaagggagaggtcaaggaagctctccttgaaaagtaacctaggaaagaaattttggaaggtagcaaaaaaaggacatattagcaaattgctccagatacatgaagaagatgttcaaagtgtgtaaagaaagcacagcaagacttgtggaattaataatggttgaattgttggagtaatcaagggctatattgtgagagctcttatgtgccaggcagtttgaaggaaggctttgaggaacaattaaagaatggtaatcaggaagtgttttagaaagtttattccatattagtgagagaagagagacagaccctctcaaattgttttatattgttttatactgagaaaaggaaagagaaacracactaaaggcaagtagcccggcgcctaggatccagacctgaaaccaaggaaccaga

SEQ ID NO: 251580 - DNA, 610 bp, Homo sapiens
tttaaatatgtcagtaaaaaactataccatcctgttagattaatttaagaaatttacttctccatatagcacaagtggtacctatagagccacctcacattctttaacagcaatgtaatgttttttggtgtgggtataatgtgatctatttaaccaatcctccataaagtataaagtattttatattatttctcattctttaattctacaaatgtgctacaatgaatatcttggtacacattagctggcatagtatttattagaaatcacttagtgtttactatcctccaggcacggttacaaaccctttaatcattcaattctcataagaagtgtttgaattcagtagttttattatctcctatttggaattaggaaaaaaaaaaggagacatagaaaaagcaatttttccatgtagctattaagtgacaatgctggtttcaaactgaggctgtcawgctccaagatcaaaactcttaacaactacactgtactgcctaaagtgcctttgctttggatgaaggtccaaaatttaaaaactcacctctgtgtttttctgaatgtgcttagatctttaattaccagccagcttctggattaaatgtttcac

SEQ ID NO: 251581 - DNA, 593 bp, Homo sapiens
ttcacataaagtttagaaaaaaaagtcccaaatatccttcatagcttgactagcatagaaaattcatagaggtttctgttttccccaaaaaaacctggagataactgtagaaaattctttttcaggtaacgcagttttacaacctctcatttcaaaagtatgtgaaacacaaatgttttagatggaatacttattgccactaaatatgttcyagaacatgtttgtttcatggtgttattgaattcttttttatctaaagtgttgttctcgctctctctctctttcgagccttcgagtcagtgcagttctaatagcagcagaggagcttctgatcactaccccaccttgattgtctctgttgtgtaaataattttgttttgaaatttgaaaatttattttaaacttttattcttaagttaaataattttgaaattatttttcctaacatgactcatcctgaatgtatgagttagggcaaagtccagggacaatggtccaacttcatgcttgcttatctttttttccagttctctaattgttttcccatatttttgagttcttggtctctctttatacatttgatcatatatgct

SEQ ID NO: 251582 - DNA, 583 bp, Homo sapiens
atgctggtttcaaactgaggctgtcatgctccaagatcaaaactcttaacaactacactgtactgcctaaagtgcctttgctttggatgaaggtccaaaatttaaaaactcacctctgtgtttttctgaatgtgcttagatctttaattaccagccagcttctggattaaatgtttcaccttgacaccaagcttaaatggacaaatcattctcttaactgtattccagttctttgttctcagcccagttgtggttccctcactctagaattctgatgtgcttctgtgatttaagcccactcatagctttggcttgaaaataaaataacttgatcacagcagtataaaaatgtttaaggagtctgtgtcagttatgatacttgggaaaaacatgaatgtttaggacactgaagaatacttttgctcagaatcaatggcctgagmttaatgtgtgggtttgtgaccttgaaatttaatttcctatccatacgatccagaaatttaccaaaattatccctcagatatatttcaacagtaaaatttagcgataagtccctacgtttcctgattcctgattcggatgt

SEQ ID NO: 251583 - DNA, 515 bp, Homo sapiens
gccatggttaggttacaaaaagactgcagcttctgtctcgggcattctcttgttctctccaggagtgctctctctgtccctttggatggttcactgtggaggaagccaattgccatttcctgaagcctccctgtggacaggtcaatgtgaggaagtttggaagaagacctactctcaatgtaactttgagatgactatgggtctggccaaccacttgactgcaacctcataagaggctttcaaagatctagctaagccatgtccctacccctgacccacagatactgtaaaataaacatttgttgtttcaagctgctaagtttgtaattttttacacagtaattgatgatatgtattactaattatatatatgtaacaaatatatacttacagcacaattcaaactkcaaaaccaacaatttatgaacagttcctaatagtctttgtatccaaagcactctatttaaaacaacgtgaataaaagaaaaatgattattttagaaaaaacatgacac

SEQ ID NO: 251584 - DNA, 590 bp, Homo sapiens
ggggaacatcacacactggggcatgttgtggggtgggggggaggggggaaggaacgcattaggagatatacccaatgtaaatgacgagttaatgggtgcaacacaccaacatgacacatgtatacatatgtaaccaacgtgcacgttgtgcacatatgccctagaacttaaagtataataaacaaaaaaggaaaaaaaaaaaacacagaaaagactaggtgatgccaatctctcctcaaattctctagatcccagctccccttagagactctgattcattgaatatctccttccttttaaactctccctctctactatctcctttccattkgtaatataaagtgttcaagcttgtgatattaaacataaaaagccaaggaatgaacaaatcatgcaccatccctgattacacattttcttccaaccactaccatctccctcctgcccttcacaataacacttcttagaataaatgctggaagcacatttatgtctttctgacatccaaagaacaagtcttatctccttcaaactctacatgcccttttagttacttctaaattctcttttcttttagccaagtttcttga

SEQ ID NO: 251585 - DNA, 518 bp, Homo sapiens
cagaaaattatctaatcacaaggaagatagcaagagagaaagaaatagccagaaagaacatacaaaacaaccagaaaacaatgaaaaaaatggcagtggtaagtccttacctaccgataattatcttaaatgtactcaatcaagagatgcagagtagctaaatggattaaaaagcaggtcccaactattatatatgctgcctatgagactcacttcacctttaagtgccaaaatagagcagggatagctaaacataccagataaaattttgacttgttaaaaactgcaagaagggacaaagaaaatcactatataataatgaaggggtcaattttgycagaggatatttaaatttctagacacccaacatcagagcacctaaatgtataaagtaaatgttaatagatctgaaaggagagacaaactgcaataaaatagtaggggacttcttaatactccacgttcaacaataggcaggtcatctggagagaaaattattaaggaaacattggaactga

SEQ ID NO: 251586 - DNA, 548 bp, Homo sapiens
cctagagtgcagcaaggctgtgcagggcagcatggccacaggcctggcccatgaaacctttcagtcctcctaggcctccgggccggtgatgggaggggctgccacacaaagatctctgaaatgccttggaggcctcttctccattgtcttggctatcagcacttggctccttttcacttatgcaaatttctgcagcctgcttgaatttctctcctgaaaatgggcttttcttttctaccacatggccaggctgcaaatttcccaaagttttatgctctgttttccctttgaatataagttctaggctgactgtsatggttcatgcctgttatcccagcactttgggaggccgaggcgagtgtatcacttgaggtcaggagtttgagttagtcagcctgaccaacatggtgaaaccccatctctactaaaaatacaaaaattagccaggtgtgatggcaggcacctgtaatcccagctactcaggaggctgagacaggagaaccacttgaacctgggaggtggaggttgcaatgagcagagattgttcc

SEQ ID NO: 251587 - DNA, 533 bp, Homo sapiens
aactctgtcacagagtatttattgctgtcaggtcgtgattcatggtgtgccatgggctggtaaccaatccaggaaaggtgtggttagtgtacaatggtttaccagcccaggatgtctaatrgtggctttggtggctcttagactccctcatgtaaatagctctgggaaagcttaggcagctccagaaatctcaaaccaagaattttggtcaaactagctactgcatttgggttttaatgtggaacctgatgtattaaaatcagtaaaggaacgataaaggtcatttgaaggctttggtttcaaagaggtgaggaaggccagtttttttctttaccacttcaaagagttcgtaattcacttagcatgcaggttcacattcctggctgtctggtctggagggaaccctggatttgggttgagattataccacctccaggttgaatgtgggtggcatccagggaataagactaaataaaaagaaacttgagaaagcaaagagagaaaggaatggtctagtctatgggaaattgaaa

SEQ ID NO: 251588 - DNA, 599 bp, Homo sapiens
aggcagatgttttgctgttaataatgagaactaatgaacaatgcttactctgagccaggtgccatggcacatgcattatctgtattacctcatgcaaacctcacaacatcctatgagcagaccttatcatagtctttattttggagatgaagtatctgagatttagagaggtgaagtaacttggcagaggacaatcaactcctagaagaggcagagccagaattcacccccaggcccacctgaatccagatctcctgcccctaactactgggttgtgttgccgctgcaggcaactcaggggacactcataatcccaaygtccctaagcttgatcctgttcccagaacctacggacttcctgcttccaatcaagttaagtgggaactaacttaacaagggtattgggaagttcagaaaggaacatcctgatagctggcctccagcctgcccacaggctagatactgcctctgaacaaaaggctgtgttctgggcctctgcatgtagagaagagtcttatttctagcactcatctaaggaacaaaatccctgactattcatatttgagttttttgtttgtttgtttgttttttgagacgga

SEQ ID NO: 251589 - DNA, 587 bp, Homo sapiens
ttaatcacactagcagtttctagatacacgaaaatgtcattgacaaatgaagagggtttcactgtttccttaataatcattggggcttttgtgcttatctttctgcaattaatatcayttccagtagatttttcaaaagaggtggtaagatcagatattggcattttattattgttaagggaaagagtttaggctttccatacataaagatgctatttataatttcttagtaggtaccctttatcagattaaagatgttcctttaattctcggtttgttgagatttttctatgatcaataagtgtttatcaaattggttttctgaatctattgagataattataggatgtttaggctttattctgttaggctgatatactagcttgtctgtggccataccaccctgaatgcacccaatctcatctaatatactaccttcattgcttttttaaaaaaatgttaaagcaaacacgcatttctgggataaaccctactttataagtgtattatacccttttatatatattttagaatttaatatattaatgattttggtggctatgttcaagagagattttttgtctgta

SEQ ID NO: 251590 - DNA, 563 bp, Homo sapiens
ataaaattcagccacatatagagaatgcagatactaaatgccctgtgatatctttgtattaagataccaacagttattgatgagaactatctacaacatcaagacttgattaggtagaaatagatcctaagacacagaaaaatactgtttgaagctataagataatttagtcaaaaaacagctaattattktgtttcaaatttcatatgtatagaaaaagtcttaaaatatctcacccaataatcatacaaaaatagttggtataaaggagaaattcattcgaggtcatacttgacttaacagcagaaaagaggcttgagctaaatatcttaactcctggttcagttagtattctaatacattacactggttttacatcattattatcctttgagtgatcatccatttattcattcatttgttttttcaacaaaatgaatgccaacagtgtgatattcgaagtaactttttaggtaatgtgggaaatataatgataataaaaatgtatactattaacaacactgcacacaagtaaatagtacaaaatagatctgaggtttttc

SEQ ID NO: 251591 - DNA, 563 bp, Homo sapiens
ataaaattcagccacatatagagaatgcagatactaaatgccctgtgatatctttgtattaagataccaacagttattgatgagaactatctacaacatcaagacttgattaggtagaaatagatcctaagacacagaaaaatactgtttgaagctataagataatttagtcaaaaaacagctaattattgtgtttcaaatttcatatgtatagaaaaagtcttaaaatatctcacccaataatcatacaaaaatagttggtataaaggagaaattmattcgaggtcatacttgacttaacagcagaaaagaggcttgagctaaatatcttaactcctggttcagttagtattctaatacattacactggttttacatcattattatcctttgagtgatcatccatttattcattcatttgttttttcaacaaaatgaatgccaacagtgtgatattcgaagtaactttttaggtaatgtgggaaatataatgataataaaaatgtatactattaacaacactgcacacaagtaaatagtacaaaatagatctgaggtttttc

SEQ ID NO: 251592 - DNA, 578 bp, Homo sapiens
attacattgcctaacttcctccagcactttttcactagctaccccatcaagtggaaactcttccatgttttgtttcattggagttgagttgaatctcccctatcaaaatagtcttgaattaattctttccggcctgtttaattctgtctagtgcattttttctttgacaacatatgggttcaacagaaactggatgacagaagagttccatatttttgaaagactgaaaagttatcaactgcaataatgtgaatgaagatgagcagttacagatttgagtcacaaattgcaaattctrtctgtctctacttaaatgtaaagtataattgacaaccatgggtttctatcccatgcatctctgtgtctgcatagtttgtagacagagttagatataacctaattatcctggattactgtagaatgaatcttgaagatgagtctagaacaaaactaatgttcagagaatgaaaagaatatacagcaaggcagtgggggcagaaaaaaatgatgtgtcaagaaacctcaaacaaatttgctttaaatagagtgtaaagttcaattgggaaaaacaaagaaat

SEQ ID NO: 251593 - DNA, 564 bp, Homo sapiens
tgtaaactaaatagcattggtttatatatatgagttaacccactcatcccatggaatgaatgctactaaggcaatgtgaataaataagttcactcagtcatctagaaaatgtaggagataaggaaaatagagttgaatacccattttataagataatgagtatatttaggaaatttagtaaatagtaaagccaaaacatattgttagatctcctgaggaagatatttggaaatggatttagcctatgcttcgtagattgcctattccagtaatccctaaccttcctgtacattttaataaattatgtattttcaataatgcatccttaaaaacaaaaattgccttcattattcaatgtygaaattaaaaagtaaaaacataaatgatacttgttatctggttttcttcttaacagttcttcaatctgggccttagaataaaaaatgattatagtccaggacaaaattctcttataaagactgttccccatatgcacacatttctcttgagtataacttagagttgaatatttgggtttatggcttggttgtatggatcccagtc

SEQ ID NO: 251594 - DNA, 564 bp, Homo sapiens
tgtaaactaaatagcattggtttatatatatgagttaacccactcatcccatggaatgaatgctactaaggcaatgtgaataaataagttcactcagtcatctagaaaatgtaggagataaggaaaatagagttgaatacccattttataagataatgagtatatttaggaaatttagtaaatagtaaagccaaaacatattgttagatctcctgaggaagatatttggaaatggatttagcctatgcttcgtagattgcctattccagtaatccctaaccttcctgtacattttaataaattatgtattttcaataatgcatccttaaaaacaaaaattgccttcattattcaatgttgaaattaaaaagtaaaaacataaatgatacttgttatctggttttcttcttaacagttcttcaatctgggccttagaataaaaaatgattatagtccasgacaaaattctcttataaagactgttccccatatgcacacatttctcttgagtataacttagagttgaatatttgggtttatggcttggttgtatggatcccagtc

SEQ ID NO: 251595 - DNA, 565 bp, Homo sapiens
gatgtacattcagtttatatccttaaaaaaaaatgacagagactatatacgcttatgtaaaaaaatgccttccaaccatgtttgatatacatwtgagataacagcagtctccaacatttatgaagcacttcttctaaaattgtcggtaaataaaacatgtcaatgctataagggactactcttaagaataccagttctattatcattggtttaaaaagctcctggcttatttgaaaaaatgagtacttacttttaagtggttttatatctcagtgtcctgaaagtggtatttctcagcacattaggagtatgtgataattcaccaggacttccatggtataaggacattgacaaaggagcaacaaatgaagttaaggaatcctatagtgagaaaaattttaatacattaaggaaaattaagcccctttgtcaaccctctcagcagaatagaactgaatttttccatactcatgttgaattggaaactccagtgttggaggaggggtctagagggaggtgattggatcatggtttaatgcagatgacaggttgatgggtgcagcaa

SEQ ID NO: 251596 - DNA, 591 bp, Homo sapiens
tttcaggcactgtttaaggtctgtttataatagtgatgttgtctcccttggaatattataaagtattttcaggtctaaaatgagttattcaaaagaaagtaaatcccttggaagctgtttgaactgtttgtagaaaattactttctagtcttacagtattagaaaataaaaattactatctctagtattgtatctcccacttttctctctgaaacaacagtccttttaaatggtactttatattggatcttgtcaaaactaaaaggtcatagctttatttactatttataagccctcatagtccyggcacagacctaggtcaacagataataaaattttaaaaacaatcacattgcatccattctagcatgcactttttcacactttgaaacctctgaattcatgaatgcaagtgtttttgccttgttggttgttcaccaaatacagtctgtcatagatttgaggaaatacagtaagactgataatatctagcaataaatccccaacatatcttggaatgtgtgacccaaagaagaattttaatacagagtaaaaaaaatgaataaattctgatgagaatcatgaagttat

SEQ ID NO: 251597 - DNA, 510 bp, Homo sapiens
aatgtattagtgtgcttgtctgccacaacaaaatagtgggtggcttaaacaaaagacattttaaacaacaggcatagttgggtcacttaaacaataggcatatttgggtagcttaaacaatagacatttattttctcatagttctagaggctagaagctcaagatcaaagtgttggcagagttggtttctggtgaggcctctcttggcttgcagacatccagccaccttcttgctaagtccctacaaggcctttcctctatgttttgcagagaaagagagatgtctggtatctctcactcttcttataaggacaccagtgcaataagattaggaccccactctcatgacttcattttatctttaccttcttaaagactccatctataaacataattatattgggggataggtattcarcatatgaatttgaagacacaattcagtccataacaataagtaagaacagacctgcaagcatatctcttccaacatcagtgaaagggttgtag

SEQ ID NO: 251598 - DNA, 532 bp, Homo sapiens
aaggtagtgtaataaattactcatgtaacactcatcacactaattatttatcataatactaattatttcaccttagggttttaccatgtttgctagttgcaacaactgttccttgtgttgcttttttcaagaaaattgtctattcatctaaattaacaaaggtattgaaaaactgttgctaatagtatctttaaartctttgccatttatctacctgtgttctccttttctctgccttattggtttattttctccgttttcttttattggttttgctaaaagttcgtctttcaagttttccaaaataattagttttggttgtaattgttaaaaataatttctaaattttctaataaattttaaaccttttcatttgtcttcattattgtctttcttatatttttcttattatataattattagttgcattttgctgccttgaaattcatttgtggatgtcctatccccagtacttcaaaatgtaactatacttggagacagggtccttaaagaggtcacaaagataaagagt

SEQ ID NO: 251599 - DNA, 576 bp, Homo sapiens
cctttggttaagcttattcctagatattttatattatgtgtagcttttgtaactaagattactttttaaatttctttttcacagtgttcactgttgtcatatagaaatgctactgattttggtatgttkactttgtattctgcaattttactgaatatatttattgtttaatagttttttgtggagtctttcggtcttttcaaatataagataatatcttctgcaaacaagaataatttcacttctttctaatttggatgtctttaatatagttcctttgtctgattgttcttgacagaacttccagtactatgttgaataacagtggtgacagggggcattcttgttatgttccagatcttagagaaagggcttttagtttttcattattcagtatgatactagctgtgggtctgacatatattcctttaattatgttgaggtatgttccttctatcctcaattttttgagggtttttatcatgaaaggatgttgaattttatcaaaagctttttcatcatcaaccgaaatcatagggtttttatcctttaatctgttgaggtccttggggcttt

SEQ ID NO: 251600 - DNA, 624 bp, Homo sapiens
tttattttttaaatgttttaagactttttttgtgacctaacatatggtccatccttgagaataattcatgtgctgagaaaagaatgtgtattctgcagctcttggatgaaatgttctgtaaatatttattagatttatttggtctatgatgcagactgtctgatgtttctttgttggttttctgcctggaagttctgttcaatgctgaaagtggggtgttaatattgtactggggcctcttgagctcttattatatttccwctgtatatctgagtgctccagtgttgggtgcatatatattaaaattattacatcctcttcctgaattgacccctttatcattatatagtgactttctttgcatcttcttatagttttggtcttaaaactgttttgtctgatataagaatagcaactcctgctctttttcttttctctattggtgggaatatctttttccatcactttattttcagtctgtgagtgtctctataggtgaagtgtgtttcttgtaggcaacaaattattaggtcttggtttttcatccattttaccaatctatgtcttttgattggagagtttagtccatttacatacaatgttattacttataagaaaggactt

SEQ ID NO: 251601 - DNA, 624 bp, Homo sapiens
tttattttttaaatgttttaagactttttttgtgacctaacatatggtccatccttgagaataattcatgtgctgagaaaagaatgtgtattctgcagctcttggatgaaatgttctgtaaatatttattagatttatttggtctatgatgcagactgtctgatgtttctttgttggttttctgcctggaagttctgttcaatgctgaaagtggggtgttaatattgtactggggcctcttgagctcttattatatttccactgtatatctgagtgctccagtgttgggtgcatatatattaaaattattacatcctcttcctgaattgacccctttatcattatatagtgactttctttgcatcttcttatagttttggtcttaaaactgttttgtctgatataagaatagcaactcctgctctttttcttttctctattggtgggaatatctttttccatcactttattttcagtctgtgagtgtctctataggtgaagtgtgtttcttgtaggcaacarattattaggtcttggtttttcatccattttaccaatctatgtcttttgattggagagtttagtccatttacatacaatgttattacttataagaaaggactt

SEQ ID NO: 251602 - DNA, 585 bp, Homo sapiens
gatctcttttgtaactgtgagctatacaacctggggttagggaagggatgatgacagcatgctcttgtctgctccagctggtgtctcataatgtcccctgcyccccaccaaccccaactttactgtctctcgacctagttcagcaccaggacttgcctaagagctgcagtccttatggccttgactgcctttcaagtttacttggagacacagagtactgtagcagccactcaagttcagactgctgggatcagagattcccctctggctagggctggtttaaatgctcccactgtgggagtgtccctaagttctatctggtttttctttctgctctaacaggatagcaatgagttcaatgcctcacaactactgtgttctcttcttcccagcacccagagatactcttggcagcatgctgagggtggtgttgtggggggcttccatgattgaagactgtgttttctatctcttcagtgtctctttcagtgatataaaggtaaaaccaggtgctgtaagtgctcacctggatttttggtgcttttaaaggtgttttttctgtgtggatagttgttaacttggtga

SEQ ID NO: 251603 - DNA, 516 bp, Homo sapiens
tttctgctctaacaggatagcaatgagttcaatgcctcacaactactgtgttctcttcttcccagcacccagagatactcttggcagcatgctgasggtggtgttgtggggggcttccatgattgaagactgtgttttctatctcttcagtgtctctttcagtgatataaaggtaaaaccaggtgctgtaagtgctcacctggatttttggtgcttttaaaggtgttttttctgtgtggatagttgttaacttggtgaccttgtcgggggaggggaggcgagtgtatgataaatggagcttatctgccatcctgctccactgccactattcaataactaatttttaatctgattttatgtaataataaagcatgaagatgcatttttacaaaatctccttaatcttagttttcagttgagatgaaatttataagacattgtaagaaacaaagcatgtgattaatttgatgaggtttgagaattacatatgttcataaaatggccatccaaagtaag

SEQ ID NO: 251604 - DNA, 649 bp, Homo sapiens
ctcccactgtgggagtgtccctaagttctatctggtttttctttctgctctaacaggatagcaatgagttcaatgcctcacaactactgtgttctcttcttcccagcacccagagatactcttggcagcatgctgagggtggtgttgtggggggcttccatgattgaagactgtgttttctatctcttcagtgtctctttcagtgatataaaggtaaaaccaggtgctgtaagtgctcacctggatttttggtgcttttaaaggtgttttttctgtgtggatagttgttaacttggtgaccttgtcgggggaggggaggcgagtgtatgataaatggagcttatctgccatcctgctccactgccactattcaataactaatttttaatctgattttatgtaataataaagcatgaagatgcatttttacaaaatctccttaatcttagttttcagttgagatgaaatttataagacattgtaagaaacaaagyatgtgattaatttgatgaggtttgagaattacatatgttcataaaatggccatccaaagtaagatatagaatatatccactttctaaaaaataccccctatccctttctccaatcaatcccaactttaccagaggcaaccacttcctgatttcta

SEQ ID NO: 251605 - DNA, 649 bp, Homo sapiens
ctcccactgtgggagtgtccctaagttctatctggtttttctttctgctctaacaggatagcaatgagttcaatgcctcacaactactgtgttctcttcttcccagcacccagagatactcttggcagcatgctgagggtggtgttgtggggggcttccatgattgaagactgtgttttctatctcttcagtgtctctttcagtgatataaaggtaaaaccaggtgctgtaagtgctcacctggatttttggtgcttttaaaggtgttttttctgtgtggatagttgttaacttggtgaccttgtcgggggaggggaggcgagtgtatgataaatggagcttatctgccatcctgctccactgccactattcaataactaatttttaatctgattttatgtaataataaagcatgaagatgcatttttacaaaatctccttaatcttagttttcagttgagatgaaatttataagacattgtaagaaacaaagcatgtgattaatttgatgaggtttgagaattacatatgttcataaaatggccatccaaagtaagatatagaatatatccactttctaaaaaataccccctatccctttctccaatmaatcccaactttaccagaggcaaccacttcctgatttcta

SEQ ID NO: 251606 - DNA, 659 bp, Homo sapiens
tcagcatatattctcagcagagagctcctctgtaaacttggtcatgatctcagttgtattactcaagcgtcttagccaaatgaaaagaaatgtcagcttggaatttttcagatatttgcaaaaaatattttcattccaaagacaagtaagggaagaagagtagtcataaattccttatgttctctgaaacgtgcaaaattttaaatagaattttatacagaaaattaaaaatacaataacctggcatctttaactcaatattcrtaacaatttaatggtggtgggctttagtgaagcctcctattcaggctttattactttaataaaacaactttagtacattttctattccacagtagtactttattatgagttacagaaagtaaactgcccttgttaaaataaataaagcaagtacatctcaggatttcacatacctgattttataatgttgttttctaatgtgcatcgctactcatttgcacaattcagtcatctcttaggaattctcaagtcattagcatgaattagtatagtattaagtatgaaatgcgagatacttctaagaattttaaaagaagtgcactgttaggcacagattaaaggggagtaatttatctccttctacatttacagctcccacaatgaaagcagacggg

SEQ ID NO: 251607 - DNA, 659 bp, Homo sapiens
tcagcatatattctcagcagagagctcctctgtaaacttggtcatgatctcagttgtattactcaagcgtcttagccaaatgaaaagaaatgtcagcttggaatttttcagatatttgcaaaaaatattttcattccaaagacaagtaagggaagaagagtagtcataaattccttatgttctctgaaacgtgcaaaattttaaatagaattttatacagaaaattaaaaatacaataacctggcatctttaactcaatattcataacaatttaatggtggtgggctttagtgaagcctcctattcaggctttattactttaataaaacaactttagtacatttkctattccacagtagtactttattatgagttacagaaagtaaactgcccttgttaaaataaataaagcaagtacatctcaggatttcacatacctgattttataatgttgttttctaatgtgcatcgctactcatttgcacaattcagtcatctcttaggaattctcaagtcattagcatgaattagtatagtattaagtatgaaatgcgagatacttctaagaattttaaaagaagtgcactgttaggcacagattaaaggggagtaatttatctccttctacatttacagctcccacaatgaaagcagacggg

SEQ ID NO: 251608 - DNA, 659 bp, Homo sapiens
tcagcatatattctcagcagagagctcctctgtaaacttggtcatgatctcagttgtattactcaagcgtcttagccaaatgaaaagaaatgtcagcttggaatttttcagatatttgcaaaaaatattttcattccaaagacaagtaagggaagaagagtagtcataaattccttatgttctctgaaacgtgcaaaattttaaatagaattttatacagaaaattaaaaatacaataacctggcatctttaactcaatattcataacaatttaatggtggtgggctttagtgaagcctcctattcaggctttattactttaataaaacaactttagtacattttctattccacagtagtactttattatgagttacagaaagtaaactgcccttgttaaaataaataaagcaagtacatctcaggatttcacatacctgattttataatgttgttttctaatgtgcatcgctactcatttgcacaattcagtcatctcttaggaattctcaagtcattagcatgaattagtatagtattaagtatgaaatgcgagatacttctaagaattttaaaagaagtgcrctgttaggcacagattaaaggggagtaatttatctccttctacatttacagctcccacaatgaaagcagacggg

SEQ ID NO: 251609 - DNA, 550 bp, Homo sapiens
aagatatggttaatttttaggagtaaaagtttctaaaataaccctcacataatttttatgctcttgctaacctttggagagcagcattcataagctctttggaagggctattattcccaaatataactcatagtawctaagttattaatgtattctttactcactttaccttaagttacagaatttggaattatgtaatacaactaagaaaatgctaaaactgtgtcattgagtacatgagcggctgctatgagtctcaagagatgagatacaaaatggaaaaaagttttaaattaatctggctacaaagattaaatataaaaatgatgactaaaagtagtcatcatgttattattcttgttattattcatgttattattcatgttattattcttaaccaagagaaaatatctatcctgttcctttttggaactgtttatctcatcttcaactcaatttccaactcacatctaccagaagatctcccgctaatacagcttgggtctccacagtacgtcttggatgtggtcttcccgtacaatctatatac

SEQ ID NO: 251610 - DNA, 550 bp, Homo sapiens
aagatatggttaatttttaggagtaaaagtttctaaaataaccctcacataatttttatgctcttgctaacctttggagagcagcattcataagctctttggaagggctattattcccaaatataactcatagtaactaagttattaatgtattctttactcactttaccttaagttacagaatttggaattatgtaatacaactaagaaaatgctaaaactgtgtcattgagtacatgagcggctgctatgagtctcaagagatgagatacaaaatggaaaaaagttttaaattaatctggctacaaagattaaatataaaaatgatgactaaaagtagtcatcatgttattattcttgttattattcatgttattattcatgttattattcttaaccaagagaaaatatctatcctgttcctttttggaactgtttatctcatcttcaactcaatttccaactcacatctaccagaagatctsccgctaatacagcttgggtctccacagtacgtcttggatgtggtcttcccgtacaatctatatac

SEQ ID NO: 251611 - DNA, 550 bp, Homo sapiens
aagatatggttaatttttaggagtaaaagtttctaaaataaccctcacataatttttatgctcttgctaacctttggagagcagcattcataagctctttggaagggctattattcccaaatataactcatagtaactaagttattaatgtattctttactcactttaccttaagttacagaatttggaattatgtaatacaactaagaaaatgctaaaactgtgtcattgagtacatgagcggctgctatgagtctcaagagatgagatacaaaatggaaaaaagttttaaattaatctggctacaaagattaaatataaaaatgatgactaaaagtagtcatcatgttattattcttgttattattcatgttattattcatgttattattcttaaccaagagaaaatatctatcctgttcctttttggaactgtttatctcatcttcaactcaatttccaactcacatctaccagaagatctccygctaatacagcttgggtctccacagtacgtcttggatgtggtcttcccgtacaatctatatac

SEQ ID NO: 251612 - DNA, 550 bp, Homo sapiens
aagatatggttaatttttaggagtaaaagtttctaaaataaccctcacataatttttatgctcttgctaacctttggagagcagcattcataagctctttggaagggctattattcccaaatataactcatagtaactaagttattaatgtattctttactcactttaccttaagttacagaatttggaattatgtaatacaactaagaaaatgctaaaactgtgtcattgagtacatgagcggctgctatgagtctcaagagatgagatacaaaatggaaaaaagttttaaattaatctggctacaaagattaaatataaaaatgatgactaaaagtagtcatcatgttattattcttgttattattcatgttattattcatgttattattcttaaccaagagaaaatatctatcctgttcctttttggaactgtttatctcatcttcaactcaatttccaactcacatctaccagaagatctcccgctaatacagcttgggtctccacagtacrtcttggatgtggtcttcccgtacaatctatatac

SEQ ID NO: 251613 - DNA, 590 bp, Homo sapiens
tttaattttaatattaacaaaggatagcagatttaagccatatttaaaatgttcacagtacatatagacacttaccctgaacaattagttacacagagagtcacaagatgaaattcaaaagcagcatctttagattttgaggttgttactccaaacatagacatgagaaaaatctctgtaaatatctcatcaattcagaagattattgagttttagtaaagagataggaagaacatggaagtcataagagacactaaaattaaaaacacatttgtttctgatttcagattttgattctttaaagggaaaaaaacacaaaaagaaataaggataaaggaaaaaaaaacacaaaaagaaataaggataaaatctacatactcaatgcaaaggcaaggaatttctcagacaraaaataatctggctgatggaaataataaagctaaacaccatgctccccaccatcaatcataaggtttgagatgaaagatagataccccagaatacaaatagacaaggagaggcttcacaattttgtaaaacctttaggggacagaaaaggagaaagatgtttcttcatctttggaatacag

SEQ ID NO: 251614 - DNA, 519 bp, Homo sapiens
atacaaatagacaaggagaggcttcacaattttgtaaaacctttaggggacagaaaaggagaaagatgtttcttcatctttggaatacagtagacatgwccctaaccccacaaattcagaaccctgggcaggtccctgagagccaaatgagacgcatatttcagagcagagatagctggcttgagtcttgggagaggctaaagctacaggacactaggtgatagatgaggcagcattgctggaagtgagcacaggaagcattttaagatggcagaagcaacagcagaacagtaatttggataaaccctaagacagattcctgtactaacttccctccttcacctcctagctctgtgtgcttgttcaagttacatgacccactgaacttgtttctttaactgaagaataagactatcaacaccaaacttaaataatttttatacatatttggctaggaaaacagagccacttaatgtgttctaagtatgaagggtttaatatgaaaaagtaaagaattca

SEQ ID NO: 251615 - DNA, 519 bp, Homo sapiens
atacaaatagacaaggagaggcttcacaattttgtaaaacctttaggggacagaaaaggagaaagatgtttcttcatctttggaatacagtagacatgaccctaaccccacaaattcagaaccctgggcaggtccctgagagccaaatgagmcgcatatttcagagcagagatagctggcttgagtcttgggagaggctaaagctacaggacactaggtgatagatgaggcagcattgctggaagtgagcacaggaagcattttaagatggcagaagcaacagcagaacagtaatttggataaaccctaagacagattcctgtactaacttccctccttcacctcctagctctgtgtgcttgttcaagttacatgacccactgaacttgtttctttaactgaagaataagactatcaacaccaaacttaaataatttttatacatatttggctaggaaaacagagccacttaatgtgttctaagtatgaagggtttaatatgaaaaagtaaagaattca

SEQ ID NO: 251616 - DNA, 519 bp, Homo sapiens
atacaaatagacaaggagaggcttcacaattttgtaaaacctttaggggacagaaaaggagaaagatgtttcttcatctttggaatacagtagacatgaccctaaccccacaaattcagaaccctgggcaggtccctgagagccaaatgagacgcatatttcagagyagagatagctggcttgagtcttgggagaggctaaagctacaggacactaggtgatagatgaggcagcattgctggaagtgagcacaggaagcattttaagatggcagaagcaacagcagaacagtaatttggataaaccctaagacagattcctgtactaacttccctccttcacctcctagctctgtgtgcttgttcaagttacatgacccactgaacttgtttctttaactgaagaataagactatcaacaccaaacttaaataatttttatacatatttggctaggaaaacagagccacttaatgtgttctaagtatgaagggtttaatatgaaaaagtaaagaattca

SEQ ID NO: 251617 - DNA, 553 bp, Homo sapiens
aggttagtcactgtgagagtggacagcaatcactgtggtcacactggaagactccctccaggaaagttaaaaggagaaataaagacctaaacagtgccatacatcaaacccatgaatctgagaacagggtggtaaaagatgcatttatrgtacaaattaatccaaatgaccaagaagggcaaatgttttccacatgtacactgtgtgtcataacgtactctgtgactgtgcataaaataatagcacactttgccagaaaggtcattttatttatcaattcaaaacatatccatgcagatttgcagcatgccaatatattcaacattttacttaacattaagacattttattcactcctgttctcaggccctttgatgaagtgacatttcctgacattttctgacactttctcacagtggagtaaactgacattcattaagtcagatttcgctggattattacatcttatagattagaaaaattctggtcattcattcaacaatcgttgacgaggtgcctcaccgttctcattcttctcctggttaccagcatt

SEQ ID NO: 251618 - DNA, 571 bp, Homo sapiens
tcgttccttatatgaaatatattttttgctcttttatagaacattgtgttttgtttctggttaaataccactttatgttgaccacccccaagtcctcagtggataacaaatagccaatattatttttcatgtattttgaggattggctaggaggtttctctgctgagtttgcctatggtcatgtatgtgtctgcattcagctgggagctcagctcagcaggaaggctccagacggtcttattcatgtccggcagcttgcaccagctgctggctggtgtgccctgtttctttttttttcaacctgttcttccattcacctattggctagactatctcattccattgataaaagaaatagagagagccagytttcatttaaggattgaagaatgaatttcacttcttgatgtgaaggatgtaaggccacttttactgtattacacatttcatattttggttgtgcttttattcttacaggtcctgtaggtcaggaactctgttaccacagtatctcctatgttgtctggcacagggatgtgtatgttttacttaataaatatttatttcacag

SEQ ID NO: 251619 - DNA, 571 bp, Homo sapiens
tcgttccttatatgaaatatattttttgctcttttatagaacattgtgttttgtttctggttaaataccactttatgttgaccacccccaagtcctcagtggataacaaatagccaatattatttttcatgtattttgaggattggctaggaggtttctctgctgagtttgcctatggtcatgtatgtgtctgcattcagctgggagctcagctcagcaggaaggctccagacggtcttattcatgtccggcagcttgcaccagctgctggctggtgtgccctgtttctttttttttcaacctgttcttccattcacctattggctagactatctcattccattgataaaagaaatagagagagccagctttcatttaaggattgaagaatgaatttcacttcttgatgygaaggatgtaaggccacttttactgtattacacatttcatattttggttgtgcttttattcttacaggtcctgtaggtcaggaactctgttaccacagtatctcctatgttgtctggcacagggatgtgtatgttttacttaataaatatttatttcacag

SEQ ID NO: 251620 - DNA, 583 bp, Homo sapiens
attgataaaagaaatagagagagccagctttcatttaaggattgaagaatgaatttcacttcttgatgtgaaggatgtaaggccacttttactgtattacacatttcatattttggttgtgcttttattcttacaggtcctgtaggtcaggaactctgttaccacagtatctcctatgttgtctggcacagkgatgtgtatgttttacttaataaatatttatttcacagaatgtaagggttgtcatggtactatctataaataaatagataacaaagacaagtctaggcaaatattcaagacagaagcatgttcttaaaaactggagagggccaggtgcagcggctcatgcctgtaatcccagcactttgggaggttgaggcaggcggataatgaggtcaggagttccagaccagcctggccaataagatgaaatcccgtctccactaaacatacaaaaagtagccgggcatggtggcacaggcctgtagtcccagctactcaaaaggctgaggcagaagaattgcttgaatccgggaggtggaggttgcagtgagctgagatcacgccactgtactccagc

SEQ ID NO: 251621 - DNA, 583 bp, Homo sapiens
attgataaaagaaatagagagagccagctttcatttaaggattgaagaatgaatttcacttcttgatgtgaaggatgtaaggccacttttactgtattacacatttcatattttggttgtgcttttattcttacaggtcctgtaggtcaggaactctgttaccacagtatctcctatgttgtctggcacagggatgtgtatgttttacttaataaatatttatttcacagaatgtaagggttgtcatggtactatctataaataaatagataacaaagacaagtctaggcaaatattcaagacagaagcatgttcttaaaaactggagagggccrggtgcagcggctcatgcctgtaatcccagcactttgggaggttgaggcaggcggataatgaggtcaggagttccagaccagcctggccaataagatgaaatcccgtctccactaaacatacaaaaagtagccgggcatggtggcacaggcctgtagtcccagctactcaaaaggctgaggcagaagaattgcttgaatccgggaggtggaggttgcagtgagctgagatcacgccactgtactccagc

SEQ ID NO: 251622 - DNA, 546 bp, Homo sapiens
atctacccaagacacatgacccatatgttcacacaaagacttatacatggagtgttcatagcaaacagtattcatgatagcccaaaattataaccattctaagtgtccactaactggtgactagaataacaaattgagatatatacacagtatgaaataatactcacaaatatgatagtagtgatcatgatagtagtgatgagaggtgaaaacgtgctagcagccctggctcgctttccgcgcctcctgggcctccgctctggccacacgccaggagcccttcagcctgccgctgcgctatgagggcccctctctggggctggccgatgccggagccagctccctctgctcaccggaaggtgtgaagggagaggtgctggcgggagcccgaactgcgcgccgcgttcgcgggcaggcgcgggttctgggttggcgcaggctcagtgggmcccgcactcggctcggccagccggcgcctgctggacttgatcagggactagctccctctgggctgcctgagcgccggggctgggtgccgcagagccc

SEQ ID NO: 251623 - DNA, 546 bp, Homo sapiens
atctacccaagacacatgacccatatgttcacacaaagacttatacatggagtgttcatagcaaacagtattcatgatagcccaaaattataaccattctaagtgtccactaactggtgactagaataacaaattgagatatatacacagtatgaaataatactcacaaatatgatagtagtgatcatgatagtagtgatgagaggtgaaaacgtgctagcagccctggctcgctttccgcgcctcctgggcctccgctctggccacacgccaggagcccttcagcctgccgctgcgctatgagggcccctctctggggctggccgatgccggagccagctccctctgctcaccggaaggtgtgaagggagaggtgctggcgggagcccgaactgcgcgccgcgttcgcgggcaggcgcgggttctgggttggcgcaggctcagtgggacccgcactcggctcggccagccggcgcctgckggacttgatcagggactagctccctctgggctgcctgagcgccggggctgggtgccgcagagccc

SEQ ID NO: 251624 - DNA, 542 bp, Homo sapiens
tgattttactctgaaattttaattaatttatagttaatataactacctctgtattttkttgtagtcttttgtgggtagagttgaggaagagataggaatgggattattttgacatggctcatgatcaccaaaatgtgatccttggtcagtttacctaaatatcaatgtaattatgtttatctaatttaataatttgctgaaatcttccttattttttactttttatgaagcttttagccatttatattagatggtgatttttaaaacaacttttgaagacttaagtgacattttagtagatatgattgatttaatatgattttagttttagacttttaaaatttgatttagctaaatccatcctctatagctaattctccatatctgaccaaagttgagtatctgaggattttctaaacttgggaagatctaaaatttttgattatgaaaatttcttgtgcatttcaaattataagtcttattcatggctctaatgtgagtaatagtactaaataatattcacatgtatatttcaacacatt

SEQ ID NO: 251625 - DNA, 545 bp, Homo sapiens
ttttttctttttcttttctttattctttttttttttttttcaggctagtcaagtgaagcaatgagggtggagaaggaacaaataagcctgtaactggttgtgatccattagttgtaaataccactgcactgggaccaacttccagagatattcttaattactctgctgtgccgtctctttattgcttagctgggtattagcatatgatttgccctcagtgaatgttggcttttatcaacattgtcagtggtggtagtgacgatgatgaacttggttttactttttcagtgtctaacctggtcccgtgctaggaccccaggcagagcttcctatgaagtcacgtacaacaaggcctttgggcttaagagaaaaagctcacagctgcacagagggaggagtttttatataaagaatacaaaatgttctgaataccaagwgtttcattctctccttatgtttctgagttgaaatttgaagtaatcatgagacactgcatgtgttcccatttcaaagatgccacagaatcataaaactagtatgtagca

SEQ ID NO: 251626 - DNA, 560 bp, Homo sapiens
ctcctaaaatgctgggattacaggcatgaggcacccacgccgggcctgatacattttaaaaatatcttgttcatttcttttttgtattttctcctcccaaatccagaaygtcttgtttactgctacctcctgaagcagattaagaacactcacaataatttacaaggtttcaactataataatttttaaacaggctggagtgtagtggtacgatctcgggtgatacattcatattaaaaagtacacaaggaggttgggcgtggtggctcacgtctgtaatcccagcactttgggaggccaaatgggtggctcgcttgagcctaggagttcaagatcagcctaagcaacatgatgaaccccgtctctactaaatatacgagaaaaaaaaaattagccgggtgtcgtggcgcgtgcctgtggtcccagcaacttgggaggctgtgacgggaggatcgcctgagcccgagaggtggaggctgcagtgagccaagatcgcgcaactgcacactccagcctaggcgacagagcaagaccctgtctcaaaggacaaaaacaaaaaa

SEQ ID NO: 251627 - DNA, 552 bp, Homo sapiens
ccaggaggaggttgaggctgcagtgagctgtgattgccccaccacactccagcctggatgacagaagaagaccctgtctttgtggggaggagacaaatttttgacaggtgtgcatgtcgttatttcaaagctgtaggagtctgcaatgtgattgtcctaatagtatttggaagagactccacacagcatctctgtttgctrcagcatcgcatcctgaatctgctggagagccctgtcttacattgggtttcactaaaaatcggcagtcttacgggctacccagtaagtaggttggggtagtattcccaaatatattttatctcaaactcaaagggcgacttcaaacattgttgcttctgtcttcatggtgaccagtgcaaggtgcagaatcttgtctccctctccctactgcctttgtttaagagatggggtttcgctttgttgcccaggctggagtgtggtggcgtgatcatagctcactgcagcctcgaacttctgggtgcgagcaatcctcccaggtaggtgagccgtcatgcctgggtagcttgtttc

SEQ ID NO: 251628 - DNA, 622 bp, Homo sapiens
ggtgagagtctatgtgaactaacactgctctttctctctccttcctcccagctcagcatggcagagactccacctcaaactgctgcacccaaaaatacaaggcccccagtccccaaggtcccacctggagagcatttttccctaggggagtaggacttcatctcctgacatcacaagaaaagtacagaccaatatctaytatgaatatggacataaaaatcaccaataaaatactagcaagctgaatccaacaatgaataaaaattagacattatgatcctagaatttatcctggggaagcaaggttggtttaacgtccaaaaaatacaatgaaaaacaaaattcacatgatcatctccataaatgcagaaaaagcatatgacaaattccaacaccctttaatgaaagaaacattcaacaaactaggaatagaaagtaacttctttagcctggtaaaggacgtttatgaaaaatccatggtaacatcatacttaatgataagacaggatgggaggagtggtagcagccaggcagcccagctttgagaaggctctcagcatggtgcggctcacaggcacccagcatgcacactcctgaccacaagatgcccaagaggaagatc

SEQ ID NO: 251629 - DNA, 541 bp, Homo sapiens
gtttgttcatcctatcttggagtgaattccttctgcagatggctaatctcatggactttgtggcacttacttaataactttattctcagtggatgactttttcttgtctcaatcccaaatcccaaagatatactctctttgatgcctgtaggcacctgctttcagctgtgtacagactgacccatgatatttcatccgtgtaagccattagaatagttttctccactaaatcttggtactatgccctattgtctctattttacccttaactttacttaactggcatttgcatggcttggctttatttgacaaggaagtagccatcctaagaaagattcrtcatcatctcatcctctgccttgagagttcagtgaaaaagctagctgcttctggagagagttccttttccatattcaaacttcatcaagacaagggatgatttaattacgactttcagaatttgtcactatataaagtaaaatcatttgtatgaagcttcacatagtgttctgtgtctaggctgtgttactattgaaaggag

SEQ ID NO: 251630 - DNA, 541 bp, Homo sapiens
gtttgttcatcctatcttggagtgaattccttctgcagatggctaatctcatggactttgtggcacttacttaataactttattctcagtggatgactttttcttgtctcaatcccaaatcccaaagatatactctctttgatgcctgtaggcacctgctttcagctgtgtacagactgacccatgatatttcatccgtgtaagccattagaatagttttctccactaaatcttggtactatgccctattgtctctattttacccttaactttacttaactggcatttgcatggcttggctttatttgacaaggaagtagccatcctaagaaagattcatcatcatctcatcctctgccttgagagttcagtgaaaaagctagctgcttctggagagagttccttttccatattcaaacttcatcaagacaagggatgatttaattacractttcagaatttgtcactatataaagtaaaatcatttgtatgaagcttcacatagtgttctgtgtctaggctgtgttactattgaaaggag

SEQ ID NO: 251631 - DNA, 536 bp, Homo sapiens
tctaaaaatgatatggctgacagaatgttcactggtttagtcacgtcataactaaaaacaaaggaaaagtgattctctttctctccatttccccattaaccccactacttctcccagccaattaacagaaatctattctttaattaaccctataaatatatacacctactatatacccacaaaaatttcaaaagttaaaaaaaaccttttaattagccaamatctactggacacctgctcatgctgggcactatgttactatctctagagatatggagaagcacagtggaatgtacattctaattgcggagcaaaacacacgtagtatggaggtggtcaaggaatgaggggtgtttgcttttggatgcaaagtttctttctggggggtgatgacaatgttctgaaattagatcatggtgattaacctttgtacatccctaatgtccatcttcttatattatggaccaggatttgttaaggccatagactgaccattgcatagtttcagaattctaacagaagtaggaaaatgctac

SEQ ID NO: 251632 - DNA, 536 bp, Homo sapiens
tctaaaaatgatatggctgacagaatgttcactggtttagtcacgtcataactaaaaacaaaggaaaagtgattctctttctctccatttccccattaaccccactacttctcccagccaattaacagaaatctattctttaattaaccctataaatatatacacctactatatacccacaaaaatttcaaaagttaaaaaaaaccttttaattagccaacatctactggacacctgctcatgctgggcactatgttactatctctagagatatggagaagcacagtggaatgtacattctaattgcrgagcaaaacacacgtagtatggaggtggtcaaggaatgaggggtgtttgcttttggatgcaaagtttctttctggggggtgatgacaatgttctgaaattagatcatggtgattaacctttgtacatccctaatgtccatcttcttatattatggaccaggatttgttaaggccatagactgaccattgcatagtttcagaattctaacagaagtaggaaaatgctac

SEQ ID NO: 251633 - DNA, 579 bp, Homo sapiens
tctaattgcggagcaaaacacacgtagtatggaggtggtcaaggaatgaggggtgtttgcttttggatgcaaagtttctttctggggggtgatgacaatgttctgaaattagatcatggtgattaacctttgtacatccctaatgtccatcttcttatattatggaccaggatttgttaaggccatagactgaccattgcatagtttcagaattctaacagaagyaggaaaatgctaccatctggtcatgcctggctaaagacacagactcaggggctgaaataccatttttttagtagcactagcctttggttgagctcctattcttgcttttctacagctttggtctgcaattttggcccttcttcaggcaaattgatcaaaagccttacctcccacttctcttcctaaagcctgtctctgggctggggcccagtagaggacgagctaatatgccagtttgtcctgctgctcagcaatccctacttctggctcaaatgtcacccacccggtagcagaatgacctttccttgcagttctggcccatccagttccacaggaaaggggagacaagacatt

SEQ ID NO: 251634 - DNA, 613 bp, Homo sapiens
agatttaaacacctgtaagaagggttcttgttgagcatgggaaccattttgtggtaggggattctgccagtcaccagaatggtttccccaatcggccatggggtttctcagaaaaatctctaagggcaacgtacattctcattcatttaggacagtgattcttactatatatatatatatatatrtgtgtgtgtgtgtgtgtatatgtatatatacatatatatacatataggtatacatatatgtatatatgtgtatatatagttttatagaggtataattcatataccataaaattcacccatttgaagtgtacaattcagtggtttttagtatgttcacaggactgtgccaccttcatcacagtcaattttggaatattttcataaccccagaaagaaggccccctgcccatcagcattcactctgccttttccctcactctctaccccagcctaggaagctactaatctgcttcctgtcttatagatttacctattctgggcattttttataaaatggtctcatatgagatatggtcctttatgtcaggcttttttcacttggaatactattttcactgttcatccatgttgtagcatgaatcagtatt

SEQ ID NO: 251635 - DNA, 574 bp, Homo sapiens
tggctcatgcctgtaatcccagcactttgggaggcaagaggggcgggtcacttgaggtcaggagttcgagaccagcctggcaaacatggcaaaaccccatctctactaaaaatataaaaattagccaggagtratggtgcacgcctgtaatcccagctacttgggagactgaggctggagaattgcttgaacctgggaggcagaggctgcagtgagccgatatcacacccactccactccagcctgggtgacagagtaagactctgcctcaagaaaaaaagaaaaaagacataaaaatggccagtgaatgtatcaaaaaatgttcaacatcaccaatcatcagagaaatgtgaatcaaaaccacagtgaggtatcatctatctcaccgtagttaggatggctattatcaaaacacaaaaaataacaaatgttggtgaggatgcagagaaaagaaaactcttatacactgttggtaagaatgtaaactagtataaccactatggagaacagtatgaaggtgtctcaaaaaaactggaaatagaactaccataggctctaacaaactcactactta

SEQ ID NO: 251636 - DNA, 574 bp, Homo sapiens
tggctcatgcctgtaatcccagcactttgggaggcaagaggggcgggtcacttgaggtcaggagttcgagaccagcctggcaaacatggcaaaaccccatctctactaaaaatataaaaattagccaggagtgatggtgcaygcctgtaatcccagctacttgggagactgaggctggagaattgcttgaacctgggaggcagaggctgcagtgagccgatatcacacccactccactccagcctgggtgacagagtaagactctgcctcaagaaaaaaagaaaaaagacataaaaatggccagtgaatgtatcaaaaaatgttcaacatcaccaatcatcagagaaatgtgaatcaaaaccacagtgaggtatcatctatctcaccgtagttaggatggctattatcaaaacacaaaaaataacaaatgttggtgaggatgcagagaaaagaaaactcttatacactgttggtaagaatgtaaactagtataaccactatggagaacagtatgaaggtgtctcaaaaaaactggaaatagaactaccataggctctaacaaactcactactta

SEQ ID NO: 251637 - DNA, 574 bp, Homo sapiens
tggctcatgcctgtaatcccagcactttgggaggcaagaggggcgggtcacttgaggtcaggagttcgagaccagcctggcaaacatggcaaaaccccatctctactaaaaatataaaaattagccaggagtgatggtgcacgcctgtaatcccagctacttgggagactgaggctggagaattgcttgaacctgggaggcagaggctgcagtgagccgatatcacacccactccactccagcctgggtgacagagtaagactctgcctcaagaaaaaaagaaaaaagacataaaaatggccagtgaatgtatcaaaaaatgttcaacatcaccaatcatcagagaaatgtgaatcaaaaccacagtgaggtatcatctatctcaccstagttaggatggctattatcaaaacacaaaaaataacaaatgttggtgaggatgcagagaaaagaaaactcttatacactgttggtaagaatgtaaactagtataaccactatggagaacagtatgaaggtgtctcaaaaaaactggaaatagaactaccataggctctaacaaactcactactta

SEQ ID NO: 251638 - DNA, 574 bp, Homo sapiens
tggctcatgcctgtaatcccagcactttgggaggcaagaggggcgggtcacttgaggtcaggagttcgagaccagcctggcaaacatggcaaaaccccatctctactaaaaatataaaaattagccaggagtgatggtgcacgcctgtaatcccagctacttgggagactgaggctggagaattgcttgaacctgggaggcagaggctgcagtgagccgatatcacacccactccactccagcctgggtgacagagtaagactctgcctcaagaaaaaaagaaaaaagacataaaaatggccagtgaatgtatcaaaaaatgttcaacatcaccaatcatcagagaaatgtgaatcaaaaccacagtgaggtatcatctatctcaccgtagttaggatggctattatcaaaacacaaaaaataacaaatgttggtgaggatgcagagaaaagaaaactcttatacactgttggtaagaatgtaaactagtataaccactatggagaacagtatgaaggtgtctcaraaaaactggaaatagaactaccataggctctaacaaactcactactta

SEQ ID NO: 251639 - DNA, 522 bp, Homo sapiens
atgaaagcttcagcatgaatccatcctggaagaccagctccctgtggccgggcagcacgagccccaccatgaagggtggaaccaattacagcttccttctgctggctctctgggctaatctgccccttgttttttctgtaaatcagtggttctcaatcatgtctacacattggaataacctgggacttaaaaaacatactgttgtctgggtcccagcccagagattccaatttagttggcttgggatgcagcttggtcactaggatttttaaaagcttcccaacctactgaaatgtgtagccaagatcgagaacctttctctatatctagtcttccttctagatttgtttccttgtccccsccttgggttttccttattttattattattatttttttgagaaataagcaaggtcccctcaatgtgctgaggcctagcagtgactcctgatatccctgctattcccaatatcagcagtctcaatgtaacaaacaagcaaataaaatagcacactctctaaca

SEQ ID NO: 251640 - DNA, 522 bp, Homo sapiens
atgaaagcttcagcatgaatccatcctggaagaccagctccctgtggccgggcagcacgagccccaccatgaagggtggaaccaattacagcttccttctgctggctctctgggctaatctgccccttgttttttctgtaaatcagtggttctcaatcatgtctacacattggaataacctgggacttaaaaaacatactgttgtctgggtcccagcccagagattccaatttagttggcttgggatgcagcttggtcactaggatttttaaaagcttcccaacctactgaaatgtgtagccaagatcgagaacctttctctatatctagtcttccttctagatttgtttccttgtccccgccttgggttttccttattttattattattatttttttgagaaakaagcaaggtcccctcaatgtgctgaggcctagcagtgactcctgatatccctgctattcccaatatcagcagtctcaatgtaacaaacaagcaaataaaatagcacactctctaaca

SEQ ID NO: 251641 - DNA, 522 bp, Homo sapiens
atgaaagcttcagcatgaatccatcctggaagaccagctccctgtggccgggcagcacgagccccaccatgaagggtggaaccaattacagcttccttctgctggctctctgggctaatctgccccttgttttttctgtaaatcagtggttctcaatcatgtctacacattggaataacctgggacttaaaaaacatactgttgtctgggtcccagcccagagattccaatttagttggcttgggatgcagcttggtcactaggatttttaaaagcttcccaacctactgaaatgtgtagccaagatcgagaacctttctctatatctagtcttccttctagatttgtttccttgtccccgccttgggttttccttattttattattattatttttttgagaaataagcaaggtcccctcaatgtgctgaggcctagcagtgactcctgatatccctgctattmccaatatcagcagtctcaatgtaacaaacaagcaaataaaatagcacactctctaaca

SEQ ID NO: 251642 - DNA, 573 bp, Homo sapiens
gaaatttcactgtgtacgaacattttaaatctcttattacaacttaccaaattgctttccaaaaacaccacaccaatttacagattcattggcatgatataaaattcttgtcttaccacattcttgccaggactgtagaatttttttaattgtgccatttatttttcctgagtttctgaaacattttaaaagagcttttttaccatccccacaactaccttacaccatttttgtttcctgcattgaaaacattttcatttgaaggtaactccttttttaagcatggtaaggccttttaaacagcaagattaacattgattttctgtgatttgacatcaaatagaaattagtaaccaaatctcaaataaaccattcaattaatcaatttttcttaatamgagataaatgtctaaaataggtttgaatagaataacatacaagaagtgaaggcccaaggaccagattctcacttgaaactaagtatttaatgaaatcgaaggtaacacacataaactagaaccactgaggaaaaggtttccagagctagctctatgagaatgccaaaagcctata

SEQ ID NO: 251643 - DNA, 614 bp, Homo sapiens
tgttgcagtaaatgcatcttttaccacacactttagcggaaagttcacgttttaccacaatctgatgtattatggcatgcatgaattcactattttgtagtcaaacattactgagttttaaagaatgttycttgttgtgttttaaaatggatctcaagagcacacaaatttaagcccctataggacaaagaaagaagccacacagctcctcccctgctatctccttatggggggaggcaaaaaggaataagcattttaaatcctaatttcactttaaagtcaaacagttcaagaagttgaaagtcaacaatgttcttcccacaacattttaaattttcaagatgtttatttcaactcctgtttgttatcacacctcaaagtaagcatgtttgcataaagatattgaaaaggaagggaatatcattttcaaatctttaaatgaaagtgaaaagtgctcagccaaattagaaataataatataaatagaaataaactgggcaagggggtgctatttcatccatctagaaactgtatcaagccaagaaccccttctgtaaggagatggacttgtaaaaggaaaaaacaaaccacctctcaggcgggctcgccccaac

SEQ ID NO: 251644 - DNA, 562 bp, Homo sapiens
tagcctcattttacagatgaagatactgaactaaacaattcagagtgacttccccataytcactaagtattagagctttctcaaactggcggaataaattgttgagtctgagttggaagggatgggaactgaattactatcccagcattcttctgatgctaattcctattacagtgtagacaaaatatgcataactgtgggtctttctcaactcatggagtttatacttcctcatctctaagttttccttggttaaaggaatactccgagctcttatttcaacctagaccttcctacataaaagaaatatcaagaacacaatagcattttacgaattctaagatgcacaatttttcttacttacccatctacggctgggcacggtggcttgcgcctgtaatcccaacactttgggaggccgaggcaggcagatcacttaaggtcaggagttcaagaccagcctagccaacatggtgaaatcctgtctctacttaaaaaaaataaaaaaattagcggggtgttgtggtgcatgcctgtaatcctacctactggggaggctgtg

SEQ ID NO: 251645 - DNA, 562 bp, Homo sapiens
tagcctcattttacagatgaagatactgaactaaacaattcagagtgacttccccatactcactaagtattagagctttctcaaactggcggaataaattgttgagtctgarttggaagggatgggaactgaattactatcccagcattcttctgatgctaattcctattacagtgtagacaaaatatgcataactgtgggtctttctcaactcatggagtttatacttcctcatctctaagttttccttggttaaaggaatactccgagctcttatttcaacctagaccttcctacataaaagaaatatcaagaacacaatagcattttacgaattctaagatgcacaatttttcttacttacccatctacggctgggcacggtggcttgcgcctgtaatcccaacactttgggaggccgaggcaggcagatcacttaaggtcaggagttcaagaccagcctagccaacatggtgaaatcctgtctctacttaaaaaaaataaaaaaattagcggggtgttgtggtgcatgcctgtaatcctacctactggggaggctgtg

SEQ ID NO: 251646 - DNA, 562 bp, Homo sapiens
tagcctcattttacagatgaagatactgaactaaacaattcagagtgacttccccatactcactaagtattagagctttctcaaactggcggaataaattgttgagtctgagttggaagggatgggaactgaattactatcccagcattcttctgaygctaattcctattacagtgtagacaaaatatgcataactgtgggtctttctcaactcatggagtttatacttcctcatctctaagttttccttggttaaaggaatactccgagctcttatttcaacctagaccttcctacataaaagaaatatcaagaacacaatagcattttacgaattctaagatgcacaatttttcttacttacccatctacggctgggcacggtggcttgcgcctgtaatcccaacactttgggaggccgaggcaggcagatcacttaaggtcaggagttcaagaccagcctagccaacatggtgaaatcctgtctctacttaaaaaaaataaaaaaattagcggggtgttgtggtgcatgcctgtaatcctacctactggggaggctgtg

SEQ ID NO: 251647 - DNA, 263 bp, Homo sapiens
aagggaatatattattaacttaggtatcagaattagaaaggtcgtattgttctgataaaatatgctrtgactctgagatgtccaggtggaatcaagaatatatttccccagataatttaatctcatttgaaaacttagatgtacttggttcaggggaatatgctgaaataaaaccctatctgcctcttcactctttcctttcttctcaggaaggagaaacagtgatcatagctcattgaaaactctcctgctgtagtttaaaa

SEQ ID NO: 251648 - DNA, 263 bp, Homo sapiens
aagggaatatattattaacttaggtatcagaattagaaaggtcgtattgttctgataaaatatgctatgactctgagatgtccaggtggaatcaagaatatatttccccagataatttaatctcatttgaaaacttagatgtacttggttcaggggaatatrctgaaataaaaccctatctgcctcttcactctttcctttcttctcaggaaggagaaacagtgatcatagctcattgaaaactctcctgctgtagtttaaaa

SEQ ID NO: 251649 - DNA, 570 bp, Homo sapiens
ctatgaatttttccaattaaataaagaggctgcttaaaagtggaaagaacataaactttcccaggtatatggatctgagttcaaatcctgtctcctccactcattaactgtgtggccctggctgagatacttaacttccttgagccctaacatttttcttatttgtaaaaatgggaatagtattgactttcagaagactctagataaatgagayacttccaataaaacagaaaacacagggccagctattttgtagctgtttaatatactgataataactgttgaaataaggtacacagttcacatgtataatgataggagcaaatgtctgttattctgcggataataggcttaagggtatctggtttggggtctacagccatgcctgagtagatatacgcactatatctcaagcttctgtcattcactgtcagggtttaataatattttcaccttggttaatgttgtgagaagaacgggctctaaatgaggcagctggtaccccaagcagaacagcggtgataaggcataaccaaataagagtggttccatttttctccccaccaaggc

SEQ ID NO: 251650 - DNA, 541 bp, Homo sapiens
cttacagttctgtaggtcaaaagtctgacagaagcttcactgggcaaacatcagtgtgtccttagcagggccaagttcctttctggaggctctaggagaaaatctgtttctttgcaatttccagcatctagaagcttcacaaatttcttacctctgggttcccttctatcttcaaagccagcaatggctggcttcctcgtattgcagcactctgaaactgattattctacatcatttyccctgcttcacggacccttgtgatcatattagatttacctgaataatccagggtaatctattttgaagtcagttgatctattttgaagtcagctgattagcaactgtaattccatctgcaaccttaatcccccttttcaaataacataacacattcacaggtcctagagattaggatgtgaacaccttgtggggaggcattattttgcctaccacaaactcaattacacactggaccaacagcaacagcatcacttgggatcttgttagaaatgtgagttctctagcctcctctcatacctac

SEQ ID NO: 251651 - DNA, 481 bp, Homo sapiens
atacatatagtttgtagtcccagtgtggggagcttttaaaagtctgatttctgaaccttatctctggagagactcactaagtctgggatgaggaccaagaatctacattttaaaagcatctgtgtatttctgatggtcatctaggtggaggaatcattggtgatgaatttgcatttttctagctctatgcttgtaatattccacttcaattaaatatctatggtcctgattatacatttctattgtgtgagtttattrtctatcttcttattttatcttggagatcaccttaatatagaattggaatttaattgttaggagaataaaatcctctttctcctttcctgaaaccatgatttctcccaagtataaatgcagaatgtgaagcctccggtttgagaggtcataaatcagcagcaagtttctcagcagggtgtatattaaaatggaaggccttctattcttacagcaggtcactaaa

SEQ ID NO: 251652 - DNA, 481 bp, Homo sapiens
atacatatagtttgtagtcccagtgtggggagcttttaaaagtctgatttctgaaccttatctctggagagactcactaagtctgggatgaggaccaagaatctacattttaaaagcatctgtgtatttctgatggtcatctaggtggaggaatcattggtgatgaatttgcatttttctagctctatgcttgtaatattccacttcaattaaatatctatggtcctgattatacatttctattgtgtgagtttattgtctatsttcttattttatcttggagatcaccttaatatagaattggaatttaattgttaggagaataaaatcctctttctcctttcctgaaaccatgatttctcccaagtataaatgcagaatgtgaagcctccggtttgagaggtcataaatcagcagcaagtttctcagcagggtgtatattaaaatggaaggccttctattcttacagcaggtcactaaa

SEQ ID NO: 251653 - DNA, 591 bp, Homo sapiens
atttcactattaatctaatgagggttactttatatgtgacttgatgctttctctgtctgctatgattttattaattatgctatcctcatcttttcccttcttttctgcttcccaaaacacygaaaatataaatatttgttcacttagtagtgtcccataagtcctgtaggctttatttatttatcttttttctttttttttctgcttatattatttcaaaagccctgtcttcaacttcagaaattcttttttcttcttggtctagtctgttgttgaagctctcaatggtaatttttttattttagtcattggattcttcagctttaaggtttctgtcttgttctttttaatgatacccatctctttgtcgaatttctcattcaaatcatgaattgtctttctgaattcattgaattgcctatattctcttgtatctcagttttcttaagtttattgttttgaattctttttctgggatttcacacattttcttatcattgaggtctgttacttgagaattgctgtttttcattgacagtgtcttgtttccttgctttctcatgtttgatgtgtccctacactgatttctat

SEQ ID NO: 251654 - DNA, 555 bp, Homo sapiens
aggatatcactggggctgcaaaagcccccgccccaaaagagacttggaaatattacgctcttcatgaggaatgtggctgtgcctctcttctccccagacctcttccttcttaccagctgggttgctttctttcttggactctagacagtttctagcaaagatacaagccaytgaggaactgagataagaagcagaaaggctaggaccagaagtctcaagcagggttccaaggattacctctacagtcctgagcaaggccatgtttgcatgaaacgatgaacgatgggatgaggaaatgacaacatgcagtatttcatcatagtgtaatccatgaagctactgacacgtggcagggtgaagcatgaggcactagactacataggacctgtatgacatgagaactgatggaagcatatgagcatctggggcatctcagagccaaaggtaaaattaaaatccagccaatcactaaagactaggttcctatgcagactttgaatttttaaaatcctgaagttctttatcattggactacagcatggcatcatcccgtac

SEQ ID NO: 251655 - DNA, 555 bp, Homo sapiens
aggatatcactggggctgcaaaagcccccgccccaaaagagacttggaaatattacgctcttcatgaggaatgtggctgtgcctctcttctccccagacctcttccttcttaccagctgggttgctttctttcttggactctagacagtttctagcaaagatacaagccattgaggaactgagataagaagcagaaaggctaggaccagaagtctcaagcagggttccaaggattacctctacagtcctgagcaaggccatgtttgcatgaaacgatgaacgatgggatgaggaaatgacaacatgcagtatttcatcatagtgtaatccatgaagctactgacacgtggcagggtgaagcatgaggcactagactacatagsacctgtatgacatgagaactgatggaagcatatgagcatctggggcatctcagagccaaaggtaaaattaaaatccagccaatcactaaagactaggttcctatgcagactttgaatttttaaaatcctgaagttctttatcattggactacagcatggcatcatcccgtac

SEQ ID NO: 251656 - DNA, 606 bp, Homo sapiens
ctgacatacattgttcttactgaggaaagcattagacaaaatattttctcaatgaatcattagagtaatataactaagagaatattatatacatttagaagttttttttaatctaaagcatgagaaaatactgtatttgaaagttagaaaactgcatttagttatactaaatcaatctgactttcactcatcctcacaaaccccctttaccttcattttgaattagagagcttcttattgttatattatttataatggaactggtattcctggctggctaatgggcgagcacacattaattccaggttcaaaggaagacaaagaccctcttcagggttctttattgtttgtgcatctgagaaaatgcatttatagtgcagtgactctgtgtgcacactcccaaaggacagagaaatcatgcagaaacttcacatgcagagtttgcagaaagaaatgtcaactcatacctaacggccacggctgctgacataagaatgacaataattagactggtacatattagaagttgcaacygttcttagaagtaggtatttaattaatggcttgatttcatcatctactaagagatgggtctaaaaagtattt

SEQ ID NO: 251657 - DNA, 582 bp, Homo sapiens
ccttatttgcaatacaggcaagtttaggaaagaatgttaatataaagctggtttggcctgaatgccagggagagaaagtcacagtacacagtggggtgcatatgtgtgtgtgtgtgtgtgtgtgtatgtatgtatgtatcattaaaataacagcagcttctctccagagcaatgttcatacacaccattaaactaacatcctttcttgcaaaaagaacacccacatataggaamcatgactcctctatgagaaacataaaataaaaataaatttaatcaatagtttgtgctagtaaatgcctaaagataatgtttttgtgtggtcactttccttatttttttaacacaacatccattgacctatactgaatgttccatgttgtttgtacatactagatattgcagtagtaaaaagatcaaaactggggagaggcaaaggtatttttaaatttatttaagctttaatttattcagatatgtaaattttatttcagagctagaatggttcattttcaccaaagtgtactcattcattcattcatttattcaattataaactaaatacttattaggcactgttaa

SEQ ID NO: 251658 - DNA, 577 bp, Homo sapiens
tataatccatactagtagcataagcaagtttctcagtggtctaggctgagagagtctgtggcaccagtggtgtggctttgtaggattggggttgctgggctgtttctcaggttggaggcatatatatgcacacagtgtgctagctaacttggagtcactggggttggagctatggtactgttactcttgccacaggcacaagcatgcaattgcttgtctgacctagaattgtgcctgccaggagtggtccgtggaactatttctcaggtctacatgcaggtgcaaggctcttcagttggcctgggggtatgcccaccaggggcaacctgcaaggctgtttcttaggcactgatggagagtrcaggaccattgggtaggccacagccatgtctgcagggggcagggggcaggggcactgcagggctatttctcaggtcctgagcacggtcacatagcgactttgctggccaggggcagatcagctgctcagagactcaggtcctctcccatttaggggagggcatgtagcagtttggctggctcaagagtagagttgccctgggcaagattgctatac

SEQ ID NO: 251659 - DNA, 644 bp, Homo sapiens
tggttgctcattgacaaataccaaagcaatttctacatgcaatacaaataagtaactacarcgttagaaatgctgaaagcaaaattattggctttaaaatggtgtcagagacgtgaaatcactccaaattttttgatacaggacatcttatgagacaccacaaatagaatatcactgaagtgtcttgaaaatgaaactgtgattgcaaagcatcttatttgaaaataatgagtagagtgactttaaaaactttttgtggtcttgttctaaataaattaatctatgcagttaaaatactgaattaatttagctttagaaatgctaacagaaaaataaattttgtgatatttgatttgcaacagtttgaataatttcaaagaaaaatataccgtcaatatttcaggacatttttgaagaaacaacacaaaataaatgccacttatcctattgatttctaaaaagtgtcacagaaagatacaccttaataaatggcatcaatatgtaacagataagttgaaaaataccttaaatcaggtcactaagtaggcaataagtaataactttctaaaaatttaaaaacacagaactgatcaaatacagtcaataagactgtattttgtgtttattatcaacctaatgttgtg

SEQ ID NO: 251660 - DNA, 644 bp, Homo sapiens
tggttgctcattgacaaataccaaagcaatttctacatgcaatacaaataagtaactacagcgttagaaatgctgaaagcaaaattattggctttaaaatggtgtcagagacgtgaaatcactccaaattttttgatacaggacatcttatgagacaccacaaatagaatatcactgaagtgtcttgaaaatgaaactgtgattgcaaagcatcttatttgaaaataatgagtagagtgactttaaaaactttttgtggtcttgttctaaataaattaatctatgcagttaaaatactgaattaatttagctttagaaatgctaacagaaaaataaattttgtgatatttgatttgcaacagtttgaataatttcaaagaaaaatataccrtcaatatttcaggacatttttgaagaaacaacacaaaataaatgccacttatcctattgatttctaaaaagtgtcacagaaagatacaccttaataaatggcatcaatatgtaacagataagttgaaaaataccttaaatcaggtcactaagtaggcaataagtaataactttctaaaaatttaaaaacacagaactgatcaaatacagtcaataagactgtattttgtgtttattatcaacctaatgttgtg

SEQ ID NO: 251661 - DNA, 390 bp, Homo sapiens
tatccactagtatacttttcataacttataaaggctttgttactgttattaattctttccttattttgtatgtattgtatgataaacattttaattctataatccacttgcttttatcttctgtcatacctctgaaaactaaatcatggccagacaatattttataattcttaatttaaggaatattttccctcagcttagttgttataaattmttttaaaggtatttctaaaagtccacatctagtactattattacctttttctcaaccctcattttttcattctttaattctcttctgtgttaaatggctgttatgccccatgttctatatggtttcatattctgtgctattattatttcttagaataatattttctttcctctttt

SEQ ID NO: 251662 - DNA, 640 bp, Homo sapiens
ttcgcatagacttcgacatttgaagctcctgatttccacttccattgccattccctcatcaaattttttacatcttctttctatacaattgtctttgtttgtatctacttgttcacaaggtttctcttatagtctaattagtttaacagttcaagttttaaaaagctaaattgatttcacattaatctctgacccttcacccaagagagaaaaggaaagataataaggtaaaatgtttgcagttttatttgctaytatgaattttcttcacttgataatgcttgagtgtgatttctcatgactttttttttaaaagtagttacctatttatgcttttaagactttatttaaaaatattcaaaaaatattcaaaatattcaaaaataatgtattccagtatatcttcaagagactgtgtttttcaacatgtcaactcagcatacttttctatctatctttatattgtactatttcatatttcaatatccatgtttctgtcatttagctaatttttctaaggaactaaaacaatccaaaaaaactgtacagatataaaaattgatcattaaaaactgcttatatttatgatgtgattataattccatttctactgttgagtttttttcagttaataggttaa

SEQ ID NO: 251663 - DNA, 640 bp, Homo sapiens
ttcgcatagacttcgacatttgaagctcctgatttccacttccattgccattccctcatcaaattttttacatcttctttctatacaattgtctttgtttgtatctacttgttcacaaggtttctcttatagtctaattagtttaacagttcaagttttaaaaagctaaattgatttcacattaatctctgacccttcacccaagagagaaaaggaaagataataaggtaaaatgtttgcagttttatttgctattatgaattttcttcacttgataatgcttgagtgtgatttctcatgactttttttttaaaagtagttacctatttatgcttttaagactttatttaaaaatattcaaaaaatattcaaaatattcaaaaataatgtattccagyatatcttcaagagactgtgtttttcaacatgtcaactcagcatacttttctatctatctttatattgtactatttcatatttcaatatccatgtttctgtcatttagctaatttttctaaggaactaaaacaatccaaaaaaactgtacagatataaaaattgatcattaaaaactgcttatatttatgatgtgattataattccatttctactgttgagtttttttcagttaataggttaa

SEQ ID NO: 251664 - DNA, 595 bp, Homo sapiens
atctttcctatctttcaaagataaaaattataatattctttcaaaaagaagattcagtgattctgtacctttacagattcctcagcaatttcaaacagattttaaatactatttggcccaaagaaatattttgtactgttggcaccatgattcataacataagctaaatctgtaggtaatattgttaatttttcttttttatttttaggagctgatgaactgtggttgaaacagttattcgtaaaccaaggaaatgtgatatgcttgccagtgaggagaataaaaagctttycagtttattccagggcagctctattacaggcagttatgctacaagctttagtaacatttttctgagagcaggcaccacagggagacagaggagtgacagatggatagtggcagttacattttagcaccacagagtgagggcaattgttcacctttgaaggcacttgctcctgtggcattggcttgaatgtggtccccatgagaggacatcacctggctcaccttaggctgtgtaaattagaaacatactatctagcagatgagcaataaggatatgaacaaaacggtagcgatgttttaaaaa

SEQ ID NO: 251665 - DNA, 621 bp, Homo sapiens
ctttctttaaaaaataaacaaaatgataaagtgatgatataataaagtaattaggaattcttaggtaaatagcttatatggatttcccttaataaattattggcctttataataggagcttccttggcctttatacaaatttcagcaaactttaccagtgttcattaagctatagcatcaagcaactgagttcaactttaaagcttccttgttttggatactcaacaatatttgcatcagttacaaacttggatgaaattaaatagctaaaagaatcatgtgactgaatgtatcataacataatctagcatggcacagattctactttacactattaatatatttgataatttgatctaatagaaactaacttttttttcttttcactggtgaatcttaattaaagtaaaatcattacttgcagctaaagttctgattctgcattttattcaaattatgatcatattcctctcaayagaattcagtgagctttttgcaaaaaccattttataggcacatataaaatctacaatatggcaagctaaccttataccaaaatatatgtttctcaatactgcttgaaagaattgtacagtcattataaatgttaatagcccctat

SEQ ID NO: 251666 - DNA, 685 bp, Homo sapiens
tacatccactatattatatgacagagtatgtatttgtttctactcatgattcataccactaattattattagatattattcattctcattatggtaagaatattacaaacaggactacccagaaaaagatttgctgcatgcgaatacttgtcaaagtgaacaccttyttgtggaactcaaggaagatcaaggacttgatcattttaaagtcctaagatgtgctctacacaaatattaaaagtaatctaaactcctaatgaagctagttatcacatgaatttggatactatggggaaaagtatattctggacatcattattactgacacttctttaggtaaaatagggagaatacatgtaacattacagttaacatgttcctgttggggaagtggctttggacatatttttccactaaaacaaaccctcagtaatttctttttagaggattccaattgtagagaaaacaatatttgtactttattttcactataatagtaaaactagtaaaaaccaacccaattaaatagaataaaaatgatatattctgctgaattatcccttcaggaaaaaaatcactcaattactgtatactttttcttgccacatctttaaacatcccaccccctatccgtatttgccaatacccactcttgattttctggtcatgaatttctcaaaaggtg

SEQ ID NO: 251667 - DNA, 592 bp, Homo sapiens
tatattttgtccggattgtataaagagctcctataactcaataataaaaagaaaacagacacaataaaaataggtgcatttctttacagaaatttcaaagatgaatatacacaaatggccaagaacataatgagataatacttcacattcaatagaaggtacaaaattgggaaaaagactgaaaatatcaaatgwcggtgataatgtggaatagctagaactttaatacaatgatgggggagtgaaacacacacaaacacacacacacacacacacacacgtattaaatgaccaaacattatcacccctgaaaataaaaatattttccaagagaaatgaatatcttttttccacaaaagacttgcaaagttctaagtttatctataaaagcctcaaactgaaaataaccccaactatccatcaacaagaaaataaatgatcaagctgaggtatatttattcaatagaataccaaacaatatttttttggcaaatgaactgctaaaaaccacaacattgagaacactcaaaacatagatctcaaacaacagatactgcatacatcaatttttatggagctcaagaacaggtaa

SEQ ID NO: 251668 - DNA, 583 bp, Homo sapiens
atgttaaaccatccctggtatgaaacccacttgatctcagtggattatctttttgatatgtttttggagtcggttagctagtattttgttaagaacttttgcatctatattcatcagggatactggtctgtagttttttttgttttgttttgttttgttttttggttatgtcatttcttggttttggtcttagggtgatactagcttcatagaatgatttagggaggattmtttctttctctatcttgtggaatagtatcaataggattggtaccaagtcatctttgaatgcccagtagaattcagctgtgaatccatctggtccccaaatttttttttttggtaatttttttattaccttttcaatctcactgcttgttattggtatgttcagggtatctaattcttcctgatataagttaggagggttgtatctttccaggaatttattcatctcttgtaggttttctagtttatgtgtgcaaatatgttcacagtagccttgaattatcttttgtatttctatggtgttagttttaatatctcctgtttcatttctaattgatcttatttggattttctc

SEQ ID NO: 251669 - DNA, 583 bp, Homo sapiens
atgttaaaccatccctggtatgaaacccacttgatctcagtggattatctttttgatatgtttttggagtcggttagctagtattttgttaagaacttttgcatctatattcatcagggatactggtctgtagttttttttgttttgttttgttttgttttttggttatgtcatttcttggttttggtcttagggtgatactagcttcatagaatgatttagggaggattatttctttctctatcttgtggaatagtatcaataggattggtaccaagtcatctttgaatgcccagtagaattcagctgtgaatccatctggtccccaaatttttttttttggtaatttttktattaccttttcaatctcactgcttgttattggtatgttcagggtatctaattcttcctgatataagttaggagggttgtatctttccaggaatttattcatctcttgtaggttttctagtttatgtgtgcaaatatgttcacagtagccttgaattatcttttgtatttctatggtgttagttttaatatctcctgtttcatttctaattgatcttatttggattttctc

SEQ ID NO: 251670 - DNA, 577 bp, Homo sapiens
ggatagcccacccaaatatatttaaccttttgtttctttgacaaagaagcaaagtcaatacaatggagagaagacagctttttcaacaaatggtgctgaaacaattagacattgacatgataaaaaaataataatccagacacaaactttgcatgattcacaaaacttaactcaaaatagattatagacctaaacagaaaatgataaaatgcctaaaaggtaacatatcttaaaaatctagtttatcttaggtttagattttaaatacaacrtcaaaggaatcatcaataaaataattaatatgttggacttcattaaaattaaaaccctctgttctgtgaaagaaactgtcaagagaatgaaaagacaagccacaaactgagagaaaatattttcaaaaagagatgtgataaagaactgttatccacaatatagaaagaactcttaaaactcaagagtaagaaaatgaacctgattaaaaacctgagcaaaagttctgaacagacaccttaccatagaagataaacatgtgtaaattgctcaacatcatataatatcagggaattgcaaattaaaa

SEQ ID NO: 251671 - DNA, 535 bp, Homo sapiens
ctgccactggtatcacatagatgaccatcttagtgaatttttctttgatccaaataagcagggatcctttgtattatattgatttatgtggagtgatttcgttgatgtgtttcgctattttccttttaaaagtacatattgaatcttcttgtagatgatcctatgcaataaatgttttcagtgcagctgttcaaaagtcatgtctgatctggaatgagagacaagtaggggggtggcaacatccttcaagcttcrcattcatgggaaggaagagccttttctgagacagaatgctaccaaggtcatgagtgaaacatcccatgggacccatttaactttatacagagaaatttactctagagcttcagattgtactaagtttgaccttctcccacactgactataaaaagtgtgactagttgtagatattttcattcaaaattctttccagtgatgaaagtctgaaatttggcttatcaccagctcaatgaaagcaattcaaacagcggagtaaaatggtagcattttattcata

SEQ ID NO: 251672 - DNA, 522 bp, Homo sapiens
ggtatttatctctatgttttacacttattcacttaccttaaggtcctctaggttcattcatgttagcacaaatggcaggattttgctctttttaagggctgaatagtactccattggtatatataccacattttcgttatctattcctctgttaatggacagttatattatttctatatcttagctattgtgaataatggtacaatgaacttgggactgcaagcatctctttgacatcctgatttcaattcctttgkgtatatgcccagaggagagattgctgaattatgtaattctgtctttatatttggtgattttttttctttaagtaccatagagatctttttttattcagaaattgtttaatttcaaaaatattacgtgtagattcttgtcctgatagtcatattcacttaatcctcataacacctttcatcatgcttgcgtatttccttctaacttgtaggggaaaaagtatctaaaattcatcaccagtaattaattcaaattatgtactgtgct

SEQ ID NO: 251673 - DNA, 588 bp, Homo sapiens
ggttggttgggccagctctcaaccaaactaccaagcatcaatacccctcttcagtcttctacyatctttcaactctcatctcttcaaatagtggtggtccctcctgtctactgagccctttaagcaggcattcctatatttcatcaaaacctaaaaaagaagtggaataatctgtcattggcttgaaataaaatgtcttggtgtgaacacgtcacttaccttcttaactctcccaagtatattttatattttaaacttatttcttatattgaatgaaaggaaggcttttctgttgttaataaaatgttaggcattgggaggcagatggcatatttggaggggacaggagaagaggcaaaaagcttcccggggtccaggcatggtggctcacacctgaaatcccagcactttgggaagccaaggtgggaggatcacttgagtccaggagtttgagaccagcctgggcaacatagcaagatgtctctacaaaaattaaaaattaaaaaattagctggtcatggtggcatgcatgtgtagtcccagctactcaggaggctgaggcaggaggatcatttgagcccaggagtt

SEQ ID NO: 251674 - DNA, 496 bp, Homo sapiens
tgggaggcagatggcatatttggaggggacaggagaagaggcaaaaagcttcccggggtccaggcatggtggctcacacctgaaatcccagcactttgggaagccaaggtgggaggatcacttgagtccaggagtttgagaccagcctgggcaacatagcaagatgtctctacaaaaattaaaaattaaaaaattagctggtcatggtggcatgcaygtgtagtcccagctactcaggaggctgaggcaggaggatcatttgagcccaggagtttgaggttatagtgagctatgattgcaccactgcactccagccctcagcctgggtgacagaacaagacccttttattttctaaaaggaaaaaaaaaaagcaagcttcccaggaacccaggaagtgttacttgtccaaataataccttagtgtatacattctgacccaaagttttaaatgaaacttaaaaagtgcaatgtgaagttgtgtcagttaagattact

SEQ ID NO: 251675 - DNA, 631 bp, Homo sapiens
cagtgccagtacaataaggcaaggaaaaaaatgtgtgtgtgtgtrtatatatatgtgtgtgtgtgtgtatgtgtgtgtgtgtgtgtatgatgtttccaaataaataatcattcctaaatgacatgaatgcatatgtagaaatcccaaataatctacaaatattataataaattaataaatttaatagaatagctgcataaaacattagtaaataaacaaataaaaaccaaatcacttttatttctgtacaccagaagcaaacaactagaaaataaaatttttaaattaccatttataatagcatgaaaacattaatatcctggaataaatctaaggagatgtatgcaaggtatatacactaaaaattatgtaatgctcaataaattaaataatattttaataaataaaaaatacatagcattcatgggatagattacccaacatagtaaagatgtaattgctttcttaatcagtccatggattcaatgaaattttaatcaaaagttcagtagtttatgtgcagtatacaaagcaaattctaaagtttacagaaaaatgaaaagggccaagagaaactgagacagtcttgaaaataatgtatctggatgccttgtgtactaccagatgttga

SEQ ID NO: 251676 - DNA, 644 bp, Homo sapiens
aactctggcttcatgttgtcactaagtttctaatcttttataaaactatttaaaagtatagaatatatagccaatttaaagaatatttaacaaatacattgttgcaaaaatagcatgcgcatagcttaattggtagattgatagtcttcagtaatatctcaaattaggtcaaaatagttaacaccctaccacgattaggaggagaaaatagaaatagtgcaaacttggtaggttgttgactatattaaattaaatctcactctgacttctgttagaaaagtccttcataattgaaagataatttaaaacaaattttgaaattagttgaagattataactctatctaaagttgactaaaatgttagacattttgaaaaatgtctaatactcattatatcatacatttttattattcactgaataatatttagtaacaggaataatgtttttcaaaccagtgagaataaatgagaaccatatattctaagcaattaaaattaaccacatattattttagtgctattaatggtataataatatacgggtatactatactcagcagttttactctgtataagcattttartgtatttttacatggtaagaatatttagttttgattaacaattttaataatataaact

SEQ ID NO: 251677 - DNA, 558 bp, Homo sapiens
  misc_feature (1)...(558): n = A,T,C or G
ttctatttcttcctgatttaatctaggagggttctatgtttccaggaatttatctttctcctctaacttttctagtttgtatgcgtaaaggtgttcatagtagccttgaattatcttttgtatttctgtggtattggttgtaatatctcctatttcatttctaatttagcttatttggatcttctctttcttggttaatcttgatgatggtctattgattttgtttatcttttcaaagaaccagctttttgttttatttatttatttattttttgtttcaatttcatttggttctgctttcatctttgttacttttttttttttttctgctaggtttgggtttggtttgttcttgtttctctagctccttgaggtgtcagcttaratttttctattcgtgctctttcagactttttgatgtaggcatataatactatgannnnnnnnnnnnnnnnnnnnnnnnnnnnnnnnnnnnnnnnnnnnnnnnnnnnnnnnnnnnnnnnnnnnnnnnnnnnnnnnnnnnnnnnnnnnnnnnnnnnttttcatctgatttcattg

SEQ ID NO: 251678 - DNA, 558 bp, Homo sapiens
  misc_feature (1)...(558): n = A,T,C or G
ttctatttcttcctgatttaatctaggagggttctatgtttccaggaatttatctttctcctctaacttttctagtttgtatgcgtaaaggtgttcatagtagccttgaattatcttttgtatttctgtggtattggttgtaatatctcctatttcatttctaatttagcttatttggatcttctctttcttggttaatcttgatgatggtctattgattttgtttatcttttcaaagaaccagctttttgttttatttatttatttattttttgtttcaatttcatttggttctgctttcatctttgttacttttttttttttttctgctaggtttgggtttggtttgttcttgtttctctagctccttgaggtgtcagcttagatttttctattcgtgctctttcaractttttgatgtaggcatataatactatgannnnnnnnnnnnnnnnnnnnnnnnnnnnnnnnnnnnnnnnnnnnnnnnnnnnnnnnnnnnnnnnnnnnnnnnnnnnnnnnnnnnnnnnnnnnnnnnnnnnttttcatctgatttcattg

SEQ ID NO: 251679 - DNA, 560 bp, Homo sapiens
tttgcccccctgaattctgctcaggaaaattcatgctcagttgaaatcatttcatagttcagctagaagctttctataccctttgtgcatccctgaatctgctggckgccttccccaaggatccctgtgagataaagccagagatggcttccctgggctggaactgggaccaggagtgcctacagggctcttccagctgctgcttctacttttatattttgctcagcttcctacatctgtttcagctgtagataaggttaaatccttctccagtcgtctggatttttggcttccccagtagggatgtgcgttaagggcagattttcccctgtcactctttgggaattcatagttttccagctttctcatggagtttgcagtggcaaactgcttctttcaaagggtctgtaaattctttttttttcctggtatgtttctgtggtacttctcagagcaaaaggtcaacgtgtgtcttcccatgctgttcagtctaagtgggagctgcacatgattctgtcacctatctgccatttttccttcaaacaatttttaacacaagt

SEQ ID NO: 251680 - DNA, 560 bp, Homo sapiens
tttgcccccctgaattctgctcaggaaaattcatgctcagttgaaatcatttcatagttcagctagaagctttctataccctttgtgcatccctgaatctgctggctgccttccccaaggatccctgtgagataaagccagagatggcttccctgggctggaactgggaccaggagtgcctacagggctcttccagctgctgcttctacttttatattttgctcagcttcctacatctgtttcagctgtagataaggttaaatccttctccagtcgtctggattttyggcttccccagtagggatgtgcgttaagggcagattttcccctgtcactctttgggaattcatagttttccagctttctcatggagtttgcagtggcaaactgcttctttcaaagggtctgtaaattctttttttttcctggtatgtttctgtggtacttctcagagcaaaaggtcaacgtgtgtcttcccatgctgttcagtctaagtgggagctgcacatgattctgtcacctatctgccatttttccttcaaacaatttttaacacaagt

SEQ ID NO: 251681 - DNA, 538 bp, Homo sapiens
tttaaagctagcatttctgtacaaccttcaagaaccaattcaaaagccacaccctccaaattacccattcttagcagagaagtttgcatatatatatakagagagagagagagagggagagagagagaaagagagagcactttctatgagacaggcactgttctcagcacttaacaaatagtcatttaactctatgaggtggattctatgacaaataaggaaattgaggcacagagagactaaatgattttcccaaggccctgttctcagtagatgacagactgggatttgtagccaggtatctggttctagaatccacactgtttatactatgaaactcccaccacatcacattagccaaagattgtccctgctccaccctagaacacattcctcatatgactcttaacaccagtcctagatactgatagatagaaagaaaattaatatacatattgttagctacttaattgaatcaataaattctgttaatatgtttgtttaaaagaaagtatttacatttttttcgcatggccag

SEQ ID NO: 251682 - DNA, 566 bp, Homo sapiens
ggaagtggaatttatcgccatggatcattcttccagaaattttgttctgaaagtgaatcaatacatgtggcagtagccacaggggtaataggtgaataagagagttttttgtattgttttaagatgaaagttactagagaatttatgcygagggaatgattccttgaaaagggagtattgtgaaatctgggaaggcaatctagagtaccggtgcaagagctggccttggagaaaaaacaaagatagtttagctgttggaagaagacaaaaggttgaaagtgagggcatagcccagtggttcataggggagagatgtctgatgtgtctgagtgtgtaatgtcattttagaaagtgagagtgtgaagatactaagaagtatagtaggattgttgacggaggatcatgtacccatttgagatttgagtcttgagtcttgagtctcattgaaatgaagcctgttttcctctaggctgtcatgctgcactggattggacatagagtaggtagaagtaggggagcatcggacaagagtgatggacaatggaaaggtcgataattgacaatcc

SEQ ID NO: 251683 - DNA, 573 bp, Homo sapiens
aaaattttcctttcatatctggtatcacgtttttaatttctttaagttggacttcacctttctatgatgcctccttatattagcttaataattgaccttctgaattctttttctggtaattcagagatttttatcttagtttggatccactgctggtgagctggtatgatctttcaggggtgttaaagaacagtgtttaagaattgtttttctggttccttcttatttgagtagactatgtcagaggtaagatctgggatttaaggtattctgttcagattcttttgtcccacggggtgctccattgaagtggtgttcttctccttcccccaggagtggggtttcctgagagccaaactgtagtgattgtttttgtcttttggatctagccacctagcagagtttccaggctctaggstggtactgggaagtgtctgcagagtgctgtaatccatcttcaggtcttgcagtggtagataccagcacccaatctggtggaggtagcaggggagtgaggtgaactctgtgagggtctttggttgtgtttttgtttagtgtgctcattttgtgttg

SEQ ID NO: 251684 - DNA, 511 bp, Homo sapiens
tctagtaaacttggaggtcagtagctgttttcttgctggttgatctggtaccatgaacacaagacttacattttatgtttaagtgatgcaaattactgtggttgaaagactgaaagcaaaagtgaaaggaaatgggctaggaattgagaactttggttttgatgttaatctggcctaataatcatgtccagtattggtggtattgggraagatttctgattttggtgatggcgaactaggtaaatttgatcaaatcccctcctgaggaaaatacaaaggacccagataagatattaaaaatatatactcataaaaccatcagcaaactcacaatataggttggaatgaattactgagttgaggcctgaaaaagattattgatctagagagataagccctgcatttgagactgttttgttgcattttgaagcaatagtcagagttcagggccaaccagtggtgagactctggtcattccacctcttgtcttttgggataagacaccaaaggg

SEQ ID NO: 251685 - DNA, 466 bp, Homo sapiens
taaatagcatcctttgcattactcctcagggctggtccttgggaagtctgagaataatgcataatttttctttgctttcttccctgtattttctgggcctgcctaactatctctgtgagtccttttcttgctccatgtgcttactatcctgtctgcaggccttgttctttggcaaggctaccatttatggagctctcaccacattcctggaactgtgccagactcattatctggagcattttattaacgctcacaagtccctgtcttaggtaccacaaatatattcattttatagatgargaaattgagtcccagggagcttaatgtagttagtgttacgtactgatgctacaatttgaaaccaacagtctgaattttagctggcaccttaacctcttggttatgctggctattattattctttaactagactcatcataaaataactaggaagtgcttgttaaaa

SEQ ID NO: 251686 - DNA, 466 bp, Homo sapiens
tttaaagcacaaccatctcttaggcttccagtctattattggtccttcacaatcagcatgattttattatgtatttagcataccatttcataaatcctttgaggtgtacagtcctcccacaatgacgcgcyactcccagccctcatatatacttataattccacagaaacaaaacacagggaagagccttggcttctcaggatctgatgatgcttacctatggattcctctgtactaagtgtcatgtcttggctgtttcagggtctctaaaagatagcacctaagtattagaaatagtaaggctaaaaaatcaaagaggcaggttggcaagtttctcatataaggttcacataagcctctctaaatgaaagtgcctcctccacttgattggcacaatggtctgggagcttccagagatgggcttgctgttgaagttgatactgtattctaccactatgacattgtc

SEQ ID NO: 251687 - DNA, 595 bp, Homo sapiens
aaacaatgtacagcagaatcaataataagaaagctagccatttaggtaattgttacaaccattttcttaatatttttgtgaatggtgacaaatgatttttctgtatgtctgtacataaagacttccttgatttcatagagattagagaagttaggagataattgatttattttgacttttaatttattcatcgctgcaatcaaaacacaactttttgctaaaatcctttcagacaaagtaaattcactcattgaaaccaatactgcagatagttttaaaatccccaaatcctcaaaatagctgatttgctgtcattttatttcatttttcagtcgcctgcttgttrcatcttcccattatttcttcctcttctcattgcatgaggctaacacaatatggatttgatttctctaagactctaagaggatcctaaacacgaattctcaaagtgaataggatggcatgtgctaactaattaagtactgtttctagatatttgtgagggagcctaaatctagcctgctaaggaattagagtgtctcactggatatgtggtagccatcccctttcaatgtaacttgtcaaatgaagctac

SEQ ID NO: 251688 - DNA, 515 bp, Homo sapiens
cacctctctcctgtccagtattcttccacttaaactgtatccactttgccattcccagactcccagctccatctctccaactcaaggatacctccagcctccttctggtttctctttcctgtgctgaaacttagaaactttctccagaaagtaagcttgggcaatcattggggctaacctcrtagtttttccctctctcagagatcaattcctgcatcaatggtgtccagtgtctgaaagctgatatttcttagactataagaatctgggttgcttttttttttcagttgtttcagtggaagggtaaattcagttcctgttactttatctttgtcagcatcagaagtctgccaagattcttatatgtatttatgctgttctagtcttatgaacttctgctacctattttgctcccaggaatagtagcgtataagttgggaatatgtttcccttcccctcccaccaaaaccccaaataatgaacccccaaacaaaaaacaaactcagaaagcactc

SEQ ID NO: 251689 - DNA, 642 bp, Homo sapiens
ttttgtttcaatttgtgctgacttcattgttggatataactttctccactgcaggaatatcaccaggctaattactaggaaatctctctcttttttttttggtatatggagtaatatgtatggatgaaaggaccttaaaattggaggatttttcaatctaaaattagatgctcatacragagaacctctttcctactatagactcccttctccttcccctaatccccatcctgttcttagcagatggtgactgggcttatgctaaaaacttccagggacagagactttgctacttgtacacaggaagactattccattttgacacaactcaaattactagaaagttcaaccttatgagacaatttctttaattttgaaaatcatatctttggccatacttctgttctttgtagtaggaaaaatttatgttctctcttctgtatagtggtatttaaaatatttaaaaagattttcagaaatgctctacacctcaaagattttttattttctagggaaaaagtttctaaatgatctcttaatagttcctttaataatttgatttccaactctcttactgtctttctcactttctctgaatgattgatagtgtttagaggcccctctatgttatcaataactgat

SEQ ID NO: 251690 - DNA, 569 bp, Homo sapiens
acactatgctattggaagtatgctatgtttaaaaaagattcattatggaatttatggccagcaccagtgaaataattacaatgcaggcttctgttgttctggaaaaagaccaagccatatgcagtacagaatgacatactttctgagaaacagcccctggagtgccactgagtcctggtagaatacttaatcatggttaccaagtgaccatgcatccctaatttcttattataatctgggttttgccagacctgccaaatcataaggccagagaagccagctgtggcccgttgcacaatagaagtagtatatccagaattaagactttagagatcaaaatgatatacccaggatcatgtaagtagggatgttttaacaatggaaacaggcacaaatgtatgatattccaaggaatatggaatccaagggattcaagtgggtccattttgttrctttcttccccagttgtaattgtgaatacacagatgcagcaaccttgtcctaatgagagtctgattaccagagtctcagacctttcagaaatgagggtttgggtagtattatcagat

SEQ ID NO: 251691 - DNA, 440 bp, Homo sapiens
gctcattgttctcatgcgcttggaaattttcatttccaggttcatcttgtgtagaatttatgtgtatgtttatgtacacatgtatgtgtttttccctcctttttccctgcacatatctctatgtttgtatgttacaactgcctttgcccagtgtgctgaaatcctcagcttggaatcagaccttattttggtggcatgggtgtgtgatcctgaagcattatgagagtcatttcctaagtcagcaggtttgcttgacccaagtttggaatcttaactgttgatactctctctagcatggatggacctttttataaagactttggccatggcaaggagccccggtcaccactggattcatgttacaaaactcaccctgatgtcyaaaatgtgtttggggtttatggtttctaatcaaccacctagaaattgatcacctacat

SEQ ID NO: 251692 - DNA, 547 bp, Homo sapiens
gcacctagcactgagtggttgcttaggaaatgtttgtaaaatgaaggaattcacttctttgttccccattcaacaaacctttcccgagtctaggcccaacagcttaaatgggctggaaggccaatgaggttcgaaactcggaggcagccagttgcggtggctcacacctgtcatcccagcatttttagaggccaaggagggaggatcccttgaggccaggagtttgagaccagcctgggcaacaaagtgagacccccgtctctacaaaaagaaagaaacccagaggagatcacacaggtgagagtgctttataaaatttaaaaatgaaaattgttctagagaaataataatgcaacagaggccagaaccccaggacctcagcttccatgaggctgtggggccaagggagaatccaggacctaaggctatgggccaggcactggaaccctaggcaggcccccgctttccaccaccagggaccacattcggcctcggtccccyggaggtgcccaggggcactcacctaagctcgtagaggcagacagca

SEQ ID NO: 251693 - DNA, 633 bp, Homo sapiens
agaccagcctgggcaacaaagtgagacccccgtctctacaaaaagaaagaaacccagaggagatcacacaggtgagagtgctttataaaatttaaaaatgaaaattgttctagagaaataataatgcaacagaggccagaaccccaggacctcagcttccatgaggctgtggggccaagggagaatccaggacctaaggctatgggccaggcactggaaccctaggcaggcccccgctttccaccaccagggaccacattcggcctcggtcccctggaggtgcccaggggcactcacctaagctcgtagaggcagacagcagaccgtgacagcccgctacctctggaggtatacaggcaccatgtgcccrccaaccacgttgccctgacaattccctgtttcttaactaatatttgagttacatgacaagatggtctgcatttattgtccaatttgtttcttttagttattggttacacaactcttatatgctcctgtctctttacatgcctagtaattttaaatatcaagtattatacatttaaaaaaagtagaagttccagttgatgttattacccaccagggaatttcaactcttcctttcactgggcagatagggtgtggagtctatca

SEQ ID NO: 251694 - DNA, 570 bp, Homo sapiens
ccgtgacagcccgctacctctggaggtatacaggcaccatgtgcccgccaaccacgttgccctgacaattccctgtttcttaactaatatttgagttacatgacaagatggtctgcatttattgtccaatttgtttcttttagttattggttacacaactcttatatgctcctgtctctttacatgcctagtaattttaaatatcaagtattatacatttaaaaaaagtagaagttccagttgatgttattacccacsagggaatttcaactcttcctttcactgggcagatagggtgtggagtctatcacctggactgtgatgggttgaggctgggttgcagtatatttctagttcgcccttgttcttagggcttggtcctccagggtttttcatcaaagagtctttgggatttcttctcagtggtgaaacatggtaagaatttccactctgattttgagacctttttttaaaagcaactttattgagaaataatttacaaacgattacattcacctattttgagtgtacaatggtttttagtgtatttacagagttgtgctgcagcca

SEQ ID NO: 251695 - DNA, 606 bp, Homo sapiens
actggcggcaagcacagtgttgcctcagtatctgggagggtctgcatgcaccctttggtagttgaagttatgggcttgctcccctagggcaattttcccataccagtgtrgcgcccccagaggaaggtcatatatgagtcaaactccgccagtttgctccttacagacatgtgcatgcctggacatgtcccagaggaaggtcaacgtctgccattttaagttcatatcgggaagttgttgctcacaagttcaaggtgtctcttgtttgttaggaaattttcccctccctgtcgtctgctacctgaccattgcttggtagtcacccttcagcccccgggacattctttggggccctatcctgaccggctcatatctgcctatctacctactctaacagctggtctgtcccccagcagtggaacgctacctgtgttcttcatttgtatcctttagcctatgtccaagacaacctatgccccaggaagacagtggcagaactttagctcacctttcgaaggttccttctctgaaatgtattccctttagtccttgtggcttctacagtcctcttgtgccttaaaaacgtgatttttaaatttttctgac

SEQ ID NO: 251696 - DNA, 606 bp, Homo sapiens
actggcggcaagcacagtgttgcctcagtatctgggagggtctgcatgcaccctttggtagttgaagttatgggcttgctcccctagggcaattttcccataccagtgtagcgcccccagaggaaggtcatatatgagtcaaactccgccagtttgctccttacagacatgtgcatgcctggacatgtcccagaggaaggtcaacgtctgccattttaagttcatatcgggaagttgttgctcacaagttcaaggtgtctcttgtttgttaggaaattttcccctccctgtcgtctgctacctgaccattgcttggtagtcacccttcagcccccgggacattctttggggccctatcctgaccggctcatatctgcctatctacctactctaacagctggtctgtcccccagcagtggaacgctacctgtgttcttsatttgtatcctttagcctatgtccaagacaacctatgccccaggaagacagtggcagaactttagctcacctttcgaaggttccttctctgaaatgtattccctttagtccttgtggcttctacagtcctcttgtgccttaaaaacgtgatttttaaatttttctgac

SEQ ID NO: 251697 - DNA, 643 bp, Homo sapiens
agacctatgctagcatctcaatcaggccactcatgtgcttggaaaagttatttatcttcttagaactttacctataaaatggttaatacatagatcaaataaaatacagaatatatgaaaaaagatatttttcttggtatggcaatattaaagacaaatagataatgtctcacattattggattaatggacaagttttactggcaaacttaaccagcaaaaggtcagcagaggaagtatgtgggggtgagacaagggagytagtaggtttgctctagaagaaccctccctaccctcctttaactctcccatccccactctgcactttcatgagaacaatcctgtatgcaggtaatttactactggggcttaagtgccccactggtacatgtcaacatgtctgagagtaatacttgtcacccttggaagaagttaaatgagggtttcttgtgggaagataaattttccctgtcttgatcagtgtgttaccagagaatctgagcctctgtgatcattcaccagacagtcttgctggtttctttacatgatgtcaccccctgacacaacctgagatggaaatcaattggatttttaatggcatcttcagtttttgttataaatgaaagtacagggctgaaatagta

SEQ ID NO: 251698 - DNA, 618 bp, Homo sapiens
ctgtatgcaggtaatttactactggggcttaagtgccccactggtacatgtcaacatgtctgagagtaatacttgtcacccttggaagaagttaaatgagggtttcttgtgggaagataaattttccctgtcttgatcagtgtgttaccagagaatctgagcctctgtgatcattcaccagacagtcttgctggtttctttacatgatgtcaccccctgacacaacctgagatggaaatcaattggatttttaatggcatcttcagtttttgttataaatgaaagtacagggctgaaatagtagtatgaggccaatcatgaatacttgcaaagtctcccacaatcacccagttgtggtatccatgctgagatgtgaaaaacaaattccaaagcttagatgaaacagtagccaggaaccagattgtgtccaagaaaaaggcatgatatatytgtctactcctcagtgaggaaaagagatctggggtatacaaacatggtgctcccccggaacctgttgaaaattgaccctctgcattcattttgcattgccaccatgaatgtggaagtgcgggagcacaactgttggaagcccagccagcagggattgagactgctgcc

SEQ ID NO: 251699 - DNA, 616 bp, Homo sapiens
ggaacacactttcagtaagaagtactggtaaccatgtaatctgattgcattggcacagatttaggaaaggtagcaaagccataaggtgggtgtaagaaaatggatgaggaataagagtttggactagggccagcattcaagaatttggagcaggcaggcagtgtgattcttgatatacattgcttgcctcagcctagatctgaaaaagttttcttgattgggtttttagcaactgtgtgctattatccaagttctagagattttgttttagtaggtgtrgggtggaatttgagaataaatattttttaaaagctctccaaatgattttgatgaccaccaggtttggggaccactaccaggagatctcttattgttgtaacaaatgtcctcatttcctgaaggtggtatcattaccccaattcaagacctttcattgtctggcaggtcaatggaaagtttgaagtgtggttgttgtattgcactgctacatgtgttacagtaaccgatctcaagggaattggacatccccatcacctgcctcccaaacacgctgccagaggactagtgccagagctgctttgctcttacctgaacttgccctttgaccacagttgac

SEQ ID NO: 251700 - DNA, 610 bp, Homo sapiens
ttcatagtttaatgaaacccagttctgaaggaactttttattgtatttttttttttccaatttgctctcacctaggtttttgaatttgcaagattataaaacttgtccaactgattacttttctgaagagccatcgactctacccagcttcttgggtgcctcttgtcttttaaataattatacaaacaggtgttttgaagaggaaaccatagttttcttacagctgaaaagccaactttcagattgcaaacgagtacatgttaaaatatgtcccgtattccaggtaaaatcataatgctgttgtgattaatttccttcactttgaaatggagaagaactctattttacttctcaatatatccttcccagatgaatattgatgtgtataaatgaagtgatatggtctgtaccatgtagcttagcagaaaactagatattgcattgggttgttggcaatggttttacacaggtatgatgtctcattcatgttacagtgaaaagtccatgggytctctttttaaatttattttaaaataatgttgaacctagagaaaagtctcaagaataatacaaagaactccgtatatattcactcagattcatccattat

SEQ ID NO: 251701 - DNA, 482 bp, Homo sapiens
aataacccataagaagacataacaaaaaaatctaactgtgaatggtgggggcaggtgagaaagaaacaaagggacaggagagatgttgatactctgttttctagcaaaagacatgatttcaggatgaggagaaattacttaatggctaccgtgtacattattcaggtgataaattaaagccttgacttcaccactacttaacgtatccatgtaacaatattacacttgcaccccataattttgtttttttttwtaaaaaaagaaatgttaaaagtaaaagaatagaaaactatcatgcaaatagagatatgtatagttaacttttaaaaaaaattatcatggagatgagttattacataattatacaatgttcaattcaccgggaaaatgtagcactttaaaacatgtatgcatcaaataaagtaaccttaatataaataaagcaaaagttgataacttgtagggggaatttagtaaatcat

SEQ ID NO: 251702 - DNA, 482 bp, Homo sapiens
aataacccataagaagacataacaaaaaaatctaactgtgaatggtgggggcaggtgagaaagaaacaaagggacaggagagatgttgatactctgttttctagcaaaagacatgatttcaggatgaggagaaattacttaatggctaccgtgtacattattcaggtgataaattaaagccttgacttcaccactacttaacgtatccatgtaacaatattacacttgcaccccataattttgttttttttttwaaaaaaagaaatgttaaaagtaaaagaatagaaaactatcatgcaaatagagatatgtatagttaacttttaaaaaaaattatcatggagatgagttattacataattatacaatgttcaattcaccgggaaaatgtagcactttaaaacatgtatgcatcaaataaagtaaccttaatataaataaagcaaaagttgataacttgtagggggaatttagtaaatcat

SEQ ID NO: 251703 - DNA, 689 bp, Homo sapiens
gtatgcatcaaataaagtaaccttaatataaataaagcaaaagttgataacttgtagggggaatttagtaaatcatctttatagtagatgatttttatatatctcaaaactgttgacaggtgatgcagaaaacaatttagaagagttttagatggtttgaacacaaccaaagtatcatcatgaacatattcttatgtgactcacagtccagaaagtaatcttgatgagatcctggagttcatttagggcatttgcataccaatgctgttgatagcaatcagagatcttgtgattctcccttccctgatatgttaaagtacagttccctacatagccactcaaaaggaaagggaggaactaagccctcatggccatttgacacaaaaggtttgtcccttctcacatatatagaagtgtgcactcagctaaagtaaagatttttccaaaccatgcatacaacatttacaaaatttgaccatctactgaaacatatcagtccccaacaaattttgatgaatagatgacataaaaagtgtgttctgcagccataatacatttcagataggagctaataaaaaaatgataaattatgratacctgcatattagaaaatcttttaaaatatatttttaaatacctcttaggtcaagaaagacaccataataaaaaattttaagtacttacaaatg

SEQ ID NO: 251704 - DNA, 525 bp, Homo sapiens
aaaggaaaatatcttgaatagtcctaaggaacccaatagagggtatatttattcccagaattatttgtttcattttgagtggaaaactcatttggtctcatccttccattctgcctcatctacacaaattggcatcctttgcaaarcctatattcttctgcaataaaaatattcctgattttttttttgtttggggggaatttgatgcatcccttgacaaaaaatctgtttccatccagttttgtaatgtcaatttagttttaaacacatccccttatgcactcccagggtgcagcatagctctctgttactttagacttcaatctgctgcaggttcagaaaattctgtggtttgtctatggttcatgtttacttttagagttatatgacttccattagaaatcacaaatctatcttaactcagtttagactcatgttctgacaaaaatgtttatgccaggagagtttcaataagcaggttttgaaagataattgaagcaactaatttcctagggaggcatgata

SEQ ID NO: 251705 - DNA, 603 bp, Homo sapiens
caggcacatgagtgaacatagccatgaccaccagaaccatccagccacaccactcccagttcagccactttggtcaacctacagatctttgaaaataaatgctattgtttcaagccactgagttttgacatgatttgttatcaacaattttgtggcaatcgctgatgtgtatacctccttacacctatactgcaggcacaaggaattaggttgtgatgcatgtttttcttttctgtttaatcctacaggttgcaaaacttacgaaagattgaatattgtctcyatacacagtttaggaaaatttttaaaagaattaatcctagaagtgttccctaagagtctttgaaatattgaaatggccagccataatacacaattaaacaactatgaaataaaaagtcccatttaaagttgataaagtttttttaatcttcctagtttttctcattattgcccttgtactaacactcagggaatgcttctattccacatattctttagtggctgcagcccacctcttagaataggtctttgtggctatatatcaaacttttacccatacttggagacttagctccaattttctctctttaataaatattg

SEQ ID NO: 251706 - DNA, 556 bp, Homo sapiens
aaatatatttaaaataggaccataattttagtctgcctcaaatggccagaggatttttcttgctaccacaggatcaatattgggtaaacttcattttgaaataaaaaatgtatgactttcataaatgatactcaggcaagtgaattgtatttattcactacatggttagtggtcatctatttattgaaggacagccatgggcaagtcattttgtgaggcagagggcatacagatacatagcaaaatgcacgtgatccttgtcttcatgatatcaaccacataagcaaaaatagaaacatgattacaaatggaagtaagtgcaattaaagttgattcagagtgcttggtactatgtaggcaatggggatatgaagataaatgagccctcagagaccacaaaaagcttctccttttgcactccagcattgactctagctctctktgtgtatcttttgcattgaggggagacctaagggattcccaaaaaatatgccactcagaaagttagcttattagcttccagacaccacagagctacacctgttaagagtgatgt

SEQ ID NO: 251707 - DNA, 594 bp, Homo sapiens
tccctgaagtcaggagaacttggacagtttgccaggcctctgggaactttggtctccacaatagtaaaacatagttaagaatgactgacctcctttaccttgtgaggttttaatgagatgaagtatatgaaagcactttgaagatgacagcatatgctatataagccaaaggaatgaggatcagggtattccctaaacacactggatataggatgttttaaagatcctgaaaatcttgctgtctttatgacttcacccctcccccaaatctcaatataaaccagcttatcgtaatacctgcaattttcactgttactgttgttgttttagattggaatttaggtcttcaaaagtttctctgaaaatacacatctacccggtattagtaacaactgaaactggagggcagatacagagaaaattgtatcagattatttcattttggtcttgccatatggaatattggataccttagaaaatgggacaacatggggaaagctggactgaataaagaagtctagtttaactgaagatacwgtatgtgttcaataaatactttccatggaagcttatcgtgtgaagtttttattaggt

SEQ ID NO: 251708 - DNA, 587 bp, Homo sapiens
gataaagctgggtgattcaatcttaagtggcttccaacctctccatgaatgagaattacttttgaaggaaaagttaaaagaagcaaaattaggcaagacagatgagagtagtgagcaagtgcctagccaagttaacggaagtcaaagcttcaattggagttaaatcacatttaacttaactcctatttgggatttcttgggcttcatggatctggatgttcattttctttagatctggggatctttatttaaacagcttctgcctcctttctttttctctgcttcttctgcaacacccataatacgtatattggttcatttgctggtgtcccatcacaggctttccttattcttttcaattttttctttttatttctctgagtaatttcaaattcttatgctttatcaagtctgytgttgaagctatgaaattttttgtttcatgcattgtattctttggttctaaaatttctgctttgttttttgtgatttatatctctttattgtacttctcatttgtgttttgcttttctgattttatttagttgcttatctgtgttctcttatatctcactaaaatgattatt

SEQ ID NO: 251709 - DNA, 446 bp, Homo sapiens
tttttgttagggttgaatatgcaaactaagcatgagggcttcaaaccaagaattttttactcccaaataacaatgcatctcttcaaaactgtcacaaaaaatgaggtagacaggcccagttcacatctacccagcctcatttctcagygatctatgccttcagatttccatttcaatatcacacctaatcagaacctcaagctctaaaaacacccatccctgctattatgacctgcaaccccaaatactagtatttgataacctactttgcttttaggtgcttaagagcttatattaacagctctacctctcatgtgctcgtattctgcaaggcaaattttaactaaacatcaaaagagctggattttagttttgatgtttccagcagtgagtcaggtgcctggggaagctgttaagaaaaagaaaatgttgatttccctcaatta

SEQ ID NO: 251710 - DNA, 440 bp, Homo sapiens
gagtggggagtaagggtgaaaaaaactacttattgggtactatgctcactacctgggtgacagattcatttgtaccccaagtctcagcatcatgcaatatacaaacctgcacatgtactcccaaatctaaaataaaagttgaaaaacaaaacgaaacaaaaacttttgtgcatcaaaggatataatcagcagastgaaaaggcaacctattaaataggagaaaatatttgcaaatcatatttctgataagaggttaatgtccagaataaattaaaaaaaatattataattaaacaacgaaacaccacacaacttgattttaaaaatgaggaaaggacttgagtagacatttctccaaaaaagatatacaaacagctaacaaacatatgaaatgatgtttgacatcactaatcattaggataatgcaaatcaaaaccacaa

SEQ ID NO: 251711 - DNA, 440 bp, Homo sapiens
gagtggggagtaagggtgaaaaaaactacttattgggtactatgctcactacctgggtgacagattcatttgtaccccaagtctcagcatcatgcaatatacaaacctgcacatgtactcccaaatctaaaataaaagttgaaaaacaaaacgaaacaaaaacttttgtgcatcaaaggatataatcagcagactgaaaaggcaacctattaaataggagaaaatatttgcaaatcatatktctgataagaggttaatgtccagaataaattaaaaaaaatattataattaaacaacgaaacaccacacaacttgattttaaaaatgaggaaaggacttgagtagacatttctccaaaaaagatatacaaacagctaacaaacatatgaaatgatgtttgacatcactaatcattaggataatgcaaatcaaaaccacaa

SEQ ID NO: 251712 - DNA, 440 bp, Homo sapiens
gagtggggagtaagggtgaaaaaaactacttattgggtactatgctcactacctgggtgacagattcatttgtaccccaagtctcagcatcatgcaatatacaaacctgcacatgtactcccaaatctaaaataaaagttgaaaaacaaaacgaaacaaaaacttttgtgcatcaaaggatataatcagcagactgaaaaggcaacctattaaataggagaaaatatttgcaaatcatatttctgataagaggttaatgtccagaataaattaaaaaaaatattataattaaacaacgaaacaccamacaacttgattttaaaaatgaggaaaggacttgagtagacatttctccaaaaaagatatacaaacagctaacaaacatatgaaatgatgtttgacatcactaatcattaggataatgcaaatcaaaaccacaa

SEQ ID NO: 251713 - DNA, 581 bp, Homo sapiens
aatctaccagctacctcagtctactgtgtgttatgagmctttcccatccaaatctggtattataacagtccattagatttcagataacccttaccatttcataggaagttccaactttcacaactgacttcaggtgtttcaaggtaaaatgccattttttttgggtagcatttgtgtatttttaatttttaaaaaaagattcctattcactggcaaaatgagttaatacagaggaaaccctaaaaactccaccaaaagcctgctggaactgattaatgatttcagtaaggtttcagggtacaaagtcaatgtacaaaaatcactagcattttcatacaccagtaatgtccaggctgagagtcaaatcaagaacataatctcatttacaatagccacaaagaaaatgaaatacctagggatacagttaactaaggtcatgaaagatctttatgagaactacaaaacactgctgaaagaaatcagagatgacacaaataaatggaaaaacattccatgctcacagataggaagaatcaatattgttagaatgatcatactgcccaaagcagtttacagattca

SEQ ID NO: 251714 - DNA, 586 bp, Homo sapiens
acattcttggtatgtttgagaagcatcaaggagggtcaggttggctgggatgaatgtggagggggaaacagtgcaacacaggtgaactgaatagcttgatgaatgacatattttattcacttaaaatatgtatatgacacttactatttgtgagacactgttcaaggtagtttgtaagtcttatcatataaaaagttaaagaactaccatgggctaacacttctgatactattacagggaaataatgagccaggtgccctaaaatagtacaggagtaactgttttaagttcaaacaagggtgagatcactacggatatgattgacctgggacaatcactgcatcacagcagtggtaggacatgaaccgctcagggcyttaggaaagaaaatagattacctgatgctattttaaaataaatttttctgttcccatatgttctcatttcccaaacataccagatcctacctatctttcttttggcctgtgtcctttgagcctgaaggatgcagccatccatgttgctgcaaaacacgttttattcttttttatggctgcatagtaatccacgagacatttactgtatt

SEQ ID NO: 251715 - DNA, 586 bp, Homo sapiens
acattcttggtatgtttgagaagcatcaaggagggtcaggttggctgggatgaatgtggagggggaaacagtgcaacacaggtgaactgaatagcttgatgaatgacatattttattcacttaaaatatgtatatgacacttactatttgtgagacactgttcaaggtagtttgtaagtcttatcatataaaaagttaaagaactaccatgggctaacacttctgatactattacagggaaataatgagccaggtgccctaaaatagtacaggagtaactgttttaagttcaaacaagggtgagatcactacggatatgattgacctgggacaatcactgcatcacagcagtggtaggacatgaaccgctcagggctttaggaaagaaaatagattacctgatgctattttaaaataaatttttctsttcccatatgttctcatttcccaaacataccagatcctacctatctttcttttggcctgtgtcctttgagcctgaaggatgcagccatccatgttgctgcaaaacacgttttattcttttttatggctgcatagtaatccacgagacatttactgtatt

SEQ ID NO: 251716 - DNA, 425 bp, Homo sapiens
aagtctggagagaagttgcttcttgggagcatggagggccactgctccatagatgaccatgacatctgtcttggtcaggctctttttcccagaaaaaaggctctgaagaccrggaaagggagacatgaaaaatgtgactgaaggagttctattttctctcatgtttttttcctaatcctgtggaccactataggggataagaaactggactgggatgattcgaataagtctaaaatgaatatactctcgcctgtttaaatgtaaacagccaggatggtcctgtgggatgatcaggccttcagagaggtaactgggagaagcttttgtttattatatatacttatcaggcccctttccttcagggaaagcagagtatgcatgagaggagctattcatgagggccaagtggttggtagagggacaaa

SEQ ID NO: 251717 - DNA, 425 bp, Homo sapiens
aagtctggagagaagttgcttcttgggagcatggagggccactgctccatagatgaccatgacatctgtcttggtcaggctctttttcccagaaaaaaggctctgaagaccgggaaagggagacatgaaaaatgtgactgaaggagttctattttctctcatgtttttttcctaatcctgtggaccactataggggataagaaactggactgggatgattcgaataagtctaaaatgaatatactctcgcctgtttaaatgtaaacagccaggatggtcctgtgggatgatcaggccttcagagaggtaactgggagaagcttttgtttattatatatacttatcaggcccctttccttcagggaaagcagagtatgcatgagaggagctattcatgagggccragtggttggtagagggacaaa

SEQ ID NO: 251718 - DNA, 495 bp, Homo sapiens
tatggagcacatgccctatgtcaagcacttcaccagggactttatatactttatctcattgaaccctcagaatactacaaccctcagaggtgggtattgtttctattttaytgatgagtatggtgagaatccagagagataaaataatttacctaaggccccactagtagtaataaggggaaactggcttcaaaccccatttggaatggatggctacaaggtggaagcttaggtaggggccatttagagacagagggatagaagaactgactttaaaaacatggaaaggaataatgtttgaaaaatactttattgctctgatttgtcctgttaactgacacatggctgtgggtcctttaatcattgttatccatggccatacctctttgtcactggaaataaaaacctatttctttgggcgccctttcctagaactggcttttgagtactcttttagctataagcttttgttaaattgtagtagatttctttttg

SEQ ID NO: 251719 - DNA, 495 bp, Homo sapiens
tatggagcacatgccctatgtcaagcacttcaccagggactttatatactttatctcattgaaccctcagaatactacaaccctcagaggtgggtattgtttctattttattgatgagtatggtgagaatccagagagataaaataatttacctraggccccactagtagtaataaggggaaactggcttcaaaccccatttggaatggatggctacaaggtggaagcttaggtaggggccatttagagacagagggatagaagaactgactttaaaaacatggaaaggaataatgtttgaaaaatactttattgctctgatttgtcctgttaactgacacatggctgtgggtcctttaatcattgttatccatggccatacctctttgtcactggaaataaaaacctatttctttgggcgccctttcctagaactggcttttgagtactcttttagctataagcttttgttaaattgtagtagatttctttttg

SEQ ID NO: 251720 - DNA, 580 bp, Homo sapiens
cttattactcaaaaccagttcttttccgatccacttaaggttgattatcaagcttcagctcccttgacaggccacaagattgaaacatgacagagggtggacatagctggcatctgatggtgacaactcaggatgccagtatctggggttttcaaccttcatgccatgtctaaacaaagcaattccatataagttacagaaaactagggcctgatatgcacgttgcttaattctaatcactattaaataactttttagacaaaaactctactattcatttttttgatgcttgatcaacaccattactcaactgacgtctcttgcaaacaataatytgtgatagaaaagagctgaaagtattatacaacatcatttttattttaaatatcaactttttatctgagaaatgtagtataagaacattattgtcaaaaatacatagagaaaataaaatttggtcagcagggaagttaagaactgttccctgactgtactgtaatagataggtcaggcatttggggctgtatttagtgttaccttccattcttccttatttatcatagagaagcagtcttcagag

SEQ ID NO: 251721 - DNA, 501 bp, Homo sapiens
tcagtttttgtaaaatgacaagtttacaccactaaaatttagctaaataaaagatctgctttagttcaaccattgtggaaagcagtgtggcgattcctcaaagaacttaaaacagaattccttgaaggacttaaaacataattaccatttgacccagcattcccattactgggtatatacccaaaggggtataaatcattctatcatagagatacatacacaggtattttattgtagcaccatttacattagcaaaggcatagactcaacctaaatacccatcaacaataaactgcataaagaaaatgtggtacaaatataycatggaatgctatgcagccataaaaaacaatgagatcatgtcttttgcagcaacatggatggagctggaagccattatcctaagcaaactaatacaagaacagaaaaccaaataccacgtgttcttacttgtaagcaggagctaaacaatgagaacatacggacacaaagaaataacag

SEQ ID NO: 251722 - DNA, 596 bp, Homo sapiens
ctcaatttaactgcctactaaaaatacagatccccaggcataacccaataatattctagaaagaaagaaacaaatgtgatatggagttatgttaaagagctcargcctgtgagtcatgtattatttaaatcctgcttctaccatttactaattgtgtggcaatgcgcaaagggcttacattctttgagctcagtttcctcttctgtagaattagtatgatagcctattcatatgtttgctgtaagggttcaaaaaaataaagcatgtaaagtgcttggcatattgtgtggcttcacagtacatgctctacaaatgataacgatgaatgtagttaggcaatgccaatgttaaaaataaaaataaaataaaacagaaaggacaggctgaagacattggagaaatggattgataggactagtgcctgattgaatgtaggcagtgagtaaaagggaggtgccagagatagtgcaaatcctcattggatgtggacagtgagacgggggaagtgccagaaataggccaactctttaagcttactggcttactagtgccctctagtctcttatatacagatctctctattcagtcacagttgg

SEQ ID NO: 251723 - DNA, 596 bp, Homo sapiens
ctcaatttaactgcctactaaaaatacagatccccaggcataacccaataatattctagaaagaaagaaacaaatgtgatatggagttatgttaaagagctcaggcctgtgagtcatgtattatttaaatcctgcttctaccatttactaattgtgtggcaatgygcaaagggcttacattctttgagctcagtttcctcttctgtagaattagtatgatagcctattcatatgtttgctgtaagggttcaaaaaaataaagcatgtaaagtgcttggcatattgtgtggcttcacagtacatgctctacaaatgataacgatgaatgtagttaggcaatgccaatgttaaaaataaaaataaaataaaacagaaaggacaggctgaagacattggagaaatggattgataggactagtgcctgattgaatgtaggcagtgagtaaaagggaggtgccagagatagtgcaaatcctcattggatgtggacagtgagacgggggaagtgccagaaataggccaactctttaagcttactggcttactagtgccctctagtctcttatatacagatctctctattcagtcacagttgg

SEQ ID NO: 251724 - DNA, 566 bp, Homo sapiens
tcaacaagtgagaaaacattgaacatctgtgaagtgggaactataagatgtgcaaacaggaagatggaaatactgcatcctggaaagtgtttggcctagcacaattactgctaggcccagcacaatgaacagatttaccatcccgaagaaccaactcctacaaatgagaattcttgcacaaacagcagactggcatgctcaaagttactgacaaaaattattttctgttagtttgagatcattattctcccctgactctcctgtttgggcatgtcttattcagttccagctcatgacgccctgtagcatacccctaggtaccaacttccacagcagtctcrtaaattctcctgttcacattgtacaaaaataatgtgacttctgaggcccttatgtagcctgtgacattaagcattctcgcaattagaaataagaataaaacccataattttcttcaatgagttaataaacagaaatctccagaacctctgaaacacattcttgaagcccagctttcatatcttcattcaacaaataatttctgagtgtgtatacaggatgtcaag

SEQ ID NO: 251725 - DNA, 566 bp, Homo sapiens
tcaacaagtgagaaaacattgaacatctgtgaagtgggaactataagatgtgcaaacaggaagatggaaatactgcatcctggaaagtgtttggcctagcacaattactgctaggcccagcacaatgaacagatttaccatcccgaagaaccaactcctacaaatgagaattcttgcacaaacagcagactggcatgctcaaagttactgacaaaaattattttctgttagtttgagatcattattctcccctgactctcctgtttgggcatgtcttattcagttccagctcatgacgccctgtagcatacccctaggtaccaacttccacagcagtctcgtaaattctcctgttcacattgtacaaaaataatgtgacttctgaggcccttaygtagcctgtgacattaagcattctcgcaattagaaataagaataaaacccataattttcttcaatgagttaataaacagaaatctccagaacctctgaaacacattcttgaagcccagctttcatatcttcattcaacaaataatttctgagtgtgtatacaggatgtcaag

SEQ ID NO: 251726 - DNA, 566 bp, Homo sapiens
tcaacaagtgagaaaacattgaacatctgtgaagtgggaactataagatgtgcaaacaggaagatggaaatactgcatcctggaaagtgtttggcctagcacaattactgctaggcccagcacaatgaacagatttaccatcccgaagaaccaactcctacaaatgagaattcttgcacaaacagcagactggcatgctcaaagttactgacaaaaattattttctgttagtttgagatcattattctcccctgactctcctgtttgggcatgtcttattcagttccagctcatgacgccctgtagcatacccctaggtaccaacttccacagcagtctcgtaaattctcctgttcacattgtacaaaaataatgtgacttctgaggcccttatgtagcctgtgacattaagcattctcrcaattagaaataagaataaaacccataattttcttcaatgagttaataaacagaaatctccagaacctctgaaacacattcttgaagcccagctttcatatcttcattcaacaaataatttctgagtgtgtatacaggatgtcaag

SEQ ID NO: 251727 - DNA, 595 bp, Homo sapiens
ttaatttatagtgtaaatgataatagcccctcccccaaactcagtggcctttgtaaagctaatgagagaccaccacactaggaggatgagaggaacctggattctgctaaggtgtggacatacatgattagccacacattattccagatgcacaagatgtacaacttccgccaattactcctgcaaataacatcactattgtagaacctaagattggtcttttgagatgtcttttctggttttttgcatctgatgaccaatggttccacctggaaccaccaactgctcctgtggccccatccaaaagtgactcagtgaacaaggggaccatttcccacactcctgtaattgtactcccaacaaatcagcagcaagtacccattgcctagccatcctccctcttcccccaaactatctytgaaaaatcctggcctttgaagttttagagagactgatttgagtaataataaaactcaggtctttcattcagctggctctgtgtgaattaagcttcttctctattgcaatcccctgtcttgataaatcagctgtctctgggcagtggacaaaatgaactgattgggcagttatagtg

SEQ ID NO: 251728 - DNA, 394 bp, Homo sapiens
ttgcagtctgactagggagaagatggatacagcccttttctccatctgcatcccatggcacagggaagtaatgaaaacttggtggctcctgtggagcacagagaagaggaaaggccagcactggcactggagggaagaaggagatgaaatgaaaatcagatatgagattggagacttaaactggaccaactttcaaaaaacagaaagtgaccagaaatctgtctgatctgtgccagagctaagragaatggaatctggcagaccctagtgaaagctagagttgccatacataacaaagtcatacaaacagaaacattttgtctcacaattctggtggctagaaatctgaaaccaagatgttggcagggccatgtttcctctgaaacctgtagaa

SEQ ID NO: 251729 - DNA, 476 bp, Homo sapiens
tcactgcagtttctgccttcatcaccacgtggctgtctttgtcttccttctgtcaatatctgcccaaatttccattgtcttataaagatgctaatcttgttaaactaggcccaccctaaatgaggcagaagagtagggtctggaggtaaggaacataaggccaattcatgatttacgctgacttcctaaaactaaaccaaatggaaacacwtcagctaagacaggaaatagcctctccatttacctagtgtgtacacggagtaaatgactttgtaactttacttcatcctttttatttccatagggcatacaccaagtaaccaatggaaacctctagagggtacttaaaccccagaaaattctgtaatggggctcttgattagttggtctttttaccacttcagctacctttgtttcaaagaattttttgagtgcactaatccattaaagtttgcattaggctgatttgcatacca

SEQ ID NO: 251730 - DNA, 579 bp, Homo sapiens
catgtgtggaatcaatgaggcattgagcttctaaccaaacaaatagcctgcaaaattrtagttgtatccagtccattttatgaacataagacaggccactgctaccctatttgtcttcttgacaagttctagctgcacagtttcagttccaaatgtcaaatatcagttaagagaggtgtgtgtcaccaatcaagggactccaaggaacagatggcacactgaaagtcatgctcacaaagatttatatagaaagatgctcatcacaacattatttataatatcaaaaaatgacagaccctaactgtccaataataaatcatggcccctcaatataaaggaaagtatgaggtcactgacaagcatctttttaaaatgatattaagggacataataaaaagtgaaagacctggtattttattctctttgaagcaattgtgaatgggagttcacttatgatttggctctctgtttctctgttatcggtgtataagaatgcttgtaatttttgcacattgattttgtatcctgagactttgctgaagttgcttatcagcttacggagattttgggctgagacaa

SEQ ID NO: 251731 - DNA, 579 bp, Homo sapiens
catgtgtggaatcaatgaggcattgagcttctaaccaaacaaatagcctgcaaaattatagttgtatccagtccattttatgaacataagacaggccactgctaccctatttgtcttcttgacaagttctagctgcacagtttcagttccaaatgtcaaatatcagttaagagaggtgtgtgtsaccaatcaagggactccaaggaacagatggcacactgaaagtcatgctcacaaagatttatatagaaagatgctcatcacaacattatttataatatcaaaaaatgacagaccctaactgtccaataataaatcatggcccctcaatataaaggaaagtatgaggtcactgacaagcatctttttaaaatgatattaagggacataataaaaagtgaaagacctggtattttattctctttgaagcaattgtgaatgggagttcacttatgatttggctctctgtttctctgttatcggtgtataagaatgcttgtaatttttgcacattgattttgtatcctgagactttgctgaagttgcttatcagcttacggagattttgggctgagacaa

SEQ ID NO: 251732 - DNA, 545 bp, Homo sapiens
tggttgtcacttatgcaatgatgatacccaaatctatatgtccaatttttgctcttcctttttaactccaaacctgaatatcctcaaacctactaatatctccacttgactgtaccataggtgttcaaatcaaaatgtctacatcaaacccattttgtactgtcccacatttgtaattcctcctcgtttaaattgatgatcccaagatcacctgagtcagaaacctaggaaaccatcccaggttcctccatcctaataagcatccaactgatgccaagtcctggtcattctattcttcagcatctgactcctctgatcagttccacgaacactatgttaattgatctctttaccacttatgagctggaatatttctatagcctcctagcaggtagtcttatcttagtccaccccatacccctctattgttaatgttgatattagaatgatttttctactgcartactcaaatccttgcttaaaacctttcaagggtttcttgtttattaaaaaaaagtccaaacttgtatgtagcagctaaggct

SEQ ID NO: 251733 - DNA, 484 bp, Homo sapiens
agtattaaataccaaaacagtggctggacctagttaacacgtactgacaggaacaaggacatagtgcctgggaatcctgaagaagccagctgaatgagggagtaatataagactggagaaggaatagagtgttgaaatgggggcaccattctgtgacccaggatttgacactttggtaaagggccaaggggcagttttaatgctatacmagggtggtggttagaagattgggaaaagtaatgccctccatcaaatgtcagcaaactttctctgtaatgggttaggtaacaaatattttaggctttgaaggtcatatggccaatatgtagacaaatgggtgttgccagtaaattgagtgtttcaataaaactttccttaccaaaaaaggaaaccggctggatctgacttgagagccagagttttccaaacacttcatttaatgtagaacattaaatgaagtagagatgccaaaacttctgtggca

SEQ ID NO: 251734 - DNA, 606 bp, Homo sapiens
ccctggtaagacacctgtgctcctgagggaaatagataagttctaaaagagttcaagggccagtcacattagtgacctttttatgtgttccagtgttataaggcatgctggaatatcttcattcaatgtgaagaacagattgttgtgccttatacttcctaacactaagaaagaagcacattccttggtaggcctctttgggttataaaggcaacatattctgtacttgggaatacttctgtgacccatttattacaaagtgaaacactgctagttctgagtggatcttagagcaagaaaggactctgaagcaattctgggctgtggagcaaccagtgctgcctcttgggcagatcctatggtagtacaggtatatctagtagaaaagtaatgcctgttcaacctgagaaagctgactgaaaataaaaataaaaatatagaaagataaaacactgcgtggagcctctggagagccacaataagagaattgtagcataggattctggagcaagtttatgccatctgccamagagtattacacaccatttgaaaaacatcctggcatgctattagaccctggtagaagatgagcatctattgatgtgt

SEQ ID NO: 251735 - DNA, 550 bp, Homo sapiens
agctggctgaaatggtttcagatttaagatggaaatagagtcaatgcaccttgctactggaaatggtaggactcttttggatggataaaatgctgcagagcataggaccctgtcagattctgtagtagggcagatattagctcaaattctgactttccacagtttattaataaaacttaatatttcctggcaaatgaactattccatcaactgtgccatggggtgttgcttgaatataggagccatacgagtatgctggtactcactgaattttcccaacaccattacttcttttcccacggttacacagaatcactggctctaattaggatggtgtttgtgggattgtctgccgaaacttgtgttccaccttccgtaatgtagcattgtcactgaaaagtgacagcacagctaggaactacatctctcwgtcccctttgcagctaggtgggataatataatctgctgtaattgagtaaacataaggtgtgccatttctatgaaaggttttttactaagtgattgtcctttttcttttgtggatcaggtg

SEQ ID NO: 251736 - DNA, 547 bp, Homo sapiens
gattttgcctttctctttgtttggaaaggccacatcttccataacacagtcccccaaacaatgctggatggaatagatctggagaagcactcarttccctggatagtatttgaccacatttatattgctgttggatgagtctcactgcagtattggccagaactgacctttcacagttaatcctttttgaacagcccatggctcaaggtgttaggatgtcagccaatatgaaagaaatatgatcctagaacacagtgtattgttaattttttttctctctttaggtaggtttttcagaggagcctagggatgagaaagttgaataggagaggaggagacaaagagaaggtgaataaaaggcattttccataattgctcattctgaggttgccatagtgatcagccaacatgatggctgccaatggcctggtcctgactacccaacccaacaatattagaacagtccctgcaggtggagaacaaatgacaagatgatgtgtttgtctgtccgggtaaggagctgcatgtaaattcaacagagctactc

SEQ ID NO: 251737 - DNA, 570 bp, Homo sapiens
gccttcaaaacagcatatccagaatgagcaaagcaccagggaaatagaaaagcaggctgccccctcgcaagagaaatgtgcaagtctgaaaaaaaagctgtatgtacatggagcacaaatgtagacaactgggattgcctaaagagctcacaacattggaaycagtgttgtccattttgggttttatttcatggtccatgttattttacaatttagatgttgtgaaaactaaagttcagagatgataagttggttttttatcaaaataatggatacatgctaatgtatttaacatatcagtaaggtgtaaaaaagtaggcaaaggttcatttttactactgtctcccccaaccactctccagtgaacaaacaaaacaaaacaaaacaaaacaaaagactcaaaggggaaaattgggtgcatcctgacggaattggagcagagctggtttgggctaagtgctaccttctgaacctaatccctggtgagaccaggtctcattacacagagatgtgccagacagttcaaagcgtgggcctgacactcactatgttgccaatgaagagtgccag

SEQ ID NO: 251738 - DNA, 626 bp, Homo sapiens
gaaggtcttaagtaatctctatcatctgttcactctaaggaaggggtctggtctgctaaaatactggtaaagtttccatttcatggaagatcaagtaaatgtaaattgccatgttttgtgcatctcagatacagggaaaaaagccagatgtggccataaatttcactggggctttatttcttaaaagtataatgatatgtgaaagctaagtcaaataaagagctttatgaaatcagcactattttaatatcacgttagcaattacatgggattatcctagcgtgatttccaaatgactttttctatcacccaaaccaaagcattttgtacaaacacagrcatacacttgcatgtgaacatgtaacatccagttattgattgaggaacaaagcctccccaaaggagttttaaaaactgctatgtcccagcatgccgctttctattttacatcaatttttgagtcagcagaaatgtgtgtagaatcatataaagcctgaatactcccctgctagtccatgaagtcagagcccacacatgggggttatcctatcctaggtctggaatatatcattaccacaaaattcattgcctaagcaatcatcagggctgatggtaatataatagtt

SEQ ID NO: 251739 - DNA, 285 bp, Homo sapiens
ggaggttgctgtgagctgagattgtgtcattgcactccaccccaggtgacaagagtgaaactccatctcaaaaaaaaaaaaaaaaagaaagtacaaagaaacaggaaaaatgcaggagaggcatacggtgaacagagagaagaaacaagattacaacactttattctgataatgtgactgaatgttatggtatgccaatgtgcttagtgttcttgtaaatagtttcgtttkgacattttatgatcagtagaactgggcagacataagcaaaattatggtcattga

SEQ ID NO: 251740 - DNA, 561 bp, Homo sapiens
ccactgtgacaatggagttttttggggccagagaaacttcccagcaaccatcacatcactagcggaactcacaaatgaatttacctactctccaagtggcttttcttaagccactttgtgtaaagtccccggaagcaggcacctggataagggtgagggaacactacaacagcaatcttttaactcccactgtctctttaaaagttttgaattagggaaaattctttccctccascagaggaaaacttgcacagttccatgacttatttggtccttaaagtgaaaaaaaaaaaaaaatacagtctcaatggagacatttactgtgtctagtttcaggtaataatcaaaacttagaagttgatttaaaactaaatcttcctttctacccagctaggccttgctttgggctgtctccttggagtggcctttctcttcttttttcccatctggcatttctctttctttcctagcatgataactgttatttcttatcctgccaggcttgggccaaggggatattggagaattcagagggataggaaggttcttacttgactggta

SEQ ID NO: 251741 - DNA, 569 bp, Homo sapiens
ataccatagactgtgtgttttgtaaataacagaactttatttctcacagttctggagtctgggaagtctaaggtcaagatgctatcagattcagtgtttggggagggcccactttctggtccatagatggtgccttctccctgtgtctttatatagtagaaggtacaaggggtttttcttgggcatctttcactactgtgaagttttgcataaatggcaatcagtatactacttaccactggtcttcgttactggccaattggtgagagatccagctttgtaayctcattttagcctctaggtcccaggaaaacaaatggaaactatcttagatttggttacccagggggaaagctctaagaaggaaatgtgctcataggtgcacctgggtacgatcttgcagttgtctatgaaagccaagggaagcatgaggtcagaaggagaagttgcactgtaatgtgggacaggacttttgaatgatcgtatgtggagctctagagctgggatggtcttcagaattgtgccagttgagtcaagggaacaagcctaccctcactttgattagtcat

SEQ ID NO: 251742 - DNA, 605 bp, Homo sapiens
ttttgactgtcatagagccaaacaaaatggctaaaagttgttgaaagccctctcagaatatcatggtgctgtgcattccctgggccatcttagaaaagaaggaatatattctttcatcaacattagcatggagcttctgtcagaagaggctgtgcagcacatctgtgaaccatttctttggactactaaaagtataactctaactccatgatattatttgctcccagaactttttctttcattttttttgtagttgtctatagaaccaaaaaagaataaaaccaagaataggggtggaaaggttataaatacattatgtttgaaagtgtttggcttacatagatgaggtcaaagttctttttagccaaaagtttgtctttttcatttgtttgcatcccatatttgtgtaaacaaaaggaaattacktgatgaaactagaatccagtgaaaaagttacctgtttggggttttgtaaacaaagaagcaaacaaacaaacaaagacacagtaggccaaatttgtcaggtactgttgaaggtagaaaatctacagtggttgaaatttggctgtttcctgaacctgaacttggttattaagtgagtatct

SEQ ID NO: 251743 - DNA, 518 bp, Homo sapiens
acattcttcatgatccctttccacactcccttgaattccctcttcacattcctgctaggctcttgaactagaccatggattttacttgtaaaaaagttttcaaaatgggtgaaaaatatttaaggcaagccaggaactctctaagagctttggtgagatctaattattccagatgataaaacattgccttcaaatacatgtcaggattgagtagtataatctgctgatatctaaggaatgtaactckgcaatcagtttggtctttgggctttgaaggggattgatttagatgggcaagtgttccagtgctgaatcagaatccaattttaatgacaatttcagcatctctgggaaaaaatagagccaaggtatgatacaaatattcagccgaacaaatccacagtataagaagtagcatgtaaacatctcctaggaacaaaattttccttctcaatcaagcaattttacatacaaaagttgtcacctaatttgtaaagtgccacaactagagtaggagg

SEQ ID NO: 251744 - DNA, 576 bp, Homo sapiens
tctttattttagtcccagaggctttctagactgaccactgacagctctcaagagacagaagggaaataacagcttctgttctaagaatttgtctacttttttgccagcaaaaaatcttagggagattcttgttatttaccarcgtgttcagttcaaattaaagttttcttctctcaatgacacttagtgtgacttctttgaacagttgctgtgcttttatttttcttgcttgtactttccaaacgtccaatttagccactaaacattcagggcattaggccattctttagatctctcattgtatgaaaaggctttcatacaatatttcacatgccaaagaggtatatcacgtcctacatatcataatttggttactcattagttttggagttgtttaggggttgtctctggttcataaaacctatttatgtgtagatactcattaaaaaacactttccttatacatatttatattaatcaaataggtctttgtgctacttactacacaaggatttcaaagtataagtatccagtgaccaaggatggatgcacaatccaatgcagtagctaccagta

SEQ ID NO: 251745 - DNA, 578 bp, Homo sapiens
ttcatttaagtaaactatctcacctgagatattttttttctaccctaagtattccaaagcaccgtgtgcattggccccaaaccccaatatcatggctgcattttaacttccttttctctctctgtatcctcacctcccacccatcctactttggcttcagcccctacccctacccttatgctaactaaaacacagattagatgtagttgcttcagagcagactcttcttgttcatggttttattcccagtttctgacatagtgcctggaacagaataagggatcagtatgtatgtgtggaggaattatcaccaaatatcaaaatcatgaatagaaagyaaaaatgaaaattgctttccacccaatggaatttccacaaataaataacagaagtcattcaaaaggatgtaaagtccaggggttcaaatgaagagtcattacaatgaggtaatggcagcatttgataaaaatccattgcttcataagcatatttgatcaaaatagatttcttcaagaaaaacaaaaagtacagaatgaatcatttaataaagagagatgaagcaataatattagtgtaga

SEQ ID NO: 251746 - DNA, 578 bp, Homo sapiens
ttcatttaagtaaactatctcacctgagatattttttttctaccctaagtattccaaagcaccgtgtgcattggccccaaaccccaatatcatggctgcattttaacttccttttctctctctgtatcctcacctcccacccatcctactttggcttcagcccctacccctacccttatgctaactaaaacacagattagatgtagttgcttcagagcagactcttcttgttcatggttttattcccagtttctgacatagtgcctggaacagaataagggatcagtatgtatgtgtggaggaattatcaccaaatatcaaaatcatgaatagaaagcaaaaatgaaaattgcwttccacccaatggaatttccacaaataaataacagaagtcattcaaaaggatgtaaagtccaggggttcaaatgaagagtcattacaatgaggtaatggcagcatttgataaaaatccattgcttcataagcatatttgatcaaaatagatttcttcaagaaaaacaaaaagtacagaatgaatcatttaataaagagagatgaagcaataatattagtgtaga

SEQ ID NO: 251747 - DNA, 422 bp, Homo sapiens
attgtttcctaataatttatttacttacttttacaacaaacacaccctcagactttgaggtctatagtctaagagagagaaggcaaaattctctgctgaaattttagtctatttccacttcaggaggcaacactagagtcagatagtgatcaaattgtcactttattgttggtacagctagattggagaacatggcatggaatcaaaagtctacttccccatyccagtactgaacttaccacccagtcactggcaaaacagttggacaaccaggcaactgtggccactctcctagttcacatccaacttcccatctcccctattcccagaaagggtggcagtgtgcttgtttgttgatccttttgccaaatagaggtaggaacaggattagcaacacaatttgcaaagtccagagcaaaata

SEQ ID NO: 251748 - DNA, 603 bp, Homo sapiens
agttgtcccacctttctgaaccaaaccaatgtatttcttaattgtatttgattgatgtctcatgcctccctaaaatatagaaaaccaagttctaccccaatcaccttgggcacatgttctcaggacctcctgagagctgtgtcatgggccatggtcactgatatttggttcagaataaatctcttaaaatatcttacagagttcgactctttacatcaacaataacttggcgcccaaacacatgggacctcagagaagatgcaggactccgaaggagttgcccaaacttggagctaaggtaccagcrgggcccattaaagcctgtccaacttagagcttctcctctggtggaactggtaagtcctgagccctgaacccccctggttgatagtcagtctttgatttattctgagctggttttctcctaggaaattgtttaaggatcatagttgagtttggagatgcattctaaagggaattctatattgctttttatcctaaaatttatcttgatttggtttttctgtgtgcattttcatgaggaatggaactgttgttttcacagataaatgagagactaagtttttcagctccaaagagaaa

SEQ ID NO: 251749 - DNA, 603 bp, Homo sapiens
agttgtcccacctttctgaaccaaaccaatgtatttcttaattgtatttgattgatgtctcatgcctccctaaaatatagaaaaccaagttctaccccaatcaccttgggcacatgttctcaggacctcctgagagctgtgtcatgggccatggtcactgatatttggttcagaataaatctcttaaaatatcttacagagttcgactctttacatcaacaataacttggcgcccaaacacatgggacctcagagaagatgcaggactccgaaggagttgcccaaacttggagctaaggtaccagcagggcccattaaagcctgtccaacttagagcttctcctctggtggaactggtaagtcctgagccctgracccccctggttgatagtcagtctttgatttattctgagctggttttctcctaggaaattgtttaaggatcatagttgagtttggagatgcattctaaagggaattctatattgctttttatcctaaaatttatcttgatttggtttttctgtgtgcattttcatgaggaatggaactgttgttttcacagataaatgagagactaagtttttcagctccaaagagaaa

SEQ ID NO: 251750 - DNA, 582 bp, Homo sapiens
acgtttttcacaaaaatagaaaaagcaatcctaaaattcatatgaaactaaaaaggactccagatagccacagcaatcttgagcaagaacaacaaaactagaggcatcacacttcctgattttgaactatattactaacctgtagcaatcagaacagtatagtactttattaaaacagataagtagagcaatgggacaaatattaagcctgaaaataagcccatgcatatatagtcaactaatctttgacaaaggtaccaagaaaatagagtgaggagagggcagtctcttcaataagtgrtgctggggaaaatagatggtcacgtgcaaaaaaaaaaaaaaagaataaagaaagaaaaagaaattggatacttataccatacacaaaaatcaactgaaatgggattaaagaattaaacgtaagactactagaagaaaacataagggcaaagctccagcacaatggtcttggcaacgattttttggatatgacaccaaaagcacagacaaaaaatgccaaaataaacaagcgagactatgtcaaactaaaaagtttctggacagcaaaggaaacaatcaaca

SEQ ID NO: 251751 - DNA, 582 bp, Homo sapiens
acgtttttcacaaaaatagaaaaagcaatcctaaaattcatatgaaactaaaaaggactccagatagccacagcaatcttgagcaagaacaacaaaactagaggcatcacacttcctgattttgaactatattactaacctgtagcaatcagaacagtatagtactttattaaaacagataagtagagcaatgggacaaatattaagcctgaaaataagcccatgcatatatagtcaactaatctttgacaaaggtaccaagaaaatagagtgaggagagggcagtctcttcaataagtgatgctggggaaaatagatggtcacgtgcaaaaaaaaaaaaaaagaataaagaaagaaaaagaaattggatacttataccatacacaaaaatcaactgaaatgggattaaagaattaaacgtaagactactagaagaaaacataagggcaaagctccagcacaatggtcttggcaacgattttttggatatgacaccaaaagcacrgacaaaaaatgccaaaataaacaagcgagactatgtcaaactaaaaagtttctggacagcaaaggaaacaatcaaca

SEQ ID NO: 251752 - DNA, 551 bp, Homo sapiens
atttcctaaataatgcatattgcagctaccaaggtatgacaattaacctattgttctaggaattaattattttcaagtagattttaaatgaatatataagacttcctggtggttgaatatcagtaccagcaatttatcacttttgtatacatgtcaaacaggtagtaaatcattgagcttacccctttttcaatattcccagtttgacacagtgtcccctcagctgctggaatactgttggtgacacagcggttgcttttgctgagacaccagagctctctacacacttcytaggaaagaaggcaaaagcaagttgatcagaaatagagtcatgtccaattcttccataaaatacacttacagtcactctgcattactttcaagagaccctgggtaccttttgctgctgaagcatcgcagttgaggattttggaggaggtttttatgaaacatcttgcagtatcatttaactatttgtctttgcaattcttattttagcagataaagtatatcttagcttttaatattagttaggatctttttacaatagt

SEQ ID NO: 251753 - DNA, 551 bp, Homo sapiens
atttcctaaataatgcatattgcagctaccaaggtatgacaattaacctattgttctaggaattaattattttcaagtagattttaaatgaatatataagacttcctggtggttgaatatcagtaccagcaatttatcacttttgtatacatgtcaaacaggtagtaaatcattgagcttacccctttttcaatattcccagtttgacacagtgtcccctcagctgctggaatactgttggtgacacagcggttgcttttgctgagacaccagagctctctacacacttcctaggaaagaaggcaaaagcaagttgatcagaaatagagtcatgtccaattcttccataaaatacacttacagtcactctgcattactttcaagagaccctgggtaccttttgctgctgaagcatcgcagwtgaggattttggaggaggtttttatgaaacatcttgcagtatcatttaactatttgtctttgcaattcttattttagcagataaagtatatcttagcttttaatattagttaggatctttttacaatagt

SEQ ID NO: 251754 - DNA, 551 bp, Homo sapiens
atttcctaaataatgcatattgcagctaccaaggtatgacaattaacctattgttctaggaattaattattttcaagtagattttaaatgaatatataagacttcctggtggttgaatatcagtaccagcaatttatcacttttgtatacatgtcaaacaggtagtaaatcattgagcttacccctttttcaatattcccagtttgacacagtgtcccctcagctgctggaatactgttggtgacacagcggttgcttttgctgagacaccagagctctctacacacttcctaggaaagaaggcaaaagcaagttgatcagaaatagagtcatgtccaattcttccataaaatacacttacagtcactctgcattactttcaagagaccctgggtaccttttgctgctgaagcatcgcagttgaggattttggagkaggtttttatgaaacatcttgcagtatcatttaactatttgtctttgcaattcttattttagcagataaagtatatcttagcttttaatattagttaggatctttttacaatagt

SEQ ID NO: 251755 - DNA, 551 bp, Homo sapiens
atttcctaaataatgcatattgcagctaccaaggtatgacaattaacctattgttctaggaattaattattttcaagtagattttaaatgaatatataagacttcctggtggttgaatatcagtaccagcaatttatcacttttgtatacatgtcaaacaggtagtaaatcattgagcttacccctttttcaatattcccagtttgacacagtgtcccctcagctgctggaatactgttggtgacacagcggttgcttttgctgagacaccagagctctctacacacttcctaggaaagaaggcaaaagcaagttgatcagaaatagagtcatgtccaattcttccataaaatacacttacagtcactctgcattactttcaagagaccctgggtaccttttgctgctgaagcatcgcagttgaggattttggaggaggtttttatgaaacatcttgcagtatcatttaactatttgtctttgcaattcttattttagcagataaagtatatyttagcttttaatattagttaggatctttttacaatagt

SEQ ID NO: 251756 - DNA, 445 bp, Homo sapiens
ggacacaattccttaatttaactacttattaattaatctaattaatttttgttgcatayatactatgtgccaattaattaatctaataaatttttgttacatacacactacatgccaagtgctattctaggcattcattgtttccaataaaacgttttgtggtgatgcaaatgttctgcatctgctctgtccaacatagtagccactagctacctgtggctagtgggtctgaggaactgaattcttcaattaatttaaatttaaatagccacaagtgactcttgaggcttttacattacaaagaagtaatttgataagtaaacagggcaatttaaagtagtggtaagtggtaagagggaactaaagcagtaggacagaattactgttacatggtctgggagcaggaaagggtattgaggtatcattttagaatgaggatggtcaa

SEQ ID NO: 251757 - DNA, 513 bp, Homo sapiens
taagtaccacatcatgatcccttttcattttaatataaggttgaatttttattaaacaacctaacattgatgacatttgttcaactttgctgataaccatgttccttattgttattcatataaacaaatgactttcatagtagcattattttggtktgtcaaagtttgataatttgaaaaatgcatcaacaaaagtctacaaatgcttggtttaaaaaagactttcattttgccatattctgcaaataagatttatcatgctagagttatgagttgattttgtgatgtctgtgtctcaataaattattcctggctttctacttaggtgcagtatgtgtggtttattacggagagtagagctgagcagaattccagtacatatgttcatgtgggggccatacacatggctagtcagtgtatacaagggtttttttgtacccagtccctaatgtcttggcattacttttattatgtctgcagtgctcatgtagatgaaatgccacaacacattct

SEQ ID NO: 251758 - DNA, 637 bp, Homo sapiens
aagtgtttcaagtgacaggtgcatattaggatatatagatagtcttctcagatgaccactttgaaacagatgccacattctaatatgttggtgtccctgagttwgtatagaaaattgacccattatatttaggtcacattcctactattcaagattgtaaagtagatacttattacaattatcttaactttagcttttgttttttactcagatttctaaaatgtacctcccaatctttcacccattatttttcaaatagtgaagtcattctacaaataggtattgcctaacctcatgctgggtatattatctgctgacttaccattggctagagaatgcctctggaaaggataacaatgacctaccttacaggacttttctgggaagttacatgatagactgctcgaagaaaggtctgcaaattcacctggtgtaatattaattctttacatttctagagctgcctttctctcaaagaattccaagcgcttcacatatggtccgccagatcctcttagagtgtaaattatgccccaggagtaagttaattgcttgcagggaggcattaactctttcaggtcactagggttccacttacagcattgcaggagggcagtaatttaccaaataatacacc

SEQ ID NO: 251759 - DNA, 634 bp, Homo sapiens
tccaggcttgcctgggattctgcccctgggtcagctgcccctggctcttcccaggtttcacagctccgacccttccccagtttccaagcccatatatttccagtggaatttttttctcaccaaactcctatggttatgttagggagacctcttccgtcatgggaaggagggaaccaaggcagggtaggatctttctatggaagkgacaagagggttgtgagttggaggctacctgtatggagatggagcgtatctttgtaaatgatccatcccagctggacatttaatttaagaagtttcataaccctagcaaaaaatacttagtaaactgtgagaccacctctatagagctaaggaagcttctagtgcaacaagctgggtaaatgttaagctttcaaatctaatgttatgaaatacagaatttagaatgaacaaacaccatctatctgttgtgtcttatcgcttagggactgtatgaatgaacaatactttaacaaagtaactacctaagctggaaaggagctctgccacttgggatgggtctcttggaatcaagaaactgcacatcagactcttgtaggaggcactgattctttacttgagatctgagaccaatattctcattctggcccca

SEQ ID NO: 251760 - DNA, 599 bp, Homo sapiens
aagtctttttttcccgcatgacattgacatttgtgaaaactctgggctcttttgctagctgtttcccagactacccttcagtttagatctgtctgattatttccacatgattagatgtagggaaacatccttggaatatcatattcatggcactatgtcctcacatcaggaagcgcccaatatcagtttgttccaaggagccattcatgcatgaatgcctttgtatggcgcctgaaggtgtttatccctgggacaggccccacaatagaatggctagataggtgagaagcacaccgtctctcagtaaggataaagagggattggaaaaggggacatgggcaaggagaaccasagcaggagcatccgcaggcagaccagacattttaggacatggcacatgtggaaattgaggaaatggacatggattccctttcaaccacccataggcactgcagaaagtcttcctgtgcccccagagggccaggtgcctcagtctgaagacactgctctaagccatagtggacacaaagataaccctcatgggctctggggtctgctgacatttgcatgtttagttgtcaggcattttgaggaacacg

SEQ ID NO: 251761 - DNA, 573 bp, Homo sapiens
ccttggtgcaggctgggggcgagaaggcagggtggcaggagtggagaccatgggcatttgggccatttcctcatgtaacttacttgtgccttcaagacctgctcgagccttatcatgtatatacctcttccatttgatgatggaatgctgctgtgcatgaccaactttatggctagatagctcagaaagcacccagttcatgataagcagttcaggttgcatggtgacttgatgacccatagtcaaacgttcagtttccaccaaacctagtaacattccaaaagctgtctctcaaaaggtgagtagttatctgcagaagatggcagggccttgctccaaaatccaaggtctccactgtgattcacttatgggggcctgccaaaggctccaaacagcatccctatctgccactgacacmtaaagcactattggatctgctgggtcatatggcccaagtggcagagtagcttgcacagcaatctggacctgttgcagagccttttcctgttctggtccccattcaaaactggcagccttttggggaacttaataaatgggccagagtgacacacc

SEQ ID NO: 251762 - DNA, 508 bp, Homo sapiens
cagctccctgtaagaacccacgagttcttccttcaaaggaaaggtgtctgttacaggtcagttgtggactctggtctgtgtcgtccttgctctgggacccaaagatgtctgccacctctgggaccttaccaatcacagtggcagagggaacatgggaagccctgtaccagctcttaaagcgtccacctaagggtgatgcacttccactcacattgtactggccagaacatgccacacgrccatacagaccacaggggagctggcagccaccacccgaccgtgtgcctggaagtagatctggaatatttggtgaccagcactgactgtcaccacacgttctctcagctcacctgcacagctgaggggcatgcctcaagcccagtgagctgtcagtccgtctcgaatcagacccccagcccccttttcccacctcccaggtccttgtgggtctccatcaggcacactcacaaccttccttctctgttcctttctgtttctttgcctttcc

SEQ ID NO: 251763 - DNA, 520 bp, Homo sapiens
agggtaatgactatgtggaagtatgtttttcaggatagattgggttataccacagtaataaacaatctcaacagcttaaaacaataaagatttgtttcttgctcatattatatgtccatcatgcacaggtcggggattctgctcaacttcatccacatttggagacacaggctaacggagactccattacatagaatgtagctgattatcttggaagatggcagaagagatggagaatgcactcccacttaaaagtatgcttcagcacaacaactccactcatattttgctggccagatagagccacatggctatacgtaatttcaaagagacaaaaaagtataatcttcctgcataccaaaaagtagagtgaaaccagagattgatkaaagtacttatgataaaagtacttaaggaggtacaaaatgtgtaataagatcataaagaagggaaagcctaaggtagcctcgaatgtccagaagaacctctttcaggaaagtaactcttgtgataaaatttt

SEQ ID NO: 251764 - DNA, 343 bp, Homo sapiens
aacacacaaccacaaaaagcagatagcagtgaacaacacattcagaagaaagtggctgagggaaaactgatttttaaatgaaaaggcttaatataaagtgcttgcagagaagctgacttggccccccaaagaaayactcaagaaagtaaaatgctcttagaacttaaaaatgataactaataaaatgatcaatagaaaagcagtacagtgatgttgaagaaatcttctagaaagtgtagcaaaagtcagatagaaaacaagaatggaaaagttaaagacttggacaatcaatcctggagatccaactgcaggctaataggaattctagaaacaaaacagggta

SEQ ID NO: 251765 - DNA, 579 bp, Homo sapiens
aagtatagacatggctactgagtaagacttatgaaaatctagctcttagcacaactgtaagcacagaatgaatttagcaaacttttccacatctctgcagacaaagccctggtttttagtacagacatcctgaaaggttacttatcctgatgtcaggtgtagccttgagaagtccagtgattcaatgttcaggaagaaaatgtgtgaaatgtatctcaacaaattgagcctgcygtttaggaggctttgcatccatttttaaggaaaattattcataactactcaaacccaagcatgcaagtctgtagctaaagaattccaagggcaaagggttttccaggtgaagccaaatgtaacctttagataattgagagtagcaatatcacagaaaaagaacttcaagctttgttgctattgtttagtgtcagcatgagagttttcatcctgaattgctcttaaatcctgattcatttgaaaattaatccaaatgtcttcccaccaactcttctcccttctggtaaattttattaagcaataaattcacatcaaacattatttattgggaaacatcagatgaaa

SEQ ID NO: 251766 - DNA, 579 bp, Homo sapiens
atctacaagagctctgcagaatcacacgttgtgccacgggtcaatccatgtccaaaggaaagtccctgaaagccaggacagagaccagagtcacagcttgactctcatagcccagatatactgcttgctgatggctccactctgttgtttctccaaaccttggatcccaaaccctgtctcatgtctaaagactaggactcctcttttgctccaycttcctatattctggacttttggctgccagtctctggccatactctgcctctgtcccttgcctgacatgggccttcatctactgcaggcctatggaatcaaagaaacccaaccttcacaagtctaccagctccttcctgtttacatttttctccaccttcccaatgtgcagcttttaacctgccttagaccctctcttgacctttcttaggctagtttgagtctagaattttttctcatggaactcctgtcccaaggttctgttggaagttggtgagcagccacactggtgactgttttctctgccaaacatattctcttggttcctctgcttctcctaaagctattatacagagacctagccag

SEQ ID NO: 251767 - DNA, 605 bp, Homo sapiens
ctccagctcattcgatgccctggttgcacatgcattatcctgtttattcctcacaacaccctagaaatttggcccccaccatgagtctgaatgaaagagatcccagtgcaaggctatcagtccccagtcacagcacccagggtgctggccttccagaacaaggcattgctcctcccccagcttcacttgggtggtaagcaagtggaggcccacaggaaagccactaggtgagcagcagaaaccgatagaaggtaaygcaaagcacagttgcagggaatttattttgcttgtggtggcttcatgggaaaaccacagctacagggaggattagcaatcaggggtgggtggttcttccatgcagaggcattggcagagaacacattgggaaagtgaaaagcccaacaaagaaaatgctcacaccaggatgttcaaaaactaagattctgtttgtgcacccattgcagtggtccttaaccttggctgcacacacctaggactttttaaaaatcccgatgtatgggccccaacctcagtgattgcaagcatggggatttttttttccaagttccctagatgactctaaagtgtagcccaggtagagaacc

SEQ ID NO: 251768 - DNA, 605 bp, Homo sapiens
ctccagctcattcgatgccctggttgcacatgcattatcctgtttattcctcacaacaccctagaaatttggcccccaccatgagtctgaatgaaagagatcccagtgcaaggctatcagtccccagtcacagcacccagggtgctggccttccagaacaaggcattgctcctcccccagcttcacttgggtggtaagcaagtggaggcccacaggaaagccactaggtgagcagcagaaaccgatagaaggtaacgcaaagcacagttgcagggaatttattttgcttgtggtggcttcatgggaaaaccacagctacagggaggattagcaatcaggggtgggtggttcttccatgcagaggcattggcagagaacacattgggaaagtgaaaagcccaacaaagaaaatgctcacaccaggatgttcaaaaactaagattctgtttgtgcacccattgcagtggtccttaaccttggctgcacacacctaggactttttaaaaatcccgatgtatgggccccaacctcagtgattgcargcatggggatttttttttccaagttccctagatgactctaaagtgtagcccaggtagagaacc

SEQ ID NO: 251769 - DNA, 605 bp, Homo sapiens
ctccagctcattcgatgccctggttgcacatgcattatcctgtttattcctcacaacaccctagaaatttggcccccaccatgagtctgaatgaaagagatcccagtgcaaggctatcagtccccagtcacagcacccagggtgctggccttccagaacaaggcattgctcctcccccagcttcacttgggtggtaagcaagtggaggcccacaggaaagccactaggtgagcagcagaaaccgatagaaggtaacgcaaagcacagttgcagggaatttattttgcttgtggtggcttcatgggaaaaccacagctacagggaggattagcaatcaggggtgggtggttcttccatgcagaggcattggcagagaacacattgggaaagtgaaaagcccaacaaagaaaatgctcacaccaggatgttcaaaaactaagattctgtttgtgcacccattgcagtggtccttaaccttggctgcacacacctaggactttttaaaaatcccgatgtatgggccccaacctcagtgattgcaagcayggggatttttttttccaagttccctagatgactctaaagtgtagcccaggtagagaacc

SEQ ID NO: 251770 - DNA, 537 bp, Homo sapiens
cactcctggccctgaatctgaacttcctgctacacccagcctaggaccttcagagatttagtgcagccaatctctcaaagaagtcagtccccacatcccaaccaaagacctcaggtacagagactgcaggagacttcttggagttggagacaaatggttagtcttggtctgactacaggtccagagcttcattgactagtttcctggggcaattacaacaaattcatgaatttagtggcttacatcaacacaaatgtatcatctcacaattctgtaggttagaagtctgacaaggttcctgttgggctagaatcaaggggtcagcaggggggcgttccttgctggaggctctagtagagaatccatttccttgcctttccagctcttagargccacctgcattccttccttcttggccccctccctccatctccagaggcagccacagcaggttgaaccttgcaggcatcgctctttgtccgtagtcccatcttccttccactctcttctgcctccttttccacttttcagaaccct

SEQ ID NO: 251771 - DNA, 610 bp, Homo sapiens
gcatttttaaatgtagcctgcacctggggcagacagctcctccccacccccaccttggttttccaaggccatacaaggttgttattctacaggcctttaagttaagtaccattcccaaaaggggcatagccacagggtctcctgggagcaggattcagagtctagagaccactccccagttgtcctaagagactttgggctgcagaaggcttcctcccaccacctgcctcccgcctcccagtctccaagccccagtatcactctcctgtgtgctcactgttcccttctccacccattaataaaaacctgctcagcctcctgcctcagaagatcaatgatctgtcagaatcattctccttaaggtcttcatggaagagcaasacttctcccagaccttgctgcacctaaaaaatcagggatcctagattgtctatttgcaaaagatcatattgctagtggtggcaatgaagccatttcaggccccaaaagcagtcaatttgaaacaggtagcttctgacccctcagatcccccctgtgtaggtgaaccctgaatattctatgacatcagccttcttttaataaccaaacaaaatgacccaagcccctgtgt

SEQ ID NO: 251772 - DNA, 505 bp, Homo sapiens
cctccttccttcctccctctcttcatcctacaacgaatatatccagactttggggtggggtaccaattgcataagaccccagggtatctgtgcatgcacatcagaagtaaagtactccaggaattcctaaaaattacttccctagcatctcatttgtgaccacggacaaaaataatgagaatggaaaacatccttggccagggaagtcagctgtttctgttccctgattttgaatctgtgagcaaagctttgctgtctcgtctggaatcagaaaggtcagtttaaggttaagcccaagtraacggtccatcatgaagtaaacacagcacaacccagggctatgtgcaatgttattctttcaccttcttcctggaatttcagaggttgtacaaatggaacactaaagtgaacaaaataatgtaacagtgcaaaacaatgtcagtggagaaatgtttacttgagggttcaaaaaagaaacaaaacatactttaactatgaatgtgcc

SEQ ID NO: 251773 - DNA, 501 bp, Homo sapiens
ggtgcaaatcatcctaataactcatctactatctgaaaagtaccaggtgtagggccacaagtaaggagatcctttctatgcttttccgaatgtaatgacaactggtcattttccagtctctaggcatagttacagggattataatggataaagagtttacagtttgtgtaaattgcttgcagctggagaaaatgttcacaaaccaggtagcatagtaaataaagaaaaggaggaagtgaagaataccattctgactactgaccgaatctcaaactattcatttcacagtaaataagtgagaactaactacttcagtccctgccacccaaccatgattccatgtaagttacagcagtgaccgacaaaataggagagaacacagttgarttaaattctaagtgtatatctgatgaagaaaattgtcaaaagaaagagtaaggatgggattgattgtatttctatctgtggataaatgaaggctttagaagccagagaaccggg

SEQ ID NO: 251774 - DNA, 501 bp, Homo sapiens
ggtgcaaatcatcctaataactcatctactatctgaaaagtaccaggtgtagggccacaagtaaggagatcctttctatgcttttccgaatgtaatgacaactggtcattttccagtctctaggcatagttacagggattataatggataaagagtttacagtttgtgtaaattgcttgcagctggagaaaatgttcacaaaccaggtagcatagtaaataaagaaaaggaggaagtgaagaataccattctgactactgaccgaatctcaaactattcatttcacagtaaataagtgagaactaactacttcagtccctgccacccaaccatgattccatgtaagttacagcagtgaccgacaaaataggagagaacacagttgagttaaattctaagtgtatatctgatgaagaaaattgtcaaawgaaagagtaaggatgggattgattgtatttctatctgtggataaatgaaggctttagaagccagagaaccggg

SEQ ID NO: 251775 - DNA, 568 bp, Homo sapiens
ggccagtgagttaaaaggggcgagtcagaaacgacccagggaagcacctacaatgccactgaatgccttagccagggtggttctcagtcctggctgcgcratagaagcagctggggagttaaaaaatgtactaataccgaagccccacactaacatttctattatttttgaaatgcttctcaattcattctaatgtgcaggaagggttgagaagcaatgcattaacccaacaacactctggaatcatgctttccttccacctgagccctcagaattccctcacactctagtataaactagctgggctcttaaaccaagtgtctccaggtgctagacagtggtaaaatagaagagagaaacggatccttcctaggatagggaaaagatgagtctaattttagatcaaggaatctacccttttattttggggtcacaaaactaggtaattaatccataggttgaaacaataagaaaaagaaggtaagctgaaggagaccctcactgtttggtaaggggctattcctctccccagcctggaggtgaatttgccttattatctactgtattc

SEQ ID NO: 251776 - DNA, 568 bp, Homo sapiens
ggccagtgagttaaaaggggcgagtcagaaacgacccagggaagcacctacaatgccactgaatgccttagccagggtggttctcagtcctggctgcgcaatagaagcagctggggagttaaaaaatgtactaataccsaagccccacactaacatttctattatttttgaaatgcttctcaattcattctaatgtgcaggaagggttgagaagcaatgcattaacccaacaacactctggaatcatgctttccttccacctgagccctcagaattccctcacactctagtataaactagctgggctcttaaaccaagtgtctccaggtgctagacagtggtaaaatagaagagagaaacggatccttcctaggatagggaaaagatgagtctaattttagatcaaggaatctacccttttattttggggtcacaaaactaggtaattaatccataggttgaaacaataagaaaaagaaggtaagctgaaggagaccctcactgtttggtaaggggctattcctctccccagcctggaggtgaatttgccttattatctactgtattc

SEQ ID NO: 251777 - DNA, 583 bp, Homo sapiens
aacatcaatttttatccattctatctcccaagaatgccaaatgatggctggagagaatctcacttcctgtttccagacaatcagaagctggtatttatgaaaacttggaagtttgtgaagtcgattgcatggctagaagatccaaaggaagatggcaattctttaagatatctacattcattaaattggctaaaactttagaaaagattccttttaaatattatatttccctgattaaattaagttcaacaaacatttaagatgcctactgtattcggcattgttgcataacaaattaccacaaccttaccrgcttaaaataatatacatttgttatctcagtttccacaagtcaggagtccaggcatggctgaagcaggtcctctgctcagctgttcatatgttacagttaaggtgttcgtctggaggcttgaccatggaaaatatccacttccaagctcatttggattgttggtagaattcatttccttgtggctatgtggctgaaccacctgttttcttgctagccagtggctgggaactgctgccaactcctagaggccaccctcaggaccttgccaca

SEQ ID NO: 251778 - DNA, 593 bp, Homo sapiens
cctaataaaacatctgacacgcttgcatgaatccttttagactaagacgctgaggctgaattgtcctctgggaaaagaaagcaaaaatccaactggcctgcattactgaggagaccttgaaagactgacgtaagatagcccccgatggaagaaaacgggcagggtccatgggggtggccygcaggatcactgtggacctgctgggggtgcgacaaaggacaatgtgagaaggaggagatagtgacaataaactttggttatgccaaattttctgaagagccagcacttcttactgtgaaaaactgatctggagtgaagtgatgaattatcccatccaaaattaccaattcttttcaagaactcctttcacttttattcaatcccctaataaaagcaggcttgttgtcctcattaagcccaatgtattggcatctgaagtgtattgatgtactcgcatgtgatttccctaattacactggaacttgcaatgcccaagaactctgctgatgaaaataatccttctgtaatatttcctttttgactgggcacctctgggcattaaaaacacattttcaatgaaaactaggaagggc

SEQ ID NO: 251779 - DNA, 551 bp, Homo sapiens
tgtttgcccttatggacaagatcaccagcaaaatgaactaacaggttagaggaccgatcagttgggttactggtcaccccatgccaagtcacacgctgcctttagcatgtttcayttctggagctggaagtgctcaccctacacagaagaaattttccatttgcaggagtggattattttttccagcctcactgaggaatatgccaggactgcagccattcaaactctggcaccacctaagaaaagcttaggaggacatgcaggcctgtggcacaccttgaacccagaagggccgggtgtctctttgttactgcctagtaatatagtttggatatttgtccccacccagatctcatgttgaatcgtaatccctaatgctggaggaggggcctggtgggaggtgtttggatcatgggggcagatccctcatggcttggtgccatcttcacaatagtgagtgagttgttatgagacctgctcatttaaaagtctgtaacaccccccaccaccatccccaatctctctcgcttgctcctgctttcaacttgtgg

SEQ ID NO: 251780 - DNA, 551 bp, Homo sapiens
tgtttgcccttatggacaagatcaccagcaaaatgaactaacaggttagaggaccgatcagttgggttactggtcaccccatgccaagtcacacgctgcctttagcatgtttcatttctggagctggaagtgctcaccctacacagaagaaattttccatttgcaggagtggattattttttccagcctcactgaggaatatgccaggactgcagccattcaaactctggcaccacctaagaaaagcttaggaggacatgcaggcctgtggcacaccttgaacccagaagggccgggtgtctctttgttactgcctagtaatatagtttgratatttgtccccacccagatctcatgttgaatcgtaatccctaatgctggaggaggggcctggtgggaggtgtttggatcatgggggcagatccctcatggcttggtgccatcttcacaatagtgagtgagttgttatgagacctgctcatttaaaagtctgtaacaccccccaccaccatccccaatctctctcgcttgctcctgctttcaacttgtgg

SEQ ID NO: 251781 - DNA, 579 bp, Homo sapiens
aagtcacacgctgcctttagcatgtttcatttctggagctggaagtgctcaccctacacagaagaaattttccatttgcaggagtggattattttttccagcctcactgaggaatatgccaggactgcagccattcaaactctggcaccacctaagaaaagcttaggaggacatgcaggcctgtggcacaccttgaacccagaagggccgggtgtctctttgttactgcctagtaatatagtttggatatttgtccccacccagatctcatgttgaatcgtaatccctaatgctggaggaggggcctggtgggaggtgtttggatcatgggggcagatccctcatggcttggtgccatcttcacaatagtgagtgagttgttatgagacctgctcatttaaaagtctgtaacaccccccaccaccatccccaatctctctcgcttgctcctgctttcaacttgtggcatgcytgttcccgcttcccgttctgccacgattaaaagctacctgaggtttcaccagaagctgagcagatgccagcactatgcctcctgtatagcctgcagaactatgagcc

SEQ ID NO: 251782 - DNA, 403 bp, Homo sapiens
aatataagaagacatcaacataagacacaccattgtcttatgtattgctaccaaaggaaacatgctgccaattatactatgacacaccaacacagcaagacagagtctggtttccaagatttcaaatactcaactaggaaaaaggtatatattggaaatgatgaacacagtatcaaagtggaatatgaatctgttgtgggggttacagtgaaacctccatcatcttycctttgaatctccacagtaaactccacatttctcacaaatgctttcgtgagcattgattattgagaggaggtggtagcaaggaaaaactcccagaagtgccatttgtgtgtgtgcacgtgtgcacacgtgtgcagaggcagagcaaagacaattttagcaaattcaaaatgtactt

SEQ ID NO: 251783 - DNA, 550 bp, Homo sapiens
tgcggtggctcacgcctgtaatcccaacactttgagaggctgatgcagaaagatcgcttgaggccagcagtttgatatcagcctgggaggtatagcaagactccacccatctctacaaaataaaaattaaacaaattagccagtcacagtggtgtgtatctatagttccaactactcaggaggctgaggctggaggatcgtttgagcccaggagtttgaggcttgcagtgagctatgattgtgccactgtactccagcctgggtgacagagggagatcctgtatcaaaattaaaaccttaaaaaaatcccctctcatgtatctatctatagacagatatagatagatagatagatagatagatagatagatagatagatagatagayagacagacagacagacagatagataatatagatgggtagataataggtaggtagatagatggatagatagatagatagatagatagatagatagatagatagatagatagagatataggtgatatagatatagatacagatatattaatagatataccctact

SEQ ID NO: 251784 - DNA, 550 bp, Homo sapiens
tgcggtggctcacgcctgtaatcccaacactttgagaggctgatgcagaaagatcgcttgaggccagcagtttgatatcagcctgggaggtatagcaagactccacccatctctacaaaataaaaattaaacaaattagccagtcacagtggtgtgtatctatagttccaactactcaggaggctgaggctggaggatcgtttgagcccaggagtttgaggcttgcagtgagctatgattgtgccactgtactccagcctgggtgacagagggagatcctgtatcaaaattaaaaccttaaaaaaatcccctctcatgtatctatctatagacagatatagatagatagatagatagatagatagatagatagatagatagatagacagacagacagacagacagatagataatatagatgggtagataataggtaggtagatagatggatagatagatagatagatagatagatagatagatagatagatagatagagatataggtgatatasatatagatacagatatattaatagatataccctact

SEQ ID NO: 251785 - DNA, 560 bp, Homo sapiens
agagttttgagggacctttggttcaatatcctacacaatgtgggaatatatgcattgaatatttgacctgtatgaacagagtgtataatttgtgtataacttsatttttggaataggtatttaattatttgggaaatgtcatttgctatggtaccctaaaactctgagatgtttaattaagttcatattagtgcacattttattctaaaggatgattttattcatgatttttcaattaatcaatttataggtctacctaactcaatacaatgcaataggtgtgtgcatgtgtgtgtatacacacactatataaactatgtggaaatcatatattcatcaacaaaatcatttaaagtgcaccaatcatgtcactaaacaaatgttaagataaattattccataaaatgaagaatagtttaaacttcagactatttgacctctaatctgtgttttgcaggtctagatttttaatccgacctttctgaaaatgagacccacctatataggcacctacagttctggattttacaatgacgagattccccagaaaaatgactgtg

SEQ ID NO: 251786 - DNA, 560 bp, Homo sapiens
agagttttgagggacctttggttcaatatcctacacaatgtgggaatatatgcattgaatatttgacctgtatgaacagagtgtataatttgtgtataacttcatttttggaataggtatttaattatttgggaaatgtcatttgctatggtaccctaaaactctgagatgtttaattaagttcatattagtgcacattttattctaaaggatgattttattcatgatttttcaattaatcaatttataggtctacctaactcaatacaatgcaataggtgtgtgcatgtgtgtgtatacacacactatataaactatgtggaaatcatatattmatcaacaaaatcatttaaagtgcaccaatcatgtcactaaacaaatgttaagataaattattccataaaatgaagaatagtttaaacttcagactatttgacctctaatctgtgttttgcaggtctagatttttaatccgacctttctgaaaatgagacccacctatataggcacctacagttctggattttacaatgacgagattccccagaaaaatgactgtg

SEQ ID NO: 251787 - DNA, 560 bp, Homo sapiens
agagttttgagggacctttggttcaatatcctacacaatgtgggaatatatgcattgaatatttgacctgtatgaacagagtgtataatttgtgtataacttcatttttggaataggtatttaattatttgggaaatgtcatttgctatggtaccctaaaactctgagatgtttaattaagttcatattagtgcacattttattctaaaggatgattttattcatgatttttcaattaatcaatttataggtctacctaactcaatacaatgcaataggtgtgtgcatgtgtgtgtatacacacactatataaactatgtggaaatcatatattcatcaacaaaatcatttaaagtgcaccaatcatgtcactaaacaaatgttaagataaattattccataaaatgaagaatagtttaaacttcagactatttgacctctaatctgtgttttgcaggtctagatttttaatccgacctttctgaaaatgagacccacctatataggcacctacagttctggattttacaakgacgagattccccagaaaaatgactgtg

SEQ ID NO: 251788 - DNA, 512 bp, Homo sapiens
ctttctgaaaatgagacccacctatataggcacctacagttctggattttacaatgacgagattccccagaaaaatgactgtggagcatgttattatcatgtggaatatttgaggattaaactggttctctctagtatgttccagaagccacatgcagatgaccttcarattcctcccttcttctgcttccttctgagatgggtactggttgattgtcgattccatcctgatgcagcctcaactcgcagcctgaccctgccagccgactaccatggtctttgcctgttatgtgcccatgtggacagcttgtatggcacctagagtattcacaggaaattagctcatcaactcttcacccaacctgatgccagacacacaacttgtaataggtggaaaaaataataatgtgatgacatcattagtttctcctccctcttcctcgctagcagaaccccaactgtccaggcagcattgtgcccagtcccagaagctgattcatggttagtctaca

SEQ ID NO: 251789 - DNA, 568 bp, Homo sapiens
tatagggactattgcaataagattttgcagttggggagagagattgtgctcaactctgtatatagcatggggcaagtgggaatttatagagaaggagcagggtaggagaagtgaatggacaactgctaagaggaagcatcaagggtaaggagggttctggctaacacaacctaacaggattcttgcttatgacaggctagggttattagatttcgtctaagggatgttggaggatgaggaacatattgatggtgatcatatatcaaggatgcgggtgatggggggcagttgctaaactgactcaacagtttgttgctaaatctgattttacaagaaagtatacagacaggcctaggagaaggttcaggagcctgaataaagtttggtcaagcaaagaatttttatcaccctccataacaaggaagtacctggcccgatatgtaaacagtgcccaggatraaaaaccttagaataaatgaataaatgaatcaaggagttatcacatattgttaagcaaaaaagtagattataaaagattaaaattagtgtgattccctttttgtaaaaa

SEQ ID NO: 251790 - DNA, 485 bp, Homo sapiens
ttggtcaagcaaagaatttttatcaccctccataacaaggaagtacctggcccgatatgtaaacagtgcccaggatgaaaaaccttagaataaatgaataaatgaatcaaggagttatcacatattgttaagcaaaaaagtagattataaaagattaaaattagtgtgattccctttttgtaaaaaaccccaaacaactgtgcatatgtaatgtgtgtgtatgtatatgtattcacaaaaatgttaacaattattagctcagaatgatgaaatcatggatgaattttacttacttttgctttattttgttaatctgtaatttcttatttttccatagttaattacattacttgaacaataagaaaaatacagtttggtttctaccaaagaaagaacattgactgtggcatcagaaagagcagggtytgaacactagttgtatctctcacattttaatcttctgagataattgtcttgctggtaaa

SEQ ID NO: 251791 - DNA, 596 bp, Homo sapiens
gaagaagtggaggaagcacgcactggctgccgcgggaaaagctcagccagcaactgtatcagctttacattcgaccctcctttgctgcatggcaaaaagaaaataaactaccatttcttagttcgtgttttattttcagctatttcttgtttccttggtttcgattctaattattgctrtagacgccttcaggtggtggaagccaaggcaaggaacccctgaccgcaatttcctaacctttgggcagagtgtggggtgtggggactccccgcctgcctttccccgcccccccttcatagagacctaaaaacctttaaaaaggatctaacactagctctattatctaccctgtagcctactcaactaattaattcagacatttataattacacaccaaaaaaaaaagagagagagaaaaaaagttaaaccgttggaactacaaacattaaacatgagcagttcttagggccaaaatctctgaatgtgactgcgacagatcgcacttgaaacgcctgtatgaggtaaacggaaatggccagagaaaatgaactgacgggtatgtgtatttccaaatgtactactatcagctaaaaaag

SEQ ID NO: 251792 - DNA, 596 bp, Homo sapiens
gaagaagtggaggaagcacgcactggctgccgcgggaaaagctcagccagcaactgtatcagctttacattcgaccctcctttgctgcatggcaaaaagaaaataaactaccatttcttagttcgtgttttattttcagctatttcttgtttccttggtttcgattctaattattgctgtagacgccttcaggtggtggaagccaaggcaaggaacccctgaccgcaatttcctaacctttgggcagagtgtggggtgtggggactccccgcctgcctttccccgcccccccttcatagagacctaaaaacctttaaaaaggatctaacactagctctattatctaccctgtagcctactcaactaattaattcagacatttataattacacaccaaaaaaaaaagagagagagaaaaaaagttaaaccgttggaactacaaacattaaacatgagcagttcttagggccaaaatctctgaatgtgactgcgacagatcgcacttgaaacgcctgtatgaggtaaayggaaatggccagagaaaatgaactgacgggtatgtgtatttccaaatgtactactatcagctaaaaaag

SEQ ID NO: 251793 - DNA, 664 bp, Homo sapiens
aaaaatttgttagttgttaatccatatttaatccatgcttaaatccatatttaatccatgaaattttttttttatgcttatataataaaaccatgactttatatgtatattacrctttatgatgcgccaaatacttttccatggcatcttattttatacttaatacaattgtgacaggaataaagcaggttaatgcctgaattctacagataaggaatctaagtctcaagttacacaattttgaaacccaggatttagtttgatttatactatttgtgttttctttgttaacataattttggataaaaacaaatattctgcctttagtgtatatgaagatatattatgatactgtatttacaatgatcaaaattatttgccatgctttactagaacaacggctgctaaagaacaagaaatagagtttgatacttccttactggaagaaaatgaaaatcttcaggcaaatgagatcatgtggaataacttaacagcagaaagtttgcaagtaatgtaagtattcacaaaatatcaacagtttaaatactagtattattattgctttattgttgtactcagatttaaaatatcaattatttttacaagtattgaacagtaaatttttggggtcagagtgacatgttttgagaaatatgttaatttt

SEQ ID NO: 251794 - DNA, 569 bp, Homo sapiens
tggcaactgttgaaatataggatttattctaggctaaattttggaaaatttcagcctttgcatctaagaaccaaaaattcatcagctgtgaacatttcattactgtccattttgcttcctgtcttttgtacaagtttaggctgccaggcagacactggattattattttyggagaatgtgcccagataaattgtcactagctttcagcttccatctccctgtgctagagtttaacagaaaatagtttgctgtaggaaatggacttagaattaactctttcctcttctgcatcatgattaggactctgttgccgaaacttggaaaagtccaaactttttgatatttcccatcatgatgagacaaaagaaaaatagaaaactacatgaaatacttttatagaaaaaaatcttatttttttgtacttttatttaaggcttaagcaccctttattttttatttgaaaacttcagaacttcagtcaaatcttgcttttagcctttttaatagattgcacatgggttttgttttttgtttcttgttttatcatgttagtgtttccaacaatatta

SEQ ID NO: 251795 - DNA, 569 bp, Homo sapiens
tggcaactgttgaaatataggatttattctaggctaaattttggaaaatttcagcctttgcatctaagaaccaaaaattcatcagctgtgaacatttcattactgtccattttgcttcctgtcttttgtacaagtttaggctgccaggcagacactggattattattttcggagaatgtgcccagataaattgtcactagctttcagcttccatctccctgtgctagagtttaacagaaaatagtttgctrtaggaaatggacttagaattaactctttcctcttctgcatcatgattaggactctgttgccgaaacttggaaaagtccaaactttttgatatttcccatcatgatgagacaaaagaaaaatagaaaactacatgaaatacttttatagaaaaaaatcttatttttttgtacttttatttaaggcttaagcaccctttattttttatttgaaaacttcagaacttcagtcaaatcttgcttttagcctttttaatagattgcacatgggttttgttttttgtttcttgttttatcatgttagtgtttccaacaatatta

SEQ ID NO: 251796 - DNA, 608 bp, Homo sapiens
ttatagccactatatttttggtattcttgaaatattttatgtaaaatactcagtgattgttttgaagtaggattcaaattgctttaaccaagtatttatgtagatttttaagtaatttgaataacaatgatgtaaacattctcacacctgtgtttgtgtgtgtgtgtgtgtgtgtgtgtgtgtgtatttggttaattttgtctcataatgaagattgctccaaataaatatgatttgacaataactgcaatatctacagtggcagacaccaattggttcttcccagaacatcatagaaaaaattatgatgataaattgtgataatcttgaaatgttttagtatatactacctcaagccaggkgatgaagcaaaggagataatagcattcatgacggtatattattacacttagcttcagaactagatttgttgccttagatttttatcccactttatccctcaaagagttgagactctgaatgcctgttctttgtgttcagcaaggtgcccagtataataactacatagtgcggacatttgtggagtctgtacaaatctgtctccccctcctagattgggagcctccaagcagtggacctgccgtgtt

SEQ ID NO: 251797 - DNA, 608 bp, Homo sapiens
ttatagccactatatttttggtattcttgaaatattttatgtaaaatactcagtgattgttttgaagtaggattcaaattgctttaaccaagtatttatgtagatttttaagtaatttgaataacaatgatgtaaacattctcacacctgtgtttgtgtgtgtgtgtgtgtgtgtgtgtgtgtgtatttggttaattttgtctcataatgaagattgctccaaataaatatgatttgacaataactgcaatatctacagtggcagacaccaattggttcttcccagaacatcatagaaaaaattatgatgataaattgtgataatcttgaaatgttttagtatatactacctcaagccaggggatgaagcaaaggagataatagcattyatgacggtatattattacacttagcttcagaactagatttgttgccttagatttttatcccactttatccctcaaagagttgagactctgaatgcctgttctttgtgttcagcaaggtgcccagtataataactacatagtgcggacatttgtggagtctgtacaaatctgtctccccctcctagattgggagcctccaagcagtggacctgccgtgtt

SEQ ID NO: 251798 - DNA, 547 bp, Homo sapiens
cttgatggtgtttataccctggagagaggagcaggaaataggctcaggctagctcctgtttttaagyggtatttcagatgtctccgtatagagaagaaggaaactgtactatgtattcttagcaaatagattctccctgctgcttaaaatgacctttcctccaccttgtttaattataagccgtggtgcattgtttcatggccttgtaggtccgggatctataaaattatctgcaattatcacttcattttagtagaagcagtgaatgacacttggcagtttcttagctttaagttctctggccacacctgcttgattgcttgcttgcttgattgatggattggtttatgatatttgattgtgacagctgttttaaatttatttttatttaaaaaatttttccaactcttttgaaaaataatttcaacttttaggttcaggaagtacgtgtgtagatttgctacaggagtatattgcatgacactaaggtttggggtaaaaatgatcctgacacccaggtagtgagtgaatatagtacccaaacagt

SEQ ID NO: 251799 - DNA, 547 bp, Homo sapiens
cttgatggtgtttataccctggagagaggagcaggaaataggctcaggctagctcctgtttttaagtggtatttcagatgtctccgtatagagaagaaggaaactgtactatgtattcttagcaaatagattctccctgctgcttaaaatgacctttcctccaccttgtttaattataagccgtggtgcattgtttcatggccttgtaggtccgggatctataaaattatctgcaattatcacttcattttagtagaagcagtgamtgacacttggcagtttcttagctttaagttctctggccacacctgcttgattgcttgcttgcttgattgatggattggtttatgatatttgattgtgacagctgttttaaatttatttttatttaaaaaatttttccaactcttttgaaaaataatttcaacttttaggttcaggaagtacgtgtgtagatttgctacaggagtatattgcatgacactaaggtttggggtaaaaatgatcctgacacccaggtagtgagtgaatatagtacccaaacagt

SEQ ID NO: 251800 - DNA, 519 bp, Homo sapiens
ggccttggaataagtgggctagttatctactggcatttgatagtttcaggtctgctaggaggtcaatcccctctgaccgcaaaggggatttccatcttaaacacatctaccacatgtcaaacattscagtattagaaattcattctgctggatcttggagatgtctttggtacctcactgaaatgtatgtacctttggtcagggcaggttgtcgcccaaactaaatttagcacagcagaagacaattcattaatgggatgcttctggtgaagtggcaagaaacaaggctagcagaaagttgagcaggtattgagaaccattttaccatatgactacattaataaatgtatgaaaagaataatgaacttattttaccactttctaattttgcctttcttggttaggcacagtaaagggtgtccagagatgagatggaagatgagagtgaccaacagagggagaaaatattgtcaaaaagtagttaggactacaaagcaggggaacttgatggtagcttct

SEQ ID NO: 251801 - DNA, 596 bp, Homo sapiens
ttttagtttgcatgtctgtttatgtaccaaattatgaagtatacccatatctggattggttgagagatttgtaaatatgatgtgaacaaagaactataactgaagtgcacaatacaccatgtactttggaatcttttgtgacttaattctttttaagcttaatgttgaatattacgtggactttagaaattgtcacacttgaaactggataaagttttygagtatttgatatgcttttggccattcttaacttttaatttatactgtatattgacattaacttaattgtttttactgacattcttaattgctttttggaattcattagctggtataatactaaagtaataaatacgttgtgtttttctaaaggcatctgaaatagtggagctaaatactaaaactgggataaaaataatggtaattttagcttacaaataaagacaaacaaatgtgaggtctctattttacttatggaagtagaaggacatcctcatgtaggttctacctatgtttacttgattaagtagaaaaaattattagtttattctgtagccaaaaataaaatggtgaaatgattggtatatattattgaa

SEQ ID NO: 251802 - DNA, 630 bp, Homo sapiens
agaacctgttccatgcctcttctagcttctggtggtttgtgggcaatcttttgctttccttggctttcagaagcatcatctccatctctgcttttatctttacatgacatttctctggtctgtacgtctatccctgtgtcaaaattccacttttttataaggacacagttatattgatttagtgtccaccctaatgactccatctgaccttgatcatcagcaaagaccctatttccaaataaggtcaaattcaaaggtaccaggtgttaggacttcaacagctttccaggggcacaattcagtgcataataccccttctgttctcatccctactgctcaagtctagaaggcagattctatctgccagtagacatggcccaattgagcatgttgtggtttgtggaatgtctcctcttttcttactgagttcttcagaatggggtccatagtcccattgatagagagtgaaaggactgtggaaaaacacagggataagacaaattrcttgttggggagaggacaattgaagggttcatttgccagtttgcaaagtcagaaagaagtacgagttgctctttgctgctgtttctttcacgctcaatccgggctttcctccacagctcattaagg

SEQ ID NO: 251803 - DNA, 555 bp, Homo sapiens
tttttattccacatcattgatattcacttctttcccagggcattttcctggataatgagaagactctaaaatcaaataaagcttttgaacattgaagatgtttgccactgttctgttgaagaatcctatagatttatagtgattctaaaaggtgtcttatatccactatattaactagctttttagaagcttatgaacattgtagcttttattgattctagggaattggacccaacaataagcaataaaagtcgatggtaactttcttcccatatagggttgtgcagatcaatacttcgaatttactgtaatttgctggtaatggatggaagaactgaaaaaattgtggagccttgtggggcacagctgtgcggtgttgcctttttatctaagctcactgtaggtcacaggctttcccaagtaacaagaaacatagttaagtggcagggctgatacgcatayttatcaagagccttcataaatcattctaggaaaaaaaggaaatcacaaaagttgtccacaatgactttaattttatagagatcctgaaggatc

SEQ ID NO: 251804 - DNA, 533 bp, Homo sapiens
gacacatgtcccacctctaggaaatggagaggaggaaatcacctttcctcagtcttttttgttctgtctgggccaccatctgattgggtagtgcctgccgacattgagagaaaatcttcttcacttagttcatggactcatatgtcaatcagtctcctctggacacaccctcaaagacacactcagaaataatgctttaccagttctccagatgtttcttaatccagtcaaattgacacctaaaattaaccatcacactgtacttcccctttgctttaatgataaarctctgctttttgtcaggatggtaatgttttcagctaaaaggatatacttatcagcctccctctctcacagctagatacagttatgttactatctgctggctgatgagatgtaagcagagggaattaaattcaagggatagacagctggttgggcacctttttccttttctcctttatctggaatgaatttgtgttggccagagctccagcagctgtattggtccatgaaataaacatgaaggtaga

SEQ ID NO: 251805 - DNA, 460 bp, Homo sapiens
tatattcagtctaatgattctggtattagtttctctttctaaagtgttttcttttccttgtagttaacccatatttttttatgattataccctttattttagttttgtttttatgttaatagtttcttcttttataccaccttttcttgttgtcattggcrgcaaaactggaattttatatttttctgtgggatccattcagggcacttagctgttatatttatattaattctaatagtttttcagttgagtctgtttggttttctagatacaaaattatgtacaaataatgataatttttcacctttttcaatacttttacctcttttagaactgtcatattgcctagaatcttattccaaatcagcattacataatgattatggtagatgttttttcttataatgcttttactgccttattaagataaatctagactgttagtgtaaaatatgctccc

SEQ ID NO: 251806 - DNA, 570 bp, Homo sapiens
ctgggtggcttataaacagaaacttatttcttacatttctggtgrctgagaagtctaagatcaaggtgctggaagattctggtgaggggctctttcctgttcatagatggccatcttcttgctatgtcttcttcatatggctgtaggtagaaaggggtgtggcagctctttggggcctcttttataaggtactgatgccatttatgagggtcctgccacatgacctaatcaccttccccttccaaataccatcatattggggggtaggattttggtgaaatgcaaacattcaaaccatagcactggccatctccattctacctcttatcaacccacttaacattagaaaagttaagtatcccttctatgtcttaatttcattaccggtgaaatgaggttgataatagtatctacctcactgaattaaatgtgataatgcacattgggtggtagcccagagcaaccatttataaatggaagctatggttagtatttctagcaaaaatgcatgttctcattgtgtttagtgtacaggttattaaacaaggccctgagataaaggaatattta

SEQ ID NO: 251807 - DNA, 563 bp, Homo sapiens
aaacctggttgagaaccactactctagagaatgcatagaagagatctagccttaaaccattcctctgggtttgtttaaaccccatatttccaccattaatgcagcagtggtagggaagactccttaacttccaccttgtcatatatatatgtcttctcagtcatatcgaagtactgtggtttaaaccaatgtccccccacaacccacccacctctactgataaaaatatatcacactactctagtgtagccttaggttcctcttctgcacacacatgtatacagctagtccatgatgtatgccttccagccggcaaaggtcttttctgggtcttcatgtggtatctgaacatgtcccaattytccattttcttaagaccactctttgaggtcattgctctgacactgtttagttatgtaacactgtggtgagctacaattatttaaacaatgaaaaatctcctgaattggtggtttctgcaatatagggagggtcattcattcattttcagcacatatttattgaatatttatgtgggctgctcttggcactgggattaaaca

SEQ ID NO: 251808 - DNA, 532 bp, Homo sapiens
actcattcttctacttaaccctcctctctctagctggaaatgcataactaagccatagctctrtgtttaaaacccaggggcattaacctcccgctttgcttttgcctctgttttttgttgtgctgtttcctggttgttttctttggacttagtagatatcatttcacattaggctttttctttctttcctcttcttcctttactttttttctttcttttctcaatcttgtctacattaagaggagacacttcaaagtaactttttaaaaatatgaactcagctgtgtcaaacattccattttatgattagaaggactgaattatgccacgagttttatgaccttgccagcgtcgacacaggacataacagtcagctaaacacaggggatctttggatgttgttttggtatcaggccacgccccctccttctatcctcttatcttggtaaatattactgtgcatttaaaataggtaattctgtttgcctagggagcgtgagagtggaatagagaatcactcttaaatatcatt

SEQ ID NO: 251809 - DNA, 532 bp, Homo sapiens
actcattcttctacttaaccctcctctctctagctggaaatgcataactaagccatagctctgtgtttaaaacccaggggcattaacctcccgctttgcttttgcctctgttttttgttgtgctgtttcctggttgttttctttggacttagtagatatcatttcacattaggctttttctttctttcctcttcttcctttactttttttctttcttttytcaatcttgtctacattaagaggagacacttcaaagtaactttttaaaaatatgaactcagctgtgtcaaacattccattttatgattagaaggactgaattatgccacgagttttatgaccttgccagcgtcgacacaggacataacagtcagctaaacacaggggatctttggatgttgttttggtatcaggccacgccccctccttctatcctcttatcttggtaaatattactgtgcatttaaaataggtaattctgtttgcctagggagcgtgagagtggaatagagaatcactcttaaatatcatt

SEQ ID NO: 251810 - DNA, 657 bp, Homo sapiens
cacatgtcatctttaaaccaattactttgatgaaagcagtgagttttgtcattagtttaattggagcttatccttgagattgaaggtagtatcagttccactgtattttgttagcatgaataacaagaaacattggggaagaaacagtcctgaccctcctcagagaaactgatcaccctcctcccttttgtattactgcatactttgaaaagacctctattccaggccttttcacactgtattttacagtgagtaaagtcctttctccccagtgtctggcacagcaccagccatatccacctttactaaaaagtatgtgattgaataaaggaaacccattttgttggctttaatccccacatgtgcccttgcctttgcccttggtagaagacttttgccttctgtattactgaaattacagaacttcaagtgaattgcttcagttttactttgcttatctttgaaaagtgcctgttttcacctgttcctttcttcctcgttaggggaaagagtgccctctttattatcagtacsagccctccctgctcgtgtatttattcaaacctctcctttcagttgctcacatcaccactgtctcccactctctgacattgccgtggtggagtataggggaaaaaattggaactggatgacata

SEQ ID NO: 251811 - DNA, 651 bp, Homo sapiens
taactacatctgttttgacaaccctacagcttgtgggaaaaataactgaaacatgaaaaagtactaatttttatcatatgaaaaaattatctaccattagaaaaatttggccaatcctataaattctttggcttagattaaatagataataatgttgaagattagtggctttttaacatatagagaactgataaagaggaggaagtaaggctcagagaggattacagcatatgagtctagctatcaaagtcaggtcacaatcaaccatccrgggcagcatcatgcaattatgatctttgaagtctatttctggagcctccaactagtccctgtttccttcagtcccttgtccatataaccaccagagtaatcttcctcaaagactcattcacatattctcccaagtcctactgcacagtttctcaagtttcagggtgcatcagagtcacctaggggtcttgtcagtatgaattctagtatgaattcctagaatttggcaggactggaaccttcactccaagaagcagtcctggtgggctaggtggattgagagccacctagaagaaagctgggctacaggatgaaatccagactccttgtcctggcattcaaggcttctaaatctgatccctacctcctttttccacacat

SEQ ID NO: 251812 - DNA, 611 bp, Homo sapiens
ctttacatgtttcaatctgttttgattccctttgacaaaattccatcttttgttgtgagttgctatcaatccaggtgtctttggatgaaatttgtaggtcatctcttcttatctgctctgagcatatcatctgtgcaaggtgacttagtttagtggtatacgtcttatgtttaacatagcatcttgcttcctttctagcatgccaacagctttgcctactcaagtcaatgccatgaacatttcttattatgcatcrtagtgtacatgagtggttttgtgtgtctatcatcactcccccctcactctgttaaaataaatcctattcctttggggattccaaccataaagttatagtttgggctgaaacccagaatttctatgaccaaaggtatatttggtcatagaaacaggcagtaaaaaaaaaatgcctactattgtagcctcatttcctggttacggtccttggttcaggatgggcccactacacaagatcagtcttttgggagttgtccaagtgaaggctacataaaaggtcttttttcttctcatctcttaaaataaagtgatataagcccagtatttcctgtggccatatactttgttgtgagaaa

SEQ ID NO: 251813 - DNA, 581 bp, Homo sapiens
aataatcatcagtcatttcatagtaaattgtaagagcattgctagtgttcacatgtttaatcacgggatgatacttctgccatttcatcctcaattctgatacctccagttcgtgtttgcttatgaaacagggaccacttgagggactgatgagtttgttgcatgttgtaggcactgatgtgcttttatttaactacactgrttttctggttttatcatttttctcatagttgtcaccaacttgtggtctcataattgttaccaacttgtgaagtaggggtgagagaaactgtggtacttctctctaaatagcttgaatttcgtctgacctagttttcaaaagcaaaaaaaaatgaacagtaacagtgcagttaattagtaagacctccttacctaagatctcattctaaggtctgagagataggacaacagacaggaagagggttgtcagaaaaatacatttaagacagaaatgttcggccaggcaccgtggctcatgcctgtaatcccagcactttggaaggccaaggcgggtggatcacgaggtcaagagatcaagaccatatacaaatacaaaatta

SEQ ID NO: 251814 - DNA, 529 bp, Homo sapiens
aagctggattagatacagtccctgccttaataataataataataataataawaagctcagagcttaacaccaaagactgacttggaagcacatcattgtaaaagtattttaaattgtaaagaactgttcaagcttatagaaaattgagtgagaaaaaatgttattaaccataatatcaatatatccaatcaaaaccattaggtttttaaaaactatttcaccaaatgcatgtcaatatggaagtagaaaaatctttttgaataagattgtgtttgcatgatatgccacaaaatcacttttctactagtaatcagttaagcttaaagttaaattaatgttggctgcataaatggtcaatcaacaattagagcaaatgctagaatccaggattcaatgaagatttttgaataaaatgttaaatattattaggtgttggcactgacttagccatccgattgaaaaaaaaaagattggaatgcaatatagcagaaaatgatgtttgtgtcagatgactacaactactactggt

SEQ ID NO: 251815 - DNA, 529 bp, Homo sapiens
aagctggattagatacagtccctgccttaataataataataataataataaaaagctcagagcttaacaccaaagactgacttggaagcacatcattgtaaaagtattttaaattgtaaagaactgttcaagcttatagaaaattgagtgagaaaaaatgttattaaccataatatcaatatatccaatcaaaaccattaggtttttaaaaactatttcaccaaatgcatgtcaatatggaagtagaaaaatctttttgaataagattgtgtttgcatgatatgccacaaaatcacttttctactagtaatcagttaagcttaaagttaaattaatrttggctgcataaatggtcaatcaacaattagagcaaatgctagaatccaggattcaatgaagatttttgaataaaatgttaaatattattaggtgttggcactgacttagccatccgattgaaaaaaaaaagattggaatgcaatatagcagaaaatgatgtttgtgtcagatgactacaactactactggt

SEQ ID NO: 251816 - DNA, 231 bp, Homo sapiens
caactttttttgtagtagttaaaaactgtcaaatatacaaatgtctataattcttagaatggataaattatgctatgtcctttacaggtcatgtgaagccagtagtactytcatacaaaaactgaacaaataagtataaaaaaggaaatggccggctgggcacggtggctcatgcctgtaatcccacactttgggaggctgaggcaggtagatcatgaggtcaacagattg

SEQ ID NO: 251817 - DNA, 580 bp, Homo sapiens
ctcatatctgtctactcctgctaatcctagaaaagggcttagattgcctttgccctgtctccaagaacccaagtttcctgcatctgccagagcaagagaaagactacagtgattagcaacttttcacgtacctgtggattctcccaagacaagcccatccccatccccaagaataattgctttcaagctcrtcatggtctcccttctttcttccagaaagatgccttgggattatgtctcctttttcccagacaaacttttaaaacataatcaaaatataactaggttttaagatagacttaaggtaacaaagcctgacttatacatatgtgctagagttaattacagtagtccccacttatggtggttcgctttccacaatttctgttaccctagggtcaacaggagtctgaaaatattaaatggaaaattccagaaatacacaattcataaattttaaactgcatgctgttctaagtaacataatgaactcttgagacatcctgctctatcctgcctgggatgtgagtcatccatttgtccatcagatccacactgtctgtgctaccattagtcatct

SEQ ID NO: 251818 - DNA, 561 bp, Homo sapiens
ataatcaaaatataactaggttttaagatagacttaaggtaacaaagcctgacttatacatatgtgctagagttaattacagtagtccccacttatggtggttcgctttccacaatttctgttaccctagggtcaacaggagtctgaaaatattaaatggaaaattccagaaatacacaattcataaattttaaactgcatgctgttctaagtaacataatgaactcttgagacatcctgctctatcctgcctgggatgtgagtcatccatttgtccatcagatccacactgtctgtgctaccattagtcatcttcattgtctgctccggacatccaaccatkgacataatcatggtcaatgatacgggatcacccaaggcaggtgatcctccttctgacatatggtcagaaggtcagtagtagcctaacactatgtcacaatggctacatcattcacctcacttcatctcaccatgtaatcttttcatcatctcacatcatcacaagaagggagagtacagtacagtgatacttctgagagaaagaaagagagaccacat

SEQ ID NO: 251819 - DNA, 583 bp, Homo sapiens
tgccccaggtctgctggagtttactggaagtccactcttgaccctgtttgcctgggtatcaccagtggaggctgcagaacagcaaagattgctgcctrttccttcctctggaagcctcgtcccagaggggcacctgccagatgccagccagaggtctcctgtatgaggtatctgtcagcccctactgggaggtgtctcccagtcaagatacacgggggtcagggacctacttgaggaggcagtctgtccattatcagagcttgaacgctgtgctaggagaaccactgctctcttcagagccataaggcagggatgtttaggtccgctgatgctgtgcccacagctgccccttcccccaggtgctctgtcccagggagatgggggttttatctataagtccctgactgtggctgctgcctttttttcagaaatgccctgcccatagaggagaaatctggcagtctggccacagcagtcttgctgagctgcagtgggctctgcccagttccaacttcctgactgctttgttcatactgtgagcataaaaccacctactcaagcctcagcaatggcggatgcccct

SEQ ID NO: 251820 - DNA, 513 bp, Homo sapiens
cattccaaattctattgaaagctgacccccaggtccctcaagccaaaccacacaaaaagattgttgcaaaacagtagctgctattgcctccacattcaggagaaagaggggaacagtatgttttaaaacatcaaacctgggcactgcataaggtgtgatggtgtgatctcatctaaatagctctcaatttaacttgtgacaagatgaaaattcaggagattcttttcatttcccaaagatatacttattctttgaggacayattcatggtttgcttttccataatcatttctgacatattacttatcagactccaagttccctcaaagaagggaattaaatagtcagtctctattagaaatgctatgaacgaccaaacaattttaagagcctttctctagatatcacaaaaaaatacgctatagaatcattgcttcacagtttagaaacttacaaactctaattattaacataactgaatacataaataagacaatgattacaaatcaattat

SEQ ID NO: 251821 - DNA, 528 bp, Homo sapiens
tgtgttccttaacaattgacaacggtaaaaacaaaatccaagttgggggtgcaggagaaaaggttttcatttagctaaggaacaagaaaatctctattcctagttaagtcaggttgattgactactgaacagcccagatgcatgaataattgtccaggcttttctgcccttctctgtgcttgtctagggaaggtcaaggaagccagacttgttataaatggaacagaatcccccagggatttgggggttagaaaagggaraaattgagcaagaaggagcaaggaaatggattgatggttctgcctgtcttcaaagcccaacaaatatgtaaatcatggaacatatttggcatccaatctcactctactctgggaaggcaaaggtatccatggccatgagtaaaattcttagttgccaagagagccaaatgctctttcttcctaccttcccaaattcccatcactacttgggtctaacttttttagacaatgtatcttgcagagatttcatgaatagcctgaacaggta

SEQ ID NO: 251822 - DNA, 528 bp, Homo sapiens
tgtgttccttaacaattgacaacggtaaaaacaaaatccaagttgggggtgcaggagaaaaggttttcatttagctaaggaacaagaaaatctctattcctagttaagtcaggttgattgactactgaacagcccagatgcatgaataattgtccaggcttttctgcccttctctgtgcttgtctagggaaggtcaaggaagccagacttgttataaatggaacagaatcccccagggatttgggggttagaaaagggaaaaattgagcaagaaggarcaaggaaatggattgatggttctgcctgtcttcaaagcccaacaaatatgtaaatcatggaacatatttggcatccaatctcactctactctgggaaggcaaaggtatccatggccatgagtaaaattcttagttgccaagagagccaaatgctctttcttcctaccttcccaaattcccatcactacttgggtctaacttttttagacaatgtatcttgcagagatttcatgaatagcctgaacaggta

SEQ ID NO: 251823 - DNA, 599 bp, Homo sapiens
cttatgttctagaactcaactgcccaagatggtacccatgagtcccatgagccactgagaacttgagaagtggctggtctaagttgaaatgtgctgtcagtgtgagaaacacacagcatttcaaaggcctattactggaaaaagaatggcaaagcatgccaatgttttaagattgattacatattgaaaagataatatgttggatagtactgagtcaagtaaaaatatgttattaaatttaatttcagctgggagcggtggctcacgcctagaaacccaacactttgggaggcccgaggcgggtggatcataaggtcaggagwctgaggccatcctggccaacatggtgaaaccccgtctctactaaaaatacaaaaattagccaggcatggtggtgggcgcctgtagtcccatctactcaaaaggctgaggctggcagaagaattgcttgaacccaggacgtggaggttgcagtgggccaagatcgtgccactgcactccagcctgggtaacaaagtgagactccatctcaaataaataaagaaatataaataaagttaatttcacctgtttctttttacttttttcaatatagaccc

SEQ ID NO: 251824 - DNA, 599 bp, Homo sapiens
cttatgttctagaactcaactgcccaagatggtacccatgagtcccatgagccactgagaacttgagaagtggctggtctaagttgaaatgtgctgtcagtgtgagaaacacacagcatttcaaaggcctattactggaaaaagaatggcaaagcatgccaatgttttaagattgattacatattgaaaagataatatgttggatagtactgagtcaagtaaaaatatgttattaaatttaatttcagctgggagcggtggctcacgcctagaaacccaacactttgggaggcccgaggcgggtggatcataaggtcaggagactgaggccatcctsgccaacatggtgaaaccccgtctctactaaaaatacaaaaattagccaggcatggtggtgggcgcctgtagtcccatctactcaaaaggctgaggctggcagaagaattgcttgaacccaggacgtggaggttgcagtgggccaagatcgtgccactgcactccagcctgggtaacaaagtgagactccatctcaaataaataaagaaatataaataaagttaatttcacctgtttctttttacttttttcaatatagaccc

SEQ ID NO: 251825 - DNA, 599 bp, Homo sapiens
cttatgttctagaactcaactgcccaagatggtacccatgagtcccatgagccactgagaacttgagaagtggctggtctaagttgaaatgtgctgtcagtgtgagaaacacacagcatttcaaaggcctattactggaaaaagaatggcaaagcatgccaatgttttaagattgattacatattgaaaagataatatgttggatagtactgagtcaagtaaaaatatgttattaaatttaatttcagctgggagcggtggctcacgcctagaaacccaacactttgggaggcccgaggcgggtggatcataaggtcaggagactgaggccatcctggccaacatgrtgaaaccccgtctctactaaaaatacaaaaattagccaggcatggtggtgggcgcctgtagtcccatctactcaaaaggctgaggctggcagaagaattgcttgaacccaggacgtggaggttgcagtgggccaagatcgtgccactgcactccagcctgggtaacaaagtgagactccatctcaaataaataaagaaatataaataaagttaatttcacctgtttctttttacttttttcaatatagaccc

SEQ ID NO: 251826 - DNA, 566 bp, Homo sapiens
tctacttggcatctgtttaaaaacagttctcccttcttctgctggcaacaggatacttatttcttggggaaactcattttgtctgatttaggtggagtcggtaccgatatctctaccacagccatgtacacatggctcaggtcttacctatcagagagctatattcttctgcctactgattggctcaaagatgggcatgtgacccaagctggaccaatcatatatctctcagagacttctgctgaaactaccaggaaaaagatatgtccaatctttgaagataatgaatgtaaagacaaggcaataatggagctgctgtggacaattatttcatcatgtccagagcccatgaatggagtcaactgggcttatcatgataagagagccaggagagggaggggagagatggaatcctgaaggcagcatttgagtcctgaatctagccaggtctaccttgagccttcagttttgtgaactagtaagtcctccttccttttttattttttctttttttagcttaagttaatttcatttgaatttytgtcatcttagaacaaaacagtttg

SEQ ID NO: 251827 - DNA, 642 bp, Homo sapiens
attcccaacaatgcataaagagttcccttttctccacataatcaccagcatgtgttattttttgactttgataataaccattctaactggggtgagatggtatctcattgtggttttgatctgtattttcctgatgatccgtgatgttgagcagtttttcctaaacctgttagccatttgtctttttagaaatgtctattcatgtcctttgctcactttttagtgagattatttgattctttgctgtcgaattgttttgagttctatgtatattctggatattagtcccttgttggatgaatagttagcaattttttctccattgttcatgttatctcttcactctgttgattgtttcctttcctrcgcagaagctttttagtttaatgtcgttccatttgtctatttttgttttggttgcccctgcttttgagatcttagccataaaatctttgcctagatcaatatcttgaagcatttcctctatgttttcttttagtagttttatagtttcaggtcttgtatttaagtctttaatccattttgaattgatttttatacattgtgagagatagaggtctagtttcattcttctgcatgtgaatatccagttttcttagcacaatttattgaaaagaatgt

SEQ ID NO: 251828 - DNA, 528 bp, Homo sapiens
ttgaactcctgggttcaagcaatctgcccacctcagcctcccgaagtgctgggattacaggcttgagccaccacaactggctggcatcctgttttccagtttggatgcctttcatttctttctctttcckgaaagagaaagtctggctaggacttccagtataatgccgaataagagtgcttagagtaggtgtccttgtcttattctagttcttagaggaaaggctttcagttattccccattcagtatgatgttagctgtgggctcgtcatatatggcctttattatgtcaaggtatgttcctgctatacctaatttgttgagagtgttcatcatgaagggcagggtgaaagggattcttttctgaaggaggttgtgtcactcagtgtctgatgaggatatagaagtcagtgtttggtgagagatagtaatttgaagagggaacatttactataaagaattattaactggcaaaatgtgataaactacaaaaggggtaaattgtatgctaaataacacagaaatagc

SEQ ID NO: 251829 - DNA, 570 bp, Homo sapiens
caagcatactgtaataaacactaagaagaaacactgctgacatcacagtgaggaataggagggcaacattaagacacataawcaaaagatataagcaaaataaccagaaatgaacaaagttagagtgaactagagagaacatgaaagatacagaaaacaaaagaattgcaacatatgcattatttgtatcttttaagaagaagtctggagatattactcagtaaaactctttagaaataaaataagacttgaatctacaaatggaaagggcatactgtagctcagaaaaaattgatacagaatgatcaacattgagaggtatccaagtaaacatactggccctcaaggccaatgaaaaattttagaatccaggcaaaaataaaaaataagagtgaaaaattaagttggcatgataacaaaatagactatgtagtggaatatcaaaagtaagagaaaggaatcctaacataaatgagagtacactttcacatattaccataaaaaggtattaaacttagttctaaaattcaccctacttgactcaaatttacaaaaaagggaaatcaaatt

SEQ ID NO: 251830 - DNA, 570 bp, Homo sapiens
gacaatatatattgctacttaaaattgctaaaacaaaatttataagcatctatatattttgcagctaggacaattatctacaaacatgatatttaatggaagatatggtaataacatctgagatatacaattatgttataaaatctaaaatcaacaagaaaggaataaagttgtaccattccaggaaatacatttccagagctttagatatccttattagattctacatgttagttttggtgatgttaactgccataacatataaaatctgaaatcttgttgacttaactgagaagtttatttctcactcaatcaaagcctaaagtgagtattcttgatgggcagattcttctcattcattcaagcagtgttcttgtgactccactcttaycaccttgttgtcacaaccagcttcctggtgtctgtgctttggcaaaggagaaaactcatagaagtctgctcaccttctattggccagagcttggtcacatggccccatatagtgaaagggaagctggggctatagtcctatttgtgtctgggaagaataaaaagttggtttggtgattg

SEQ ID NO: 251831 - DNA, 570 bp, Homo sapiens
gacaatatatattgctacttaaaattgctaaaacaaaatttataagcatctatatattttgcagctaggacaattatctacaaacatgatatttaatggaagatatggtaataacatctgagatatacaattatgttataaaatctaaaatcaacaagaaaggaataaagttgtaccattccaggaaatacatttccagagctttagatatccttattagattctacatgttagttttggtgatgttaactgccataacatataaaatctgaaatcttgttgacttaactgagaagtttatttctcactcaatcaaagcctaaagtgagtattcttgatgggcagattcttctcattcattcaagcagtgttcttgtgactccactcttaccaccttgttgtcacraccagcttcctggtgtctgtgctttggcaaaggagaaaactcatagaagtctgctcaccttctattggccagagcttggtcacatggccccatatagtgaaagggaagctggggctatagtcctatttgtgtctgggaagaataaaaagttggtttggtgattg

SEQ ID NO: 251832 - DNA, 580 bp, Homo sapiens
tcttcagtatgtctatgtagaatctatgccttgtaaccaataaggtaatgaaaaaaattataatatttaccatctggaagaaattaggaaaatgattttacttttaaattcttgatccatatgttaaaaaatttccaaggctattaaaatatcactgaacattgtgattatagagattgctatgatttaatacttatgtcttatagtgaaaaagtagtcctgggatatttttmtctctttacctcacccatcctcttctatgtcaggtatttgaatcccttgctttgtagttttataaaaagttggggagaaaatgaacaattgtcaaggaagatgaaatggctaatcaaaattcattcattctccatagttccttgggtattttataaactttgcagtaaatgctaacttcttattggggaaaactgctataaagtaagtgtacaggtaggttttggagaaatttttcttgcatggagttgagcaaatggtgcatctaacataagcttggtttatagtttctgtttttcagaagctagaagatttttctccactctgaacttctagggatcaacaaaag

SEQ ID NO: 251833 - DNA, 580 bp, Homo sapiens
tcttcagtatgtctatgtagaatctatgccttgtaaccaataaggtaatgaaaaaaattataatatttaccatctggaagaaattaggaaaatgattttacttttaaattcttgatccatatgttaaaaaatttccaaggctattaaaatatcactgaacattgtgattatagagattgctatgatttaatacttatgtcttatagtgaaaaagtagtcctgggatatttttctctctttacctcacccatcctcttctatgtcaggtatttgaatcccttgctttgtagttttataaaaagktggggagaaaatgaacaattgtcaaggaagatgaaatggctaatcaaaattcattcattctccatagttccttgggtattttataaactttgcagtaaatgctaacttcttattggggaaaactgctataaagtaagtgtacaggtaggttttggagaaatttttcttgcatggagttgagcaaatggtgcatctaacataagcttggtttatagtttctgtttttcagaagctagaagatttttctccactctgaacttctagggatcaacaaaag

SEQ ID NO: 251834 - DNA, 566 bp, Homo sapiens
tagggatcaacaaaagtatttatatcacaaataaaaaaaaacacagttacctctcagtaaacaattttttttcagattattctatttaaaaaatctctccaaatctgttaattttctgttaataaaacatcagtttcaataaaagtcataagcctgtcaaaccaattttagtcctttatcttggatatagtaggttaaaatatttttgttgggtgttaagccaataataaactcagctattttaacaaccaaattattttcctcctataaaccaaatttacaatcaagctacttaagaaataaagacaacaaatagaaactgttttaatcttcatatcctgacctaaaaaatagaagcacgaactcatgtcacattctcatattatctgattagactaggaatgcctaaaaagaattttcccataactccatttacttgttgtttatttcctagctcattccaaaagcaaatttaaawaacaacaccaaaagagtaaaatatcctcaatctgacatcctagcaatctttttattttggtgaaactgaacaataataataggcactt

SEQ ID NO: 251835 - DNA, 507 bp, Homo sapiens
tgtattttggagaaacaagaatttattgcagtaggctatgttggataaagaacaaacagccctcagtagcacattgtgaatattaagaggtggtgaagctgtgattgtcaagccaagttgtttgggaatcttcattttagtatttgttgctctagtgtgatcagtayataacatgatgcaaaattatatagctttctgttgtgtgctgtagaatgttgttctagagatactaccagttggtagctccttttttcatgcaattattcaaagtaaatgtaaatatgtctgttgtccttttcttttacatgaaaacttcccccctccccaacgctgtaagattcagaagcatagtgtacagaaaaggatcttgaacttgggtttgaatcctgacttagtcactttataaaggagaaacatcaagttacattgccaccgccagcctcagtttccttgcctgtaaaacagaggtgggaatccaggctatgcttgccacaaaaggaggaccaa

SEQ ID NO: 251836 - DNA, 578 bp, Homo sapiens
aaacatagttttggattaaatggataaatgattaaaaggataatcatggaagattttcatgagtctaccagttggctggggagttctggttatctaagcagattctgattattttagcaagccttactcatgcattaggagttagctggcaagccaagatgaccttccttggtaaagtcaatgctccttcccatgtctctcatatccctccaacaggctagctcagggatgttttcayagtggtgtctggggtcgaagcatgggcaagtccagttgtgtaaaatggtagttggcaacacacatgcacttttcaagtctctttgtgtgtcacatttgctaacaccccacggccaaagcagttgtggtggaactccgagtccgagtggaggattgtaaagttatgagtcaaagtgtgcatacataggaaggccatgagttgggccattaatacactcagtctaccagaagtcatttcaccttttttcctccatcttaacagcctcccttttggaaatttaacttttacatactgtgtaaaatcaaaccaaacaaacagaaaaatctcaacttacctggtt

SEQ ID NO: 251837 - DNA, 473 bp, Homo sapiens
aaatagcaaaaatctctagggttatatctgaatgattggatttagaacatgctgacaggattatttgttagattgagtcctgagggatagtgaaggataactctggtaagtatgtaatcagatttagttattaccccttattgattatctactgaatgtcactctatgttaggcaccttctataygacatttcactcagctttccctgcaacgctatgtgatgcgggtggtaattgtctttttttttttttttttttttttttcatttaacagatgagagaagtgaagttcatagagaataaatagcttgttttaggaagtctctgatttttcagatattacaagattagctctggtaaattctctgcaaacaggaacttagtctgttttgtacactactgtctccttagaacatagaaacatttctagtatataatagacattaatcaatacttgctaaatgaatgaaagga

SEQ ID NO: 251838 - DNA, 565 bp, Homo sapiens
actccgtttatgtggtcaccgtgaggataggaaacagagagaggagatttttctttggatcactgaatagtactcatttcattatatgatttatcccattccaggctcacccctaacatttgagggcccaggacaagacccccctattccacaacctattccttctcttcttgccctggctccactgtgcaactggaggatccttgtaagaatgtgtgtgggtgagccagcctgctcattcaactttattcacacccacatccactagctgcccatgaacacccctcaggcctaggggtgcgcacacctgtgagttgatctgcttcgggagggtgaagacacacccaggccctggaagctggtttcggaccacttggggcaggaaattcaagggtcatgagtacttggggaagagtctagaagggaagttgtycctgcaggtgggtatgtatcacagccctgcagactgctggttccatggagaggcatggctggagaagggcaggagagggcattctgaagcatcagccccctgattagggatacctggccctagagtggtcct

SEQ ID NO: 251839 - DNA, 547 bp, Homo sapiens
aggagcaacagagaccagtaggccagagtattttctgggttagtggggaagggtgaccaacattcttggaaatgttcctgggtccgggactgtggcctcctctaagggctcaggcaacacaggctgtgctaatcaggcacttaagccaaaggggataccaatatgacactgactttgatgactttagcaaaatacaaacgcagttctaactttcactcattcagtagacttatatagatacacacacttcaatttggtgaatagctcagtcagtctataaataacaaaataattgtggagatgttaagttcaaggcaccataccagtgtcgcaggattgcagaagggaaaaggttggagtagtaagggagtataacacacgtccctgcccaaagaccttagtctagtgagacagatgaaacaaagcatatgacaaataaaaatcaggaccggaagacwtgagctgaggggaacactcagaaaaggagtcactgcggatatgtgggctttccaaagagctcaatactacacaaacttggacatgatcc

SEQ ID NO: 251840 - DNA, 606 bp, Homo sapiens
agatggatgctgtatactttttaaaggcctttctgcccatagcctaatacaaagaaaaaattgttttgaaaattactgaaaaatggaaaccaaagagaaatacttggtgggggttgctaggggagggattcaaagcactcatgtgtatctgctttaaatacctaaatgttatttgttggctgatttgtatggtgaccttatacatctgtatccacaatctcaaacccaatatctttattacagacatttgccaaacattccacacacacamaaaatgctccttataaaaacatccagacatccatgattgaagctatccagaaactcaaaattgtgaccaattctcattccactggacaatggggttaagagaaatttattgatcagaatgaaagggattttttggcatcaatgtattaagttttttgaataaaatgttaatagtttccattcacccctctctctctctctcactcacacacacacacacacacacacacacacgattgccaatttcaaaaagtggtttcattttccaactccattaagtattttattctggattcaagaataagcattccaagttcatttcaagttcaaccataa

SEQ ID NO: 251841 - DNA, 606 bp, Homo sapiens
agatggatgctgtatactttttaaaggcctttctgcccatagcctaatacaaagaaaaaattgttttgaaaattactgaaaaatggaaaccaaagagaaatacttggtgggggttgctaggggagggattcaaagcactcatgtgtatctgctttaaatacctaaatgttatttgttggctgatttgtatggtgaccttatacatctgtatccacaatctcaaacccaatatctttattacagacatttgccaaacattccacacacacacaaaatgctccttataaaaacatccagacatccatgattgaagctatccagaaactcaaaattgtgaccaattctcattccaytggacaatggggttaagagaaatttattgatcagaatgaaagggattttttggcatcaatgtattaagttttttgaataaaatgttaatagtttccattcacccctctctctctctctcactcacacacacacacacacacacacacacacgattgccaatttcaaaaagtggtttcattttccaactccattaagtattttattctggattcaagaataagcattccaagttcatttcaagttcaaccataa

SEQ ID NO: 251842 - DNA, 587 bp, Homo sapiens
taataactgagcttggcctcatggttctccacattgttctttctttaacagggtaggggagaaacacaagcactaatcttaaatcaaaagagctggggtacaagcattggccacatcagttacaacctgggtgggattggctaagtcacttatcttctctgctctcatttcctcctccagaaactgaacaataaaagcagcacaacatggagtggtgtgtgcaaccccagccctgggcaagcagaggtacttggtactcmccaaatgtttcatgtactcccctccatttctcagcacccctgttgtcagattggggccaatgacctgtgcatggatgtgccatgtgtttttcaagctgaagcagttcacagctggtgccctcttcccttccactctattgccatagtactttggagaacacatgtttcaggtggtaaggatggaagatgtaggaagctgcctggccccttcagatgcaatgcaatgaagaaagacatctttactgggcaaagctcctgagattttcatggtgattgtggctctgcctagcatcgttgtcctgaatatcccagaacaagcacaagctg

SEQ ID NO: 251843 - DNA, 587 bp, Homo sapiens
taataactgagcttggcctcatggttctccacattgttctttctttaacagggtaggggagaaacacaagcactaatcttaaatcaaaagagctggggtacaagcattggccacatcagttacaacctgggtgggattggctaagtcacttatcttctctgctctcatttcctcctccagaaactgaacaataaaagcagcacaacatggagtggtgtgtgcaaccccagccctgggcaagcagaggtacttggtactccccaaatgtttcatgtactcccctccatttctcagcacccctgttgtcagattggggccaatgrcctgtgcatggatgtgccatgtgtttttcaagctgaagcagttcacagctggtgccctcttcccttccactctattgccatagtactttggagaacacatgtttcaggtggtaaggatggaagatgtaggaagctgcctggccccttcagatgcaatgcaatgaagaaagacatctttactgggcaaagctcctgagattttcatggtgattgtggctctgcctagcatcgttgtcctgaatatcccagaacaagcacaagctg

SEQ ID NO: 251844 - DNA, 587 bp, Homo sapiens
taataactgagcttggcctcatggttctccacattgttctttctttaacagggtaggggagaaacacaagcactaatcttaaatcaaaagagctggggtacaagcattggccacatcagttacaacctgggtgggattggctaagtcacttatcttctctgctctcatttcctcctccagaaactgaacaataaaagcagcacaacatggagtggtgtgtgcaaccccagccctgggcaagcagaggtacttggtactccccaaatgtttcatgtactcccctccatttctcagcacccctgttgtcagattggggccaatgacctgtgcatgratgtgccatgtgtttttcaagctgaagcagttcacagctggtgccctcttcccttccactctattgccatagtactttggagaacacatgtttcaggtggtaaggatggaagatgtaggaagctgcctggccccttcagatgcaatgcaatgaagaaagacatctttactgggcaaagctcctgagattttcatggtgattgtggctctgcctagcatcgttgtcctgaatatcccagaacaagcacaagctg

SEQ ID NO: 251845 - DNA, 544 bp, Homo sapiens
atgaggcagtgagggaaggtggatcctgaaaatggcaggagggactcagaactggagctttgcaaatagaatgaaaggacaagaggacaagcaacttctctacagacttcacccagtccctatgccagatagcaacttccctgggagtttcgtctatcatcttagcagagcatgtaagcaacaagaaacttttgagtctaaaatgttttctgtacacaaaaacacacaactgctttaaattgttgacttcagtaagctactrcagctttattctaaattagataacttgctggctaaatcctctaacaagtaccaagaaaagggatgaaatatatcatgtagctgatttgagtgatgaaggtatcagtatagataagttagtcttaatgtgaatatctagagttctcttgtttgtcattgatccagtcacctggataattgcccaattcctattacactctgggtgatggggaacactttgtgattttataccttttaaatcactagaacatcaatacggtggagaaagttactaggacagtga

SEQ ID NO: 251846 - DNA, 436 bp, Homo sapiens
actattatacattatgttgaaaagaaccttcttgtccatatttcctagtacacaggttcatagatattcccagtactgggttcattccacccagtagtggaatgaaattagtaaccaataagataaatacatctatgactttaayagataatgcaaaattgttcaagaacagtgaatgagagttcccattttcccatattatatctagtacttggcattctcacttttacatgtagttagtctggtgaatatgaagtggtatctcattatgtttaatgttaaagtcacacatatcctgttgtgaattagggccctaatctatgggccctaaatctatggcttgtggctatagattctcaatgaatagttgtctcccctggacccagagtcaaggcccactttatttgcttactttacttactttgtttgcttgttt

SEQ ID NO: 251847 - DNA, 465 bp, Homo sapiens
cttgtcttgaatttcttgattacttgattgccttgtgaatagaggtggcttcacagtagtttgtgctttgctttgctatgagatagcgaacattttaattattgctctatatttgttttttattttttcttctgttttttggaggggtggcatgtgcatatatgttattattattatctgccgtaagaactggtgggaggattgataaagtgcttcaagattttactaacgagagggatgaaaagactgttggtgaaaatttggggaaatgcttaatgcatgaatgtatagggagataaaataataaccctattagttttgtttgcttaataaaattcgagaccaacactttaggtactcakagtgccagaggcctcagcacaatttctctgtagctctgagatactcagtttttttttaaagccttttttcattaaccagccttcatgcaaataatcttcttct

SEQ ID NO: 251848 - DNA, 597 bp, Homo sapiens
caataaagctagggtgggtcctgtagatttgcatttcttataagttccagggtgatgctgatgctgctggtccggggactaaactttgagaaccaatggtctagaccagggatcagcaagtttttatcactattaaagggccagatagtaaatgtttttgctatcttgtataatttgcaggatgaaaggtaaaatcgaggatattatatgagtacttatatacccatctaaaatgtaaccacttaaaaatgtaaaatccattcctagctatcaggctgtacaaaacagatggcacrctgaatttggcttatggactgtagttgcctggcccctcatctagacactagaccaatttctggtcttgatcccaactgccccctgaccccacaactgttttcttgcttttcctgaggtcccagctacctaatggcctaatcggggaagtacaccttagcttcaagctgctggaaaggtcaatgaatgtccagcacggaccatgaaatgctcaggacagtggtagaactgccactaaggaaaggaaacctcttctattgctggctccaaacctctggtgcccaggaacatcctggtcactat

SEQ ID NO: 251849 - DNA, 518 bp, Homo sapiens
agaaaagttgaaatttgatccaaataggatctcttactccccacagatttcaagtttttctatagtcagttcaaaattggaagcaaccaggatccagcacataaggccatttcctcttcaaagcccttgagatcagactgttctgggaaggtctctttggaacctttggaatgaagacatgtttaaaaccatgagctcatgctgtccatggatggtgagactttgttagcgggaccattatattattaaaaagccaccacccaccatccccagacatgatatttttcaaaagaaaatcattcatacagcatcattgtgatttgcagcaaaacaatttattatgattattaagctgaaaattataraagggtatatacatactttacctgtggaatcatgcatatagttttatttgctcttcacaatacccatgggaggaaggcaggacaggtgttataatttccatttttcagctgcaaaacctgagaccccaaaaatttggtgacttgcgtaaggtc

SEQ ID NO: 251850 - DNA, 535 bp, Homo sapiens
taaggctgttaaaaacattttataagaaaataaaaataatttcctttctttgggtttaatggttttccaacaagggtaaagggcagagatggggagggaaagagaagaggacagaaggcagcatattaaaatcatctaagaagcttttttttttttaacacacatagacttcctcctccgtggaataaatattagaagttgaagaataccatctattatcaggaggctgtacgtactttgcaaatgttccccaaatgattctgatatgcattgcctcccargcatattacccctgagaacctcttctcttgatagattgggtcctaggagtctgttttcaataagcaaagcagtgattcttgtgaccaggtaagtttaacaagcacagcccatgtctgcaacagtaggaactttcagcactgtggcagtgcaacgtgggataaatattactctacgaaaaactattttctgaccttttattcacatctccccagtcccctgtcagtgccagacactagggatagcaagtaccttc

SEQ ID NO: 251851 - DNA, 535 bp, Homo sapiens
taaggctgttaaaaacattttataagaaaataaaaataatttcctttctttgggtttaatggttttccaacaagggtaaagggcagagatggggagggaaagagaagaggacagaaggcagcatattaaaatcatctaagaagcttttttttttttaacacacatagacttcctcctccgtggaataaatattagaagttgaagaataccatctattatcaggaggctgtacgtactttgcaaatgttccccaaatgattctgatatgcattgcctcccaagcatattacccctgagaacctcttctcttgatagattgggtcctaggagtctgttttcaataagcaaagcagtgattcttgtgaccaggtaagtttaacaagcacascccatgtctgcaacagtaggaactttcagcactgtggcagtgcaacgtgggataaatattactctacgaaaaactattttctgaccttttattcacatctccccagtcccctgtcagtgccagacactagggatagcaagtaccttc

SEQ ID NO: 251852 - DNA, 535 bp, Homo sapiens
taaggctgttaaaaacattttataagaaaataaaaataatttcctttctttgggtttaatggttttccaacaagggtaaagggcagagatggggagggaaagagaagaggacagaaggcagcatattaaaatcatctaagaagcttttttttttttaacacacatagacttcctcctccgtggaataaatattagaagttgaagaataccatctattatcaggaggctgtacgtactttgcaaatgttccccaaatgattctgatatgcattgcctcccaagcatattacccctgagaacctcttctcttgatagattgggtcctaggagtctgttttcaataagcaaagcagtgattcttgtgaccaggtaagtttaacaagcacagcccatgtctgcaacagtaggaactttcagcactgtggcagtgcaacgtgggataaatattactctasgaaaaactattttctgaccttttattcacatctccccagtcccctgtcagtgccagacactagggatagcaagtaccttc

SEQ ID NO: 251853 - DNA, 625 bp, Homo sapiens
ttttgaaacacataagaaatattttggaaccataagtggctcaggaaattctaaattaaaggccttgtagggctgcagctggccctgtcaggtctcacaccccaggggacacacagcacaaacagattttggtgtccttccaaactcactgcatgatgctccaggcaccactccctactgttactctcttaaacgacagaactgtgtaaacaaacacacaagcaacatcctcccaaagaagaaatatgtacaatcaatgttaataaatgagtatgatcattgcttccctcatcgctcttccaatattctctctgaaaatgtctagagttagaattgtcaaatttattgtctttcaaactcaaagatacaattactacttaaacacagggaatataatggatcctggagagaaggagtgaccctaaggatatgtgcagaaagcagatcactgatcacttaatattagttgtacttggaatcttcaaatatytgctcagcctcttacacttgagcttgtaattttaagaatagtatttccatattttctgaggatgcagtaggttaccagtgaaggcaggatagaatgatgtttgggcacagttccaaagccaaattagtaccatct

SEQ ID NO: 251854 - DNA, 547 bp, Homo sapiens
aggagcaacagagaccagtaggccagagtattttctgggttagtggggaagggtkaccaacattcttggaaatgttcctgggtccgggactgtggcctcctctaagggctcaggcaacacaggctgtgctaatcaggcacttaagccaaaggggataccaatatgacactgactttgatgactttagcaaaatacaaacgcagttctaactttcactcattcagtagacttatatagatacacacacttcaatttggtgaatagctcagtcagtctataaataacaaaataattgtggagatgttaagttcaaggcaccataccagtgtcgcaggattgcagaagggaaaaggttggagtagtaagggagtataacacacgtccctgcccaaagaccttagtctagtgagacagatgaaacaaagcatatgacaaataaaaatcaggaccggaagacatgagctgaggggaacactcagaaaaggagtcactgcggatatgtgggctttccaaagagctcaatactacacaaacttggacatgatcc

SEQ ID NO: 251855 - DNA, 583 bp, Homo sapiens
attcatttttttcttcttcaaattcttttatagcttcaaagttcattgtacttatattacaagagacacattatgcataaaattcaatatcagaagcagcaacaaatggtgcattataaagtagaaaattctcacaccgtagctccttctatagtattcccggaagcttctcatgcatggggctaggtattatttttcaaatgctcataacagtacatgagaaatttacagtaagtacatttccaaataccaactatgttagaaaataatgtatcatagtatctttgccagtgggcattccataaattggaatgtagtaagttgaaattccagttggccaggggtactgttcaccagttgaccgataggtcttataatatacagtgttttgaagtactytccaaaccatcaaactgaatagtttgtgtagtttgtgtgcttggtgtatactgcggcattctatatgccacaatgatacttctgttttggtgacattataactcacagtcagatgttgattaacttgaacacttcattccctgatcctgagagtgaagagagagctcactgcatctctcaggtg

SEQ ID NO: 251856 - DNA, 598 bp, Homo sapiens
tttttttaaaagattgggaatagtgaagtaacaagaaagaaaagaaggaaggaagatggaataaaggaagaaaagagaaaaaaagaaaccattgttgacttctgattatccctttgttcttcattcttcagccagagctcaggtgaccctgccctgggctcatctctgctttgttctgtgaatgaaagagttatccctggagcataatataccaatcatactgcccattgccaatcagagacaagaaattgtgctgctactgaaggaaaactcatccattatgtgtaagattccctgctcatcaggatcctgtattcacttccattgccatatgttctcagggaaaattaaaaatgatatttttgctttcaatattggagcagagtacaagtcttaatgcatactacgtgagttcaggagacctcacacaatatacttcactggctctstggaagcatatttactgaagttaggctgccacctggtagatgatttgcagggtagctactgcagtgccaatctgcttccagcccactatcctaatgcctggaaaggggtctccttgattgactacatgtctgttgccttccatatttat

SEQ ID NO: 251857 - DNA, 560 bp, Homo sapiens
tatggttccatagtgctgtatcttcgggtaatgtcttaattattcttaagttccaacttttggtattatattatatgaagccccattcaatgtgccgttgaaatctcatacttggcttctattcttttcaacattgctaygcttaatgatgtaattccacgtatgaggtgacacatcttccagtaattggggtgcatcatccaggtcaaggccagctgtgtaattttcagtatgtgtatccctagttgacatgacattaataaacatggtttcatgatctatttgtacaaaagtatgacagttatgatatttttgaattttaccaataaactgttctcccatcaaacactctgtcttccttcaactaaacaattagacttcttatttatacctttttaagtgaatccacacaggtaagcatctgaaagttctctttggttctaagatgacatttatcgttgggttgatataaaatttctaactgggtaacaacaggcatttaactttttagcctaagaaaagtgaaaattttaactaataggttatagagaatcttattt

SEQ ID NO: 251858 - DNA, 525 bp, Homo sapiens
ttaatgtgatatagatgaattaaagtttttttttcttatgtagctaatttttcattaaattcctggaagtttattaataaaggataattctaagaacatgtgaatatggaatagagaatcaacataatctcttttgtcagtttttattcaaattagatattgaatgtcactgtggttatcttcttcttttataagatgtgcataaaaataaaattaccttacttaaaaacatgcaaacattaaatgctaaagtagcccaactccaagcaggagtggatctaacaggctgaaggtgaaaaaaattctgacagaagaayaaataggcattctttatcatcaaaaccaagatatgtattattaatattgggtggcatttatgatgtcaaaaataaaataaagagtattttgtgcctttctccctatgattcagtgaaatactgaaatgtaaatatcaataatcaactataaaagcagcttggcttgccttgatttcaaagcatgtaatttagcaccataaggcagttt

SEQ ID NO: 251859 - DNA, 633 bp, Homo sapiens
ttttcggctcatcgatggccccttcttgctgtgtcctcaccttgctctctcgggtgtaagggcactaatcccactcatgacatgtccaccctcatgacctcatcacctcccagaggccccacctcctaacaccatcacactgggtgttagctttcaacataatcggggggcgaggagagcacaaacatttagaccctagtagtcagttcgcttgttgttattcacatgacsaaaaacagtcccctttcccccaacttggtagcttttttcagatatgtagtatttattgtatgtagtcaaaacaaattgactttctgtactagaaagcatcactaacatcactagggtacaaaaccagttggttgtttaacagtattatctggataatgacaacatttgaaaaaggaggtgagagaattttggctatagattggtttcatcaattttgtattcaactagaaaattaatgttttaatgaatacaactgcgattcaaatgatcattatacatacataacccaataactaattgaactttaacatatacatgcacatacacacatattaaagcttttgagaggaaaagaatcaaaggaaaattttagttctccttagaactgtttattacataaca

SEQ ID NO: 251860 - DNA, 601 bp, Homo sapiens
actacagtctgggaatccctactctgaaaatccaaaatctgaaatccaaaaatcccaaacattttgagcactgacatgaatgtcacagctagaaaattctacacctgacacctttgctttctgaagtataatgtacataaactttgtttcatgtacaacattatttaaaatgtcatataaacttaccttcaggctatgagttatgtatgaaatacaaatgaattttgtctttagactgggggggagtcccatcccaagaaatctcattatggatacgcaagtattctaaaatcgccccccgccaaaatctgaaatccaaaacacttctgatcccctgcatytcaaacaagggatgctcgacctgtctacaccatgtacaaatgaggagtttgtttttgaagagctctcaacaattcccttatatggagtattttactttgatgttattttggagatctatcgatggagtatttttgtttgtacagaatactatctggccacaattaagacactgttctttgggggagtaggagcccctaagaatatggcactcttaaaccagaaagtggcactcgttttagtgccaagcacatttgcttcc

SEQ ID NO: 251861 - DNA, 572 bp, Homo sapiens
ttgattttgtcaataactaaataaaatcatccagggccttgtttgatgattctcttgaggggtgctggttttggtaaaagctaatatgtaacataaaagaagagatagcttctatgcacattttatacaccttccctgaagtcatcaccactgggatcattactgttggtgagaaaagaagggctgggtttacctggtggtgatgtcccactgacactgaaaggtggtgtccacaacaaactgaacttaagtaacggaaaacccaaggtacttggragaaattcctttcctcagatgggaacatccaaatcaaaaggaccataaaagcaactatatccctggaaataataacagaaaccaccctcgctgctttctctctgcccaatggtcccaaaattatggacgagggggagagaaagaacaagagagaaagtgagagagagaaattttgcaaactattttgtctctgccactgcagttagaaggaggcggcaatggattcattttccccaggtctctaagtcacaagtgcaaacatggtgacgtagatttttgcatccttgagtactgat

SEQ ID NO: 251862 - DNA, 572 bp, Homo sapiens
ttgattttgtcaataactaaataaaatcatccagggccttgtttgatgattctcttgaggggtgctggttttggtaaaagctaatatgtaacataaaagaagagatagcttctatgcacattttatacaccttccctgaagtcatcaccactgggatcattactgttggtgagaaaagaagggctgggtttacctggtggtgatgtcccactgacactgaaaggtggtgtccacaacaaactgaacttaagtaacggaaaacccaaggtacttgggagaaattcctttcctcagatgggaacatccaaatcaaaaggaccataaaagcaactatatccctggaaataataacagaaaccaccctcgctgctttctctctgcccaatggtcccaaaattatggasgagggggagagaaagaacaagagagaaagtgagagagagaaattttgcaaactattttgtctctgccactgcagttagaaggaggcggcaatggattcattttccccaggtctctaagtcacaagtgcaaacatggtgacgtagatttttgcatccttgagtactgat

SEQ ID NO: 251863 - DNA, 582 bp, Homo sapiens
ggcttggaggagtaagatttcacacggatcagaattttgaaaagaaaagtatcacaccactcaaatagagggatctgaacaatagtgtcattattggaatggaatgtggcctcccttctctcaagggtataacactaaaagcagagtgaaaatgctggcttatttgttgaacgtttctctgacattacattgaagtcacaggcgctacagaatattcaataagcatccctttcatacttcagcacacagctaaagtaaattataataccaatatctaccactgagttaaataaatgagarttcagatattccacaatggtttcccttctgttagtagagtgaattagaacatttcaactcctggtttgattattcatacttgtgcatcctacccactgccaggtaagtgagtctaccagtaacctttgcctcaaacttaagttatatctttgaacatttacatttatcgatgtcttcaaactataactctgatgacttcagatacagagctttgatatctttataacttagtaaccctttctgattaaactttaaagcaactttgaatgtgggtagagggac

SEQ ID NO: 251864 - DNA, 582 bp, Homo sapiens
tctttcaacaacctgcaagctttcatcttacaaacaaaacatacaaggcacagttcattaaaatggcctgcatgcaataaaacaacaacaacaacaaaactaatgtcagagcaaatagatgaggagctaaaatcttttggcacttagagacagttctccgtttcctcagcctgaaattcttttttccatcaacctcaaaactcattctcaaacttaaactgctgcttaaatgtcacctcccaatattttaatagaaaatattaagtaagaataaaggaaacagatgrtagaacttacatacaaaagggttattggaccattacaaaatcaatgagaaaaattgttgattatttctaaaattaccaaactgatttaaatagattcaaagcactttgatcagacttaactctgcagaataaaaatattctgtttaaatttcactactaatgatttcatttgtagcagcagtttcacctttatgggttccagaagaacttgcccatttacaaattaacttagagtaagaggtagctactgatgataaagtggttgttttctcctgatcttcgttagtaacttata

SEQ ID NO: 251865 - DNA, 592 bp, Homo sapiens
tatgtatcagaatttcctcccttcttacagctgaataaaactccatcatatgtatactgtatactacattttgcaatggacatttagattgtttcaaccttttgacttttttcttttctattcttttcttttttttgtttttttgaggcagggtctcactctgttgcccaggctggagtgcagtggtgcaatcacaactcattgctgcctcgacttcctgggctcaaatgatcctcctgccttagtcttcasagtagataggaccacaggcatgtgccaccacacccagctaatttttgtattattctgtagagacagggttttgccatattgcccaggttgctcttttttatttcgataagcaaaggtaaagggaattccccagatgatattagagggaaagatggatagttttgtgagatgatcagtcagatcagacataacaaatcatcatcccacaaacttaaaggctggaaacaacaatcttcacttatgacacctcacaggttcataggaacaccagatagggaagagtagggatgaccttctctgcttcaccacgtctgggagctgacctggaagatccaaaggc

SEQ ID NO: 251866 - DNA, 592 bp, Homo sapiens
tatgtatcagaatttcctcccttcttacagctgaataaaactccatcatatgtatactgtatactacattttgcaatggacatttagattgtttcaaccttttgacttttttcttttctattcttttcttttttttgtttttttgaggcagggtctcactctgttgcccaggctggagtgcagtggtgcaatcacaactcattgctgcctcgacttcctgggctcaaatgatcctcctgccttagtcttcacagtagataggaccacaggcatgtgccaccacacccagctaatttttgtattattctgtagagacagggttttgccatattgcccaggttgctcttttttatttcgataagcaaaggtaaagggaattccccagatgatattagagggaaagatggatagttttgtgagatgatcagtcagatcagacataacaaatcatcatcccacaaacttaaaggctggaaacaacaatcttcayttatgacacctcacaggttcataggaacaccagatagggaagagtagggatgaccttctctgcttcaccacgtctgggagctgacctggaagatccaaaggc

SEQ ID NO: 251867 - DNA, 553 bp, Homo sapiens
acaaaatggtacaaggaacaattccacctgcaagaccccattctccttccagtatgagaatatctaaatcccatagataacacatgcatatcacacatacatcatatacaatatcatcagtaaaatgacagagattaaccacgaaagaggaagtaatacaaattactgataaagctataaacttaaarcataatgacaacattgcggataattatttgagaattcagtagattactcctttaaagcactacctgcttttttttaatgtgttatcactgtacttagcattattggggaccttaaaattcattaagttctgacttctactgatccaagatacccttgatactggacattatcatcagatttagtgtctccaataagcttattttgtaaaaatttcatgctactttaattattgcatggtacttctcagttgctttaaattagaggaaagataatatatctgttcctggaacaggggatatagtggacttcaggtagaaaggttaaaaaagaaagttctggaaagatggaataagcaaatatgatg

SEQ ID NO: 251868 - DNA, 628 bp, Homo sapiens
aagtgaatgtaaagttcttcatttatgttaaaaagaaaattccagataagatcagtgattcatagttttgcagaagttgcctgtgaaaagacttggcattttgtttgattctacagctcaaataggtatgaatgtccattacaattagaaacacgagactgaaagtcagatttgggttctgtttccacctctctgagcctcagtttccccacatgtaaaataggtattataaaaagtcatgtgatagagattttgggatgattaaattagataacgaatataaaatattcaacactgagcatggaacttaataattaactttcatcatcattgttatcatcaacactgttataaacattgttgtcatcttactgtcaagaaaccctaaagtgaacccaggtttgcccaaagtaacacttactctctttctatacttgctggtgatgtgtgaagcataatttggagggacatcagccactgttgggcccrgaagtgacagctcatggaacaatggcagctagcacaggggcaggagccttgggcctgggagtgaggtgcaggaactgtctcccaaggccactctttgaaaaagggataggtgtattctcaaacgatttcaaaggtcaga

SEQ ID NO: 251869 - DNA, 677 bp, Homo sapiens
tgttcagctgcaatataaactttgtgcataagaagaaatatagagaatactttctaaggaggcatgggaagttaattcttcattttcaagttgagaagattcagaatgtgttccggtaatgttatattaactttattaaagatgtaaaatgaattcagtaatgtaattagtaatgtagttaattttcttgaatcaaagaaaataagaagaaatgagagggagtgtatgcatgggggtggaggtgagaagaggtggggttcacatctccataattagcaccagaacattcaatccatgactgctctagtttttgtaaagtaactcccgmaagatttttatatgcctctttttcaagtgaagctgtcacagaaacaaacacatttggtgaagggagaataaggccaaaaccaacccaactgcaaggcagacaaaataaggagctgacttagcttttctgaaagtatttgcatcttctcaatgtgtctaaattgttttgagaagattttacactagttactaaaatcagtttgactattttgaaactgaatttcaattttttgtttccctcttggattctttttagatcctttcatgtcattatttttatctggttctcaaaatatatttgacatctaaggtttggttgatagatacaatgaaaatagcatctttcattt

SEQ ID NO: 251870 - DNA, 423 bp, Homo sapiens
cagctgatattaataaaaaaggaattgaagtcctcggagttggtttctagagttcatgctcatagacaccatggctaccagggcaggtttaaaacctcaaagctgtagattattgaattacctaayacggtcagaaaacttagaaaaacggtgaggcctgaaacgaaaggaaatgtctactaaaggtacagagaagagatgggttcactaaggaattaacaacctgaatattatattgaaaaatattacaaactcgtatgctaactaatttacactatttctcattacatttacactatttctctactaaaggtaacagataaaagatgggttcactaaggaattaacaacctgaacattatgttgaaaaatatattacaaaattgttatgttaactaatctacactatttctcattacattt

SEQ ID NO: 251871 - DNA, 499 bp, Homo sapiens
tttaagtctgagagtaaaaaaggtaagaggttagttggtatttttaactcatagargctcagagtcaggatcctgagctgggactcaggccctttaggaggagtcattgcctgattagtgctggtacttcaggagtatggctactgggctgggaactctggggaggggcactggccatctggtgttggtatctctgagggacacaatgagggtggttttgggagtgtaaactgcaacctattgctactgtagtaccacctgtttctgccagggtgaagtatcattgctgggtgatgctgagagcaataggaattatacaggaagtagcaagttcttttctccctctttcttccctctagtctcctctgagtgctcctattgacagaatataacagggtgtttgatattccttttgtataggatcttggtttgaatcatctcaggccaacgtatctccatgggttccatattttgtcttcaggattccacatttttatta

SEQ ID NO: 251872 - DNA, 569 bp, Homo sapiens
ctgcttgtcctatcatataaagttcatggatttcactatagggcttttagcctttttatttctgttttttttttaagtcaacttctagttcaagggtacagatgatcagaggtcttacctgggttaagtggggggcattactgtwttttcatagctaacttaattaaaaaaaaatgacccaatgatttgagactagtgcttacttgtgatctaaaatcaaatttcttgcacttttgacaaatctgtattgcagaaggctgtagttgaagtatgtgtagtgaagcttttattagacactgtacttggctctttcatggtaaggcacttgcctttcttgttgagataataattacacttatgctataagattttaaggggattaagtggaatgtatgtaaagtgcttaacacagtgcctggagcatgacaagagcataattcttatttgagaaaggaagaaaaggccaatgtggatggagagtaagtcagattgctgtgccattagaggaaggaaagtgggtaagggccaagtcaggctgtgttaggatttgggacttcatttgggagcaa

SEQ ID NO: 251873 - DNA, 569 bp, Homo sapiens
ctgcttgtcctatcatataaagttcatggatttcactatagggcttttagcctttttatttctgttttttttttaagtcaacttctagttcaagggtacagatgatcagaggtcttacctgggttaagtggggggcattactgtattttcatagctaacttaattaaaaaaaaatgacccaatgatttgagactagtgcttacttgtgatctaaaatcaaatttcttgcacttttgacaaatctgtattgcagaaggctgtagttgaagtatgtgtagtgaagcttttattagacactgtacttggctctttcatgktaaggcacttgcctttcttgttgagataataattacacttatgctataagattttaaggggattaagtggaatgtatgtaaagtgcttaacacagtgcctggagcatgacaagagcataattcttatttgagaaaggaagaaaaggccaatgtggatggagagtaagtcagattgctgtgccattagaggaaggaaagtgggtaagggccaagtcaggctgtgttaggatttgggacttcatttgggagcaa

SEQ ID NO: 251874 - DNA, 595 bp, Homo sapiens
gttgcccacttcttaggttgatcatacccagttcatcctgaacgtctttcttcaggtgtaaatatataggggagaaactgaaatattaatgagtgaaataatatgttatctgatatttgcttttagagatccaaggaaaactaataaaaaagtggcagaagcctagatgaatsaagaatgacccaatgttgatatttttttaaagctgggtgatgtctacattattctattatattctgtgtgtgtatgaatatattcataagaaaaataaaaaagagaaacgtagagattaggacatactaatttttagccaaatagaggtcctaaggatggaggtatgagaagcaatatgtgatagccaaaaaaagggtgctctgtgttgtcttgacatattagacaggccaatcatttcctattctaatacattgtccccttccaagtgattccttacagacatcactccttcattttccttgatcttgctattctgatcatagttgcttgacccagggaggggtttttaaacaaaggcttctatctgtgtggcaatgtcttagcattggtgctattgacagtttggactggataattctcg

SEQ ID NO: 251875 - DNA, 595 bp, Homo sapiens
gttgcccacttcttaggttgatcatacccagttcatcctgaacgtctttcttcaggtgtaaatatataggggagaaactgaaatattaatgagtgaaataatatgttatctgatatttgcttttagagatccaaggaaaactaataaaaaagtggcagaagcctagatgaatgaagaatgacccaatgttgatatttttttaaagctgggtgatgtctacattattctrttatattctgtgtgtgtatgaatatattcataagaaaaataaaaaagagaaacgtagagattaggacatactaatttttagccaaatagaggtcctaaggatggaggtatgagaagcaatatgtgatagccaaaaaaagggtgctctgtgttgtcttgacatattagacaggccaatcatttcctattctaatacattgtccccttccaagtgattccttacagacatcactccttcattttccttgatcttgctattctgatcatagttgcttgacccagggaggggtttttaaacaaaggcttctatctgtgtggcaatgtcttagcattggtgctattgacagtttggactggataattctcg

SEQ ID NO: 251876 - DNA, 595 bp, Homo sapiens
gttgcccacttcttaggttgatcatacccagttcatcctgaacgtctttcttcaggtgtaaatatataggggagaaactgaaatattaatgagtgaaataatatgttatctgatatttgcttttagagatccaaggaaaactaataaaaaagtggcagaagcctagatgaatgaagaatgacccaatgttgatatttttttaaagctgggtgatgtctacattattctattatattctgtgtgtgtatgaatatattcataagaaaaataaaaaagagaaacrtagagattaggacatactaatttttagccaaatagaggtcctaaggatggaggtatgagaagcaatatgtgatagccaaaaaaagggtgctctgtgttgtcttgacatattagacaggccaatcatttcctattctaatacattgtccccttccaagtgattccttacagacatcactccttcattttccttgatcttgctattctgatcatagttgcttgacccagggaggggtttttaaacaaaggcttctatctgtgtggcaatgtcttagcattggtgctattgacagtttggactggataattctcg

SEQ ID NO: 251877 - DNA, 490 bp, Homo sapiens
ttttgtcatagcagcacaaacgggaaaagacacatatattatgcttattgttaattgtctgtgtaccccatgccaactataaactcctttaggagttttgtctgtttcatgtgcttgtcatgcaggtgcctggtgcatagtatttcagtgcattagaaggatctttgttatagggaattctagatttasgtctctgctaacagtcatttctattgttttgttgttgttattaattcaaactaaaaactcagaaagatcttgaaggatgacctgaatgaataaaaaaaactctgtttggtattcttttttttttttgagtcggagtctcactctgtcgcctaggctggagtgcagtggataggaagaaatactgtcaaacaaagaaatgctatctcagtggttttgagaagtgtattcatccaaatgcttggatcctgaattcctaaatttctccaggggtcagagagaagtatagagtagatattttaaa

SEQ ID NO: 251878 - DNA, 490 bp, Homo sapiens
ttttgtcatagcagcacaaacgggaaaagacacatatattatgcttattgttaattgtctgtgtaccccatgccaactataaactcctttaggagttttgtctgtttcatgtgcttgtcatgcaggtgcctggtgcatagtatttcagtgcattagaaggatctttgttatagggaattctagatttacgtctctgctaacagtcatttctattgttttgttkttgttattaattcaaactaaaaactcagaaagatcttgaaggatgacctgaatgaataaaaaaaactctgtttggtattcttttttttttttgagtcggagtctcactctgtcgcctaggctggagtgcagtggataggaagaaatactgtcaaacaaagaaatgctatctcagtggttttgagaagtgtattcatccaaatgcttggatcctgaattcctaaatttctccaggggtcagagagaagtatagagtagatattttaaa

SEQ ID NO: 251879 - DNA, 599 bp, Homo sapiens
aaacatgaccatgagaaaagatattttattattattaaaaaaaaacttacacttctagatgcctcaaagattttctttttaggattggtcttaagcaatttgattatgatatgcttgagtgtattgtctttatttatttttatttttcgcttggaatttgttaagcttcttagatctgtgagtttatagttttcatcaaatttgaaaaaaaattagcctttatttcttcaaatattttttttatcttccccygtctcttcttgttttagggacttataattatacatatatcaggcaacttgaagttgttgcacagcttactgataacttcattggttttcagtcttttttctctttgtgttttactttggatactttgctatgacttcaggctcactaatactttcttgtgcagcatttaatatacttttagtcttatctagcatatttttcatttcagacatgtagttttcgcatatggaactttgatttgggttgttggtatgtcttttatgtctatgcaaaacagtcaatttttcctcttgttttcttatatatggaatatggtaatagtaactgttttaatgtgcttgtctcct

SEQ ID NO: 251880 - DNA, 543 bp, Homo sapiens
ttgatagaccactagcaagactaataaaggtaacatggacatttaagccggtgaatagaaagaaagaatacmccagggaatgcagtgtggaaagataattgttctggaagccaagggcatagtgttaagaaatagagaaactatatgcagatcacatgctgctgagaggtcaaatggaacagaatgaaaacaagctaccaaataatgtcatttattttatgcagagaatattcttttagtgttgtgagtagaaatgagattataaagggttgaggatggagagaggcagagagtagattttcttctttttttatttgtacagattctctttctccttatatttttctcagtttccttaacaaatagaccaacagcttttgatgggtatacttttttttaaaaaatgtattttttcctatttagacttattcagaggatgaaatacctttacttgtggaggttggctgttaactaccaacatttatctgactgggtatatttttagggtttggaaaaatagatgttactatcttcaggtttcaa

SEQ ID NO: 251881 - DNA, 566 bp, Homo sapiens
tgggccaatatccgtgatgaatattgatacaaaaatctgcaacaaaatactagcaaactgaattcaaycatacattgaaaatattattcagtaagtccaagtgggattttccctagggatgcaaatatggttcaactcatgcaaatccattgatgtgacatatcattttaacagaatgaaggataaaacccatatgatcatttcaattgatgcagaaaaagcatttgataaaattcaacatcccttcatgattaaaatcctcaaaagcagaatagaaggaacatacctcaacataataacagccttaaatgacagactctcagctagtatcatactgagttgggaaaaactgaaagcctttcctctaagttgtgaaacatgacaagaatgcccacttttatcactcttattcagcataatactggaagttctagctacagaaatcagatgagagaaagaaataaaaggcatccaaattggaaagaacaaaatcaaattattcttgcttgcagatgatatgatctatttggaaaaacctaaatactgcaccaaaagaaaaaaaaaca

SEQ ID NO: 251882 - DNA, 566 bp, Homo sapiens
tgggccaatatccgtgatgaatattgatacaaaaatctgcaacaaaatactagcaaactgaattcaaccatacattgaaaatattattcagtaagtccaagtgggattttccctagggatgcaaatatggttcaactcatgcaaatccattgatgtgacatatcattttaacagaatgaaggataaaacccatatgatcatttcaattgatgcagaaaaagcatttgataaaattcaacatcccttcatgattaaaatcctcaaaarcagaatagaaggaacatacctcaacataataacagccttaaatgacagactctcagctagtatcatactgagttgggaaaaactgaaagcctttcctctaagttgtgaaacatgacaagaatgcccacttttatcactcttattcagcataatactggaagttctagctacagaaatcagatgagagaaagaaataaaaggcatccaaattggaaagaacaaaatcaaattattcttgcttgcagatgatatgatctatttggaaaaacctaaatactgcaccaaaagaaaaaaaaaca

SEQ ID NO: 251883 - DNA, 599 bp, Homo sapiens
aatagtgctgcaatgaacatatatgcatgcatgtgttgttatgatataatgatttatattcttttgggtatatactcagtaatgggattgctgggttgaattgtagttctgtttttaggtcttcaaggaattccacactgtcttccacaatggctaaactaacttacactcccacaaacagtgtataagcattcctttttcttcccaaccttgccagcttctgttatttttttactttttaataatagccattctgactctgactggtgtgagctggtatkccattgtggttttcattcgtgtttttctaatgctcagtgatgttgagcgtttttatcatatgcttgtaggccacatgtatgtcttcttttgcaaagtgtctattcgtatcctttgcccactttttaatggggttgtttgtttcttaaaaatctgtttaagttctttatagatgctagatattagatctttgtcagatgcctagtttgcaaaaattttctcccattttataggtcatgtgttcactctgttgatagtttcttttgttgtgcagaagctctttagtttaaatagatcccatttgtcaatttttgtttttg

SEQ ID NO: 251884 - DNA, 599 bp, Homo sapiens
aatagtgctgcaatgaacatatatgcatgcatgtgttgttatgatataatgatttatattcttttgggtatatactcagtaatgggattgctgggttgaattgtagttctgtttttaggtcttcaaggaattccacactgtcttccacaatggctaaactaacttacactcccacaaacagtgtataagcattcctttttcttcccaaccttgccagcttctgttatttttttactttttaataatagccattctgactctgactggtgtgagctggtattccattgtggttttcattcgtgtttttctaatgctcagtgatgttgagcgtttttatcatatgcttgtaggccacatgtatgtcttcttttgcaaagtgtctattcgtatcctttgcccactttttratggggttgtttgtttcttaaaaatctgtttaagttctttatagatgctagatattagatctttgtcagatgcctagtttgcaaaaattttctcccattttataggtcatgtgttcactctgttgatagtttcttttgttgtgcagaagctctttagtttaaatagatcccatttgtcaatttttgtttttg

SEQ ID NO: 251885 - DNA, 612 bp, Homo sapiens
taaacatttgactccaatgctgggttgcctgagagatctttccttttgatgtttcttaggcattaaaaacccagcataatcataatggagttcaaccttctttccttaactcccaacctgctccactcctccacttcctgttttgctgaaggcattcattcctctcaccaaatcagacatctggctatcatcttccacttctttgactttacttcccattagtcacaaagtcttgctaattcgacctcctaaacatttccagaatgtacatattcctttatcttcattgccatgaacttaggctagacagctgtcttctctctcttggtttatggaaaaaaatattctaattgattatctgtctctaggtttcccagttccaatcaatttgctatattgtaaaatgaaaatctgaccatgttattcttctccttaaaatgctttagtgcctctcactttacttaggccaaagtccaaactycttagcattcattagaagtatctgtccaatctcctattcatttttcattaaccctttcccatcctatgctataagttacagtcatacagaacttaatatatagttattggattaaattgaaggcatgagta

SEQ ID NO: 251886 - DNA, 553 bp, Homo sapiens
acaaatagtcttttcattttccatgatatcatgttatgtctgtaacatgtcaattctatctgtttatttaagcctaaacatgagtgaagggaaggagaaaagaaagaaggagggagagtttatgaataatctaaaacataaagcatgagaaaattgacctgatggcaaggttttgaatgcaatgttataatttcataatataggttttcagwagataaataagtaaaatgttttcttatattgtcatacagtcttacgacaaaaatgtgtctgctctcagaatctttcagtgtccatcttaaaaggatattggatgtaacctcaatgttatttgaattttgtctccaaataataactgaggattactgtcatgtttaagaaaaatttgctgataggttgatctatcctgatttgaagaaaagtataaattaaaatcctgagtgaattataatctgatctcaatgccaattcctttacctgtatttcatgtaaaattaagaaagatgataaagaatctcattagttctgcctaaaacaaaagcactgtagtaat

SEQ ID NO: 251887 - DNA, 443 bp, Homo sapiens
ctgtttgcttcttcaagatcagcaggagaatatctctctccagtccactaagacagggtcttacataacaagacaattacaggggtgctatcccatcacctctgctatatcgtattggttaaaggcagatctcagtttccatcactcaaggggaaggcacgatatactagggctgtgaatcattagcgatgaccctagggcataatyggacttcatcaaaataaaaactttggtgcctcagaggacactaccaagaaagcaaaaagacagcctacaaaatgggagacaacatttacaaatcttgcgtctgataagtcctttatatagtctactttctagaatatataaaggactcgtccaactcaaaaacaaaaagacaatccagttgaaaatgggcagagaatgtgaataaacagttctccagagaagatatacaaatggcc

SEQ ID NO: 251888 - DNA, 443 bp, Homo sapiens
ctgtttgcttcttcaagatcagcaggagaatatctctctccagtccactaagacagggtcttacataacaagacaattacaggggtgctatcccatcacctctgctatatcgtattggttaaaggcagatctcagtttccatcactcaaggggaaggcacgatatactagggctgtgaatcattagcgatgaccctagggcataattggacttcatcaaaataaaaacttyggtgcctcagaggacactaccaagaaagcaaaaagacagcctacaaaatgggagacaacatttacaaatcttgcgtctgataagtcctttatatagtctactttctagaatatataaaggactcgtccaactcaaaaacaaaaagacaatccagttgaaaatgggcagagaatgtgaataaacagttctccagagaagatatacaaatggcc

SEQ ID NO: 251889 - DNA, 443 bp, Homo sapiens
ctgtttgcttcttcaagatcagcaggagaatatctctctccagtccactaagacagggtcttacataacaagacaattacaggggtgctatcccatcacctctgctatatcgtattggttaaaggcagatctcagtttccatcactcaaggggaaggcacgatatactagggctgtgaatcattagcgatgaccctagggcataattggacttcatcaaaataaaaactttggtgcctcagaggacactaccaagaaagcaaaaagacagcctacaaaatgggagacaacatttacaaaycttgcgtctgataagtcctttatatagtctactttctagaatatataaaggactcgtccaactcaaaaacaaaaagacaatccagttgaaaatgggcagagaatgtgaataaacagttctccagagaagatatacaaatggcc

SEQ ID NO: 251890 - DNA, 436 bp, Homo sapiens
ttcttgcctgtttaattctattcaatgcaatagatttatcattgcattacaaatgcatttttaccrtctaatataattttttgtaacgctagtgagaattttaaatcaaacagctactttagaaagcagtttagcactttctcaagtggttaaacatagagttactcagcaattccactcttacgtatatactcaagagaattgaaaacatatgttcacacaaaaacttgcatgtgaatattcatagaataattattcataatagccaaaaagtgaaaacaactcaaatcaactaatgaatggataatcaaaatgtccataaataaccataaatggaatattattcatccataaaaataaatagtactgatatatgctaaaacatggatgactatgaaaacattatggttagtgaaagaagccagacataaaaggc

SEQ ID NO: 251891 - DNA, 436 bp, Homo sapiens
ttcttgcctgtttaattctattcaatgcaatagatttatcattgcattacaaatgcatttttaccatctaatataattttttgtaacgctagtgagaattttaaatcaaacagctactttagaaagcagtttagcactttctcaagtggttaaacatagagttactcagcaattccactcttasgtatatactcaagagaattgaaaacatatgttcacacaaaaacttgcatgtgaatattcatagaataattattcataatagccaaaaagtgaaaacaactcaaatcaactaatgaatggataatcaaaatgtccataaataaccataaatggaatattattcatccataaaaataaatagtactgatatatgctaaaacatggatgactatgaaaacattatggttagtgaaagaagccagacataaaaggc

SEQ ID NO: 251892 - DNA, 596 bp, Homo sapiens
agctatttgggaattcagtttcaaaatctattttagtggctccatgggtcactattgtactaattgtcctaggtcaagctgtcagggaaatagactctgagatggagttttatatgtagttgtgtattggagaatgttatcaggaataacacatttgagacacacacacacacacacacacacacacacacacacacacagagcagaattgcacagagggagaggttaacctgcaaagcgatgccaatattggacttctcaaacaatgccatggagagatttgaggttgagatggcctttctgagacatcctaaatggaacaagcaggctggcctttacatacctacactgaccagtcactggaagtggactgtccctgggagagacataaccttggatgaagcagctttattcaactaagggtgatttcttgggaggaattccgctrtgagctttcagcagggtcaacattcttggcagctaggggagtgagtatctctatcctacaggggaatctgggagttatacagcatctgctcgaactagctttaagctaattagctaaccaactcaccaaagaaaagtaaaagacacgg

SEQ ID NO: 251893 - DNA, 601 bp, Homo sapiens
aatttgtgcacccatgcactgcttccaagtcgggcacttctacttagaaagatttctacaatatgtgggattgactcttatgttcattgaggttaaaaaattgctaattagccagggtgtttaataataataaaacacctagacctgatgattcaagtgctaaacctaactttatattatgtcaatttaacaaataataaataattatttttttacttaaaggatgaggtggggtggaagaagcagattttttttaatagtctactatgagttatgtattttacaaacagtatcttccttccactacataacaagttctgttcttatccctttcttacttaggaagaggacatagagactcaaagaaattaataactagcctgatgtcacacagctagtagtcagcagagctgaaatttggtatttgcttggctgcaaaatccaggctcttttcaaaactccaagctgtttctttcttacccaagttgggytgatattgcccaaatgaagaagagtaagccaaaaacctaaaaccaaggaaaggcaggggggaatgtccctgtgtgttccacgtttactttattctttcctggcagctcaa

SEQ ID NO: 251894 - DNA, 604 bp, Homo sapiens
agctatccaatataaagtcaggatccctttcctggttttaggaactgagcccatttttaggctcagagcttactgactgtgggagaggccagattcctaaggaaaaggatcctgcaatatcatggtaattataagaagtaataatkcccccaaccttctccaaaggaggccaattgctcatttaactgtgttcttgaaaaaggataatacccagatatgatgaggtctacagtacatagggttgaagttgacattggtaccaagggacctaaagcatcaaggtggcaagttgtttccattgagctttttctatactagaaaagtcagtgatttgtcttggctggaattgtcatgaattctgagacagggcctcagccagcaccactctttaagggcttacagagtgtttgatgcactaacatggcatcctatctatcactcaatcaaacaaaagaacacactttaaaataaaagtgaggatgcagtgggcacatccccatgggattcactgatcctaccacatactagagcacctggaagttgtcaggctgaaaaacaacaaaacatccttgtattgatgcagctgaagtagtggtttggagat

SEQ ID NO: 251895 - DNA, 617 bp, Homo sapiens
ttcaagaatgagattccagttccaaaatggcagcagagaggcaagaagatttctccctgtgccactatatatgtatatatatatgtgtgtatatatatatatagtgggtatatatacgtgtgtgtatatatatatagtgtgtatatatatatatgtgtatatatgtgtgtgtgtgtatgtgtgtgtgtatatacagtgctgagattttcaccagtaacgtgacagaactcatatacaaggatgagacagttcctagggccacagagaagttaaaaaactgacaagatggtaagagaatcagattccatatatgagatgtccctctcccattctgcctggcaccaagctgctggaaaatctcccgcgaactcacagtttctacactggaaaattgagtttgaggtggacaaccagcttctccaccatcctgagttccctggcagaagtttctacactggaaaagtgagtttgaggtggacaaccagcttccccaccatcttgagttccctggyggaagactttccctgctttaactcatggaagtactgtgagtgcctaaagaaagacatgtccctgaggttaggcagagacaaacaggggaggcagaactaccatcc

SEQ ID NO: 251896 - DNA, 479 bp, Homo sapiens
attcctgctggtcatgagtaacttcttgttcctacgtttatgagatttataagggccaaagttatttattgatgaccatatgtcacctcctagagatgagtacctggtcagatgatgcataaatgactcttaaaataaatatttgactatctatggraaggcaaattagcctggttagattacaagaaatattttctttcttggtgttttttctttattctttattttttgttactttgatattaacattgcttttatttgatgtacttttgtattagaaggagaataaatgttatggtgagcaaatttagaaataaaatggagagttaagagaaatgtaattaaaagaaataatggagagtaaagagaagggagggagaattgctaggagagtggagtagggaactgaaaaaacaaaaacaaaaaccagaacactttaacttccccctctactagtttcttacagcttggggatttat

SEQ ID NO: 251897 - DNA, 545 bp, Homo sapiens
ctattttagcttttatatttaggaaagcttctttattctactttcttttacaaagatattttcactgcttaaagaattctaagttgctaaggtttttttctttcactcagtattttaaagatcctgtccgctttcttccagcgtgaattgtttctgatgtaaaatctgctgtcttctttatgactgttcctctgtatataatrtctctattttcttctggctcctttgatctctgttaatcaaaatgtgtcttgatgtagttttcattatatttctcgtgcttgaggtttatggagattcttggatctgtgggctaatagtttcatcagtttagacaatttttctcaattatgtcttcaaatatgttttatgtctcacccctctcaactctcttttggttactctaattatttggtcatttgatgtcatcccacagatcactatgctctggtttttgttgttatcattgtttagcattttttctctgtttttttttttttttgtgggagtggtggggagggaggcaggctgtttctattgctata

SEQ ID NO: 251898 - DNA, 545 bp, Homo sapiens
ctattttagcttttatatttaggaaagcttctttattctactttcttttacaaagatattttcactgcttaaagaattctaagttgctaaggtttttttctttcactcagtattttaaagatcctgtccgctttcttccagcgtgaattgtttctgatgtaaaatctgctgtcttctttatgactgttcctctgtatataatgtctctattttcttctggctcctttgatctctgttaatcaaaatgtgtcttgatgtagttttcattatatttctcgtgcttgaggtttatggagattcttggatctgtgggctaatagtttcatcagtttagacaatttttctcaattatgtcttcaaatatgttttatgtctcacccctctcaactctcttttggttactctaattatttggtcrtttgatgtcatcccacagatcactatgctctggtttttgttgttatcattgtttagcattttttctctgtttttttttttttttgtgggagtggtggggagggaggcaggctgtttctattgctata

SEQ ID NO: 251899 - DNA, 610 bp, Homo sapiens
tggtaaggtattgtgacaagaataaagagaccaaacataaatctacatgtatgtacccctaattcaacaatgtaactacacttagtctctaaataccatttcctactaaaatgaacaaaggctccttggagaaagagctgattccagatctggaaacataatttacagaattgtcagaaatattttgtcactttcaagagcaaggaagctctccaaactacyagggtcatgacaaaaggacttaggagccaacttaaagaggctcccagtggccaaaaataagcatcaataagaataataaccaaaaaaaaattacggtattgaggtatatatgtatagattcttgagataacaatgtgtctacacaacaattaccaccatgacaaaccttgttcatcacttttaaaggatgccagaaagccaactcattttagtagcttataaataaagataaagaatcaaatattctttctgactttccaataaaaaccataacccaagggaaccaaataagtaatgaaaatttctctttataaatgatttcttgctaataaatgaagaaaaatgacagaatgagaatatcaccattttacaacccttattgaaataa

SEQ ID NO: 251900 - DNA, 443 bp, Homo sapiens
gacccaacatctttaaaacaccaatcattttcccctccatatgcttttagaaagaaaacatgggacaaattgactccaagcatagcttcccacctcccytttctctggccccagtttggaaaagaagacaaacagctctccctgcaatcctgcatcttcctgtggagcactattaccctgagctgtaaaagacttctgggtaccaaataaagaatttagacatgcatcccttctgagagagagtcacaggaaagtaaaggaaaggaaggtttgggaggaaatattaaagatgtggcactgtttcattcaggtgacaaagtcatggtgagtttctttgcctccatccatccatccatccagccagccagccagccagctatgtagcttagaatgagaattcagaagtaatgtttgctgaggaatgtgtactaacatgtgtattt

SEQ ID NO: 251901 - DNA, 443 bp, Homo sapiens
gacccaacatctttaaaacaccaatcattttcccctccatatgcttttagaaagaaaacatgggacaaattgactccaagcatagcttcccacctcccctttctctggccccagtttggaaaagaagacaaacagctctccctgcratcctgcatcttcctgtggagcactattaccctgagctgtaaaagacttctgggtaccaaataaagaatttagacatgcatcccttctgagagagagtcacaggaaagtaaaggaaaggaaggtttgggaggaaatattaaagatgtggcactgtttcattcaggtgacaaagtcatggtgagtttctttgcctccatccatccatccatccagccagccagccagccagctatgtagcttagaatgagaattcagaagtaatgtttgctgaggaatgtgtactaacatgtgtattt

SEQ ID NO: 251902 - DNA, 597 bp, Homo sapiens
attggtgttcaagaggaagttgagcaacagcaaggggtagaaagcttatttagagatataataacagaaaaattcccaaaacttgaggaaggtatacatatccaggtacaggaaggtcaaagaacaccaaacagatttgatccaagtaagactaamccagggcatataataatcaaattttcaaaggtcaagaacaaatagaaaattctaaaagcagcatgagaaaacaagtaaataacatataaaggagtgtcaattcatctggcaacagacttctcaacagaaaccgtatagcccagaagggaatcctgaaagaaaaaaaaactgtcatttaagaatactgtattcagcaaagttatccttaaaatataaaggaaatatagtctttcccaggcaaacaaaaacagagaattcatcaccaccagacccatcttatgagaaatactaaaggaagttctttaatctgaaagaaaaaagcactaatattaaaaagaaaacacaaacatttaaaaatacaaaacctactggtaaaattaagtacatagacaaacccagaatagtctaatactgtaattttggtgtataatacactcataa

SEQ ID NO: 251903 - DNA, 597 bp, Homo sapiens
attggtgttcaagaggaagttgagcaacagcaaggggtagaaagcttatttagagatataataacagaaaaattcccaaaacttgaggaaggtatacatatccaggtacaggaaggtcaaagaacaccaaacagatttgatccaagtaagactaaaccagggcatataataatcaaattttcaaaggtcaagaacaaatagaaaattctaaaagcagcatgagaaaacaagtaaataacatataaaggagtgtcaattcatctggcaacagacttctcaacagaaaccgtayagcccagaagggaatcctgaaagaaaaaaaaactgtcatttaagaatactgtattcagcaaagttatccttaaaatataaaggaaatatagtctttcccaggcaaacaaaaacagagaattcatcaccaccagacccatcttatgagaaatactaaaggaagttctttaatctgaaagaaaaaagcactaatattaaaaagaaaacacaaacatttaaaaatacaaaacctactggtaaaattaagtacatagacaaacccagaatagtctaatactgtaattttggtgtataatacactcataa

SEQ ID NO: 251904 - DNA, 597 bp, Homo sapiens
attggtgttcaagaggaagttgagcaacagcaaggggtagaaagcttatttagagatataataacagaaaaattcccaaaacttgaggaaggtatacatatccaggtacaggaaggtcaaagaacaccaaacagatttgatccaagtaagactaaaccagggcatataataatcaaattttcaaaggtcaagaacaaatagaaaattctaaaagcagcatgagaaaacaagtaaataacatataaaggagtgtcaattcatctggcaacagacttctcaacagaaaccgtatagcccagragggaatcctgaaagaaaaaaaaactgtcatttaagaatactgtattcagcaaagttatccttaaaatataaaggaaatatagtctttcccaggcaaacaaaaacagagaattcatcaccaccagacccatcttatgagaaatactaaaggaagttctttaatctgaaagaaaaaagcactaatattaaaaagaaaacacaaacatttaaaaatacaaaacctactggtaaaattaagtacatagacaaacccagaatagtctaatactgtaattttggtgtataatacactcataa

SEQ ID NO: 251905 - DNA, 597 bp, Homo sapiens
attggtgttcaagaggaagttgagcaacagcaaggggtagaaagcttatttagagatataataacagaaaaattcccaaaacttgaggaaggtatacatatccaggtacaggaaggtcaaagaacaccaaacagatttgatccaagtaagactaaaccagggcatataataatcaaattttcaaaggtcaagaacaaatagaaaattctaaaagcagcatgagaaaacaagtaaataacatataaaggagtgtcaattcatctggcaacagacttctcaacagaaaccgtatagcccagaagggaatcctgaaagaaaaaaaaactgtcatttaagaatactgtattcagcaaagttatccttaaaatataaaggaaatatagtctttcccaggcaaacaaaaacagagaattcatcaccaccagacccatcttatgagaaatactaaaggaagttctttwatctgaaagaaaaaagcactaatattaaaaagaaaacacaaacatttaaaaatacaaaacctactggtaaaattaagtacatagacaaacccagaatagtctaatactgtaattttggtgtataatacactcataa

SEQ ID NO: 251906 - DNA, 537 bp, Homo sapiens
acgaatccattatgagattcgacgagtgagaattcatacccaaagaaactggaatgacatataaatttcaaataactttaaacttaacatgcttagaattcttaaagagattaaggatgtattaatagcattctttcgatattaaatgggaggttatatggcaagaacaagaagatataaaataagcttgttgaaaattaaattttattccctgaattaggaaaaaacacactcaaaaagtaarccttaatacttagcataaacaagagactgggcagacttgaaggcagagtaaaagaattggaagattgcgctgagaggggtcatacagaacttagcctagacctagcctagaaagaggagatagaataaaagagttcaggtaaaagaaaaatagacagagaaacacagaccacacatccaatgggagttccagaaggaatgaataataaaaattgggcagaaaaactacctaaaaatataataacagaaaaaaaatttaattgaaaaaatataaaaatcctcagactgaaaaat

SEQ ID NO: 251907 - DNA, 537 bp, Homo sapiens
acgaatccattatgagattcgacgagtgagaattcatacccaaagaaactggaatgacatataaatttcaaataactttaaacttaacatgcttagaattcttaaagagattaaggatgtattaatagcattctttcgatattaaatgggaggttatatggcaagaacaagaagatataaaataagcttgttgaaaattaaattttattccctgaattaggaaaaaacacactcaaaaagtaagccttaatacttagcataaacaagagactgggcagacttgaaggcagartaaaagaattggaagattgcgctgagaggggtcatacagaacttagcctagacctagcctagaaagaggagatagaataaaagagttcaggtaaaagaaaaatagacagagaaacacagaccacacatccaatgggagttccagaaggaatgaataataaaaattgggcagaaaaactacctaaaaatataataacagaaaaaaaatttaattgaaaaaatataaaaatcctcagactgaaaaat

SEQ ID NO: 251908 - DNA, 537 bp, Homo sapiens
acgaatccattatgagattcgacgagtgagaattcatacccaaagaaactggaatgacatataaatttcaaataactttaaacttaacatgcttagaattcttaaagagattaaggatgtattaatagcattctttcgatattaaatgggaggttatatggcaagaacaagaagatataaaataagcttgttgaaaattaaattttattccctgaattaggaaaaaacacactcaaaaagtaagccttaatacttagcataaacaagagactgggcagacttgaaggcagagtaaaagaattggaagattgcgctgagaggggtcatacagaacttagcctagacctagcctagaaagaggagatagaataaaagagttcaggtaaaagaaaaatagacagagaaacacagaccacacatccaatgggagttccagaaggaatgaataataaaaattgggcagaaaaactacctaaaaatataataacagaraaaaaatttaattgaaaaaatataaaaatcctcagactgaaaaat

SEQ ID NO: 251909 - DNA, 576 bp, Homo sapiens
tgcttttagtatatggtgtgcttacagttcagtttctttggtttcctatggtttcactataatgtttctggcagtgctgttctttaaatttatattgtgtaagctctattaggcttcttgaatctattsattgatgtcttctattagtccttaatattcttggctatcatatcttaaaacattgcctttagtttattctgtctgttttcttcttcaaacacagcagagttattttatagtttgtgactaataattccaacagacattatttccagtcattatgggtctatttgtgttgtctgttgtttctgctggtgttgttcagtgaactctgtttccatgtatgactggttgtttttgacaatgtgttggacattgtgttttaaagattatttgtactaattttcacaataatttgaggcctagcgtaacatcatcttcttccaaagaggattttcctctgtctctgccagacacttgaggtgctaccagtctgggtctatcttaaaccaagttcaaggcttgcagtttcctggaccacccgaatgacataaagccaaatcaaaattctttgca

SEQ ID NO: 251910 - DNA, 602 bp, Homo sapiens
ttgcctttagtttattctgtctgttttcttcttcaaacacagcagagttattttatagtttgtgactaataattccaacagacattatttccagtcattatgggtctatttgtgttgtctgttgtttctgctggtgttgttcagtgaactctgtttccatgtatgactggttgtttttgacaatgtgttggacattgtgttttaaagattatttgtactaattttcacaataatttgaggcctagcgtaacatcatcttcttccaaagaggattttcctctgyctctgccagacacttgaggtgctaccagtctgggtctatcttaaaccaagttcaaggcttgcagtttcctggaccacccgaatgacataaagccaaatcaaaattctttgcagggattagcttactcatgatttaccttacctggatcctttgggatcccaatttaaaatggtcatgatttattaaaatcctgacttctggtggattacaggtcttgccttttgcctcctggccccaggaatttaccaaaaatgaatttctttaggcttagcaaatgttcttagagcaaaatcagattcagatgttggttttactctct

SEQ ID NO: 251911 - DNA, 515 bp, Homo sapiens
accagcccccttgagaggaccatgaatgacccagcgtggataaaggctcggtgctgtcttcctgaractgcctgagccctaggtctgggactacctaaggaaggatccatgtgggatccattaaaaataatgatatagaactgttagccaactttgtcaaggaggggaactctaatcatatttaatttaatgtataaaaataaataaagttatttcctgtccctggtgtgccacagacacataaataagcatttagaatgcttgaagagagcctacaagcagaggaaaaggcctttacaacctctctggaggagactgtgaaaaggtgagctttactaaattacggaaatgaatactggagaatgattagcctaataataaacccacagttgacagtgcactcaaaaggctgttagtaggagccctccgtttctctccatgtggatctctccatgggttacctgggtatcctcatgacatggctgctaatttacccccaaagcaagcaatccaag

SEQ ID NO: 251912 - DNA, 562 bp, Homo sapiens
acaaggtcatgcctgtaatcccagcactttgggaggctgaggcaggcagattatctgaggtcaggagttcgagaccagcctggccaacatgatgaaaccctgtctctactaaaaacacaaaaattagctgtgcatggtggcacgtgcctgtaatcccagctactagtggtggctgaggcaggaggatcacttgaacctgggaggcagaggttgcagtgagctgagattgtgccattgcactccagcctgggcaacagagcgagactctgtctcaaaaaaaaaaaaaaaaaaagagtaaacaaggaggacttgttttacttgtagtatgactacagccattccccaacttaaaaatgtttgtttgctcataccagatatttggagctcagactgcatgttccttggtggttaagtcygcaagccagttgtgatatggtgaaatatatatttggccttggtcctcatttcctggcatacaactcctaaaatccttggaatcttcaaaatgatgtgacttttggtatgctaatgagttgactggtggccggcagcccaaggtagc

SEQ ID NO: 251913 - DNA, 627 bp, Homo sapiens
tgaaagtcatgccggtaatagacaagttctcatatcctgagaagattcaatattagatttgttttgagtgcctctacctctttgtggaacattagattaaaatgcaatgcaaatgtacctgaatggaactggagatcattatgttaagtgaagtaagccaggcacagaaagacaaaattgtcctcacttacatgtggaagtaagaagttgatctcatggaggtagagagtagaatgatggttactagagactggaaacggtggggcaggtggtaggagctgaagacaagttagttaatggttacaaaaatatagttagatagaggagttaagttctagtgtttgatagcacagtagatgactatagttaacaacagtatattgtatattccaaaatagctagaagagaatatttgaaatgttcccaacacaaagaaatgataaatgtttgaggtgatgaatatactaactaccttgattagatcattacacattgtatgtatgtatcaaaawaccacacataccccacaaatctgtacaattattatgtttcaatttaaaaactttaaaaaaaatacaacaaaaactagtttaaggtttcgggctacttccttgatgagagctggtt

SEQ ID NO: 251914 - DNA, 585 bp, Homo sapiens
taatataatctcaggagcatttttctgtgtggcttaatagcattccattttttgctattataagtaatgatgcaattagtatccttgtacacatgtcttcgttgacaatatgaaatattatatagtcatccaaaatgaattcttcaaggaatctctaatgatacaaggactgtcatggctacattatttataccagcaaaaagactggaaacaatatgaatggtttggcagtagaattgttatatgaacttagtacaacattaagtggagtaccaagttcatatattgtggatggaatattattctgtagcttccaaatgtaatgattatgaagaatggaaaaatggttctctctccgagcctcagtttcctgatatgcaaagtgaggatacagcctcccagagctgttttagaagygttttctctttcttttcctttttcttttcttttctatttttttttttttgacaagatctcactctgttgcccaggctggagtgcagtggcagaatcatggctcactgcagcctcgacctcccaggctctagtgattctcccacctcaacctcccgagtagctgggacc

SEQ ID NO: 251915 - DNA, 585 bp, Homo sapiens
tcgagtgagagtaattgatgcagtctggggatgaaggagggctttgtggaggcaggacctttgggttggctcatgaaggttgatggagggttccccagacagccaggggtgtaaagagcattgattaactctcaggcaaaaagatgctctagccacctggcgtattccggctgcagccagtaggttgacctgtttttagctcagatgtcagtttgggcagctgtggaagcagctgtggagaggggctcccctctctgctcagcatgctctgatctatgcacgtttcagttctatgacataaatcaataaaaagcactaaataaattaagtgagcagcagaattgtaaatcgatttcaggcggagaacagagaggttgagggaacgaacaagagactattataggaactgaagtgagaaatgactcacgcaagactcaagagtgtgaccatggagccaaccacattgttacacatccctgaaatattaaacaaatgaaacctacaagctttggagattgcttcacaaaaattgctggctggtggctgccagaaatcccagggcaccaaraaacaggagcagggagc

SEQ ID NO: 251916 - DNA, 450 bp, Homo sapiens
agtgattgagaggtgcttggggatgttgggctggttagtataaaggtcaagagtgtgggatatggcaatgagctaggacaggaccagactgcaaaactttgtctaggagagcacgtgtcagggtcaccattcattcatttatcatgtattcattcaatcagccaacgaatatttagcaaaggcttttcacatgccagacactattccagggggttggggagtggtagactggaatagatgggcrgatgtcctgctcttaacgggcatgggttctagtggaggcagccagacaattagcatataaactaacatgaaatttcaggcagtaaacatttccatgaaaaaactaaaatagggccaagtggtgaagagtccttggaggtggggggcacttcagcctgggtggttagggagagcatctcagaggaagtgacatttaagcagaggttt

SEQ ID NO: 251917 - DNA, 498 bp, Homo sapiens
cctcccaaagcgctaggattacaggtgtgagccaccgcacctggcccaggctttctagttttttgttttttgtttttttgagacagagtctggctctgtcgcccaggctggagtgcagtgttgcgatatcagctcactgcaacatccacctcctgggttcaagcagttctcatgcctcagcctccctagtagctgggattacaggtgcctaccaccatgcccagctaattttttgtattttagtagagacgggatttcaccctgttgcccaggttgrtcttgaactcttgatctcaggcaatgcacctgccttggctttccaaagtactgggattacaggtgtgagccaccgcgcccagccctctagttgtttttcaagacagtttttggggtgcgggaagtatccacattcctacttcagtgtgtattttgttatgactatatattagtgcagtatggcttgtaaatgatggataaataaacagatatgcgcttgtt

SEQ ID NO: 251918 - DNA, 551 bp, Homo sapiens
ggacccctttttcgttctgggtgattccgttctccagtagccccgccccttcgattcctacttgagttggcctcgcccattaggctctaagcccgcatctcaaccctccactcatttctgtcccttggctccagcaactccacctggtgttcctcgagccaggccccggcccacgtgctcagagccttggccacgcctcccctcttagccccgccccaccagcctwccgggccaggctccgcccccaccaggattcaccacgctgggcccggcaccttcctcaggtttttccagggccccgcccatgctcacctggagcgcagaccgtttcgcagaccagcgggcagagatagcagaactgacagtgctggaggcggggacggggagagagagtgagcgtggggcgtggccgggggcggagttaggatggggccgggaccagacccggaccagaggctaggtctaggttaaggttggagtcaggatcgcttgtggagtcaaggttgcatcaggggtaaggggttgggtcagaggccaggatttagggctgg

SEQ ID NO: 251919 - DNA, 550 bp, Homo sapiens
actgtgggcattgtggtatcatccgagattaggctgtgaaataggaagtggggttacaggcagatccgcaagtgtatgcaaactgttgagttctatctcttgctaaaaccaagggtgcccaattcaggtttggagagtagggaaagtaaggttatcagcgcattcctatcagggtcgttttcttttttgcactgctcttgttctggttttataaggagaacacaagcagagtctatggaaaatagttgccraagcatacaggaaatactccttatactgaacaaatgcaagaaaacagaacgggttagaaaccgagggagacaaaaaggcagtgggtgccaaggactgtgaaaagcaaatgcaacgatagagacagcacagtctcaggcttatttttcaaaaattctcattgtaagcctctttcctttctaaatggagactatcttaacactttagctcgcattagacttaatttaataagaaggttgtaaaccacagctgttaaagtcttgccactgccctaccggattcttcgcatcctgtaaggcac

SEQ ID NO: 251920 - DNA, 593 bp, Homo sapiens
aaatggaatgtttatcctgtactgatgaaaatgtaaattagttcagccactgtggaaagcagtttggagattactcaaagaaattaaacagagctacctggccgggtgcggtggctcgcacctgtaatcccagtactttgggaggctgaggtgggtggattgcctgaggtcaggagttcgagaccagctgggccaacatggtgaaaccccgcctctactaaaaatacaaaaatcagccagrcgtggtggtggctgcctacaatcccagctacttgggaggctgaggcaggagaatcgcttgaacccaggaggcggaggttgcagtgagccaagatcacaccattgcactctagcctgggtgacaagagtgagactccatctcaaaaaaacaaaaaacaaaaaacaaaaaacaaaacccaaaaacagggctaccattcgacccagtagtcctgttactgggtatatactccaaagaaaacaaaaatcagtctgccaaaaaggcacatgcatgcatgtgttcactgaagcactattcacaatagcaaagacattgtgacacagaggtgcaaagtcagaggtcagggtgcaatgca

SEQ ID NO: 251921 - DNA, 593 bp, Homo sapiens
aaatggaatgtttatcctgtactgatgaaaatgtaaattagttcagccactgtggaaagcagtttggagattactcaaagaaattaaacagagctacctggccgggtgcggtggctcgcacctgtaatcccagtactttgggaggctgaggtgggtggattgcctgaggtcaggagttcgagaccagctgggccaacatggtgaaaccccgcctctactaaaaatacaaaaatcagccaggcgtggtggtggctgcctacaatcccagctacttgggaggctgaggcaggagaatcgcttgaacccaggaggcggaggttgcagtgagccaagatcacaccattgcactctagcctgggtgacaagagtgagactccatctcaaaaaaacaaaaaamaaaaaacaaaaaacaaaacccaaaaacagggctaccattcgacccagtagtcctgttactgggtatatactccaaagaaaacaaaaatcagtctgccaaaaaggcacatgcatgcatgtgttcactgaagcactattcacaatagcaaagacattgtgacacagaggtgcaaagtcagaggtcagggtgcaatgca

SEQ ID NO: 251922 - DNA, 625 bp, Homo sapiens
gtggcttctagactgagctctgaatcctgtctgggctacgtgctcacccctgagtggatgtgcaaaatgtaccaggtgccccatatgtgtgtgtgtgtgtatgttttttttttgccttttttttttttaacctgatcttgctgtgtgtgtgtgtgcattattttttttttttgcgttttttttttttttttttttttacatggtcttcctgtgtctcccaggctggagtgcagtggtgtgatcatagcttactgcagccttgacctcctcggctcaagcgatcctcccgcctcagcctcctgagtagctggaaagtgtgaactccaggcttcccatcttgcggcctgctgggtgtcagctggaggatggggtggaggctggcagctggaggttcagctgatgtcactgaggtgacctgcaagggtctctagctgagatgygacagagagcagggagggctatcctgtctgaagtcctcaggagcatcccaagctatggggagatgacagggcccaatccagggtggccagctgatcagggcagggtcagagtctatagggcctgaccttgacctccgggtggggagcctggaagcctgactccaaatccaagctctgcgaccccc

SEQ ID NO: 251923 - DNA, 625 bp, Homo sapiens
gtggcttctagactgagctctgaatcctgtctgggctacgtgctcacccctgagtggatgtgcaaaatgtaccaggtgccccatatgtgtgtgtgtgtgtatgttttttttttgccttttttttttttaacctgatcttgctgtgtgtgtgtgtgcattattttttttttttgcgttttttttttttttttttttttacatggtcttcctgtgtctcccaggctggagtgcagtggtgtgatcatagcttactgcagccttgacctcctcggctcaagcgatcctcccgcctcagcctcctgagtagctggaaagtgtgaactccaggcttcccatcttgcggcctgctgggtgtcagctggaggatggggtggaggctggcagctggaggttcagctgatgtcactgaggtgacctgcaagggtctctagctgagatgtgacagagagcagggagggctatcctgtctgaagtcctcaggagcatcccaagctatggggagatgacagggcccaatccagggtggccagctgatcagggcagggtcagagtctatagggcctgaccttgacctccgrgtggggagcctggaagcctgactccaaatccaagctctgcgaccccc

SEQ ID NO: 251924 - DNA, 414 bp, Homo sapiens
ggctcctgcagtgacagcatccagcctctgaagacagatgtttctgaattcttccccctcccccactccaaggctaaactttagggtaattcttgtgctccaaccaatcaagaagtggcrttaattcagcctgggcaacatggcaaaccccatctctacaaaaaataaaataaaatcagccgggcacagtggctcacccatgtagacccagccacttgggaggccaaggtgggaggatcgattgagcccaggaggtcaaggtgcagtgagctgtgatggtgtcactgcactccagcctgggcaacagagcgagaccctgtcttaaaaaataataataaaaataaaagaaagaaagaaatgatgttaactgtgagcagactggcttgcattcactcagatcccagtttcccagcc

SEQ ID NO: 251925 - DNA, 414 bp, Homo sapiens
ggctcctgcagtgacagcatccagcctctgaagacagatgtttctgaattcttccccctcccccactccaaggctaaactttagggtaattcttgtgctccaaccaatcaagaagtggcgttaattcagcctgggcaacatggcaaaccccatctctacaaaaaataaaataaaatcagccgggcacagtggctcacccatgtagacccagccacttgggaggccaaggtgggaggatcgattgagcccaggaggtcaaggtgcagtgagctgtgatggtgtcactgcactccagcctgggcaacagagcgagaccctgtcttaaaaaawaataataaaaataaaagaaagaaagaaatgatgttaactgtgagcagactggcttgcattcactcagatcccagtttcccagcc

SEQ ID NO: 251926 - DNA, 529 bp, Homo sapiens
ttttcttctttcccccagcatgaggagtatacatcagaagtttatttcccctatagtcagtacctaactatctttatggagatgctaatcaacttctttaataatgcttctggaataaaatactaccactgttcggggtcaaagacacacaccgtatttttttgtctttgcatatatgttagagcctaattcattctatagtgtctatgtatgtcattgtacatagtatttatctatctatatcattgtacatagttgtctgcattttatgatgttggaatagagatttggatttgcaattgagatacatctatattgacttttttgttagtttgtttttwaaaaattctttctcagattatttcgttttttctattctgctttaggccagacactctgaaagggtctgtacatggaacagactgggcattgttggtggtatgtactgcagttccatggaaaccatgtctatgagtcagaaagcaaacaccaggcctgttgtattgataccaggaggtgtgttactaat

SEQ ID NO: 251927 - DNA, 594 bp, Homo sapiens
acaagctgacaaagtagaaaacctagcagaaatgcataaatataacctaccaagattgagtcaggaaggaatagaaaactggaacaaaacaataactagtagcaagtttgaagtgataataaaaagtctcccagaaagaaaagtccaggactggatggattcacagctgaattctaccaaatgtacaaagaagtactaatacttatcctcctggaaccattccagaggagggaatgttccctaactcattctatgtggccaacascagcctaataccaaaaccacacaaggacaaaacagaaaagaaaaccacaggccaatatccacaatgaacacaaaaacaaaaatcctcaccaaaacactaacaaaccaaatgtagcagcacatcgaaaagataatagagtacaatcaagtgagatttataatagggatgcaagggatggttcaacatatgcaaatcaacaaacatgatacatcacatcaacagaatcaagaaaaaacactgtgtgatcatagaagcagaaaaatcatttgataaaattcaatagaagcagaaaagttatttgatagaattcaacatttcttcataatgaa

SEQ ID NO: 251928 - DNA, 603 bp, Homo sapiens
aaaaggacccaaatagccaaagcaatcctaagcaaaaagaacaaagctggatacattacatcacttgacttcaaaatatattacaaggcaccaggtgtgatggctcacacctacaatctcagcactttgtgaggccaaggcaggaggattgcttgagctcaggagtttmagacctgcctgggcaacatagtgatacttcatctctacttaaaaaaaaaaaaaaaaaaaaagcagctgggtgtggtgtggtggcacatgcctgtagtcccagctacttgggaggctgaggtgggaggatcacttgagcccaaaagattgagactacactccagcctggatgacagagtgagaccttgtctccaaaaaaaaaaaaaaaaaaaaaaaaaattacaaggctatagtattgtagtattggtataaaaatatatagaccaatggaacagaattgagaatccagaaataaagccacatacttatagccaactgatcttcaaaaaagctgccaaaaacatacattgggtaaagggcaccctcctgaaaaaactgtgctgggaaaattggatattcatatgcagaagaatgaaactggacccctatctcagc

SEQ ID NO: 251929 - DNA, 603 bp, Homo sapiens
aaaaggacccaaatagccaaagcaatcctaagcaaaaagaacaaagctggatacattacatcacttgacttcaaaatatattacaaggcaccaggtgtgatggctcacacctacaatctcagcactttgtgaggccaaggcaggaggattgcttgagctcaggagtttcagacctgcctgggcaacatagtgatacttcatctctacttaaaaaaaaaaaaaaaaaaaaagcagctgggtgtggtgtggtggcacatgcctgtagtcccagctacttgggaggctgaggtgggaggatcacttgagcccaaaagattgagactacactccagcctggatgacagagtgagaccttgtctccaaaaaaaaaaaaaaaaaaaaaaaaaattacaagrctatagtattgtagtattggtataaaaatatatagaccaatggaacagaattgagaatccagaaataaagccacatacttatagccaactgatcttcaaaaaagctgccaaaaacatacattgggtaaagggcaccctcctgaaaaaactgtgctgggaaaattggatattcatatgcagaagaatgaaactggacccctatctcagc

SEQ ID NO: 251930 - DNA, 571 bp, Homo sapiens
taactcccagaaaaaggctgactgttcgacagccatggtattaagtaaaccactagaaccagttggaagaataattaaaccagatttatgcagttaatgatatctcaccaaggtctaaataatcagtgacaactcacttcagtaaatacacctctgaaagccaattaaccagtgatagccacatgcttttgaaagttggcctgtcggctgcagactcgctccagtgaatatgcttctgaaagccagccagtcaacaatagtttctttcgaataatggggcttctgagggtgatagctgcccctaaacaattcctgaccccaaaacactatgtaagatttgcagcctgctttgcttggagacactgtgcctaaaagcacagctcctctttacttaagtaataaattaagcctttttytctccagtcattgagaggtagcctttttcttcaacacttcttacaatctttgctgcatcccccacaaaatgcaccctttaaaattgtaatattaccactgatgagaagtaagtgcagaagaatggtaggactgtcctgttaaaggtactttacca

SEQ ID NO: 251931 - DNA, 609 bp, Homo sapiens
atcctgggaaacatggtaaaacctgtctcttcaaacaataaaaaaattagctgagcatggtagtgcacgcctggagtcccacctacttaggaggccgaggtaggaggatggcttgagcctgggaggttgaggcttcagtgagctgtgactgtgttactgcactccagcctgagtgagagcctgtctcaaaaaaaatctcattttagtcaactgtttatgacaggaaacatttgcaagcagtttattttgaaccaacataagccaatttgttctataattgtcaggtaaaagtcagtaacctggcaattaaggttaggcggagtgtctatgtgcctctccctcacaatcttgtttccaggtggtaagcaaggttacgataaagggaaatcataaaacaaattctgccaawccacatttgtaagaaagcaggccaggtgtagtggctcatgtctgtaatcccagcacttcaggaggccaaggaaggaggatcacttgaggccaggagttcgaagttacagtgagctatgatcacaccactgcagtctagccagggtgacagagcaagaccttgtctctaaaagataaaataaaataaaataataaaataag

SEQ ID NO: 251932 - DNA, 571 bp, Homo sapiens
gatacaattatccttggctacaaggagcagtaataagagtggcatcagtccaaggttggacaggcagttgctgggtagatgaccttacagaagtataagtctgaataataacaattkcaaaaccaaatcattaaggagacacacacaccaatttattttggattttaaaaaaggtaaaatggtaaaatgaagagaaacaataatgctccaaagcaagatggagctttcagctaaatggtctatttctcctttgttccatatagaataccatcatatcttcttatgtaattctaaactccacccagctatttcctcatttgccagttttaaaagaaaaatatgggaatttttggtgttgcatattttttccatggtgggctgatagtataagttttatttatttatttatttagtattttataaacattcatcaagattattgcttttcttgctacagtggaggggactgtcatgggtgcaactggctgagggcctgcttcatgggcagtaaagggatttaccaaggcagttgtaggtaaagaaaggcatattttttagagaatacccattg

SEQ ID NO: 251933 - DNA, 615 bp, Homo sapiens
tgtgtgttctcatgtattgagatcattactacggctatcaggaaggttttttgtagtttcatattttgcttgagaaatactaagataaagcctaaaatgtttatgtcatatatgtcataaatataacaccaattgtggaatgcaccacaatgtcagcattgtcctctgacttgacatgaacttaaacttgtaatgtgaccttggaaataatggaggtcaatatataaatattcctacaaatcattaaggaaaatgctaacaacccagcaaaaatggrcaaaagatataaataaaaagttcacaagaaagaaaatgcaaatggttcttaatgtcttaaaacaatctcaatatcactcagagtacaaatacaaattaaaactactataagatacaattttcacttatcaggctggcaaaggcaattttcgtccctgtctattcaaagtaacaccattttctttattagttccagtgggcaagtaagagcaaggagtccacatagcgttggccaaccaaagtgatgaaaggaaggcacatttttaaaaattcatagatccaaatccacgaaaaaaattctcagtgtattaggccatagaatttattaaaaaaaaactt

SEQ ID NO: 251934 - DNA, 541 bp, Homo sapiens
tgtacaacaggaagacagacccctatcatttgaaagcaacattacactaagtgaagaagccagacacaatttagaataagtgatcataatatgtggaaatttcatcttcagggaattacctcttatgcttaaaaactttctrtcaagtactacatttctttgcctcatcttcaggggctagggttacagcaaaacacagaacatttatggacaaccagggaccaagcactggtatcatgtatcaattacttcccaagctgatactaagttctttgaagggaggaattttgtcccatttactctgaatgtctctgtacgctttcagcacctaatgtaccattagatagtaaaggcaataaacattcgttgaacagacttattacatgtgcttcaaattcttcacagaccaaatttttgtccacactcttaaccttacagaacttagaagctttaatatctttgatgagccttatgctggaaaaagtcccaagctgtttttggatgaaaacttgggcccttatgttatcattcagcctatttc

SEQ ID NO: 251935 - DNA, 541 bp, Homo sapiens
tgtacaacaggaagacagacccctatcatttgaaagcaacattacactaagtgaagaagccagacacaatttagaataagtgatcataatatgtggaaatttcatcttcagggaattacctcttatgcttaaaaactttctgtcaagtactacatttctttgcctcatcttcaggggctagggttacagcaaaacacagaacatttatggacaaccagggaccaagcactggtatcatgtatcaattacttcccaagctgatactaagttctttgaagggaggaattttgtcccatttactctgaatgtctctgtacgctttcagcacctaatgtaccattagatagtaaaggcaataaacattcgttgaacagacttattacatktgcttcaaattcttcacagaccaaatttttgtccacactcttaaccttacagaacttagaagctttaatatctttgatgagccttatgctggaaaaagtcccaagctgtttttggatgaaaacttgggcccttatgttatcattcagcctatttc

SEQ ID NO: 251936 - DNA, 541 bp, Homo sapiens
tgtacaacaggaagacagacccctatcatttgaaagcaacattacactaagtgaagaagccagacacaatttagaataagtgatcataatatgtggaaatttcatcttcagggaattacctcttatgcttaaaaactttctgtcaagtactacatttctttgcctcatcttcaggggctagggttacagcaaaacacagaacatttatggacaaccagggaccaagcactggtatcatgtatcaattacttcccaagctgatactaagttctttgaagggaggaattttgtcccatttactctgaatgtctctgtacgctttcagcacctaatgtaccattagatagtaaaggcaataaacattcgttgaacagacttattacatgtgcttcaaattctycacagaccaaatttttgtccacactcttaaccttacagaacttagaagctttaatatctttgatgagccttatgctggaaaaagtcccaagctgtttttggatgaaaacttgggcccttatgttatcattcagcctatttc

SEQ ID NO: 251937 - DNA, 576 bp, Homo sapiens
tctttattagggcttattattcaggaaattaagtcttttctctcaaagaataaaggttttcacctgtttttgaaatctttatgttatccctttggttaaatgaatgacttattttgcaatgacctgtgatcttatttcatgatatcaagtgttttaaactttttatatttgacacactttctaaagtcaaattctaacttgggtcctcattaattttttgctattagtccccagaagtgcaaaagagacatatttggcttattggtatagaaatcatacaggaagcattgtcaaatatgaaatggtgtttggtattctttgggctatatctgtataaakgttattggtatgtgttcccaaattatgggaaactcctataattttaatatgacttagtgtatgttattaataattataattattatgtaaaactgttgtatgccacagaagtaaaaaattgctagtaaaatgtggttttaataatggctgtcctaagacttctcttgttttgatcctcttcaaaaggtggtttataatcagctgtaggactttgataggtgctcttgaatgcaggtt

SEQ ID NO: 251938 - DNA, 576 bp, Homo sapiens
tctttattagggcttattattcaggaaattaagtcttttctctcaaagaataaaggttttcacctgtttttgaaatctttatgttatccctttggttaaatgaatgacttattttgcaatgacctgtgatcttatttcatgatatcaagtgttttaaactttttatatttgacacactttctaaagtcaaattctaacttgggtcctcattaattttttgctattagtccccagaagtgcaaaagagacatatttggcttattggtatagaaatcatacaggaagcattgtcaaatatgaaatggtgtttggtattctttgggctatatctgtataaaggttattggtatgtgttcccaaattatgggaaactcctataattttaatatgacttagtgtatgttattaataattataattattatgtaaaactgttgtatgccacagaagtaaaaaattgctagtaaaatgtggttttaataatggctgtcctaagacttctcttgttttgatcctcttcaaaaggtggtttataatcarctgtaggactttgataggtgctcttgaatgcaggtt

SEQ ID NO: 251939 - DNA, 615 bp, Homo sapiens
gaggtagcacttaggaggagatctgaattgtaggaggggtggcttgaagggagaggagactgcagtcggaggaactggatacgtaaaggaagaggaaataygtgaaaagaggaaatgaaagatgttttctatggatggaactcaaatacagatgggagataagtgagaaattaagtacagaggtagtagctgtagctaatattgactaatatttatgtgtcaaatatgtcagaatgaaagatgttttctgtggatagaactcaaatacaaatgggaggtaagtgagaaattaagtagatagtaactgtagctaatattgactaatatttataagtcaaatatgtcagatactatatcaaacattgtattctatctcatttaatattcacaactgcactgtgaaatgagtattaatattcccattttacagatgaggacactgagggacaaagaaatcaagtaatttgcctattatgagacagctggaaagcaagaagtcagtctggttcctctagactgtgtacttcattcattttgccatcgtataggataacttacaaggtagtttccagctctttaaggacctgtaggccatgacaagaggtttggcattat

SEQ ID NO: 251940 - DNA, 605 bp, Homo sapiens
tttggaagcttcagtgaagagtccagcagctaaagttccactgggaggcttccactgcaaataattacagcgacggcaatgtctttaatacatcatacattagattaaaagccaggtggctaatttgtatacctggcacacagaagtcagcaacagcagcactatcagacagcaggctgtaaagtgtcagtaatatgcacaggtggcagtgggggatgcctgccaaccccaaatacactaggggagattgtaaacatcgtttaggaggttatccwgtcttattgtccttattcccatgtgtggccttacagtgctccctcattcccagagaaaagcagagtagctctctgttctttcaccccagagatgcaaccacctacagacaaaacgaatactaatggttaccgttgattaatcactctccacatgccaggcactgttgtgtgcatttcacacctattgtctcacttaatcctcataacaccctttaaggtaggaactatttatatctccttttcagagatgaggaaactgaggcatggagaggttaaggccacagagccagtaaggtcccatggagagtaaggggcacagtaggagtttaa

SEQ ID NO: 251941 - DNA, 379 bp, Homo sapiens
aaatattctagatcaatttgcataaactcttttaaattgaaattttatatccttaattgttaattgttttaaaactagggagtgaatcaaggaagtaattattatgtgattattctaaacataattttatcttatacaggtaagggtgtcaaaaaaaaaaagattgattcctactgtcaaatgcactggctatgcccctgctctggtgttcaattaattataggggcctcagctcctggcagcagggtctgtttaaaggtggcaggtctgggcagcaatcactgggacagcttccgcagctcctgagtgttcayacactacccataaataaaatagccactctttaatgcttgatttaaaaaaagccttgatggataag

SEQ ID NO: 251942 - DNA, 513 bp, Homo sapiens
attgtcaggatgtttcaaaatgatattagttcatattgccttcgtgagtgtgcatatggcagctcatattttccaaaggtggctgcaacaatattctcccattcagcgtgctcttctacracatgaccttgtcatccctcactgagacacagagtctaattctcctggccttgaactaaatgcagaagtgatgctgtgtgacttcagaggccagattagaaaaggccaagcaacttcatctgctgcatctgtgtctcaatctcgggacactccagctaccacagtggggaaactcagcgcccttggaaaggccacatgtaggtcaacagtcagccccagatgaacctagcccttggatcaaccggctcaggtgccactcacatgaataaaacagcattcagatggttctagcccccaggcatttgagtcttcctagccaaagtgccaaacacagtggaacagaggcacagcatacccaatgtgtcctgtctcaatttctgacccacaggatct

SEQ ID NO: 251943 - DNA, 513 bp, Homo sapiens
attgtcaggatgtttcaaaatgatattagttcatattgccttcgtgagtgtgcatatggcagctcatattttccaaaggtggctgcaacaatattctcccattcagcgtgctcttctacaacatgaccttgtcatccctcactgagacacagagtctaattctcctggccttgaactaaatgcagaagtgatgctgtgtgacttcagaggccagattagaaaaggccaagcaacttcatctgctgcatctgtgtctcaatctcgggacactccagctaccacagtggggaaactcagcgcccttggaaaggccacatgtaggtcaacagtcagccccagatgaacctagcccttggatcaaccggctyaggtgccactcacatgaataaaacagcattcagatggttctagcccccaggcatttgagtcttcctagccaaagtgccaaacacagtggaacagaggcacagcatacccaatgtgtcctgtctcaatttctgacccacaggatct

SEQ ID NO: 251944 - DNA, 455 bp, Homo sapiens
acctattccgctataaccctgatttgtgaccatatactgatatttagaaagcagaatacacttctttggaaacccagagtcagatacttatttaacattttcaaagtgcactcatcttggtgctaatccatctgactttgtccaccataatggtcaggtaggatcaaccaagttcagatattsatctgtcataatgtaggacttcataaagataataggaggacgaattcagatgatttcaatggaattaaattattggaattgagagatggatactctagaatgaggatcatatagtttactaaatgcataaatatataaaataaactactagtaatatacagtggaggtctgataacctttctgttgtagttcactaatgaagaaatgagaatccttaatcagagtggctaatctaatggtctgttatttagccagccttcctagttccattt

SEQ ID NO: 251945 - DNA, 455 bp, Homo sapiens
acctattccgctataaccctgatttgtgaccatatactgatatttagaaagcagaatacacttctttggaaacccagagtcagatacttatttaacattttcaaagtgcactcatcttggtgctaatccatctgactttgtccaccataatggtcaggtaggatcaaccaagttcagatattcatctgtcataatgtaggacttcataaagataataggaggacgaattcagatgatttcaatggaattaaattattggaattgagagatggatactctagaatgaggatcatatagtttactaaatgcataaatatataaaataawctactagtaatatacagtggaggtctgataacctttctgttgtagttcactaatgaagaaatgagaatccttaatcagagtggctaatctaatggtctgttatttagccagccttcctagttccattt

SEQ ID NO: 251946 - DNA, 594 bp, Homo sapiens
caaactaacacaggaacaccaaacagaaaaccaaacactgcatgttctcactcataagtgggagttgaagattgagaacacatgggcacagagagaggaacaacacatgctagggcctgttggtgggtgggggttgaggggagggaacttagaggatgggtcaataggtgcagcaaactatgtaacaaacctgcaccttctgcacatgtatcccatttttgttttttttgaagaaatgaaaaagtccctataatcaatctctcttgctatctttctctctgtgtatctattaccttctttcattgccctaaatctttccctcaatattttccccatattgaccaacatctggattttgtttctatctgtcctgcctttttcatattaacaaatttccgagttcctatcctctctcatattctgcagtttacrtgattccttcataagagttttaccagctcctaatttatctgtgtagctccagggaggttttatcttattctgttcatatctccctctatttatagtactgcagacaatctagctgaactttgacttttgtgcttactcacatacccacatccagtagtagat

SEQ ID NO: 251947 - DNA, 615 bp, Homo sapiens
ttatttaacaaagtgaaatcagtgtgtaagttggtaggtttatggacgagggccaaaaatgatttcaaggttttataatcaattcattgatattgatgtcgttctttgagttaggaaacactgggagaataygccaggttagaaaaataaattttataataacaaaatatgtaatacaaaaatagaaaaaatacaaattcagagactaattgactgaaatgtgtcctggagactttatagcaatcatccatttatcaagatattagctgaatgtttaaataattataaataaaataattattatttgtgattaatacataaacatgtatgtatgtatggtatatacacataaataccacaaagagatgatgaattatttgtgtaagttcatagggacattttcaaaatctcatattattatttccagttattgccagatgctagtaataactgaataaggagttagagtaacataatttataatatcgtgtgtttgtgcatgtatatactgtgaaacaagaactgtattatctttacatgtcattaaaacatttccaaaaatagttgtcataattggccacaatgaaatctcaataaatttaaaaagacaaaatt

SEQ ID NO: 251948 - DNA, 554 bp, Homo sapiens
atgtttacagtagccacattaggtagcccattgggaattctcatgtataatagataatttttgtatccttggttcttaktatgggcacatgaacccattagcgggatttctgcctctcaggagaggtctgaccaactgtcctgggtattcaaaattgtccctttactataagtctccatctcctgtgttcatagaaaaacagactcacaagcaatgaagagatcccagtctgggttctgatgttgactggatggggtgggatggggagatagtattcctttccgctgtagattttttttttttttgatcagctgtagacttttatgaaagtggcatggtgcccaccaaatagaaggctacatccggtttgtaatgtgtctaaagtgcagaccagcccactgcacaaagctgtcccctctggttttgctcttgctctgtgttcaatgttgcttgtttcagaatggctgccaggtgtcttctctcttccgctggactgagagttcccagcgagtcaggctactccacactgtagctggagactgtcacaaaggatg

SEQ ID NO: 251949 - DNA, 554 bp, Homo sapiens
atgtttacagtagccacattaggtagcccattgggaattctcatgtataatagataatttttgtatccttggttcttagtatgggcacatgaacccattagcgggatttctgcctctcaggagaggtctgaccaactgtcctgggtattcaaaattgtccctttactataagtctcsatctcctgtgttcatagaaaaacagactcacaagcaatgaagagatcccagtctgggttctgatgttgactggatggggtgggatggggagatagtattcctttccgctgtagattttttttttttttgatcagctgtagacttttatgaaagtggcatggtgcccaccaaatagaaggctacatccggtttgtaatgtgtctaaagtgcagaccagcccactgcacaaagctgtcccctctggttttgctcttgctctgtgttcaatgttgcttgtttcagaatggctgccaggtgtcttctctcttccgctggactgagagttcccagcgagtcaggctactccacactgtagctggagactgtcacaaaggatg

SEQ ID NO: 251950 - DNA, 586 bp, Homo sapiens
aatggggaaatgtgtctttctttaatatattgtgctgtgataactgattagcaatatgcagaagattaaaactggagcccttccttttaccatttacaaaaatcaactcaagatgggttaaagacttaaatgtaaaatctaaaactataaaaaactccagaagaaaacctaagagattccattctagaaataggccctgrcaaagatttcctgatgaacactccaaaagcaattgcaacaaaaacaaaaatttataagtgagacctaattaaacccaagagcttctgcacatcaaaagaaactatcaacagtataaacagacaccctacagaatgggagaaaatattcacaagcagtgcatcaaaggtctaatatccagaatctgtaaggaatttatacaaatgaacaaacaaaaagcaagccaccccattaaaaaatgagcaaaggatgtgaacaaatacttcttaaagacatacattcagccaataagcatacgaaaaagtgctcaaacatcgctaatcattagagaaatgcaaatcaaaatcacaatgagataccatctcataccagtaagaatggctattaa

SEQ ID NO: 251951 - DNA, 597 bp, Homo sapiens
tattccttttgtacatatcagccacatcagtttaagaggtggttctctagggcatgccagttgttttcatttgctgacacatttgtaaatctttaatttttaatcatgtgagtttctttccttgtgtgagactacaggagttgtcttaacatgttctgtaaaaaatgagttatccttaaaaacatttttcctctttgttttagtatagtaaattcgtggcaaaattcagatcattaaatgagaatggtgtgtttggcttcaagtattttaactggtggacttctccatgtacatgaaactggaaatgtcctctccccatctgagcagtgttggagaccccccaaaccatagcctctgtcactaggattgtgatcatcatgctaaaggaattatatgattgcactttaaagttagtgtaaaacatgggcctgataatactccctagaataatttgtttctgtttctagattttctaatgtattgttggtagaattggttacaagagtrtaatattaaatataagagtcatctagaaaggaaataaatatgtagaaacaaaagcatgcaatcctcattttttaaaaaaaagaatatttt

SEQ ID NO: 251952 - DNA, 558 bp, Homo sapiens
attatttaatagccacacatggctagtggctactgtattagacactgcagaatgaggaacattgacatcattgcagaaagttctattggagagtgcggctcacctgtgtgagaggaagtcagaattrggggggtcaccatgccattcatatgaacaagttttcaccataggtgagttgtccttccttatttatgtggaaatctttgggaatttcttatgccagtgaccataagctacatctccaagggctttatcactattattattttatcattattactattatgtttgtacaaacatggcctttacctttattccttaaaatatctgttaaaggcaatcttatgtgcatatgtgggcgtgggaaatcaagagcctcaccacactgccatgaggtattcttggctttggcttggtacagctcatagaattattcaaatgacccttccctgaacttaaaaaaattaatgtacattttaaagaaaacaaatcccacatgttttagtgtatttatacttgttcttccagcttttggtttgaagaggactgtggtatctg

SEQ ID NO: 251953 - DNA, 558 bp, Homo sapiens
attatttaatagccacacatggctagtggctactgtattagacactgcagaatgaggaacattgacatcattgcagaaagttctattggagagtgcggctcacctgtgtgagaggaagtcagaattgggggggtcaccatgccattcatatgaacaagttttcaccataggtgagttgtccttccttatttatgtggaaatctttgggaatttcttatgccagtgaccataagctacatctccaagggctttatcaytattattattttatcattattactattatgtttgtacaaacatggcctttacctttattccttaaaatatctgttaaaggcaatcttatgtgcatatgtgggcgtgggaaatcaagagcctcaccacactgccatgaggtattcttggctttggcttggtacagctcatagaattattcaaatgacccttccctgaacttaaaaaaattaatgtacattttaaagaaaacaaatcccacatgttttagtgtatttatacttgttcttccagcttttggtttgaagaggactgtggtatctg

SEQ ID NO: 251954 - DNA, 540 bp, Homo sapiens
ggaactcttgttgaaaattaactggtcacaaatgtatgggtttttttctgaacactcaattgtattccattggtctatataatgtccttatgccatgaccacactcactgtcttgattgctgtagctttgtagcaagtttagaaatcaggaaacttctcaaaatttctcccattgtgtttttcttttccaagattggtttttctatttagaatttcttgtctttccatatgaattttaggatcagcttgttcatttctgaacaagaaagtagttggaattttgataaggattgcattgattttgtagatcaatttggggaatattgccatcttagtaawataaagtcttccaatccattaacaaagaattatttctattttttaggtcgtctttaattactttcaacgatgttttgtagtttctcttgtgctattttctctttaccatggtccacatctccaacttcagaacctgctgctgcctgttctgggaatggttgctatcatcagacctgatatctagaagtagtagtaggagag

SEQ ID NO: 251955 - DNA, 603 bp, Homo sapiens
accctggcttaaccttggttttgattccttaaaagggataaaatttggcctagctcccagttatatttggccttttgcaagttgagtcttccttagaacttccttcctcccaatccatgccaattaattcatcaatcttttcttaactaacatttctgtaatctctgtgcatttttgtcaactacttctgaggcacccatgtgagtcagccactgtgctagcactgaaaatatagcagtaagaaaggaaaaaacagccgtctgacactgggttgaggtttacagaagagtcacagtgcaaccttttgtggcttgaatttttgtgctgtcttctctttgctgcaaactgctatgattactttagtgatgaaccaattcaggcttgagtatgtatcacctacttactgacacagaagatcctgaaattctgagtatataaagctaatgaataaaaggtatgggatcaaaaatttcttccaggctaatatccccactactccagcaacctaagccacccacttctcttctttttaattattaaaaacgtttttgtttttatacatgtrcagagtttaagaaatcagatagagataaaagtgccctg

SEQ ID NO: 251956 - DNA, 597 bp, Homo sapiens
gctaattggcagcatgtctttgccattttggaacttacagtctaactggcaaaagaaaccatataacaagaagttatagtgaactatgataattacagagggaagtgagggcctcacagggaggcacttaatccagacccggggagtcagggaagagcttctgcaaaaagtggtgtccaagtgcraactggaggatgaatggggcttaccagccaggagtggctgtgtgggtaatggaaggaatatggagggcaggagagcgttgcagcagagaatgtcccagcaagaaggaatattgtaagataaggcttgaagaagagacagaaactggagaggaaagaaactatgactggagagtagaataagtggtgtggctgaaaataaagaagaagagacaataagggagagccataaatccatacgtaacagtttagattttattctaagaaccatgagtaactactgaagggttttaagccaaggagtgacagaatctagcatgtcagctggcatgatgttctcacagggatttggattcttgatcttcagtggaaaggttgagggacaaacattatctttttccttggccacattctg

SEQ ID NO: 251957 - DNA, 597 bp, Homo sapiens
gctaattggcagcatgtctttgccattttggaacttacagtctaactggcaaaagaaaccatataacaagaagttatagtgaactatgataattacagagggaagtgagggcctcacagggaggcacttaatccagacccggggagtcagggaagagcttctgcaaaaagtggtgtccaagtgcaaactggaggatraatggggcttaccagccaggagtggctgtgtgggtaatggaaggaatatggagggcaggagagcgttgcagcagagaatgtcccagcaagaaggaatattgtaagataaggcttgaagaagagacagaaactggagaggaaagaaactatgactggagagtagaataagtggtgtggctgaaaataaagaagaagagacaataagggagagccataaatccatacgtaacagtttagattttattctaagaaccatgagtaactactgaagggttttaagccaaggagtgacagaatctagcatgtcagctggcatgatgttctcacagggatttggattcttgatcttcagtggaaaggttgagggacaaacattatctttttccttggccacattctg

SEQ ID NO: 251958 - DNA, 597 bp, Homo sapiens
gctaattggcagcatgtctttgccattttggaacttacagtctaactggcaaaagaaaccatataacaagaagttatagtgaactatgataattacagagggaagtgagggcctcacagggaggcacttaatccagacccggggagtcagggaagagcttctgcaaaaagtggtgtccaagtgcaaactggaggatgaatggggcttaccagccaggagtggctgtgtgggtaatggaaggaatatggagggcaggagagcgttgcagcagagaatgtcccagcaagaaggaatattgtaagataaggcttgaagaagagacagaaactggagaggaaagaaactatgactggagagtagaataagtggtgtggctgaaaataaagaagaagagacaataagggagagccataaatccatacgtaacagtttagattttattctaagaaccatgagtaactactgaagggttttaagccaaggagtgacagaatctagcatgtcagctggyatgatgttctcacagggatttggattcttgatcttcagtggaaaggttgagggacaaacattatctttttccttggccacattctg

SEQ ID NO: 251959 - DNA, 581 bp, Homo sapiens
ctgatgcatgacgtcaaggaaacctaaataaaaaatggagagatatttcatattcatgagtakaagaatctaatgttgttaagatgtcagttcttcccagcttgatctgtagattcaatttaatcccaataaaaataccaccaaattaccttgtggatattgccaatcttactctttttttttttttcctctttgagacagagtctcactctatcacccaggctggagtgcagtggcatgatcttggctcactgtagctctgcctcccgggttcaagtgattctcctgcttcagcctcctgagtagctgggattacaggcacctgctgccactccaggctaatttctgtatttttagtagagacagggtttcaccatgttagccaggctggtcttgaactcctgacctcaggtgatccacctgccttggcctcccaaagtgctgggattacaggcatgagccaccttgcctggccattgccagtcttattctaaagtttatacggagagacaaaagacccagatggacaacacaatactgaaagagaagaacaaagttcgaggattggctctacctggttt

SEQ ID NO: 251960 - DNA, 554 bp, Homo sapiens
catgtggctactttaggaataatggacacacaaaaaggataccatggaaagtattctcatatgtgcacagtatgcatccttagcccaagaaagtataagcccatcaactacaacttttattttaaaataggcaagaaaatctaatatgccagatcatctttcactgaatttgagagtagaataaaaataagtaaccaaatagcaagcaataaagtttacttctattactgttttgattcttagtattcatttttacttcagacaaaaacttttcctttacataataggyataattattagcagaaaatatatttagggaggaagttaacacctgcaaacccaaaccacaaaatgtttggtgggctttacaaataaataattttgttcacctctcttagtgagccatttgcccccatattttgcagtttttcttttcttatttttaatgtgcaaaagttagtaaatgttggaaacaaaaacgtgaaggctcacttatgttttgctttttaaaatgggaaaatgagaatggaaattaaagagcagtggatcactgt

SEQ ID NO: 251961 - DNA, 524 bp, Homo sapiens
  misc_feature (1)...(524): n = A,T,C or G
atgacaccgttgatccaatgtactgctgttaagcagaattaaattcttccaaaatatggagaaaattttgaccaaaaaatttgtgattgctattactacagtatgtcctgtagtttttctcttagtcaaaaatatagtgatttttgtttttgtttgtttttgtttttaagatggagtctcgctctgtcacccaggctggagtgcagtagcgtggtctcggctcactgcaaactctgcctcctgatttcaagcaattctcttgcctcagtttccagagtagctnngggacatataggagccgcaccacngcatgtctggctaatttttgtatttttagtagagatrgggtttcgccatgttggccaggctggatgacaaaattaaagaagaaaagaattcaaaaagagaatgcttaaaacattcaaaacttacaaaatagaggaaataaggacataagaatgttctgctgtagaatgagtgaatgagcagcccttgagattttactgcttgatggctcagagtac

SEQ ID NO: 251962 - DNA, 524 bp, Homo sapiens
  misc_feature (1)...(524): n = A,T,C or G
atgacaccgttgatccaatgtactgctgttaagcagaattaaattcttccaaaatatggagaaaattttgaccaaaaaatttgtgattgctattactacagtatgtcctgtagtttttctcttagtcaaaaatatagtgatttttgtttttgtttgtttttgtttttaagatggagtctcgctctgtcacccaggctggagtgcagtagcgtggtctcggctcactgcaaactctgcctcctgatttcaagcaattctcttgcctcagtttccagagtagctnngggacatataggagccgcaccacngcatgtctggctaatttttgtatttttagtagagatagggtttygccatgttggccaggctggatgacaaaattaaagaagaaaagaattcaaaaagagaatgcttaaaacattcaaaacttacaaaatagaggaaataaggacataagaatgttctgctgtagaatgagtgaatgagcagcccttgagattttactgcttgatggctcagagtac

SEQ ID NO: 251963 - DNA, 524 bp, Homo sapiens
  misc_feature (1)...(524): n = A,T,C or G
atgacaccgttgatccaatgtactgctgttaagcagaattaaattcttccaaaatatggagaaaattttgaccaaaaaatttgtgattgctattactacagtatgtcctgtagtttttctcttagtcaaaaatatagtgatttttgtttttgtttgtttttgtttttaagatggagtctcgctctgtcacccaggctggagtgcagtagcgtggtctcggctcactgcaaactctgcctcctgatttcaagcaattctcttgcctcagtttccagagtagctnngggacatataggagccgcaccacngcatgtctggctaatttttgtatttttagtagagatagggtttcgccatgttggccaggctggatgacaaaattaaagaagaaaagaattcaaaaagagaatgcttaaaacattcaaaacttacaaaatagaggaaataaggacataasaatgttctgctgtagaatgagtgaatgagcagcccttgagattttactgcttgatggctcagagtac

SEQ ID NO: 251964 - DNA, 622 bp, Homo sapiens
tcacacagagaataggattgggctcctgatacattttgttaaatccttttccctttcttactgctctgaactttggtaagcattcttactactttgccagtctagtgggtarcatttttttctaaaagttttttaaaactttgtttcatgggtttagcgaaaggtgggaaacagtgtgtaagagcatgtcacctccttccatgcttaagtagactgttaaaggtactaaaacaactctgttataagtcatttttatcctaggtccaattgtcctgaacctcaggggacacttaattgtactaggagtccagtattttttaaaataaatttttgtgatttgctttgcaattttctatactatatgagtgacattttattttagtgtcaatttttccctcttttaattatctgtttaaaagttagggttatgtgtgtgtgtgtgtgtgtgtgtgtgtgtgtgtatgcatgtgcaatttgtagaatctgggaaagccaaagttttcatagatgacactaacatagttattttttggtggacccactctgaatgtcattttgtttattttagtttcttctaaacccagggccaaatcttatttttataagaatttttttttatttg

SEQ ID NO: 251965 - DNA, 622 bp, Homo sapiens
tcacacagagaataggattgggctcctgatacattttgttaaatccttttccctttcttactgctctgaactttggtaagcattcttactactttgccagtctagtgggtaacatttttttctaaaagttttttaaaactttgtttcatgggtttagcgaaaggtgggaaacagtgtgtaagagcatgtcacctccttccatgcttaagtagactgttaaaggtactaaaacaactctgttrtaagtcatttttatcctaggtccaattgtcctgaacctcaggggacacttaattgtactaggagtccagtattttttaaaataaatttttgtgatttgctttgcaattttctatactatatgagtgacattttattttagtgtcaatttttccctcttttaattatctgtttaaaagttagggttatgtgtgtgtgtgtgtgtgtgtgtgtgtgtgtgtatgcatgtgcaatttgtagaatctgggaaagccaaagttttcatagatgacactaacatagttattttttggtggacccactctgaatgtcattttgtttattttagtttcttctaaacccagggccaaatcttatttttataagaatttttttttatttg

SEQ ID NO: 251966 - DNA, 599 bp, Homo sapiens
caaaggacatgatttcattcttttttctggctgcctagtattccatggtgtacatgtacattttctttatccaatctaccattgatgggtacctagattgattccacrtctttgctattgtgaataatgctgcaatgaatatacaagtgcatgtatctttttggaggatgatttgttttcttttggatatataggcagtaatgggattgctgatcgttttgttttcagatatttaagaaatctccagactgctttcccaagtggctgaattaatttacactcccaccagcagtgttgaagcattcttttttctctgcaagcctcaccagcatcttttgttttttgacattttaataatggccgttctgactggtgtgagatgctatctcattgtggttttattttgtatttctctgatgattagtaatgtggaacattttttcatataatctttggctgcatgcatgtcttcttttaagaagtgtctgttcatgtcctttgcccatttttaaatgaagaagtttattatttgcttcttgatgtgcttaagttccttctagattttgaatattagacctttttcagatgcattgtttgaa

SEQ ID NO: 251967 - DNA, 599 bp, Homo sapiens
caaaggacatgatttcattcttttttctggctgcctagtattccatggtgtacatgtacattttctttatccaatctaccattgatgggtacctagattgattccacgtctttgctattgtgaataatgctgcaatgaatatacaagtgcatgtatctttttggaggatgatttgttttcttttggatatataggcagtaatgggattgctgatcgttttgttttcagatatttaagaaatctccagactgctttcccaagtggctgaattaatttacactmccaccagcagtgttgaagcattcttttttctctgcaagcctcaccagcatcttttgttttttgacattttaataatggccgttctgactggtgtgagatgctatctcattgtggttttattttgtatttctctgatgattagtaatgtggaacattttttcatataatctttggctgcatgcatgtcttcttttaagaagtgtctgttcatgtcctttgcccatttttaaatgaagaagtttattatttgcttcttgatgtgcttaagttccttctagattttgaatattagacctttttcagatgcattgtttgaa

SEQ ID NO: 251968 - DNA, 599 bp, Homo sapiens
caaaggacatgatttcattcttttttctggctgcctagtattccatggtgtacatgtacattttctttatccaatctaccattgatgggtacctagattgattccacgtctttgctattgtgaataatgctgcaatgaatatacaagtgcatgtatctttttggaggatgatttgttttcttttggatatataggcagtaatgggattgctgatcgttttgttttcagatatttaagaaatctccagactgctttcccaagtggctgaattaatttacactcccaccagcagtgttgaagcattcttttttctctgcaagcctcaccagcatcttttgttttttgacattttaataatggccrttctgactggtgtgagatgctatctcattgtggttttattttgtatttctctgatgattagtaatgtggaacattttttcatataatctttggctgcatgcatgtcttcttttaagaagtgtctgttcatgtcctttgcccatttttaaatgaagaagtttattatttgcttcttgatgtgcttaagttccttctagattttgaatattagacctttttcagatgcattgtttgaa

SEQ ID NO: 251969 - DNA, 644 bp, Homo sapiens
gtctctactaaaaatacaaaaaaaattagccagacgtgatggtgtgtgcctgtaatcccagctaatcaggaggctgaggcagaggaattgcttgaaccagggaggcggaagttgcagtgagcccagatcgctccactgcactccagcctaggtgacagagtgagactccatctcaaaaaaaaaaaaaaagaaaaaagaaagaaagagagaaagaggtaaaaggagcacagttcctttaaatctcctggcagtcacttcagctgcagggagagaggcttgcagcaatgggggcaggtgtaacatcaatggcagcccaactctgtctgaatctgtgatcataagatgcagtccatgatcaggacacagattcctaatatttggaggatatggttctttttgcctactctggctcccacaaggtatgcttaggttgcytcatgaacgtgtgcacaattgcctgcctccatttggggatgaaggatgggtagctgctactatagtaagagctggaattgcctgaaattaactacaatttatggaccaagccttcccctggaggttgcaagccctcaatcgactccagagttccaaaagagttacatcagacagattctgccagtgcaattgttatctaggtaggaaaa

SEQ ID NO: 251970 - DNA, 589 bp, Homo sapiens
ggcatggtggctcacgcctgcagtcccagcactttgagaggccaagatgggtggatcacgaggtcagggagaccatcctggccaacatggtgaaaccccatctctactaaaaacacaaaaagcgggcatggtggcacgcgcctatagtaccagctactacagaggctgaggcagaaaaatcgcttgaacccgggaggcagaggttgcagtgagccgagattgtgccactgcactccagtctggtgacagagcaagactctatctcaaaaaaaaaaaaaaaaaaaattgtctcacatttctgcaaatgtgtaaaggatgagatagatataacaaagaggatgcactttccctaagtctaattttgacagctttacgaaaaggattcatccattataaaaccttatttggctgaaaagaaattcagtcaaaggttcaagccatcagtctgcactttaaacacctaaaccagtcaagaactttaaattttatgcttcctttgtggtggagctaaatattatgggttgtaaaatctgatccattccatgaattccttttatataayacgaaatataaaagaacttaaatcaat

SEQ ID NO: 251971 - DNA, 655 bp, Homo sapiens
agttccttaccccaagaaactatggggctgtttgggtgtcctcatgacatcgcagctggcttcccrtaagagcagttgatctgagggatctcatagagtaaggcagaagcctctggaagtcacacttaggagtcatttccacaatgtactattggttactaaggtaacccttattcaaaatgggagagaacaacacagagtgtgactaacaagaagtgagaatcactggaggtcatcctggaggtgaccacagaccctaatggcccaaggtcttccaccctgtcccaggctgcctttgtcctggcagtcctctccagatggcctccccaacgaaagcaaatctttcatgagtgtattctgtcagttccctattctttactaaggtaatgctgctgatctgttactgaaattttgctaatgtgctcagagaatgctgcaggggaaaagtgtagctttttgcacacattctccttcatcagcaaataaaagagtcaaggccttgactaaacactgattctcagggtggaagcaccaggtctactataaacagatggggaaatgtcctattatttagtcctggaaaatttcaccatgtaggcatatgcctgcttcaacaactcctaagtctgagtttatagggacaatttggacaata

SEQ ID NO: 251972 - DNA, 655 bp, Homo sapiens
agttccttaccccaagaaactatggggctgtttgggtgtcctcatgacatcgcagctggcttcccgtaagagcagttgatctgagggatctcatagagtaaggcagaagcctctggaagtcacacttaggagtcatttccacaatgtactattggttactaaggtaacccttattcaaaatgggagagaacaacacagagtgtgactaacaagaagtgagaatcactggaggtcatcctggaggtgaccacagaccctaatggcccaaggtcttccaccctgtcccaggctgcctttgtcctggcagtcctctccagatggcctccccaacgaaagcaaatctttcatgagtgtattctgtcagttccctattctttactaaggtaatgctgctgatctgttactgaaattttgctaatgtgctcagagaatgctgcaggggaaaagtgtagctttttgcacacattctccttcatcagcaaataaaagagtcaaggccttgactaaacactgattctcagggtggaagcaccaggtctactataaacagatggggaaatgtcctattatttagtcctggaaaatttcaccatgtaggcatatrcctgcttcaacaactcctaagtctgagtttatagggacaatttggacaata

SEQ ID NO: 251973 - DNA, 622 bp, Homo sapiens
tcttcctgatatttgcaggaactgtcataagacattaccagaggaagattaagactgtgggtacaggaaaagattgatgacttagaccttttagttatcacctacataacagaagtgaaaacattcataaggactaagttctttttctttcctgcctctctttctaaacctgttggcatcatgaagactgttcttccctccctgggtcttcttcctttttccaaagaattctaaaaatgggtagcctccaaggttgagtcttcaggcttgcctcaatcggggatgccagcctcaatcactacagctatgctggtggctcccaaacatatatttccattcctaacatcccataagaattcttggcctacattttccrgaaaataatattacttatgcgtccaaactcacgttttttgtccatctctctgacaactatcttctttaccagctttcctactttaattatttatcattgtaccttcttcatatactcccaactcattattccctttctctgtttaattttcttcaaataattcatcaacagctaacatgctacatattttccttatttacatttttattatctgtttcacttgaacataagctccataaggttggg

SEQ ID NO: 251974 - DNA, 622 bp, Homo sapiens
tcttcctgatatttgcaggaactgtcataagacattaccagaggaagattaagactgtgggtacaggaaaagattgatgacttagaccttttagttatcacctacataacagaagtgaaaacattcataaggactaagttctttttctttcctgcctctctttctaaacctgttggcatcatgaagactgttcttccctccctgggtcttcttcctttttccaaagaattctaaaaatgggtagcctccaaggttgagtcttcaggcttgcctcaatcggggatgccagcctcaatcactacagctatgctggtggctcccaaacatatatttccattcctaacatcccataagaattcttggcctacattttccagaaaataatattacttatgygtccaaactcacgttttttgtccatctctctgacaactatcttctttaccagctttcctactttaattatttatcattgtaccttcttcatatactcccaactcattattccctttctctgtttaattttcttcaaataattcatcaacagctaacatgctacatattttccttatttacatttttattatctgtttcacttgaacataagctccataaggttggg

SEQ ID NO: 251975 - DNA, 572 bp, Homo sapiens
tggaccagttatgtagatacatgttggaaaaactgggattgtttcatgatttatttattcactcagagaatatttaacaagctcctgctctggtcatcagggaaagaattgtgtggaaaaaaacaaatacagggcttcccccagtagaacttacagctttgcgtaggagataggctactaattatattacagatagatagggaataaactatgtgaggctttaaaggcaatgttaaggaggttctctttatcttgagagctgtaaatggccatggaaagattttaagaagtttggtggggagatgaccagagtatttgcatttgaaaaagatcattctggctgctgtgccatgaattagattacactagaagatccacttaaggaagcccccacaaaatctattccagaggcaattggaccttaaatttcaaagagcaggactcaccagtttaaccttcttgattgtttataaccagacttcawccttactggacagtgtttgtgccataccagttatcaaatattttcactataaacccattgctagggaggcagtagcagaaagaggtgg

SEQ ID NO: 251976 - DNA, 527 bp, Homo sapiens
aagcatatcaagggctagagaattgtgttggcaccagagataagacagcaaaatcccataatatggtggaggctccatggccccactgggtaggactttacctaggacattctgagctgttccaattgggactccaaggcttcaattcaacaaaatggcactgagagaaccatgtgctttcagcaagaaaattccctggaaatggcttgtgcttaaggagagaaccgcttcaaaactcaggcaaagaataccagaggcctggtcctaagagaaacccctgcctgtgagcagacagtagataccacatgyttgtggatcacagctcttcttcctacacacaagcccccttactcttgggtcacatggttggggacatatactctggcttcccactgctccataaactcaaaaatatctacataactacaaagagcaggggagaagcattgtgggctacagtagtatgaaaagctttcataaaaaatgtatgaataataacagctaccatgtattgagcatctattgtt

SEQ ID NO: 251977 - DNA, 527 bp, Homo sapiens
aagcatatcaagggctagagaattgtgttggcaccagagataagacagcaaaatcccataatatggtggaggctccatggccccactgggtaggactttacctaggacattctgagctgttccaattgggactccaaggcttcaattcaacaaaatggcactgagagaaccatgtgctttcagcaagaaaattccctggaaatggcttgtgcttaaggagagaaccgcttcaaaactcaggcaaagaataccagaggcctggtcctaagagaaacccctgcctgtgagcagacagtagataccacatgtttgtggatcacagctcttcttcctacacacaagcccccttactcttgggtcacatggttggggacatatactctggcttcccactgcyccataaactcaaaaatatctacataactacaaagagcaggggagaagcattgtgggctacagtagtatgaaaagctttcataaaaaatgtatgaataataacagctaccatgtattgagcatctattgtt

SEQ ID NO: 251978 - DNA, 556 bp, Homo sapiens
aactggcccatctgatcttgtgtctcctcctcctcccaccaggaactgactcagtgcaagaagacagctttgtctccctatgatttcacccctgaccaatcagcactcccagctcactggcttccccccacccaccaagttgtccttaaaaactctgctcctcaaatgcttggggagactgatttgagtaataataaaactctggtctccctcacagctggttctgcgtgaattcctctttctctattgcagttcccttgtcttgataaattggctctgtctacacagcaggcaaggcgaatcccttgggtggttgcatcttttcagtcctacctgatgttgacataagtgccatgttccaaatttgaaaatcctggttattttctaaaaacttctaaagattaaatatatgatgtatrtgtcacattatctcctgaagcagaatgcactttaaaaatatgttactactttctaaatccaatcatgaattatttaatttgtgcaccatgtgaagataattaatacaaagtaaagctgctggttgtcatttttaaat

SEQ ID NO: 251979 - DNA, 611 bp, Homo sapiens
taaaaaagcaaggtattgaaatcagatcctttatagcatagaaaaaataagtgatttattaatgatatcaggaattgagattttcacagcaccatgagawtgataaagtaaaattctaagttaaaaattataagataaaaaattaaattaatataaagttaaaactcaattggaaaatgtagatcaaaaccacacagaggggctgggctcagtggctcacgcctgtaatcccagcactttgggaggctgaggcaggtggatcaccaggtcaggagttcaagaccagcctggccgagatggtgaaaccccatctctactaaaaatacaaaaattagccaggcgcgatggcaggtgcttataatctcagctactcaggaggctgaggtggagaattgcttgaacctgggaggtggaggttgcaatgagccgagattgcgccactacactccagcctgggcgacagagtgagactccagaaaaaaaaaaaaaaaaaaaaagccacggaggtgagagcaagacccagggaattatgcccagcatgttttatgcaaaagatgttcagctgtgaataagtgtcccactccctcacctctgttatggtttagttgcaa

SEQ ID NO: 251980 - DNA, 611 bp, Homo sapiens
taaaaaagcaaggtattgaaatcagatcctttatagcatagaaaaaataagtgatttattaatgatatcaggaattgagattttcacagcaccatgagaatgataaagtaaaattctaagttaaaaattataagataaaaaattaaattaatataaagttaaaactcaattggaaaatgtagatcaaaaccacacagaggggctgggctcagtggctcacgcctgtaatcccagcactttgggaggctgaggcaggtggatcaccaggtcaggagttcaagaccagcctggccgagatggtgaaaccccatctctactaaaaatacaaaaattagccaggcgcgatggcaggtgcttataatctcagctactcaggaggctgaggtggagaattgcttgaacctgggaggtggaggttgcaatgagccgagattgcgccactrcactccagcctgggcgacagagtgagactccagaaaaaaaaaaaaaaaaaaaaagccacggaggtgagagcaagacccagggaattatgcccagcatgttttatgcaaaagatgttcagctgtgaataagtgtcccactccctcacctctgttatggtttagttgcaa

SEQ ID NO: 251981 - DNA, 577 bp, Homo sapiens
cacttcatcaagaaggctttccttgaccctcttcctcataatgtattgaatagtacttacttatttaatatctgccttctctttcatcctaaaatctccaagaaagccacaactagattagtcttgtttgcttctctatcttcatcagagaatttagaaaatgtaattgattttttatgcttgcatgttttatgttcttcagctttagtttttatgaataacagtagaaaaaacattatctttaaaagtatcttaggttgcttagaatatgggagtaattacagatctgtttctttttctcattaatccttgggaagcctaaattacaatcacttcctagaagctaggcrgtaaagtacttctgactcagccttgccctattgttttttggagggatctaggaagtggtgataataacacttacctggcagagcagttaaaaaaaatagagatgacgtatttcatatgtctagcatggaatgggcactaaaacatggtagctattattaaagaataaaataatagatatatgcatggatttcagagtgcctgtgacctccttaaaatgaatgcaaca

SEQ ID NO: 251982 - DNA, 454 bp, Homo sapiens
caaatatatgaatcatttatgttgtcaaagcgacctaaaatactttagaattttctattaatccaatgtaacatccccattctaaggcataatttgaattatttactaagatttattttaactacttaattatgttgaacttgaatatattaatatggctagtttaagtgactatgtgacaactagcttagctgacttctggaaacccaaaaatatttctaaaattaaaggggaaagcaaggcaataaaaatgttacacagaaacaagtagtatcaaaaaggaagagctatccatgattgatcagctctgtataacaccaaagcaacactgaaaagagaaaagttcaagtaatccrttgttttctcagttatatatatatatatatatatatattacataaaacatatttttctaatgattttttaaaaccttaattgaccggtagtttggata

SEQ ID NO: 251983 - DNA, 615 bp, Homo sapiens
tatatttttaaaattattcaaaggacttaaatacttcttagacatcaaacaagtctcaagaaataatattttgatgatttaagtaaaattaaacaaaaacatatggaatgaatttctttcaaacatacatcatgtttagaaagtgagggtaagactgcttcataaaatgaatttgctgttctatcaaacccaaaatggctgaaaaactcttcaaacatttacaattcagccagatttgtcctaccctgacttctatgctattgaatatcagaatctttcaaggtcattttacttttttagtcaatgaatcatgacattggtttctacaagatgtaatatttatggactgttttgacatgtgtatcagcaaaataagagaattcagttgaatcaattgaatgctctgatgagaggttccatacacttccaagattgcccattgctgacagtaacctatgatcrtggttttcacatttggcaagagagactgttctgagcaaaccctcctccctgaggagctatgaggaagctgactagcttgctaactgtggcccacctagcatctttaccaccaacctacacacacagaaagagagtgagagagcagcaaagatg

SEQ ID NO: 251984 - DNA, 398 bp, Homo sapiens
actgagagacagacagaggcacacaggacagaaactggggagtctccaggcgggagaggaagggggggccagaccgcctacgtcggcgcccccgctccgggctccgactccagacgccgcgaagtgaaaggggagaaaagaaagggagagggcgaggctgtgccgcggggagaccgggcctgaggtgttaaacatttttgtttgcttccgactagtccagacgaagggccgcgtctcggtagcgctctgccagggtggaaggtgccggggccggggttcctagcaacacctctgggctggggktggctgcaaagtcaggcactcacagacccagacacaaaacctcgcgggtcccgcgcccaggctgcgggtgcccggaaccgccgcgaggccggcgc

SEQ ID NO: 251985 - DNA, 613 bp, Homo sapiens
gctttccaattgaagaagagaattaattatcagtggcttttgtacaagttgacttttataatttaccatcaagatgtacatctgcccttttcctggacataagtcaagcacttactatcctactaattcccccaagtctctatagttcatcttaaactgcagcactgatgtgttaaattacttccctgacataactggcagatagcgatctcaaatctctggcagatagaaatctcattgtgagcctcttcagctggagcggcctcctcacctaagtaacatcacagttgcatcctgtctagtcctttctcataatgccacttggtgcagctgtgtctgtgtggctctatctgtgtaggtctgagtatggctccttrcatgtgtgtagtgaaaggtcatggaagctgtcaaacaactctgatccaattgagtgacagcatcactgcaagtaaagacatagtgggaaaaaaaaaaacattcaatattgaaataattacctgaaagactgttcttagttctttggccttcagaactgctataagtagtaatttctgacttaaatatgttaagaggcatatttaagcataaaacactaagctaaaacatagtaagc

SEQ ID NO: 251986 - DNA, 632 bp, Homo sapiens
tcttattgctcattaacatccttttctttctgattgaagtaccctttttgcatttcatgtaggacaggtctggtgttaaggaagtccttcagctttttcttgtctcagaaagyctttatttctctttcatgcttaaaggatattttcaccaggtatattattctaggataaaagtttttttccttcagcactttaaatatgtcatgccactttctcctggcctgtaacatttccactgaaaagtctgttgccagatatattggagctccttcatatgtaatttgttccttttctcttgctgttttaggatgttttctttatccttgacttttaggagtttatttaatggcttgatgttctcttttggattaaatctgcttggtgttctataaccatcttgtacttggacattgttatctttttctaggtttggaaagttctctgctatgacccctttgaataaactttctacccctatctctttttctacctcctttctaagaccaataactcttagatttgcccttttgaagctgttttctagatctttcagacatgcttcgttcttttttattcttttttcttttgtcttccctgactgtgtattttcaaatagcctctgttcaagctca

SEQ ID NO: 251987 - DNA, 632 bp, Homo sapiens
tcttattgctcattaacatccttttctttctgattgaagtaccctttttgcatttcatgtaggacaggtctggtgttaaggaagtccttcagctttttcttgtctcagaaagtctttatttctctttcatgcttaaaggatattttcaccaggtatattattctaggataaaagtttttttccttcagcactttaaatatgtcatgccactttctcctggcctgtaacatttccactgaaaagtctgttgccagatatattggagctccttcatatgtaatttgttccttttctcttgctgttttaggatgytttctttatccttgacttttaggagtttatttaatggcttgatgttctcttttggattaaatctgcttggtgttctataaccatcttgtacttggacattgttatctttttctaggtttggaaagttctctgctatgacccctttgaataaactttctacccctatctctttttctacctcctttctaagaccaataactcttagatttgcccttttgaagctgttttctagatctttcagacatgcttcgttcttttttattcttttttcttttgtcttccctgactgtgtattttcaaatagcctctgttcaagctca

SEQ ID NO: 251988 - DNA, 421 bp, Homo sapiens
tattttcctggatggtcttgatgctagcagatgtttgtcagtgtctgggcattgaagagttaggtatttattatagtcttcacagtctgggcttatttgtacccatcctttttgggaaggcttcccaggtattcaaaaggactygactgttgtgatgtaagccatatctgcattagggacacccaaagcccagtaacactgtggttcttgcagattcatagaggtaccaccttggtggtcttggataagatcctaattctctggattaccaggcagagactctgttctcttcctttgctttctcccaaacagacagagtctttctctctgtgctgagccacctggagctgagagagggatgacacatgcacccctgttgccatcaccactgggactgtgctgggtcagacctgatgttagc

SEQ ID NO: 251989 - DNA, 390 bp, Homo sapiens
tcaggcccacctggataatctccctgttttaaagttgactgatttgggaatttagtgacatctgcaaaatcccttcacagcagcacctggattagtgtttgactgaataactgagagaaggcctgtgtwtaccaggggccaggaatcttgatggctgcaatggactgaatgcgtccccataaaattagtatgataaaacccgaatcctagtgtgatggtactaggaggtggggtcctttggaggtgattaggtcataatggtggagtccccatgaatgggattagtgagctcataaaagagacctcagaacactctcttgccctccttccaccatgtgaggatgctatgagaagatggttgtctgcaatccagaagttggccctccctag

SEQ ID NO: 251990 - DNA, 547 bp, Homo sapiens
tgtatactttattacgaagcatattttattcagaatttcttcataaatgtatgaaagttataaaagtgtgacatttgctaccatggcaggaaaaataaagacaaaagcaaggctatttagtgcaatatttacccttttttaaaaagtaagcatttcttccttatgcacattcaaaaggaggggatgacaaattaacaaaaatgatatgaatgaaatgaagtgatccaaatattcaaattatgtaaatgtttaaagtgaaaaaaaatttgagaaattattatataagataatcttacaaacattcttatttgcaaggtgggcaattaacatgtttgcaatttgtaacttcacaaagcaatgcaaatcagcagaagaatccaaatttaattatacacaattgtacaaagagatactttcttttttaaactttttaagtttttaaaaaataatttcaacrtttagattcagggagtatatgtgcggattttttacatggacgctgagtttcaggatatgaatgatccatcacccagacagtgagcatagt

SEQ ID NO: 251991 - DNA, 478 bp, Homo sapiens
tgagcttcacaggctcagtgaggaaaagtggagagggagagaattgcatgttacacagcagacagctcagtccaacacctgcgctgaaaataggggttcctgagaacgagtagtggaagataaatccagaaaggcaggttgagagccaagctggccttccaaacaggattcttattttttcagcaatgtcccatgacttttggagaatgttgtgagggtwacatgacgagcatcattttccccaacacagaggtggggtcaggaatgctgggaagaggtcagggtcactcagagagtgacacagggaatggcagagagtcctgtttcccagtccagccatctcgcagccaagatatactacaaactccctcctctttcccaggttccaaagtactgaaatggaatgaccatgccgaaatgctggaactgccccttattttttcctttccctgtgacgagaaagaaaagagaggaggac

SEQ ID NO: 251992 - DNA, 568 bp, Homo sapiens
agtgctgcgatgaacatatgagtgcctttttggcagaatgatttattttcctttggatatacacccagtaacgggattactaggtagaatggtaattctgttttaagttctttgagaaatctccaaactgctttccacaggggctgaactaatttacrctcccagcaatgtaagtagtctcctttctttacatccttgccagcatctgttgttgtatgatttttaataatagccattatgattggtgtagacagtatctcagtgtggttctgatttgtgtttctctgataattagtgatgtggagcattttttatagtgtctgttcatgtcttttgcccactttttaatggagttatttgtttctttgcttgttgaatagtttcatttctttgtagattctggatattagatctttgtcagatgcatagtttgtaaatattttctgccattctgtaggttgtctgtttacgctgcagatggtttcttttgccatgcagaagctccttagtttaactaggtcccactagtcaatttttgtatttgttaccattgcttttgaggacttaa

SEQ ID NO: 251993 - DNA, 549 bp, Homo sapiens
ctcttttacattctttttcccctggactttcaatggaaacatgcaagcaagaaagacttttctgtttgctaccggtaaaacaacagccaagcacaatggtaactggcaacacactctcagcctcggtgagaagacaatagaacagttgggaatggcagggaaagtggaaaagcagagccttgatcttacaaagagagaacaacaacttagctccagcttatgctgcaaagaacatacagtggccaaatcctcctttttcttccccaagagaagctagaaatctggattttacataaaatctcccaatcattaaactgttgtcaacaattcccaactctgttactaagcacactgtgcaagacaattatttgcgtctcaacaatattaaccattgctgaaggccttgaaaagtaagctacacgagggcaggratttttgtctagtacaaagttgatgctcaatcaatacctatttgttgaatgatgaataaaagcagagtttctgtaagccatgaattttcaacccaagaaagaatatatgaagaatttc

SEQ ID NO: 251994 - DNA, 601 bp, Homo sapiens
ttctataatcaaagattagtgaatattttccagcaatattgaacaaaacaacaaattaacctcaaatgtgaaggataaataactacttacaactttcagttcaggatgggtcacactgacagacacaaactccataaatttggcaaatccttcatttagccaaagatcattccaccattccatagtgaccaggttcccaaaccactaaaagcacaacataagccataaacaaagacactcagaaagaagtatattttagatgtccaatataagtttatgaatgttaacatatatttacaggaccaatatttaatcaaggtaaaaataaaaaaagttcaacatgcattataagacataaaaacgaatgctttggagaaacaatttttcctattaaaaaaagacaaagtaaaaattatataaatagccttatatgtcccatagaagcaatataaatgtagtttatactttattaaaagtgtgaatgagcttatacctggtgagccagttcatgggccacagtcattgtgatgycaagcttacttgatgcagaagacttttctgcatcaaacaacagagcagattctctatatgttgtcagtcc

SEQ ID NO: 251995 - DNA, 624 bp, Homo sapiens
gcctttctgaattgatagcatatgttttaaagggagtgattaaccacctacttaatatatccactaatgcactttcagaagggcacagtgccagatgatgctgtagaagccttggctgatagcctggggaaaaaggaagcagatccagaagatggaaaacctgtgatggataaagtcaaggtaatggcaactgagatgcttctggaaaataaatatcattgatcaccttctccccctgcaaataagttagtcatttgttttgttttttatatttcctgtaaaacatgaccrgctggctttttctattattgtgcatatcctgtttaataagctaaacctgaataagctgcagtgttgaacccccacagtggatggtcgacatgcacagaccggaggcctctgagtctcatctttgcccacctgcattgacattgctgggacttgggaaggaaggggcagctgcctgctgctcctcacagctgtcttgcatcccagcaggctttctgctggtgcctgagtctgccagatgaagttgctgtaggagcactaagcatacggtcatatgtacttcctaacctaatgatagatttgtttacctcaaatctagtcactcaggcatgaatt

SEQ ID NO: 251996 - DNA, 575 bp, Homo sapiens
aataatacaatagagaagaaagaatttaaatttcttttaaaattatatgttattatgagtctatttggtcaagagaataaacagtcattaagctatckttaagagttatagttaagtgatggcattgtgctcataattttatatacaacatgttactaataaaatttttttcaataaaagaaatttgaagatgctaaacttgctgctgccatctctgaagtggtttcccaaaccccagcttcaacgacccaagctggagccccaccccgtgatacctcggtaagcagcacatcttatttgggagataaatgtttttgcgcagccacaactagaaagaaaatagggcgcctgtttaaagcaaatgaaaataggcagaattattaggaagatcaggcaccttctatttcagaagagccgagactgatgatttagcgagatggcagagattaactttgaaatgattaaatgaaactatatatgtgaaaacattgtacacatagtcaaggaccttaatattattgttgctttataagaattgaaagtgcaataaagtgcattgtgtctatattcaaatt

SEQ ID NO: 251997 - DNA, 575 bp, Homo sapiens
aataatacaatagagaagaaagaatttaaatttcttttaaaattatatgttattatgagtctatttggtcaagagaataaacagtcattaagctatctttaagagttatagttaagtgatggcattgtgctcataattttatatacaacatgttactaataaaatttttttcaataaaagaaatttgaagatgctaaacttgctgctgccatctctgaagtggtttcccaaaccccagcttcaacgacccaagctggagccccaccccgtgatacctcggtaagcagcacatcttatttgggagataaatgtttttgcgcagccacaactagaaagaaaatagggcgcctgtttaaagcaaatgaaaataggcagaattattaggaagatcaggcaccttctatttcagaagagccragactgatgatttagcgagatggcagagattaactttgaaatgattaaatgaaactatatatgtgaaaacattgtacacatagtcaaggaccttaatattattgttgctttataagaattgaaagtgcaataaagtgcattgtgtctatattcaaatt

SEQ ID NO: 251998 - DNA, 476 bp, Homo sapiens
  misc_feature (1)...(476): n = A,T,C or G
tcactttgtaaaatcatagagttgyattctattgttgaaagagcttaaatttcaaaaaaattaatttggatccttagaaaaacatttcattttatttctaaaagggaaaggtaatttgaagcacatgctatgcctcattaatattaattaatattaaaaataaacctggattacttataaaaatgatattttgtaacaggatttttctaataatataattattctttcttaaaatgttttactttattatgttataatttgaaatacatttaaacaactattttgagaacttgccttaatgatttcatatggagactaactagtaaaattgctccctgtaattcggtggtgtaactgctcaggaattagccacagccatcttcaagtgtcagatttcctttgcttccaggacttcaagtgccattctttccattgctgcctttgtgttttggtaaactctaaagngcatcatgcat

SEQ ID NO: 251999 - DNA, 476 bp, Homo sapiens
  misc_feature (1)...(476): n = A,T,C or G
tcactttgtaaaatcatagagttgcattctattgttgaaagagcttaaatttcaaaaaaattaatttggatccttagaaaaacatttcattttatttctaaaagggaaaggtaatttgaagcacatgctatgcctcattaatattaattaatattaaaaataaacctggattacttataaaaatgatattttgtaacaggatttttctrataatataattattctttcttaaaatgttttactttattatgttataatttgaaatacatttaaacaactattttgagaacttgccttaatgatttcatatggagactaactagtaaaattgctccctgtaattcggtggtgtaactgctcaggaattagccacagccatcttcaagtgtcagatttcctttgcttccaggacttcaagtgccattctttccattgctgcctttgtgttttggtaaactctaaagngcatcatgcat

SEQ ID NO: 252000 - DNA, 543 bp, Homo sapiens
ccaatgggagcattatacatgcattattttttgtactcaaaaggatgaagtatataactgtctactgtaccatgtcatttgaaaacactagaaaattctacagcaatccttcaaaagttttcaaataaataccctgtccatcttaaacctgaaaagcacttcaaattgctaacatttaatttcttrttgactgtagatattgtcgtttctgttttccttgtaaaaggatgctaaataaggctccaaggagtgattgctacattaaccaaaattatgcactgccaagctgtctccagcatcaactctgaaagataggaaagaatcagaaatccaatttcctacatgaaagttgaagcattgcttctttttttgttctcttctgtgggatttttccattgtcctcccaaatgtgacagtttgcaaatacccacatctagaagcaatctagaagcatattctataagagaaaagacaccaattttaaaacttgagaaagtactttaattctgtaggcaaaggttcagcaaatcagctagcactaat

SEQ ID NO: 252001 - DNA, 567 bp, Homo sapiens
gaaacccaaaactagcagtatattccctggtagagctcaaaaatacgaaaacagaaactaagacattctatcatatttctatcatcaagaataattgtttttagtttaataaatatgatagaatgccttttctccttctatgttgtcagtatttgaaaaaattaactttattaggtttctactatgaaatcaaagtatwaagtccaatcaaataatcatttacaaacaggtacaaatgataaagaaaaacagaagagtctaattttggcaaaatacagataaaccagacccttaactaaatagacaatcttattcattaggaagaggaatctcatcaggatttgctttgaaaaaagggaggactcatctaatttttacaacctagagctatcgaatatgtagccactagtcacatgaacactgctgaacacttgaaatatggttagtgagactgaggaagtgaattttaaattgtatttaatttttatttatttaaatctaaatattccccctaaggctagtggctaccactcagttctaaaagctttagtatacatatagtgtctt

SEQ ID NO: 252002 - DNA, 593 bp, Homo sapiens
aataattgacaatgaaatctagttatttagttttaaaaatatgagtcaacttttaaaacactataaacatattttcatagcattgtagaaagttgctagcagagagcttggattggaacataggaagcctggattcacagcccctttggccctaatgcaattgtacctgtttctaagttaatttcatcagccaaggaaatactcagagggaaaaagtaaatttagcttttttgttgttattaataataatatgattaaattttctctaatatgctgtttgctaagtatttatattatgtttccatgggaactttttctrtatgtatctttttactatttccccaaagaatgcagttataagacaaacatgaaatttggcagttaaatgaagtaatggttatggaatttcagaggatagagaattgaattaaaatagtcatccacattttgggtttttaagttgttcatgtcaatcaaaatagaacaacgcttcttccaggaaatgaatgtagaaaaagcttttctttaaaaaggggaggaaaaggttatttaatgtttttaaactccaactcttttttggttagttttgtttt

SEQ ID NO: 252003 - DNA, 621 bp, Homo sapiens
aaaatattggattacaattataaacactgtgtgggtcaaaatacgttattagtgggtagtctttggcctagtgatcactgtttgaattccattcaaatccatattaaatcaatgaccaatgttgaacattcaatattgaagtctagcatatctggttacgaatcagttatttygcatgaagtcagaggaaatgttgccttacccaactagctgaaacacatcatgaatcagacctactctgtccttaggtctgagaagtgtgtggttctgattcagctgtgtaatgagttggtcccatccatgaccctcatagtgaacgatgtagtaaccatttgagtccacattaaatttcacccaactggtcttttcaggtagatccagagtatctaagaggataagattggcataggcattttattatcaacaaacttattcagaacatctccagaactgttatttttaatcaaattacttataaatcaatgggaagatgaagtttggggagagtcataatgatattcattttcgtagttcactggatgatttcttttggaaagatggtcttattaaattaataaataagttaattcataggaataagactgctgaatttgttctaaa

SEQ ID NO: 252004 - DNA, 589 bp, Homo sapiens
cgctaggaatatttgtgatgccttctattccactcaaatattttagctctctgacagaactcttaaaagctgtttgtttacattgattaatacttggagttgtcatgatcaaatacgatttattgctgtctaaaggtgagcccacaccatcttttacatttgataagctgagttgagaatatatagcaaatgcagttcaataaatcaattcaggtttgtctctttctagtttagaaattacratcatggattttagttaatttgctatattttcattttcatataagaattaaatgaatgagtattcattgttttcttgacctggctctgagaagacaggatagaagattttttttttttttttaagcagggttctctcttactgttggaatattccctttcgagtatcatttttctgaagactgatgctatcctcattagagtgctcaggagtgcacctattggaaacaaacaagtagcgttattgtcaagtatgtttgcatgtagtgctgttggtggacacttcatggcttctataggtttctactctccagaattttctgtgtgaaagcttttgcttgtcagtgaa

SEQ ID NO: 252005 - DNA, 598 bp, Homo sapiens
ttcctgcatctttaacctctttaaattgacataggtaagatcttgtgtaataacacatttgcaaatatgcagatgcattttcaaatgaatataatctgatttagagaatattaactgactatcatagtagactatggataatactctaataattaattacaggttaacatttttaaaactcaaagcatatgctttaagtttatgctttaagccacgttatgttctacttcagcctaatacaagggagaaatttggagggggccctcctagctttctagtctcattattcccaaattagaaacattaccagcctaacactaactctgrggtctaaaatgaagttattttggcagccctagagttttcttgtcattgataactgaagattggcctttgtgcaggttaaataatcaaatcttagaggaaattgacatgcttttaaattatctacaaatattagcccttaaaagattatatagcagtatatattatgttaaccaatccatgtgcagctgatggactttgtgattcagtggataataagcattagtttttcctgctttgatcttatgtatatccatacagaaaaacaaaaaaa

SEQ ID NO: 252006 - DNA, 450 bp, Homo sapiens
tatgataccctctgggtaggagcttacacagttgggccaattaaatcatgttgagagagagcaactaagcaaacgtgcctatttgatttgcttgatttcccatgtttgctgtgatcagtggctttctcttttgtctgttccttggattcytgatttggctttgcctctaggcattagatgttatctttggaggcatccttctatgagcattcatttttggaccaagcctggatttacaattctattactggcccagacttcatttctatccaatttcattccactgtgctatagtttacaacatataatttgacttataaataattcctgactatgggtttaaagactgaaaatggatcaatagaaactttgaaaatgttaacatcttgattgcttttctcagtgtagaaatggacaatgtttagcttaaaaactgcatgtttttaatga

SEQ ID NO: 252007 - DNA, 549 bp, Homo sapiens
aaggtaaaaaaaatatattgtctctgccctcaaagaatttgtagtcacttgcgagatgtatttaagatgtaattaaattaactaatctttaaggttwaaaaaaaaaaagaaaaaattcttaggagccataagtgattactgttattgtgatgccaattttatgaatcctaaaaattctagagttttttttttcttttctctttcctatttaatcaataaagaggtctatgctatctaaaagtcattagaaacaggtatcttgagacttagtttgggtaaccctctgtgtgactttctggctgggtgcagtggctcactcctgtaatcccagcactttgggaggctgaggtgggcagatcacttgaggtcaggagttcgagaccagcctggccaacatggtgaaaccccatctctactaaaaatacaaaaattagccgaggtgtggtggtgcacgtctgtaatcccagctactcgggagactgaggcatgagaatcgcttgaacccaggaggcagaggttgcagtgagccaagatttcgttattgcccat

SEQ ID NO: 252008 - DNA, 568 bp, Homo sapiens
gttcactgcaacctctgtctcccggcttcaagctattctcatgcctcagcctcttgagtagctgagattacaggtgcctgacaccacgtttggctaatttttttatatttttagtggagactgagtttcgccatgttggccaggctggtctcaaactgctggccttaaatgatctacctgccttggcctccagaagtgctgggattacaggtgtgagtcactgcgcccggccgccattgtgyttccgtgacctacagtatacagtatagtaaccacttgtagaggtctgtagcctagaagacataggcgatatacagcctagatgtgtagctctaccatctagatttgtgtaaatatactctatgatattcgcacaatgataaaatcacctaaggacacagtttgcagaacacatccctagtgctaggtgatgcatgactgtagtagatgctcctattctttgctctcacaggttttgtgtatttattttttgaacaatttcaagaaagtattttttgatacaagaaatgcataaaataatacttctgcagcagggtttctcaacttt

SEQ ID NO: 252009 - DNA, 549 bp, Homo sapiens
ctgttgcatttattatgtgtctactgtgtactaggcatggtgatagatgctagtgatacaaaggtgaatatgtcctcatgatcttcacctgaggaaagatcattgtagaacaacaacaagtggcatagctaaggactgagcaggctagtgtggaaagagagagagagatctagtccattctgaagggaattggaaaggtggtggtggtggtgagtgcaggatgacttcgggactttgaattgagtatagacaatgcataagatttatgtgggcaaagcaggggagaggaagaaagagggaagcaatctagatatattttgtctcttaattgaaaaatctttgtttttgctttactttcttggggatttactcaactttatcttctaattatttgacacgttcaaatttcaactactatattttaataaatgtacttctttgtccctaatttttgcttttaagcattctattcttgyctatcttattacatatgagtaaatgaactatccattgtatatttttgcttaaattaaactgttaaaatttgta

SEQ ID NO: 252010 - DNA, 594 bp, Homo sapiens
ttttgtgaactctaaaaatctcaatccaagtataaaattgctatcttttcaaatgtattttytaaattcggtagactaccatgaaagctttgctcaattaattttgtagccaatattaaaaataacttgtgctaatttaaaatttgaaatctgcagaatagcagaaaaatgcatctttactcccatcactcagtgagactgctattagttgtacagtattaatcatcagtaccctgactcagctgtcattcctttgaataaatactttctcctcaccctggttagtacacagggagacagagcactggactggcagttggaagacctggacttaactccattgcttttcatgtttatttgcctggatttaggccggccttgggatatcatttgtcaagagagaaaattggactagagatgattttaatgacttctttcaggcctaatgcttcatgatgctttcatatcatgggtaacttctggtagactgattaatgcccaccaagagaaaattaactatcattagtttaaaggggtagcattgagtataaagctaaatattgaggttttctatctttgcatttttttctcctc

SEQ ID NO: 252011 - DNA, 524 bp, Homo sapiens
gaggttgagcagatggagcatagaaagacaagctgtgttctagtctattttcaaagtagtattattttcttgagaaccaattattctatcggactttagaaaacacccgtgaatcagaattgtagaagaaggtgtcagtaaattaaggcttattgcwaaacattacaagtaaagtgactcatttaaaatcaggagacctctttaggaactactaatttagctaatcagggtgatacggctttagaaagtaaattgtgcttaaacgaggttctgatgtggctctaatcctttaaatggctcccagagcatgtctgcactgatgacagaactacaatggtcatttatttggatgttgtgtgattcaagagtttaatgtcagagaagaagaaactaaaattcccaagttaagttattatgcattggatgatatataaaggaaaggccgtcaaagcctctccatgcaattccaaagtcaactgtcaaacacacctcatctcctctcctaccaactgaagtgaaaataa

SEQ ID NO: 252012 - DNA, 595 bp, Homo sapiens
taaaattgaagcaagaacaaacatcaaatttgtggtgaaatgtgggtggaagactgctgaaatcattgatgctttaaaaaatgtttatgaggacaatgccccaaataaatcagcagtttgaacacgaataactgtcaataaaaggaaacgagattatgttgargaggaagcgtgcagcagcagaccatccacataatttgcaaggcaaaatttcatcttgttggcaccctaattgaagacgactgatgattaacaacagcacaaacaataaccaataccatagacatctcaattggttcagcttatataattctgactgaaaaattaaagttgagcaaacttttcacccaatgggtactaaaacttttgtgcccagattagctacagacaagtaaagagctttcaagggaaattttaagcaaatgggatgaagatcctgaaatatttcttctaagaattgtatcaggaaatgaaatgtggctttacctgtacaatcctgaagacaaagcccaatccaaagctgaaagtggtcccgtcaaagcaaaaacagtcaaaagcaaacatcatggcaatagcttttgggggtactcaaaat

SEQ ID NO: 252013 - DNA, 595 bp, Homo sapiens
taaaattgaagcaagaacaaacatcaaatttgtggtgaaatgtgggtggaagactgctgaaatcattgatgctttaaaaaatgtttatgaggacaatgccccaaataaatcagcagtttgaacacgaataactgtcaataaaaggaaacgagattatgttgaagaggaagcgtgcagcagcagaccatccacataatttgcaaggcaaaatttcatcttgttggcaccctaattgaagacgactgatgattaacaacagcayaaacaataaccaataccatagacatctcaattggttcagcttatataattctgactgaaaaattaaagttgagcaaacttttcacccaatgggtactaaaacttttgtgcccagattagctacagacaagtaaagagctttcaagggaaattttaagcaaatgggatgaagatcctgaaatatttcttctaagaattgtatcaggaaatgaaatgtggctttacctgtacaatcctgaagacaaagcccaatccaaagctgaaagtggtcccgtcaaagcaaaaacagtcaaaagcaaacatcatggcaatagcttttgggggtactcaaaat

SEQ ID NO: 252014 - DNA, 494 bp, Homo sapiens
tctcctataacataattgtcaaaagccgatatcaaactgaaggctacacttgggccctattggtacccacccactgatcaatcaaatcgcccatctttgctgagaatttcaaatgagtttcaaagatcgaggtctagggggaatattayctgttggtatttatgattaggtagctgtctttcttgggaaggaaagtaggcttcaaatgcaacttacaatgcactcacatctttaattctctttatttgagtttagatgctgaggtctgtgaaggatacagagatgggagaagcagcaacacacgagagttctggagaatggaatggggagtgcatcaccccatggaatctctgtaaggcccttcagattccaggggaaagtctccaagatgtgctctgcaatcagttcttttttactctataaaaaacacactgagaatagagacattggggaaaacgcagaggagacaaaggtcttggaacacactgacagag

SEQ ID NO: 252015 - DNA, 574 bp, Homo sapiens
ataacacaccagtgacacttggaataacagtgtttatacttcattgactttgggttgtcagccatgctattctctgtgtttctcttagtaacttattaaggcaactgaatttcagtgtgatgatgtctgagtgtcatttcttgtaaattacacaagcatgcacacaccaaatgcatagtcaatctttgggaaaaaaataatactttctagaatagacgaccaaaatattatccacaagatacatacacacrgagtgaaaggttactctctgaacctcgtgcatgctggaagaacagcatttgggcctttcatcagaagaaatactatttctacagactttcccactcatctattcttgctctattttcaccaaatggtcatgtaactcttggtttgaaagttgtcatacagccttacagcaggcttatattatctacagagttctttatggggaaatataaatcaccacaaatgagacttttcacagccagagatatgtagaaatttgtgtcagtgctttgctggcttgctaaaaaaatatctctaggctccgaagctctcacaactcatcctt

SEQ ID NO: 252016 - DNA, 368 bp, Homo sapiens
gtcatttcttgtaaattacacaagcatgcacacaccaaatgcatagtcaatctttgggaaaaaaataatactttctagaatagacgaccaaaatattatccacaagatacatacacacggagtgaaaggttactctctgaacctcgtgcatgctggaagaacagcatttgggcytttcatcagaagaaatactatttctacagactttcccactcatctattcttgctctattttcaccaaatggtcatgtaactcttggtttgaaagttgtcatacagccttacagcaggcttatattatctacagagttctttatggggaaatataaatcaccacaaatgagacttttcacagccagagatatgta

SEQ ID NO: 252017 - DNA, 572 bp, Homo sapiens
gaatcagcaagaaagaaaggaaagaaaagggaagagatgagcaaaaaagagaaaatcaaagatcatcttttgtttatataaatagcttctggattgtgacttttatttgatgtcaacaacaaatgaacaaacaggacaaatgctgtattgctgaactgatagcctcatgttaaatagaaacttttctccagaataaacaccatagtgcagaaagttccatggtaaacggctatgrgtccacactatgagttagacctaaagcatcacacacagcatggcccttgtagagctaatatgttctttcattcccagaattaagtcactagtccaatggaaacactaaccctaccaatctcccagagactttgtgatgaacaaaacataagattagagatgaaaacacctggcaaaatgtaaagctgcaccctgctatgtgggacagtgctactcagaatgcctgttccccaagatggaaaagcatcacatctgtttaataagcaactcagtggcctcagctaaaccaagtttggttctcttcttcctgacactcccaaatccattgtatgaatggt

SEQ ID NO: 252018 - DNA, 596 bp, Homo sapiens
tcgtggtgtgatgtgtgtgtgtatgtgtgtgtgtgacagatgcatagcagaatgaatgccagatcaatattawcccactcttaaaacattaaaggggttccaatatgaacaaaagccaataattcccctgtcaatgaagctaactaggcatggaacgtttttccttctgtcactttataattgcttttatactatgtaaaggaaatgctgatattcaggctttccaaaagtccaaatgcattcatattttgtcactgaaaattgaagtcatacgattctacaagtcatttttgagtagttactttaaaatactttatattaaactcaacaagacatcgttttaagataaattagtaacattttttcttaaagcttttgctactatttcatcaatatgttaatgaaaatgtataaaaattatacctttgtttttaaaattaagattaagaatatatatttaatcatccaaaggactacattaaaatcagctgtaatcatcatttgaagctttactttgtgattgtctgcttcttttttcagatgaccagtctctcagttttgtgcaaagtatcttaaacttagactaaatggtaatt

SEQ ID NO: 252019 - DNA, 622 bp, Homo sapiens
tgcaaatactaacattttttagtgcccataaaaaagctaaggtcatttggttcctgtgagaatgtaaaatgtatactttatttgcttacaaatgtatcacatttagtatatttagatataggcagggagggaatgaggaagaatacatttcagaaaaaaatgtataaatcttttgtaaattgtatttttacttaaactttctttccactgtggctatgagagaatgagagggaacaagagcaagagcaagtagagagggaaggaagcttttaggtctgaagagttgaaactgggttattttaagctccattccatgaacagaggtggttttatcttcagctaagtgtttaaaggcatgtgataacactaaatgcagatttccatctacctgctggactcaacaaaatctcaaaccctcaactggtgcctccaaatgtaactgtcagtcagctgatgtcaaaacctaacgtcttttccatggccttacacatctggtccctgtcagtgtcaacgaggtttgttggatgtggtgtcatggcaggcaaatgatttatayacacagacccaaagatctcagagctccttcagaggatgcatttcatctggtgtacttgccatcaac

SEQ ID NO: 252020 - DNA, 538 bp, Homo sapiens
tcctcttccaaatcccatgctgttccctctaaaccacactattttctactmtacgttgatcatatcatatttattgttgggcttggctaccagtcagagctaaatgtaatgctcaatgagagtaagatactacttttgatatatttgttttctctgacctctttacagtttttacagttgttataattatttgaacagtttcatctgatatgcctttaatcagtcattcaaacaccttccctgagctttaactatgtgctatgtatcaccttggactgtggggtacaaggatgaatagaaaataattcctttcctcaaagatttcggcctggtcagggggacagacccataaacttgtaattacattttgagatgtaaaggtgggatcccaaatatagccttggagataagaaaaggcttacccgagtcaaagtttgagcaggagttatctacaattggcagaggcactctagataggatgggcagcatgaggaaaccaaaggtacaaaggtgagaaacaaggtgcctggaacctgga

SEQ ID NO: 252021 - DNA, 708 bp, Homo sapiens
attatgttgactcataactgtctaggttcctaccattcaaggcctatacaatttacataaaaatcattgtcattagaaaagtttctgtcccactgttaagacagtgtttgtgcaatgtgaggttacttcctgcttccacaatatgactgtgctttactaaacaaacttctgagctaagatgtttacttgactgggaaatgactactaataagctgttaaaggatgtatcctcaagttactacttgtggcatttgtaacacgctccctgttgaacaaaggtgtcacagtagcacagtgaataaacaatccttttttctycctgtaagttatacgatattaaatgttaataattaatttgtctttgtggattaacatacaagagcttttcaaacaggtactggtgcaaccccacccttgtgagatggctaatcatttcacatacttcacacttacccagctatcagtatcactgacctcagctagcaaagtgtgaaacggcagatggtttgtagtgttcagtaatgtcctatgaaaatgtagcacagaaaactgcaaaaggttttgggagagaatggtggtttatatgaacttttcaagaaactcaagagaaacaaaatgcgcccactgtccacgtcaaaggatctggtgaggatcctgggataaaaaatgtcaagagattctaaagcttttcagtacacaatattttca

SEQ ID NO: 252022 - DNA, 571 bp, Homo sapiens
cagtggctcatgcctgtaatcccagcattttaggaggctgatgtgggaggattgcttgaggccaggagttcaacaccagcttgggcaacatagcaagaccatctcttaaaaaawttttttttttttttttaaagaaaaacatggaacagattctccctcagagactccagaaggaacactgctgacatcttgattttggacttttggtctccagaactgtgagagaatacatttctgtggttttttagccaccaagtttgtggtaatttgctacaacatccctaggaaatgaagaacacaccctttcatcgagataggatcccaggttacatgtggttcatagacctggctaactcaccggatcctctcacatgggaatgtgaaacaaagtcagctgagtggagctatcaggtgatgggttctggcagccctgttttagacatgcgagaaaagaaagatggctaaggagagagtgaataaaagcaaagagagaagcaagggtgagagtccatgtgatgactgacagttcagtacaagtgctcatgtggaacacaagagaccctgttgtatt

SEQ ID NO: 252023 - DNA, 404 bp, Homo sapiens
gcctaggaaaggacctccaagaaacttttaactgccacggtcagaatcgagactagacattgctgctgggggtgaggggccgctcctcttcaaatgaaccggcagacctttctgatcacctgctgggggccacatgccggagcagggtgtccaaaggtgagcaaatatatgccatctatgaagtgtttactgtgggttatgaaatcctagaaacttatgaggtaaataccagcaccatttacaaatgcagcctccaagaggttgaataacttgcccggggtcatgtggttgacaaacagtggwgttccaactccaacctgatccaaagtccgcattctttgatgtgtacaccaattgtacccaaccacttaagcaaaattcttgatgacgtcatgcccaggcta

SEQ ID NO: 252024 - DNA, 628 bp, Homo sapiens
cattcttctatgtgttcagcactgtcccagccatgtgttaggtggttggaatcaaagaagagcacatctctgacctcaaagagctcatattctagttcagtgatttttaacaaagggaagggagaaaaggatggagaggatagcaggaatatttttggaaactaccaatttcagagtgaactgctgttactgaggactctcatgtcatatttctgcagtaggtttgaacagaaatgggttaagaaccactggtccacttgcagagacagaagcctggayagtagtctcatatatcacatagtaagtatagttacaatagtgaaatgagcgcaaagagcatctaaaaagagaaatgagctaatgactgtgggaagtcaacaagccttgccattaggatgaaatctctcattctaatacttgcttgtcctccacagcctttcccacattctcctctcaccacaaaaaggactgcttgctggtaaaaaatgtgaacaaaggctgggcgcagtggctcacaacatgtaatcccaagactttgggaggctgaggtgggcggatcacttgaggtcaggagttcaagaccagcctgagcaacatggtgataccccatctctacaaaacacacaat

SEQ ID NO: 252025 - DNA, 598 bp, Homo sapiens
tctcctctcaccacaaaaaggactgcttgctggtaaaaaatgtgaacaaaggctgggcgcagtggctcacaacatgtaatcccaagactttgggaggctgaggtgggcggatcacttgaggtcaggagttcaagaccagcctgagcaacatggtgataccccatctctacaaaacacacaataaaatcagccgggtatggtggcatgtgcctgtagtctcagctatttgggaggctaagatgggaggctggcttgagcctgggaggttgaggctgcagtgaactgtgatctcatgactgcacttcagcctgggtgacagagccagaygctgtctcaaaaaagaaaaaaaaaaaatgcaaaaaggtgagatgcctcccaggggcttagaaataagtccagtagagagttcaaggtgatcctggttatctgtggtgggtagatgtgcagttgataagcttgagttcattcaggactccagccaaagaaacctgtgtataatctcaaagagttggatttggaaaaccttcattatcatttagttgcgggaatctactcaactaattgtatcctaaacagaagactttgaggaaagaaagga

SEQ ID NO: 252026 - DNA, 557 bp, Homo sapiens
attggacctcaatatataaactttttttttgaagagggaagcaattcracctatagcaaggttattgcctgtttttgttttcaatttttaaaaatttgagacagtctcactctgtcacccaggctggagtgtagtggtgcgatctcagcttactgcaacctctgcttccctggctcaagcaatcctcccacctcagcctcccaagtagctgggactacaggtgtatgccaccacacccagctaatttttgtattttttgtagaaactgggttttgccatgttgcccaggctggtctcaaactcctaatctcaagtgatcctcccaaagtgctgtgattacaggcatgatccaccacacctggccaattgcctagtttttaatcaaactgtttttcttacactggaaacttcctacctgcatttcccagttattcccaggaattgagctttaagctagagagaccaatcagaatcactgtactgattgtagctcacccgatgaaaaccactcagcctagaatcctgttaccatgccttagctacctgatcagactccc

SEQ ID NO: 252027 - DNA, 573 bp, Homo sapiens
gtgggaaaaaaaaatggatggatggatactgaataaattgtttatagtcagattttctctacagtcaaaattttccaccccattaaaaacttaaggaagcttttcctctgttgcttggcttccagttctgtgaagtggaaaaccatgatgaatatggcagtttattgcaccatattatgtaattagtccacctctaagaaaagagactttttgaaatgtggtatcatcttcatacatacaactggartgtagtgtgtgtgagttagagactatagcaggagaaaaaaccctggaatagagtctagccatgagcaaaaggttaacgggctcttcgacctcactgggcactaatctttagccttcctctatttttgaggatgccacaggaatatttagagcctccaagaagaatccacaattctttccaacaaagttctagttaaaggcacattttgatgaaatggattcatatatccagctcctgcctggtttctattaaatattccagtctttcctgtgaaaaatggggagtgatttcatgctttcattattcaaactgatctggtttcacag

SEQ ID NO: 252028 - DNA, 573 bp, Homo sapiens
gtgggaaaaaaaaatggatggatggatactgaataaattgtttatagtcagattttctctacagtcaaaattttccaccccattaaaaacttaaggaagcttttcctctgttgcttggcttccagttctgtgaagtggaaaaccatgatgaatatggcagtttattgcaccatattatgtaattagtccacctctaagaaaagagactttttgaaatgtggtatcatcttcatacatacaactggaatgtagtgtgtgtgagttagagactatagcaggagaaaaaaccctggaatagagtctagccatgagcaaaaggttaacgggctcttcgacctcactgggcactaatctttagccttcctytatttttgaggatgccacaggaatatttagagcctccaagaagaatccacaattctttccaacaaagttctagttaaaggcacattttgatgaaatggattcatatatccagctcctgcctggtttctattaaatattccagtctttcctgtgaaaaatggggagtgatttcatgctttcattattcaaactgatctggtttcacag

SEQ ID NO: 252029 - DNA, 466 bp, Homo sapiens
tcccagtgggtccctcccatgacacatggggattatgggagctacaattcaagacaaggcttgggtggggacacagccaaaccatattacgtaccctattgtgtacttcctgacaaatcatttgaagactctttgtgaaagaaaagcaaaaatcaaacatgattccttcaaaggtactgtaggtcagatggatgaatcacaggcaaatgtgtctgagaaaaggaaaggccaacgatgaaaggtgagagaaaaagattctaatgcaggtttcattgcttctcctgggtctattttaatggtcttcaaataagtttwgcacggtcagtttatcttcctgcttcagcccttcctggttatttctgctagatgaacagtttgccacactatgacaattccttgttcagaaaccttcaatgatctcctgtctgaattacatcctaacccacatgatcaggttacaaattcc

SEQ ID NO: 252030 - DNA, 588 bp, Homo sapiens
tcattccccacaaagtaaattaaagccaaataggaaaatgatcttgttccatatactaaaatgttttgtatttttctatatgtaaatagagttgtgtaaaatagacaaatttttcccccataggacaaagaagcattctaaaactcacatgaagaacccataggctatctttgcygaagataagctccctcttttggactatgatttaggttacaaaatctccaaattctatttcatgagaagaaatcagtagcaatggcttaaggcttaatagttttgaaaaagcaataacatgatgacgtttgaatgaattataaacatatggattaaatttttccttacggaaataatatgaaaataatgagggttcttttttctacatatctggattttactgaaactttaaaaaaaccaacccaagaactgaataaataaacccataagacactgagcaggaatgctcttatttgcaattatcatgtgttgatttgggattataatggagttaggaagatctgtgaaagggaaaacacatcctccctatcatagcttaggtccaacaccaagtattagaaacccagatataga

SEQ ID NO: 252031 - DNA, 550 bp, Homo sapiens
gtgtaaaatagacaaatttttcccccataggacaaagaagcattctaaaactcacatgaagaacccataggctatctttgctraagataagctccctcttttggactatgatttaggttacaaaatctccaaattctatttcatgagaagaaatcagtagcaatggcttaaggcttaatagttttgaaaaagcaataacatgatgacgtttgaatgaattataaacatatggattaaatttttccttacggaaataatatgaaaataatgagggttcttttttctacatatctggattttactgaaactttaaaaaaaccaacccaagaactgaataaataaacccataagacactgagcaggaatgctcttatttgcaattatcatgtgttgatttgggattataatggagttaggaagatctgtgaaagggaaaacacatcctccctatcatagcttaggtccaacaccaagtattagaaacccagatatagacattgttcactcccacggaattgggagcttagaattcatcttttgtcagtggtgg

SEQ ID NO: 252032 - DNA, 550 bp, Homo sapiens
gtgtaaaatagacaaatttttcccccataggacaaagaagcattctaaaactcacatgaagaacccataggctatctttgctgaagataagctccctcttttggactatgatttaggttacaaaatctccaaattctatttcatgagaagaaatcagtagcaatggcttaaggcttaatagttttgaaaaagcaataacatgatgacgtttgaatgaattataaacatatggattaaatttttccttacggaaataatatgaaaataatgagggttcttttttctacatatctggattttactgaaactttaaaaaaaccaacccaagaactgaataaataaacccataagacactgagcaggaatgytcttatttgcaattatcatgtgttgatttgggattataatggagttaggaagatctgtgaaagggaaaacacatcctccctatcatagcttaggtccaacaccaagtattagaaacccagatatagacattgttcactcccacggaattgggagcttagaattcatcttttgtcagtggtgg

SEQ ID NO: 252033 - DNA, 494 bp, Homo sapiens
tttcaaggtgaattagaatgtttgaggcagaggcattttatcgggttgagggggaattaagtctgactcagstgtatcataaagtttatgttcactataaaatactagttttttatactgtgtgctatacatctacctccctattttgagttccctagaacacaaaggaagatagaaatataagtgtgtgttgtcccagctgctggaacataggccttttgcagaagtttaaatatctgactcataaagagggaattagatccactgataagttaatgcccaagtcccaccctcagttccagttggcctgttatgacccacactgccgctatgtgaacttgcagaagttatataacatcatctttaagcttcagcctccttactgcaaacagaaatgataatacctacttcatagactcataagagaatcaaatataaagtgccaatacagggctggcctatgttaagtgctcaataaatactggctagtgttc

SEQ ID NO: 252034 - DNA, 629 bp, Homo sapiens
gcttcacgtagtcctcttgaaatacacatgtccatgcatggtttacacacaagtctatttgcttgtctgcccacacactggactataatctccttgaatgtaggagactcatttctcaatgtctgggatatagatggcattcatgcagatggtaatgagggcagttgtagctatgcgtattttcttccttgcttgttatgtgtatacactggtatgtattacctattttcttatctctctatcttctcttttaatgcaagtatttttgaagttaaatgtacaattttgtctttaggcagtgaattattcagatgggactgcaactgaagtctaggggtggttaatgtagcccaaagacagtaaccgttttccagaaatgaatgtgatgcctatggggtctttgcagcttcccagtttggggagagggtgagaacatctttctctgaatgaaagacagttgcacctttttagatggaaacacttgtgtggctgtcrgaggaaaagttgaaaggtgtggaagggtgtatgtggatgctgagtagctggaggggtgatctgtgccatttaagttgtctcagcttcagaaccacctctatctccggttagtgaagccagagctagactgtgca

SEQ ID NO: 252035 - DNA, 576 bp, Homo sapiens
ttccgaaaggcctatgaaacagaatgtgtctctctttttttttttttcttgagatagagtttcactcttgttgcccaggctggagtgcagtggcgcaatctcggcttactgcaacctctgcctcccaggttcaagccattctccttcctcagcctcccgagtagctgggattacagccacccaccaccatgcctggctaaktttttgtatttttagtagagacagggtttcaccatgttggccaggctggtctcgagctcctgacctccctcaggtcctgcctcggcctcccagagtgctgggattataggtgtgagccaccgcatccggctgaatgtgtctctattttatgaataatgaaatggacacagcaacagaaaatcaatccgccataagccattgggctcaaagtgagcatagtctgtgttttctcttctcttatatatactgtctctcttgatcttttcttgaatcccactgattttaacctggattttataagctactttcaaaaagtcatcatcccactgacattaacacaccattaatttttagcaagaagccacatataataga

SEQ ID NO: 252036 - DNA, 610 bp, Homo sapiens
  misc_feature (1)...(610): n = A,T,C or G
ctaacctgcttaaaaaaaaaactatgaattatattgttttctagtttgcagagtattggctagaaattgtattgagtatttttccttttcactaaaatttatcatttacatacctgcctagccctcagtgtcacacatatcacattaatggtccaggtttgactttaggcaaaaggttggttaaaaaatctgacttaacactgggagactttcccagagtaagcagatgggatragggttcttctttctccaggcctgttgaatgcacaccagtctttaagttaactaatcatgggggtaccactctggtttatagttctagcatgaggtgaactaataggaatggttctttatcaaatgacacttagctgagtgtcagctgagacctcttggccctttatgaaatactcatatttatattgaactaaaaaaaggtttctggttagtctacccgggaatgtcaacatcaatgagtcataataaaggaagtttccttggttcataaaaaacataatacttaagcaagatgtttcattagcttttattttctttcagagcagtctcctctgttctctgaaccactaatgacctgctgcaaaactcnnnnnnn

SEQ ID NO: 252037 - DNA, 610 bp, Homo sapiens
  misc_feature (1)...(610): n = A,T,C or G
ctaacctgcttaaaaaaaaaactatgaattatattgttttctagtttgcagagtattggctagaaattgtattgagtatttttccttttcactaaaatttatcatttacatacctgcctagccctcagtgtcacacatatcacattaatggtccaggtttgactttaggcaaaaggttggttaaaaaatctgacttaacactgggagactttcccagagtaagcagatgggataagggttcttctttctccaggcctgttgaatgcacaccagtctttaagttaactaatcatgggggtaccactctggtttatagttctagcatgaggygaactaataggaatggttctttatcaaatgacacttagctgagtgtcagctgagacctcttggccctttatgaaatactcatatttatattgaactaaaaaaaggtttctggttagtctacccgggaatgtcaacatcaatgagtcataataaaggaagtttccttggttcataaaaaacataatacttaagcaagatgtttcattagcttttattttctttcagagcagtctcctctgttctctgaaccactaatgacctgctgcaaaactcnnnnnnn

SEQ ID NO: 252038 - DNA, 432 bp, Homo sapiens
atctcatcaaagccattccaagaggcttatcagacatctcaaaggcattttttgtagatgcctgctttccactcccattacttctgtttgcattagttatatcttacctccttctcccccatgcccctgctttgcctgactaaggccagaaattttttcatgaagtcactttatagagcaatagcaacatttactattcgtgaagtcgcccctccataatttttaagtctttccatgtgtctggaagcttgtttctgctcttctcggtttacagagcggctctcttccttccaaacaaaaactaaaaagaarggggaaaaggtggggggtggttggggtggagataacacccagattccttaagtgtttttaatccagttgaatttccctttggactcagctccctgctgaaactgtctgcggaccagaatt

SEQ ID NO: 252039 - DNA, 432 bp, Homo sapiens
atctcatcaaagccattccaagaggcttatcagacatctcaaaggcattttttgtagatgcctgctttccactcccattacttctgtttgcattagttatatcttacctccttctcccccatgcccctgctttgcctgactaaggccagaaattttttcatgaagtcactttatagagcaatagcaacatttactattcgtgaagtcgcccctccataatttttaagtctttccatgtgtctggaagcttgtttctgctcttctcggtttacagagcggctctcttccttccaaacaaaaactaaaaagaaaggggaaaaggtggggggtggttggggtggagataacacccagattccttaagtgtttttaatccakttgaatttccctttggactcagctccctgctgaaactgtctgcggaccagaatt

SEQ ID NO: 252040 - DNA, 594 bp, Homo sapiens
tgttgttatcagaatgaaataagttagttgtgtcaagggtcgacagtagtagttagcacatagcacggtgctgatgataatgcaaaataacattaatttttccaaacatcttaaatgaataatttaaaaaatattaagtaaattttaaaataagcttaccttaaaactcagacattttacttctaaaacagcctgcagtaacccccacttgtttgctaagaaatatgtctaagaatgtttagaatagccaaaagtggaaataacttaagtgtctatcaataggaaaacagacaaataagttatggtgcatgcatccrttgggaatactctaacaataacaacaatggtgtggctctatggcccagagctgcttgtatcaacatagatggattaaataagcaaagcaagttatagaagacagaaagcatgatgccctttatacatggtttaaatatgaaaaataaaattatgctgagaggtacaaatattcatataaataaatgtatataaaaatagtggcaataagtcacaaattcaaggtggtggttacttctgagaggaagtagggagataaagaaaagggcactccaatca

SEQ ID NO: 252041 - DNA, 574 bp, Homo sapiens
aatgaactactttgttctttctaatggttgtgtagtaagccattgcatggatttaatagttttctttctaacccatcctctatggatatagtcatttagactgtttccagtttctttctttttttcatataaacagtgctgcagtggacattcttggataagtgccttcgtgaacacattcaaatatgtgcatatgatacaaatatgataaatttccagaagtggaagtatcaagttcaagaatatatgcattttaaaayttgcatatatattttgcattcttatcttcatatgagcctgcatctttgcactctcattggctgacactgtgtgggataatacttttgatttttataattttctaaactatgagtgaaatataacttcatattgtttggttatttctattttatttttatacaaagtagccaatttttctaatagattgctcttatttatatgtaggagcttattttaaaaatgtatttcttagtcctattgagttgatatgaggaggatagtgcaagtgtcagttattaaatgtagaatatttttgttctcaaagtgacttttg

SEQ ID NO: 252042 - DNA, 487 bp, Homo sapiens
ccaaaacaatttttcaagttattttcctaaacaaaggtagcttgtatcattaagagaaactctggtgtcaagtaaatgattagaataatttatctttttttcccccatcatgttacacttaattttccttttwgtccaactagaaagctcttatttcttcttacctggtgagcatccagtgcactctatggatgttgtaaatatgtccttggttttatctgatgcttggtttgagatctcttgttggctttttcctgctcttttccagttctcaaaactgacatttctttttcagaaataaagttgccttatgatctttgggaaggcttgtatttatttcttctctatgcttactgagctttactttttttttttctttttttgcacgatcagaaaagtagaggaaataaatcctcttctctactttgctaaagtcatcttccaaccctgaggtgcacccccccttttttgacaataaggggaaagc

SEQ ID NO: 252043 - DNA, 590 bp, Homo sapiens
atatttctaccaaaaagacttgtaagtttatcacagcacttttcataatagtaaagacatggaatcaacttatatgtccataaaccatgcattggctaaagaaagtgtggtacatagacatcatggaatacaatgcagccataaaaagaacagaatcatgttctttgcaacaatgtggatgcagctagaggccattatcctgagctaattaacacaggaatggaamaccaaatactgcatgttctcacttataagtggaagctaaacattggaaacacatagacgtaaagatggcaacaatagacactgggaattactagaaggggatggatgggagtggggcaagggttgaaaaactatctattgggtactatgttcactacttgggtgatgggattgatagaagcccaaacatcaacatcacacaatatacccaacatgtgcatgtacccctgaatctaaaattaaaacaatttaaataaagaaaaaaagaaaaatatatattttagtttgtaagttcttctgtgtttttctgcttagccctgtggtgaatgtgtggtaaaatgaatgtttttaagatgtgatgcttc

SEQ ID NO: 252044 - DNA, 590 bp, Homo sapiens
atatttctaccaaaaagacttgtaagtttatcacagcacttttcataatagtaaagacatggaatcaacttatatgtccataaaccatgcattggctaaagaaagtgtggtacatagacatcatggaatacaatgcagccataaaaagaacagaatcatgttctttgcaacaatgtggatgcagctagaggccattatcctgagctaattaacacaggaatggaacaccaaatactgcatgttctcacttataagtggaagctaaacattggaaacacatagacgtaaagatggcaacaatagacactgggaattactagaaggggatggatgggagtggggcaagkgttgaaaaactatctattgggtactatgttcactacttgggtgatgggattgatagaagcccaaacatcaacatcacacaatatacccaacatgtgcatgtacccctgaatctaaaattaaaacaatttaaataaagaaaaaaagaaaaatatatattttagtttgtaagttcttctgtgtttttctgcttagccctgtggtgaatgtgtggtaaaatgaatgtttttaagatgtgatgcttc

SEQ ID NO: 252045 - DNA, 640 bp, Homo sapiens
ttatacagcattacaagcaaggaattccaaaatttcaacaaagacatatctttatcaaagcagtctcattagcttgtaaatttgacagggaaaaaatcatagggaaaacaaacttgaattgttttgtatcgaggaaggtcaaggtaaattttcaataaggatgaaaacaatctggaatggagtggcttgcccttgttttagcaaaccttaacatggagggtcaggattgttcctaggagtctggattgtcaaatgaagtggtttcccagaatgagctcttaaaaatacagatttctgctctcgccaccacatcaccaccaccatcaatttcctcctccacccacctccaccccaaaaaactctgatttaatccctctgtgcttaggaatctgtgttttcaacagcattcatcagccatgtttggaaacctctggtcaagggaaccaatcaggataattcatgccggtagttttccaccctgactgcatattgaatcacttgaggagcttttaacaacaycagtgttggaggttcctctcccagagactctcatttaacttaccagtagtgtgaatttcctaaaagctctccagtcaattctaatgtggagccaggttgaagaaccactgactgaagtcaa

SEQ ID NO: 252046 - DNA, 467 bp, Homo sapiens
atattcctaaaatatcaagttatataattgtatacaactmtcctttgatattaaagcagtttcatttcacatcaacaattactttagaaataatatgaattatgtccatattagaaagctgaaataatacctagcattatctttctatgactaaaaattcagcaatgcatactggatagcagatcgttatcaaaatgacttatgattcttacacctatccattatggctggttactgttattgctattttatgcattaaaaatggaaaacaaaacaagtgacagaaatgatatgaatttgaggtaggggctatgtttctcaggtccattttgtttagtacttccaataatatacaaggtgatatgaagcttgtcccatggatttttcaatttcttgggaaaaattcagagaaagggtcctttgaaataaaaataaaattaaagagaaaaaacccacaaagtaatata

SEQ ID NO: 252047 - DNA, 594 bp, Homo sapiens
cattttcttaatacaaaacttactatgtatttcagatgcaaaaatatatctttcccattcaaatcatcttttagaattaggtactgcattaaatagatgagaaaaagaaggggatgaaataaggacagctaattccatctatgtagacagtttgaccttacatatgtaaactcaatcttaatcctgacaacaacctcattagaaagatactattagtaactccattttaagaacaaggaaacaggcacatgggagttaagtaacttgaccatggtcattagcaagtgactgatggccctgggatttgagtgtggtcctaaagtctgtagtcttcactgaatttctaagccaaaagtagtgggttagagtaaaagagtttaaccatttcccaaatggtcattctttagagtcatggttctaaactgggggcaatttgtccccagggatatctaatggcaatgtctgatgatattttcaattgtcgtgacttgagggggtgggaggaagaggagagtgcwactgacatccggtaggtagtggccaaggatggtgctaaacatcctacaatgcacaggacaccctcccacaaaaaat

SEQ ID NO: 252048 - DNA, 530 bp, Homo sapiens
ttaaaattataaatccatacagagggtaatttgtgacacattgatttatgtccttagagacacttttctgtgcatttgtatgcatttgagtatgcattgttcttaacagagatggggttatagcctcattaagctagttttatatctcttttagtggctgcagcatctttgtaatggtgcagcatctttgtaatggatatgctattacttaaccaatgcctatttggaacattttagttacctctaacttttcaaaacccagaaatattttaarcaaagtctactgagtttacaaagttaacctaatcagttcagcacctaaattaatctgaaataaggagacatttatttatggataccaaagattctttgcttatgtttgcatactaaatgaagatggttcaaatgagcatttggaggtacaggcatttaacttactgagatacatattctttagcagacaaaatttatttgtaatgccatgaacaagaatcacttacattattaccagttttctataatttatgcct

SEQ ID NO: 252049 - DNA, 530 bp, Homo sapiens
ttaaaattataaatccatacagagggtaatttgtgacacattgatttatgtccttagagacacttttctgtgcatttgtatgcatttgagtatgcattgttcttaacagagatggggttatagcctcattaagctagttttatatctcttttagtggctgcagcatctttgtaatggtgcagcatctttgtaatggatatgctattacttaaccaatgcctatttggaacattttagttacctctaacttttcaaaacccagaaatattttaaacaaagtctactgagtttacraagttaacctaatcagttcagcacctaaattaatctgaaataaggagacatttatttatggataccaaagattctttgcttatgtttgcatactaaatgaagatggttcaaatgagcatttggaggtacaggcatttaacttactgagatacatattctttagcagacaaaatttatttgtaatgccatgaacaagaatcacttacattattaccagttttctataatttatgcct

SEQ ID NO: 252050 - DNA, 589 bp, Homo sapiens
ggattttaatcatataaaagtgatggttattctaaaagagtattgttaaaaacaaagtgccctttgtgtcactgtttacttcctcagtagttgataaaagaataaattcccaaggccttttatgatatctaaggtttatcttctccttggattcttgtttatgtactgtttcattgtattgaagcaccagaatagcatttgacactatcgtaaatatgcagtaagtggttgccactcttatatcataccatgctctaagccccagaaaatgaacaaaagaagcaatataatatccatggggaaaatttagggtaaagcatataaacatatagatacacaaaaamattggagaagattaaaagtaaacactcaagttaaaggaaaagttgttgaaattgaacagtttgctctatgtatatctaaatatatattgccagagtgtgtatagcttgaatctggatgaagaactttctctactttctctcatggttctgaagtttctgaaaatggaatcaaatgcacttttaagtctgacaaaggaaatatatagattcattttttttccctaaaattctttttggagcaaagt

SEQ ID NO: 252051 - DNA, 466 bp, Homo sapiens
gagttcaggcgttctgcagcatcacaggggggatgtggttaaccagaatttattgtacattttcaaaaagctagaagagaggatttttaatgttcacaacacaaagaaatgatccaagtttgaggtgatggatgtgctaattcccctgaattgattattatacatggtatacacatatggaaatactactctgcatcccataaatatgtacaattattacgtgtcaactaaaaattaaagaaaaaagtggaaacaactcaaatgtctatcaactgatgaaaggatagataaaatgtgttatatccacactattattgggtaatatgataaaggactgatgcatgctactatatggatgaaatttgaaaacattatcctaagcaaaagacagacccaaaagrccacagctgtatgattccatctatataaaaagtccacaataggcaaatatatagaaacagaaagt

SEQ ID NO: 252052 - DNA, 560 bp, Homo sapiens
ggattttcagtgaaagggctgagcagaaaagatgcttgttgacatcactagaaaaagacctacccttattctctttcaacataagaagaagaagagggccaggcatggtggctcacatctgtaatcccagcaatttgggaggccaagataggtggatcacctgaggtcaggagttcgagatcagcctgggcaacatggtgaaaccccgtctgctaaaaatacagaattagccaggtgtggtggtgggcacctgtaatctgagctactagggaggctgaggcaagagaattgcatgaacccaggaggcagaggttgcagtgagctgagatcatgccactgcattccagcctgagcaacagagcaagactctgtctcaaaaagaagaaggagaaggagaaagaaggaagaaggaagragagtcaacatttactcagtacttactgtgtgccagacagtgagttaagtacttcatatacattaccaaacattctaatatagcatttgcactattttttcccttttgacccattttggtataacagaaaaaacgtttcatatga

SEQ ID NO: 252053 - DNA, 366 bp, Homo sapiens
cagatttcaatcatgtatatactgtatgtatgtttgtggaaggtgacataatagacaattgcagatagtgataagtgtgtaagacaaggataccacgagcgtaatagacagtggggatggaggaacctttagaaggttggttaagttgaatgataaggagccattcttttgtctttacctgaatgacttatcattcagccctttttgagttttgggttgcttgcagagtttaaccttgcctgtaattgaaacttaattttgtaatagcataacttcatgtaagaaaagcaaagsaatacattacagaattattttactgaagaacttgtttcagagaaagaggctgtttcatatttattagcacat

SEQ ID NO: 252054 - DNA, 551 bp, Homo sapiens
tatgcttgtattcctaagcaggcattagcaagggggatggcattgcccttggaggagtatgacccaccctttgatgtgtgtgtgcaacagaggtgggtgggtgggagacatcttttttttaaaatttgttttattttttaaatttttctttaagttattggggtacagatggtatttggttgcatgagtaaattctttagtggtgatttgtgagattttggtgcacccatcacctgagcagtatacattgcatcatatttgtagtcttttatccctcacccctctcccactcttccccctcaagtccccatagtccactgtatcattcttatgcctttgcgtcctcatagcttagctcccacatatcagtgattagaacatactgtgttggttttccattcctgagttacttcacttagaataatagtctccactcttatccaagtcactgcaaatgctgttaattcattcctttttatggctgtgtagtaktccattttgtgtgtgtgtgtgtgtgtgtgtgtgtgtgtgtgtgtgtgtgtgtgtgtgta

SEQ ID NO: 252055 - DNA, 551 bp, Homo sapiens
tatgcttgtattcctaagcaggcattagcaagggggatggcattgcccttggaggagtatgacccaccctttgatgtgtgtgtgcaacagaggtgggtgggtgggagacatcttttttttaaaatttgttttattttttaaatttttctttaagttattggggtacagatggtatttggttgcatgagtaaattctttagtggtgatttgtgagattttggtgcacccatcacctgagcagtatacattgcatcatatttgtagtcttttatccctcacccctctcccactcttccccctcaagtccccatagtccactgtatcattcttatgcctttgcgtcctcatagcttagctcccacatatcagtgattagaacatactgtgttggttttccattcctgagttacttcacttagaataatagtctccactcttatccaagtcactgcaaatgctgttaattcattcctttttatggctgtgtagtagtccattttgtgtgtgtgtgtgtgtgtgtgtgtgtgtgtgtgtgtgtgtgtgtgtgtrta

SEQ ID NO: 252056 - DNA, 533 bp, Homo sapiens
aatctaaactgaagtaccattcctyctgttgctaagagaaaaatgttcttaaaaggcttatctaatagatttggatttacagactactttctaagcagctcacctcacagtcatcactgacttccataacttaatataaataaaatcagtttcttcatagattatggctgtaagatttattggtgactaaagcatgtaatctccataaattagccagttctgggttagattcttcaaggccaaagagctcacgtgacatttttcatttgggtacagaatggccatttgggcttataggatcattgagtctacatttctagtagttgacactgatccattcaaagtctataaaatataggagatgcctcacacaccttcaaagttttaaaataaataattcagacacctctataattttttgcctgcaggctctctgaaactaagtgaaggcaactttggtcagtacttaaatgggaaacagtcaaataaagaatgaagcaaaggatgactaacgtatcagtaatttcttttct

SEQ ID NO: 252057 - DNA, 507 bp, Homo sapiens
tatggtctgagagtcttcttccaggacactttcattttctcaaacagaaacccctgtacccattaaacagtaactcccattttcctctccatctcatcccctggtaacatccattttctgtctctatgaatttgcctcttctcggtatcttattgctatagtttgtctgtttgtgtccctccaaagttcatgttgaaatttaatcctcartgcaatagtattaagaattggaacctttgtttagatcaaaaaagctcttctctcataaaggggattagtggccttataaaagggcttgagggaagaatttcatctcttttttgccccttttctccgtgtgggggtgccgtaagaagttgccttctttgaaacagagaccaagccctcaccagacaccagatttcctagtcccttcatctttgacttttcagcctctgtaagggtgaggaataaatttacattatctatcaataatccagcctaaagtatttcgttatagcagaagga

SEQ ID NO: 252058 - DNA, 507 bp, Homo sapiens
tatggtctgagagtcttcttccaggacactttcattttctcaaacagaaacccctgtacccattaaacagtaactcccattttcctctccatctcatcccctggtaacatccattttctgtctctatgaatttgcctcttctcggtatcttattgctatagtttgtctgtttgtgtccctccaaagttcatgttgaaatttaatcctcagtgcaatagtattaagaattggaacctttgtttagatcaaaaaagctcttctctcataaaggggattagtggccttataaaagggcttgagggaagaatttcatctcttttttgccccttttctccgtgtgggggtgccgtaagaagttgccttctttgaaacagagaccaagccctcaccagacaccagatttcctagtcccttcatctttgacttttcagcctctgtaagrgtgaggaataaatttacattatctatcaataatccagcctaaagtatttcgttatagcagaagga

SEQ ID NO: 252059 - DNA, 558 bp, Homo sapiens
  misc_feature (1)...(558): n = A,T,C or G
nnnnnnnnnnnnncataatggtgctgggaaaattgaaggtggattcttatctgtcacaatttacaaaattcctcctaaaactgttccaaaacattgaggagaagaaattctctctaactcattctttgaagccagtattaccctgatgtcaaaacctggcaaaggcacaacaaaaaaagaaaactgtaaaccagtattccttatgaacatagatgcaaaattcctcagcaaatactagcaaccatatccaacagcacatcaaaaagataatacactgtgatcaagttgagtgctacacccagaatgcaargatggttcaacatatgcagatcaataaatgttatgcaaatcaataaatgtgatacatcacataaacagaattaaggacataattatatgagcatctcaataaacacaggaaaagcatttgagtggcctagtaatcaactttctgatttctttatctggcaattcagagatcttcttcatttggattcattgctggagaaccagtgttatcttctggggttgttatagaatcttgttttgtcatattac

SEQ ID NO: 252060 - DNA, 558 bp, Homo sapiens
  misc_feature (1)...(558): n = A,T,C or G
nnnnnnnnnnnnncataatggtgctgggaaaattgaaggtggattcttatctgtcacaatttacaaaattcctcctaaaactgttccaaaacattgaggagaagaaattctctctaactcattctttgaagccagtattaccctgatgtcaaaacctggcaaaggcacaacaaaaaaagaaaactgtaaaccagtattccttatgaacatagatgcaaaattcctcagcaaatactagcaaccatatccaacagcacatcaaaaagataatacactgtgatcaagttgagtgctacacccagaatgcaaggatggttcaacatatgcagatcaataaatgttatgcaaatcaataaatgtkatacatcacataaacagaattaaggacataattatatgagcatctcaataaacacaggaaaagcatttgagtggcctagtaatcaactttctgatttctttatctggcaattcagagatcttcttcatttggattcattgctggagaaccagtgttatcttctggggttgttatagaatcttgttttgtcatattac

SEQ ID NO: 252061 - DNA, 586 bp, Homo sapiens
caagaataggttgatttttgtaaaaaatagtcaaatacaaggaggccgatgagtaggtggataggaacatatcttctctaaaatattgactgtgtattaaatataagattatttgtatccttcattctttctttgtattatattgtggttttcctctgaagagagtaaatggctctactttctaatcccttaactcctccagaattactttataatgaagcacataaattcagtagagctgtaaktgaaaaaaaaaaaaaaacatgttattttgaaaccaatgttacagatgcctatccaaaatggaaagtagatggcatgtcttcttttaatatctcaagcatttcctttggcaatttgtaattcatgatattagaattgattataatagagaccaagctttaatgtttcttctggtggagtggaggggggcggtgtgggggcggttattgccaccatccacagtatcaggacatgaagcattacaaatgttgattccccccctccctatcccctgaaaaacatttttatctggcaatagaaactacaggggtcattattcatgactgtcaccatcaggggcagt

SEQ ID NO: 252062 - DNA, 605 bp, Homo sapiens
ggaaaatttttgttaaataatacaaaaatttatgataactgctatgtgagcgacacatcctatagcctgtgcaatacataactggcataaccatgtgtggcaactatgcctcccaatgccctaagcctttaacttcctgtcatgggctgaattgtgtccctacaaatttatatttcaaaatcccaaccrtcagtacctcagaatgtaaccatgctttgagataacatttttaaaagaggtgatgaagttaaaatgcggccattagagtgggaccctaaaacaatatgattggtgcccttttaagaaaagggagagacactaggggagcgtgttcacagaaggatgaccatgtgtcatgtgaagtgacagcagggactgccatctgcaagccaaggagaggcctcccaggaagtcaacccagctggcatcttgatcttggatttccagcatatggaactgtgaggaaataaacttccattgtttaagccaccgagtctttggtattttgttatggcagccttagtaaactagtacacaccgctaacagtttcaactgattgggttaaagcatgggtgtggatatgccatgatgggcatttacaaga

SEQ ID NO: 252063 - DNA, 655 bp, Homo sapiens
gccattgagatttggtggttggttgttattgcaccatagtcaattctaaatgtataacatagttcaggaatgagatctgaggttgatttttactagcttttttctagtagaaaagatttataaatatttgataatcactttaaattgcctttcaaattacttttttaaagaagaaatttctacaatgtgtatccgaatttaatgaaggagaatagtttgtgtgttcctgatttttcttgatagcattraagaatatgtggacacagaggaaaaagctctaggacttctgtggttttaattcacaaaatcatcttttattttttcttaaattagcttcagctactagcacttaagatatttctcagctttcatttttgtcatagaaattagcatttttattaccacaaattattcttgtttgctaattccaaatatgtccaaaagcaagaacagcctcctgagctgttagactttggaagagaatagtaaatcaactggtggataggaccatatatcatattaaacacgggaattcaccacaaaatcattacactaaaaagcgacaattttgattgattaaaatggtatgggctggagagtgttaaatcactgtgagtaatatgacattataattttacatatcatatttctgcca

SEQ ID NO: 252064 - DNA, 655 bp, Homo sapiens
gccattgagatttggtggttggttgttattgcaccatagtcaattctaaatgtataacatagttcaggaatgagatctgaggttgatttttactagcttttttctagtagaaaagatttataaatatttgataatcactttaaattgcctttcaaattacttttttaaagaagaaatttctacaatgtgtatccgaatttaatgaaggagaatagtttgtgtgttcctgatttttcttgatagcattgaagaatatgtggacacagaggaaaaagctctaggacttctgtggttttaattcacaaaatcatcttttattttttcttaaattagcttcagctactagcacttaagatatttctcagctttcatttttgtcatagaaattagcatttttattaccacaaattattcttgtttgctaattccaaatatgtccaaaagcaagaacagcctcctgagctgttagactttggaaragaatagtaaatcaactggtggataggaccatatatcatattaaacacgggaattcaccacaaaatcattacactaaaaagcgacaattttgattgattaaaatggtatgggctggagagtgttaaatcactgtgagtaatatgacattataattttacatatcatatttctgcca

SEQ ID NO: 252065 - DNA, 436 bp, Homo sapiens
cagcaaatgggtgttaaacagtataaaagctaatcacctaaggacacacagagtggtagaagcaatcaggaaaggtcttcccacacttacatagagatggaagatcctcattgaaataacatcatttttaatggatcaatttctacttttatactaaataggaacacattcgctagtrtaaccgtttatcaccactagatgtcactgtaagactaaagttaaattgctgcacctccttcccagccctctcttttcagatttttttttttttttcagtgaaaaagtggattaagaagaagagatgaagagatacatgatgatactggtggttggggggagttaaaaaatggagtgcttttatcctaaacagatctcttattctactgtgtttccttttgcagaacattatatcacttgtagaaaaataaggtaactt

SEQ ID NO: 252066 - DNA, 614 bp, Homo sapiens
tttaatttagggaaaggaacaaataaaggaagggaggaaacagaaaaaatatagtcagagagtcctaaactacaaaagcactctcattcagatggcagcaataaagtaatgttctgggagctaataaaacacttctggccttggtcatttttaatctgccataaatctctaaagatcaactagaaaggtttttycccttcaaattcctatagacttagatatcacagtttaccaaatcttggaagtgtgaggtctgtgaaggccccaaaggtgtaggcaaggccaaaggaaggaaagtcaggtcttggattctaattgccacatggtagttccacagtttttaattggctgatcgctagatggctgtcggtatcttcatctgtaaaaatggaagtggcaaatgcattctatgggtgtgaagaggcgatacaatttgttgcagcataaacaagaattatgtaaataatgcatttgaataggtgcacatccagacaatgaaaggcagctctggcgagtcctgtaaaaatgtcctgattgcttttccaactgtgagaacttttagcatctaaagttcaggaggataatgaactagactgctcacagctgggatgtgt

SEQ ID NO: 252067 - DNA, 564 bp, Homo sapiens
acctatgaagaaattactagaactaaaaatactagatgtatagacatagataaatatacaattgaattcctatataccagtgacagaaaataaataaaaaggattgctacaatagtgacaaatattattttatttgatttgatttttttcatagatagcctctctcttggttgcccaggctggagtgcagtggtgcaatcattgctcaatgaagccctaaactcgcrggctcaaaagatcctcctggctcagcctcgctgagcaggtgggactacaggcatgcgccatcacacccagctaattttttatttttattttgtagagatgaggttctcaatatgttgcccaagctggtctcaaatccctgacctcaaatccctgactctcctgctttggcttcccaaagtgcttggattatagacatgagccaccgccctgggcccccaaaatttattatatacctaggaataaatacatctaataaaacatgcaagagcttattaagaataatgttaagctttaaaaaatgtaaacaaatacctatgtaaaggaagagctatatca

SEQ ID NO: 252068 - DNA, 576 bp, Homo sapiens
gggacatgttcagaggggtgggaagaaaagcaggaagtaacaccactaccaaaatcacctatcatttattggcactttctgtgttaatcttttcatatgcatttttctcctagttatcacagcaaccctgtgagataggaattatgatctctcttaaacagacataagtcagaaacagcaagtaatttgcctaatccacagaattgaggattgtcctgttggggttctatggatgaaactattggctccacttcacaactccctgtattcacaccttttgccatgtgactttgcrgtccctcttaccggaggcatggtgtacttcctcaccccttgactgactttgagcttggtcatttgagttttatagacaaaaggaatgtgggcagagataacaacgtacctgtttcaaactaggacttaagaggtatgccaggcttccacttgctctcttgtgtttctggcatcacaccaagcttgctgcgtcctcagcctggttcctagaatgattatgcagggagtttacctgagttttatctgcagctagctggatctgcagcttgaggtacactcacc

SEQ ID NO: 252069 - DNA, 587 bp, Homo sapiens
ataaagtatctaaacatttcgactcttattaggccactaacgtaaatccatctcaggatcaaatagtctcccactaagtcatgtcttggctttattttcaaagacttttgctttgctagtcctacattcatgtcttagagacaatcttaaggaattaggtaattttatttcctgtgtcattaagtgcttatttaaaatacttgcagaccttgctggctacctctggaaagcttagatttccccccaaaaaaatatgacataaaaccacacagttttatggatcctgttccaataatcttttagcttttttgcttttaatactttccattggtacgatttagttaattctattaggctacttttgagacctgtttgttcagggtgactctcacaaaattaaagccactaaattgcacaactacagagggtgccatgcacttggaagactccagatccccaagctatggagtcaatggatttccttatggttttatacaactctccacaaattgcttagaaaccctccttccccaaagtttcattggaatgtgktccttaaactatcaacctaaatctactagaaaatc

SEQ ID NO: 252070 - DNA, 558 bp, Homo sapiens
  misc_feature (1)...(558): n = A,T,C or G
taggacttttcgaaagatgtgtcataatgggtccacctttgtgaacagattaatggtgttataaaaagggcttgccaagagtgagttcaytctgtcatgcccttctaccatgtgaggacacaggattcccatgctccannnnnnnnnnnnnnnnnnnnnnnnnnnnnnnnnnnnnnnnnnnnnnnnnnnnnnnnnnnnnnnnnnnnnnnnnnnnnnnnnnnnnnnnnnnnnnnnnnnngtgagaaataaatttctgtttttaaataaattacccaatatgtggtattctctaatacacacaaaatatttgtatggcataccttggagatattgcaggttcagttacagaccactgcaaaaaagtaaatattacaatgaaggaagtcacacaatttttttgttttcctaatacatataaaattatgtttacactattctgtagtctactaagtagtgtacaatagcattacctctaaaaacatgtacatatcttacttctaaaatattttattgttaaaaatgccaatggtcattttagccttcagcaaatcataatcg

SEQ ID NO: 252071 - DNA, 558 bp, Homo sapiens
  misc_feature (1)...(558): n = A,T,C or G
taggacttttcgaaagatgtgtcataatgggtccacctttgtgaacagattaatggtgttataaaaagggcttgccaagagtgagttcattctgtcatgcccttctaccatgtgaggacacaggattccyatgctccannnnnnnnnnnnnnnnnnnnnnnnnnnnnnnnnnnnnnnnnnnnnnnnnnnnnnnnnnnnnnnnnnnnnnnnnnnnnnnnnnnnnnnnnnnnnnnnnnnngtgagaaataaatttctgtttttaaataaattacccaatatgtggtattctctaatacacacaaaatatttgtatggcataccttggagatattgcaggttcagttacagaccactgcaaaaaagtaaatattacaatgaaggaagtcacacaatttttttgttttcctaatacatataaaattatgtttacactattctgtagtctactaagtagtgtacaatagcattacctctaaaaacatgtacatatcttacttctaaaatattttattgttaaaaatgccaatggtcattttagccttcagcaaatcataatcg

SEQ ID NO: 252072 - DNA, 513 bp, Homo sapiens
  misc_feature (1)...(513): n = A,T,C or G
nnnnnnnnnnnngtgagaaataaatttctgtttttaaataaattacccaatatgtggtattctctaatacacacaaaatatttgtatggcataccttggagatattgcaggttcagttacagaccactgcaaaaaagtaaatattacaatgaaggaagtcacacaatttttttgttttcctaatacatataaaattatgtttacactattctgtagtctaytaagtagtgtacaatagcattacctctaaaaacatgtacatatcttacttctaaaatattttattgttaaaaatgccaatggtcattttagccttcagcaaatcataatcgatttgctggtacaggatttcgttttatgttgatggctgctgactgatcagattggtggttgctgaaggctggggtggttgtggtaatttcttaaaataaggcaacagtgaagtttgccacatcggttgactctttccttcatgaaagaaaaatctttcgtcaaagagatttctctgtaaca

SEQ ID NO: 252073 - DNA, 632 bp, Homo sapiens
ttcagaaacaaatttgtatccttaaggattgcagttacaacagagtgctaatcccattacccaaggaaaggtttgcagctgactctctaaatggattttaagaggtaggggatctctggtgcatctcaaatacgtcctctagatagggcaccagcagctcttagtgccctcgaatgttttttcctctcaaaatttaaaaaaatctaccgtatgtctacaaagtcatacaagctcctcggttgttttataccaaatccaccaacaaaacaaattatatttaaattgttattagcgatagcaaattataaacaatgaaaggaccctggatatccatttctactcaagtcccttgaatcataaagctcaaaaattacatayagagcagaaactatctgtttagggagaaaatgtctcattccacataaatacatagattaaaagttatttgtaagaaagtatatggagtaacaaattttcaagtaaaaataaatacggaagtaagtttttaagtaagttaaaaaaataaaattttattataacattttaaatctctagatgacattaagtacatttttagagatttagtaaaaatagcaagtaatagtaactaagatttgagctcatactttgtt

SEQ ID NO: 252074 - DNA, 632 bp, Homo sapiens
ttcagaaacaaatttgtatccttaaggattgcagttacaacagagtgctaatcccattacccaaggaaaggtttgcagctgactctctaaatggattttaagaggtaggggatctctggtgcatctcaaatacgtcctctagatagggcaccagcagctcttagtgccctcgaatgttttttcctctcaaaatttaaaaaaatctaccgtatgtctacaaagtcatacaagctcctcggttgttttataccaaatccaccaacaaaacaaattatatttaaattgttattagcgatagcaaattataaacaatgaaaggaccctggatatccatttctactcaagtcccttgaatcataaagctcaaaaattacatacagagcagaaactatctgtttagggagaaaatgtctcattccacataaatacatagattaaaagttatttgtaagaaagtatatggagtaacaaattttcaagtaaaaataaatayggaagtaagtttttaagtaagttaaaaaaataaaattttattataacattttaaatctctagatgacattaagtacatttttagagatttagtaaaaatagcaagtaatagtaactaagatttgagctcatactttgtt

SEQ ID NO: 252075 - DNA, 504 bp, Homo sapiens
tagtaccacaggtgtgtgccaccatgctcagctatttttttttttcatttttttttgaagagacaggggtctccctatgttgcycagactgctcccaaactcctgggctcaagggatcctctgaatctgccaaagtgcaggggttacaggcatgagccactgcacccagcccaatttacaagtctttaacttaaacattagaaatggaaaagcctaggcactttggacttaatttacacggagggaattttaaacgcaaagaatcttcggtgttctataaaaaattcacacattcagagaaggtatcttacctaatttttaaaggaagaaaggaaaaagtatgagtaaaacattattttagtggagaatgttgtgctcctatgaggcccaagattcataaccaaccatgatgccaaaggggagatttttttagaggaatgaaaaaattattccaatgttacttgatcaacactagactccactaggaggcactctgaacttacg

SEQ ID NO: 252076 - DNA, 504 bp, Homo sapiens
tagtaccacaggtgtgtgccaccatgctcagctatttttttttttcatttttttttgaagagacaggggtctccctatgttgctcagactgctcccaaactcctgggctcaagggatcctcygaatctgccaaagtgcaggggttacaggcatgagccactgcacccagcccaatttacaagtctttaacttaaacattagaaatggaaaagcctaggcactttggacttaatttacacggagggaattttaaacgcaaagaatcttcggtgttctataaaaaattcacacattcagagaaggtatcttacctaatttttaaaggaagaaaggaaaaagtatgagtaaaacattattttagtggagaatgttgtgctcctatgaggcccaagattcataaccaaccatgatgccaaaggggagatttttttagaggaatgaaaaaattattccaatgttacttgatcaacactagactccactaggaggcactctgaacttacg

SEQ ID NO: 252077 - DNA, 549 bp, Homo sapiens
tcttcttctgccagctcccaaccccacttgaaatagattgaaaaataaggatggtaaaactattttgaggaggataaataaaatgctaaggatgaagcatttctccttggcctttccaccagcataatgatttctaaattaagagattttaagtgaaattcagatcattataattcaacagcagtaatgaacagccttaatttacaaatctcagatggragagtaagatttttttctgcttccagaggtgttaccttcttctcattacaggggtcaaatatatctgctgggatttatcattattattattaattataatcagcctttgcttggtagttatcttatttataacttttgatatagagtttttaagatatattcttgacctctataccacatatcaaaagagtagtaagttacttgtttcttttcaagtaaattattgatttgctactgactatgctcagaatgatgaatgaagtaagatttcaagctgtgaagaatctggagcccagtacctttctgacccgcaactttgacctaaaaaat

SEQ ID NO: 252078 - DNA, 441 bp, Homo sapiens
cacgacaagcttgccagagtgacacaggtccccaagccagagtctgtggattcaaatcctggtcccagcacttacaacctatatgaccttgggcmaactactttaacctctgtgagcctcattttccaacatctacttgagagtacaccaagaggaaatttatttctacaacagcagtgaaatctaatatgtcttcttccttaattttttctacaaaaaacaataagcagaaataaacaatctatggctgtttttcgtttagtgaaaatcttgatgcagcaataataatgaagcaatttaatgaaagtacagcaattaagaatctagctatttggaatataggggctgtactaagaaagttcttctggttgacaacaaaacagcaacttttctagataaaggtcaagtattcaatttctattcactaaatctgggtgaatt

SEQ ID NO: 252079 - DNA, 587 bp, Homo sapiens
ctgagaaaagagagaaagagatttcacatttgcattacatcaaggaggttcaacttggtctacctcttattccacttttgaaatcttgagatctgtttgatgcataaatttcataaatgttcacctcatttaaatgataatttatgtccttagaatatcatttctagctttgttcttctgcacacccctggagctgatcagagtgtgttgatccctttgttttcaaaggaaactttatgttcacactctcgctacaggggttagcagagtaagacgagaaaatagtcccatagtgtttctgccagctaatgaggaaaatttttcctcctatatatatcatgataggtaattgaattagtactccagtaggaaagggtttgctatttcatacttctatagtcttttcttaacaccatgaaattaaagacatgccagcatggagctgcctattcctgatcgatttcaaataagcaatgtagtatattattgcttttatgtgcttttayagcacatgctgtgcaagataattgactccatgacagatgtctatatttcagaggaaaatttatttgttaaagaacaaacat

SEQ ID NO: 252080 - DNA, 490 bp, Homo sapiens
aaaagcaacaacctcctggggcaccaggaattggtggcagcaggatcccgagcccaggcccccttccgcgcccccaccctcacccttgccctgaccgcctttcagtggcggcrgcagcggcaacaacaccaacctgcgcgaccacgggctctgtccgggacggaagccggatcctgcgggcggcggagcggcgggcggagttagttggaggctccggctccctgggcggggacaggctgagcacgcggaggcagctgcggtggcgggggctccctctcctcggcgtgcgccgggcccagccgggtccgccgctcgccctcgactcctggggcaggtctcagtccctccccgggggcggctcccgggccagccccgcgctcgcctcctccacgccggcggcctctgctccgccctgcctctttgggcgcagggggcgcggagcttgggaagtggagccctggcgagtccccagcgattgcgcgcagcttcc

SEQ ID NO: 252081 - DNA, 515 bp, Homo sapiens
ggccgtctgcaggctgaggagcattgagagccagtccaagtctcaaaactgaagaacttggagtctgatgtttgagggcaggaaacatccagcatccagcatgggagaaaaatgtaggctgggaggttaggccagtctcacctcttcacatttttctgcctgctttatattcactgkccgctgattagattgtgcccaccagattaagggtgggtctgccttccccagcccactgactcaaatgttaatctcctttggcaacaccctcacaggaacaatactttgcatccttcagttcaatcaggttgacacacgtattaaccatcacagtaaatgaaaccacagataagggggggaatactttatctgagtggtcaatataacaaagacatcaatctgcatttgtagctgtcacacatactgttattctacatataggatcaagcttttgaacacttcattaggtcttatggtgtaatcataactaaacatttacatattgaatgaaatacaca

SEQ ID NO: 252082 - DNA, 585 bp, Homo sapiens
taaaattcatattttataaatatgaaatctcccaaatatgaactaacccaaatgttttaaaaactattctgtgggccaaaccagacaaatctgtagttggaattcaacctagggccaccaytttatgacctctacatgtaagaaactgagaggagtttaatgtggctaaaggcataaaccttaaacggacaagcaagggaagcactggctttgtggaacttgctaaggaggggtggcctaattctaaggacagtgggtgacattgaagactgaaacaagatgagatttgtgttacaagatgcagtctagctactgtatagagaatgagtgggaggaggcagtggtggaagaaagataaccatttggaagcttaccgtggtcataggaagaaattaagtgtggctaaaagcaaggtattcaagcaggtgggagatgagtggatttcagagatatgtatgatacccctatgttgggattcaattctccattagtcactcagacttttgcatgtcttgtgagcaaaggcatttactgctttcatcccagactctcttaaagacatttgtatggtagatagttttggaa

SEQ ID NO: 252083 - DNA, 506 bp, Homo sapiens
ccttttgtaagtccttctctcatctggagtttaggacttacagaatcagaattatggttctaattcatttttgtcgataatgtttggacccatctgaaatatatttttgtgtatgatatgcaataggaagaaactttcatttttcagttactcaatttttgtgtatagccgtattaaattctatccagatagacttgccacatgctayttacctataaatttaggcatatttttcagatgtttatgcattttcattgatctaactatccattttgttgtcaggttttaactttgtaataagtacttcttgacatctgaaaattcaagttccccttgtcttatgtgtctgtattttgttgcttactattatctccagcttctatttcaaaataaattaatgaatctatattttcgagttcaagaaaaagtcttagtgagattttgattatgacaaaatttataaatactttcaggggtgctctatatttttgcaactcttcatttat

SEQ ID NO: 252084 - DNA, 651 bp, Homo sapiens
gatagccagaacatcagttgcatattacacatactgtcatttcaacagaaaagtgaaaaaatatatctttaacagggaatattataattgaaacattcaaataagtagatttttcaacataaaatattaatcatttcaacagtcatatttgtaagagagaatggattgctattgtgtgaaccataagttcaaattcctatcttgagcacttaaattttttcacaaacatctctacattaatctgccttttttgcattttactgctactatgttcaaaaattcaatctcccagacaaatggcaattcgagaacgcaattcaagtgatatattattccctttgactagaaaggtatatttgcccattcaggtttttttaagtcaaattttgcaacagctgttacatgatatatttctgaatacaaaataccacatcctgctttctcaactactataatatatagcaatttctgcmatctctccctcctttccctgaaacatatgaaatatactttaaatttaaataaaatcatacataaatgttatttatgctattttctttgacataacttgaatattttcattgtattcaatgctatcttgtaggttaaaagtaaaatgtcatgagcctcattatttaaatttcatagtga

SEQ ID NO: 252085 - DNA, 651 bp, Homo sapiens
gatagccagaacatcagttgcatattacacatactgtcatttcaacagaaaagtgaaaaaatatatctttaacagggaatattataattgaaacattcaaataagtagatttttcaacataaaatattaatcatttcaacagtcatatttgtaagagagaatggattgctattgtgtgaaccataagttcaaattcctatcttgagcacttaaattttttcacaaacatctctacattaatctgccttttttgcattttactgctactatgttcaaaaattcaatctcccagacaaatggcaattcgagaacgcaattcaagtgatatattattccctttgactagaaaggtatatttgcccattcaggtttttttaagtcaaattttgcaacagctgttacatgatatatttctgaatacaaaataccacatcctgctttctcaactactataatatatagcaatttctgcaatctctccctcctttccctgaaacatatraaatatactttaaatttaaataaaatcatacataaatgttatttatgctattttctttgacataacttgaatattttcattgtattcaatgctatcttgtaggttaaaagtaaaatgtcatgagcctcattatttaaatttcatagtga

SEQ ID NO: 252086 - DNA, 603 bp, Homo sapiens
ccttatgacagcatggcaaatataaattctcagaaaactaaaaatataaaataaattcaaatacatttctgtcacctaagtaggatatatgtcgtagtacaagaggagatttttttttttttttttttgagatggagtctcgctctgtccccaggttggagtgcagtggcacgatctcggctcactacaagctcctcctcccgggttcacaccattctcctgcctcagcctcccaagtagctgggactacaggcacccaccaccacactcagctaattttttgtatttttagtagagacggagtttcacagtgttagccaggatggtttcaatckcctgacctcgtgatcctcccgcctcggcctcccaaagtgctgggattacaggtgtgagccaccgcgcccggccaagatgagattttatgagcatcataagagatgcaggacattcaaaatggtttgtattatttcacttaaagcgctgatacttgaacgaagtacagtttatacatatagcacttccatattatttagcattttgatcaatgttcagtcattaatttcaacatatgctaactgtctgggcataaagatacatacatta

SEQ ID NO: 252087 - DNA, 536 bp, Homo sapiens
atgggggagcaggaggagaaatcaaggcgcgaaaggaccctcaaagctgtactgtcactccacgcccaggctgtcattctctccagcacaagcccctcggtggagcaygtgtttagggtctgcagagcacaggagacaaagcagaagcccagcagccacctcaaccctggcatgatcaggttccgcatctccggttctcctccggttttgggccctcacctgccacgaatgcggtcgtcacgcgagcagttgtgagatggtcaagcccattcaggtctaggttaccccctttcatcccggaggcaggggtgaggtgtttgtcaagagacttcagttgtaggcgtggacgtaggctacttccttcagtaacagctatagggccacataagggaacctcaggctactacacctcaggaatctccgtcacgcctcttccccgccctcctcgggtctcacgccgaaacctcaccgggcggaacgatttccggcaagagccaaatgatcagtcctaacctttctgaccgtggttccaaggt

SEQ ID NO: 252088 - DNA, 634 bp, Homo sapiens
ctattatactatttactcacataattttcttcytcatttcttagtattttactgctgatccaagtcagaaaaaaaatcaggtatttcaccaactataatgaagcctactttttaatatttatcatcactaattcaacaagcaatatgcaagaattcacatgtgatactgttgtaaaataatgagccagctggaaacatctacttttttatgtttaatttccatttattctttgtttcgaattttttatttgtgattattggggtacatgtacaggtttgttacaagggtatatagcatgatgctgaggtttaggattttattgatcccatcaccctgatagtgaacatagtatcccacagaaaaattttcagcccttacccacctcactgcctcccctcttctggagttgctagtgtctattcttctcatgtttaggtctgtacgtacttgatgtttagctcccacttaagagaacctgcaagttttggttttctgtttctgttaatttgcttaggataatggcctccagctgcgtctgtgttgctgcaaagaacatgatttcattctttttgtggctgtgtagtattccatggtgtacatgtactacattttctttaagctactgttgatggg

SEQ ID NO: 252089 - DNA, 634 bp, Homo sapiens
ctattatactatttactcacataattttcttcctcatttcttagtattttactgctgatccaagtcagaaaaaaaatcaggtatttcaccaactataatgaagcctactttttaatatttatcatcactaattcaacaagcaatatgcaagaattcacatgtgatactgttgtaaaataatgagccagctggaaacatctacttttttatgtttaatttccatttwttctttgtttcgaattttttatttgtgattattggggtacatgtacaggtttgttacaagggtatatagcatgatgctgaggtttaggattttattgatcccatcaccctgatagtgaacatagtatcccacagaaaaattttcagcccttacccacctcactgcctcccctcttctggagttgctagtgtctattcttctcatgtttaggtctgtacgtacttgatgtttagctcccacttaagagaacctgcaagttttggttttctgtttctgttaatttgcttaggataatggcctccagctgcgtctgtgttgctgcaaagaacatgatttcattctttttgtggctgtgtagtattccatggtgtacatgtactacattttctttaagctactgttgatggg

SEQ ID NO: 252090 - DNA, 593 bp, Homo sapiens
gaaagtgacatacagaaattgggcgtgagttacagaaatagctggactgattggcgtttgccttattckaacacagtttaaacacttggcagtgtatgagtggttgaagtatgactgctgggattggccaagactcagctattgttacaggtgcatactgctaagttaggttgtcaatcttgtctacctattaagttagattacagttcatccacaaggtctaaactacagaagtatggagtccttctccggccgtattaactctgttttaacagatcgattagctttgtttctggatgctgttatgggaacagggctctgtagagttccttggttgcagatagcttcatatgatgggtttttcagacttgcttggtgtagcaatgtattcttatttggtggtgtaattcaggctgcagtccagtagatggtgcttaagagtaagagatgagctggcaggaggctcttaactctgcttatgcacgccttcagcaggggtggaggcaacagaaaagcacgagtgccctccccacctcttccgcataccgtttgtcttcatcgggggtggagcccctggaaaagcctgagaggca

SEQ ID NO: 252091 - DNA, 593 bp, Homo sapiens
gaaagtgacatacagaaattgggcgtgagttacagaaatagctggactgattggcgtttgccttattcgaacacagtttaaacacttggcagtgtatgagtggttgaagtatgactgctgggattggccaagactcagctattgttacaggtgcatactgctaagttaggttgtcaatcttgtctacctattaagttagattacagttcatccacaaggtctaaactacagaagtatggagtccttctccggccgtattaactctgttttaacagatcgattagctttgtttctggatgctgttatgggaacagggctctgtagagttccttggttgcagatagcttcatatgatgggtttttcagacttgcttggtgtagcaatgtattcttatttggtggtgtaattcaggctgcagtccagtagatggtgcttaagagtaagagatgagctggcaggaggctcttaactctgcttatgcacgccttcagcaggggtggaggcaacagaaaagcacgagtgccctccccacctcttccscataccgtttgtcttcatcgggggtggagcccctggaaaagcctgagaggca

SEQ ID NO: 252092 - DNA, 628 bp, Homo sapiens
ctgacaaatcaattctctttctgttttctccctcttttctattcatttattaacctatttttattgatccaaattctttatttcagaactatatagtaaaggaatatcaagagctgagcagaatgggtagaaatggataagggtcatttacatcttctttagtgcaacaaaagcactaggacatttggacaacctcaaatataatccctcatatagatgcatattaatttggcagattctgctcccctcctccccaccagaatggaacagaaaaaatccaagaatctcttattacagcacatttcagtcaagtcttttagataagtatttcatattggtagtagattgtattcttggctccatgaatcttccttgagtaactgcttgtgataaaaagtcaaaaacaattttgaacaattcagtttgcctctaaacatttagttcttgcttgcatgagtgcctaaatrtacatgcccacccgcccagcaccacaactccctcacgcacatttgccaaattatttctctttccaaaaactgaattcctttggtaagaaaatttgaaaacccagcagccagacagaaagtctgaaaacaactaaactacttgtaaactactaaattatagt

SEQ ID NO: 252093 - DNA, 628 bp, Homo sapiens
ctgacaaatcaattctctttctgttttctccctcttttctattcatttattaacctatttttattgatccaaattctttatttcagaactatatagtaaaggaatatcaagagctgagcagaatgggtagaaatggataagggtcatttacatcttctttagtgcaacaaaagcactaggacatttggacaacctcaaatataatccctcatatagatgcatattaatttggcagattctgctcccctcctccccaccagaatggaacagaaaaaatccaagaatctcttattacagcacatttcagtcaagtcttttagataagtatttcatattggtagtagattgtattcttggctccatgaatcttccttgagtaactgcttgtgataaaaagtcaaaaacaattttgaacaattcagtttgcctctaaacatttagttcttgcttgcatgagtgcctaaatgtacatgcccacccgcccagcaccacaactccctcacgcacatttgccaaattatttctctttccaaaaactgaattcctttggtaagaaaatttgaaaacccagcagycagacagaaagtctgaaaacaactaaactacttgtaaactactaaattatagt

SEQ ID NO: 252094 - DNA, 526 bp, Homo sapiens
tcaggtcactgtgagaaatgcatatgattaactatggggttaatggcaagattaataaagctggccttcaaaggrcatttgcattttagaaggggctacctgtgtgtttacctgggagttctctgagctttctcaatgatatttttaaggtagaatctccaaggctaacattacaaacactagatctagtaagtaggtgagagtttttgagcagataaattcctcccaaattcccacaccatatttggcaactaacttttctatgtatatggtagcttcctggcttcacccagtaacatgtcatctgatccctatgatcactctagttttctagggacaattttttttgagggaggagtggtcaaaatgagttataataaactgttaagataaaatgagtataaggtctagtctttctcatagggtaagtaatgtttttatttgtggttgcagcattggtcagaatggagggcagaaagcagtaaggaatgaaatattcttagaatcacaacattatggactgtaa

SEQ ID NO: 252095 - DNA, 526 bp, Homo sapiens
tcaggtcactgtgagaaatgcatatgattaactatggggttaatggcaagattaataaagctggccttcaaaggacatttgcattttagaaggggctacctgtgtgtttacctgggagttctctgagctttctcaatgatatttttaaggtagaatctccaaggctaacattacaaacactakatctagtaagtaggtgagagtttttgagcagataaattcctcccaaattcccacaccatatttggcaactaacttttctatgtatatggtagcttcctggcttcacccagtaacatgtcatctgatccctatgatcactctagttttctagggacaattttttttgagggaggagtggtcaaaatgagttataataaactgttaagataaaatgagtataaggtctagtctttctcatagggtaagtaatgtttttatttgtggttgcagcattggtcagaatggagggcagaaagcagtaaggaatgaaatattcttagaatcacaacattatggactgtaa

SEQ ID NO: 252096 - DNA, 600 bp, Homo sapiens
tagcagactaacccagctgaaaacgacctcatcaccatggttccaaggcaataatgcatgtgggaatggaggagggagtactggggaaggagatccctatttaaatagggtctagttgccaaaactaacaagtgaagatgggtgattgccaagaagttaccaaagagtcaaggaggggacaaatctgcaggagtaaatctacaatgtaagcaggatctaccatataagcaaagtccaaagcgtgaggcggcggggggccacagggcaagggtgggttcagttcagcccaaccaggagaaggtatagagttagatcatctctaactcagtgcatacaattgctgttgctcagatggacaaacaggaccctctcccacagaagaacctggctgccccaggctttctatctagtggtgagggctccatccctayacttcataaacaacattcagaaaatagttaatgcatggatgcctacaacaaatcagcatttctgaataaaataatattgaggtaacattaccaaattcattatgtcaaatgcttttttcttaaaatatattcactttggatcatacataacaaaaaatttgcaaactag

SEQ ID NO: 252097 - DNA, 322 bp, Homo sapiens
tgcttttaaacttgtctttttcacctaacagtatatcttggacatctttctgtgttctttttaaagggctgtccagcattgggtggtggggggagtggtcttgttaataccatttagtcaatcaattccttatatttgggtgttttctggttttggtgtttcttttccttttttttttttttttaactataacaaatgatgctataatragcattcttgttcatatatctttgcacactttgggagttgtttcccccggtaatataaatttctagccatggattgcaggatcaaaagatatttacatttaaaaacattaaca

SEQ ID NO: 252098 - DNA, 322 bp, Homo sapiens
tgcttttaaacttgtctttttcacctaacagtatatcttggacatctttctgtgttctttttaaagggctgtccagcattgggtggtggggggagtggtcttgttaataccatttagtcaatcaattccttatatttgggtgttttctggttttggtgtttcttttccttttttttttttttttaactataacaaatgatgctataatgagcattcttgttcatatatctttgcacactttgggagttgtttccccyggtaatataaatttctagccatggattgcaggatcaaaagatatttacatttaaaaacattaaca

SEQ ID NO: 252099 - DNA, 504 bp, Homo sapiens
ttcctaaggcttcagataatttatttcaatgattcccagaacttaaggcccatagcccttgtgccatattcagtcctagattaagttgattccccatcattttactaagatgtacctcagttatctgaatctgaacagttggaaaatgtgttcgtcattatctkccctctcatttgcccatactcatttttaccaggtcctcttcttcctctcattaaatagaaacacctacgtggagctgatttttcattctttcttcttccctaccatttaaaataatcaaatactagcattcaacttcacaacatttaaaatttgaattatgaacagtgtatatttgtagcaaaattataaaattaatattcatgaacccagtattctaattaagaaataaaagtcactattactttctgttaatttcactttgtgcttatctaaaagcattccagtgcctcctcactcctccggacttaattactattctaaattttgtgttaatcattg

SEQ ID NO: 252100 - DNA, 436 bp, Homo sapiens
ataaccttccaaaaaggttcaaataatatcaaatctctctccccgctgctgaaaagtcttttacaccacttcccttagccctaatgacaaatggataggtttgttttgttgttcatgttagactttgtctttcatatggttggtttacctcaactttctcaagattcttggatgtgtagtcacatttataaatgatgaactatattgaatagcacaggtagctgacacatattctgtttgcttctgttcactaccatttccccgtgaggcctctcacctgaaagagaagcctgagtgaaggttctgtgtaagtgrgggaagtcaggggaatgttttcacagccagtctctttgaagtgcccctgggaaaaattgcaggtttcagagcaggagcctcctacaggctgtagtccagtgcattttactaccaaaagaag

SEQ ID NO: 252101 - DNA, 587 bp, Homo sapiens
atgtaattgttacttttctatttatcttgaagtctgacagcatctttccctttattatttgttgttgttctgtaaatatttaagttgtcagtctaacacacaatattcaattttccaactgtgagaaattatcattttgcaccaataacattttctcatgtccaagtagctctcaatttctctgctgctgtctctttatttgyagaaatacttcctatttaaacaggcacaaatgagttgtttatataaatcatcttaaatattaatactttcgataaatacttcatttaaatgtattctacaaagatcaccttactcataaaagcaaatcaaagtgcaggtttttcttagacccagccagaaaaaattcagaactttggtggtaagaatttggctcattcatttccatcgattaactctaatacaactaactctaattgtattagaattagtgcatgttctcacccagaaggatggatctacattaaacaaaatttgaaaggatttaaagaagacagacactttaggaataagaggcattcttccctattgattgagacatataaacttactagaaaatagatgct

SEQ ID NO: 252102 - DNA, 620 bp, Homo sapiens
ttcacccttgtgcagacagaaaaaaaaaatcagtgtgtcaactttgtttcatgaagaccttataaagaggcatttaaggttgtagtgactttttaaaaagaataatcagggaagagaaggtacaaasagaacattctacaagtgcaacaaatatcataggcgtatgaaaaataaaaattggtaaactaaatatgctcattaaaatacttaacgggattataaagtataataagaactataaagaaacacataaatatacttctggttctcttagactagataagaatcactcatttctttaagtcagaaatttatttctctagggcaatgaaaagaaagaaacaaattgaacatctttatagctatagaattaacctgattctccttaaaatttcactgatttctatcatcgggcataatacagggattttatatatgctggaagtgatggatgtatactattacttattacctatgaagtagggatgcaggacaacattgcccatgttttagtggaggaaagccaatttctgcttcacttccccaggaaggaaaagtgtaagaggcctgccttccatttctctacttgctctcttctcctctctcagttggaagtagag

SEQ ID NO: 252103 - DNA, 598 bp, Homo sapiens
gtcaaatgactatttttatccacaagaaaggataaggaatattatatttcaactggaaacattgttgccccatacaaaattaggtttctattataaccataaagttgtagagaatagacattgcataggcaagtagcaaagtcttccaagagagctaatccttatgttagtgttatatgattctaacccccaatctacccaacctttggctactaatgattggttgtgtggtagacccttaactttgggtcaaacagatttctgtgagtcaatcaggaactatgactcaaagatgaaatccgaattgtgtgttgaaattcagaaccaacattgggcactcagtgtctaccatgtgcatactgaaatagggatagcctggggaragaaaagaaaaaagaaaataaaattgcactacagaagtattagtattaaaataccatgtagcctaagaaagataaagaaaaaattcccttcttgtttcttcaacacattaccctttttggcccagctagtgtgatagcgattctgtttctcaatttaggcatataggataacatagcatctttctctcttggtggtttttgtttagttttgtttt

SEQ ID NO: 252104 - DNA, 560 bp, Homo sapiens
attaggtgacagactgtagaaattattgtaaraattgagaatttatttggttctctcattcttctaagcaacagttgagaattgtttttctttttaggatatcttttcatggatatattacagagaaataagaaaagataaatttagttatatttgtatcttctaaaaagaccattatatttatttataaaaatgtattcatttattaatacacatccattataattactttactttaacataagtatgcagaatgcctagtagtacaatattactttttgtattctccaccttagtttggtaacatgacccctttttagtcaatcatacaagaaaatgactttgtcctgaaccaaggcaggctgctgctttgagaggtcccaaagaacagcaggggttttataacatcaagatagttctttctgtgataaattttacctcttttgttcagggcatgcatcagaattatcaacaaatagttaattggaaacagtgcctagaatacaattttgaatatcatccttattttgtacaaaatatggttctgtcatttcccaccc

SEQ ID NO: 252105 - DNA, 553 bp, Homo sapiens
aataatacttctttatatcctcatatctcaatgtctgtttatatgctccctcctccaagaagtctttcaaaataaaatgaaatataataataattatatmtttcttactgtttttacatggctggcactgagctaaatgttttgcatctatgtctccttcaatattctcagaaaccctctaaggaaatattgtcaacccatttgataaggaatcaagggtcaacacggttcaagtgacatccaggtctgtcagattccaaaaagcagcttgctcttcgtgtgtgtgtgtgtgtgtgtgtgtgtgtgtgtgtgtgtgtgtgttttaatctcatccttttccagatgattgtatgcaaatatatatgcatgaatttgtgtgtgcaaatacatatacatacatatgtatgtatgaatatgtatatatgtgcaaatacgtatacatggatgtgtttgtgtgtgtattcctactgatttttgttgaagattacagccagtctttttatgtgtgcctgcagattggatcataaagcagttaaatgaaatgatagagtct

SEQ ID NO: 252106 - DNA, 553 bp, Homo sapiens
aataatacttctttatatcctcatatctcaatgtctgtttatatgctccctcctccaagaagtctttcaaaataaaatgaaatataataataattatatatttcttactgtttttacatggctggcactgagctaaatgttttgcatctatgtctccttcaatattctcagaaaccctctaaggaaatattgtcaacccatttgataaggaatcaagggtcaacacggttcaagtgacatccaggtctgtcagattccaaaaagcagcttgctcttcgtgtgtgtgtgygtgtgtgtgtgtgtgtgtgtgtgtgtgtgtgttttaatctcatccttttccagatgattgtatgcaaatatatatgcatgaatttgtgtgtgcaaatacatatacatacatatgtatgtatgaatatgtatatatgtgcaaatacgtatacatggatgtgtttgtgtgtgtattcctactgatttttgttgaagattacagccagtctttttatgtgtgcctgcagattggatcataaagcagttaaatgaaatgatagagtct

SEQ ID NO: 252107 - DNA, 525 bp, Homo sapiens
ccaaaagcacaggcaacgaaagcaaagataggtacatgggaatacatcaaactgaaaagcttttgtgtagcaaaggaaacaatcaacaaaataaaaaagcaatctatggaaggggagaaaatatttgcaaacatacctctaataaggagctaacatctaaactatataaggaactactacaactcagtaacagaaaaacaaataactcgattaccaaaacaaaatggcaaaggaccaaaatagagatttttccaaaggggacatacaaatagccaggaagcataagaaaaggtcctcaacatcagtaatcatcagggaaatgcaaatgraaaccacactgaggtatcaaatcacacctgttagggtggctattattaaaaaaaaaaaagaaaacaagtgttggacaggatctggagaaaatatgacccttgttcactgttaatgggaatctaaattggtgcagccattaaggaaaacagtatggaggtttctcaaaaaaaaaaaaaatagaattacaatattacc

SEQ ID NO: 252108 - DNA, 587 bp, Homo sapiens
tattgaatgtttattttgtgggaggaactgtgctaagtacttgatatgtattatgtaattaaaccctcacaatgaccttaaggaggttctataatcgtctccatttctatctatgtgcatcttctacttgtgcaagtccacacagcttgtaagtgcaggagcagagattggaacccaggctttctaacttggaggtcgaactgtgaactaccctgtaccacactaaaccatctctattacagatggagtggtcatgagccttttcatcccmctcagaaatatactaagcaatctcatactttttaattatatttttctatagagcaccattaagcaattttatttgttgcagaaagacacccagttttaggcttctgaataagtgcctagcttagcaaaggtaatatattaacagtaatgtatgtcattcatacaagccaacaaatatttattgagcacttgagtacctgctttgtggcaggttctgggatgcaaaaatggtttctgtcttcatactatttttggtctaatggagacaaaagacactaaataactcatcttccccgtcaaattcactgagcgggtgt

SEQ ID NO: 252109 - DNA, 587 bp, Homo sapiens
tattgaatgtttattttgtgggaggaactgtgctaagtacttgatatgtattatgtaattaaaccctcacaatgaccttaaggaggttctataatcgtctccatttctatctatgtgcatcttctacttgtgcaagtccacacagcttgtaagtgcaggagcagagattggaacccaggctttctaacttggaggtcgaactgtgaactaccctgtaccacactaaaccatctctattacagatggagtggtcatgagccttttcatcccactcagaaatatactaagcaatctcatactttttaattatatttttctatagagcaccattaagcaattttatttgttgcagaaagacacccagttttaggcttctgaataagtgcctagcttagcaaaggtaatatattaacagtaatgtatgtcattcatacaagccaacaaatatttattgagcacttgagtacctgctttgtggcaggttctgggatgcaaaaatggtytctgtcttcatactatttttggtctaatggagacaaaagacactaaataactcatcttccccgtcaaattcactgagcgggtgt

SEQ ID NO: 252110 - DNA, 507 bp, Homo sapiens
ttttttgcctcatcttaggggaagaatcaaataaggtaccttggtggaaataacatttgaagttattagaatttcataaaaattgcatcatttttattgtctctatgcaggcytgtgtgtttgagtgactcagttctgatatgatgcccacatcctccacaacagattattaatcttgcccaaaagatttcttagggactaatcaattctgtagtgactgagagtatgaaaatgcatctgtgaactacatagttagaacacattaagtatatgaccctcctatctataattacaggaaaaagaagtccatcagtaccctgtaatctgatttctatcagtgtaaaaattaccaaggaaaaaaaattcagttctgagccaaagttatgaaagtgcattcaagttgaagtgcttgtactatttctagtaaaaacattttatttttttaaaaaaatcttggaactgtcattaaaaaaaactacacaaaataaaaatattctttgcaattgg

SEQ ID NO: 252111 - DNA, 507 bp, Homo sapiens
ttttttgcctcatcttaggggaagaatcaaataaggtaccttggtggaaataacatttgaagttattagaatttcataaaaattgcatcatttttattgtctctatgcaggcttgtgtgtttgagtgactcagttctgatatgatgcccacatcctccacaacagattattaatcttgcccaaaagatttcttagggactaatcaattctgtagtgactgagagtatgaaaatgcatctgtgaactacatagttagaacacattaagtataygaccctcctatctataattacaggaaaaagaagtccatcagtaccctgtaatctgatttctatcagtgtaaaaattaccaaggaaaaaaaattcagttctgagccaaagttatgaaagtgcattcaagttgaagtgcttgtactatttctagtaaaaacattttatttttttaaaaaaatcttggaactgtcattaaaaaaaactacacaaaataaaaatattctttgcaattgg

SEQ ID NO: 252112 - DNA, 514 bp, Homo sapiens
atagagaaaaaaataaaaagaaaaaaaaagagcaactgattcaggaatgctctgctttgagctttctaactgttgtgccaagaattgagcataggagtgctgggctgttgattcagcttcatggattctcacatcctggagcaaccaaaggcccaggtcatccattcaagagcagatttatctggttatgctcaattactccagtgttcaatacaaatgttttctacctgaaaaggtcaggaagtgacagctctaaatttcatctggtarcgttttttttttccatcgtaaacggtttccctgatcttccttacttacttccttactttctcttcgttctctcttcttttccttaaaacacttatcagaatttgtaaccacatatcatctatgtgcttccttgtttaacgtctgtctccctcactaaactgtaagcgttgagaatggcatttttgcttaccactgtttactcagttcctagcatattgcctggcacataataagtacttagcca

SEQ ID NO: 252113 - DNA, 616 bp, Homo sapiens
tattaatcattccttacacctaataatgggcttatatttttcaaagtgaatttcaacataggaactaagaattgatttgtattatagaataaaaaaataccattagaaaagatcatgcatgctgaaataggttgcaaagggaactgtgaaaccttctttgatggttttaaggagaaggaattcctggctgttttggatgatcatgttacatcatgccccagggatgatggaaaacaggaaagcasagtaatgagccagatcaatactttctatttctgtaaatgtagatgactagagaaatataaagtgtagaactcacttatgcattacaatcaacttagtttgagcacaatggcttattggtcttccaatagtcattgttgcctcagactggacaaaagagcagcctttcctgtactttttctgtaagtccttcattccagcctataacctagcacaggctcacacctccctgccgctgtaggaagtgccctaagtggtgttgcatggagtctattatgaaaactgagctcaatctggaatagactgtactgttcttctgtaaacctcacaggtactttctcttagacctctgcataaggatatcaagtgacta

SEQ ID NO: 252114 - DNA, 512 bp, Homo sapiens
agaaaagatcatgcatgctgaaataggttgcaaagggaactgtgaaaccttctttgatggttttaaggagaaggaattcctggctgttttggatgatcatgttacatcatgccccagggatgatggaaaacaggaaagcacagtaatgagccagatcamtactttctatttctgtaaatgtagatgactagagaaatataaagtgtagaactcacttatgcattacaatcaacttagtttgagcacaatggcttattggtcttccaatagtcattgttgcctcagactggacaaaagagcagcctttcctgtactttttctgtaagtccttcattccagcctataacctagcacaggctcacacctccctgccgctgtaggaagtgccctaagtggtgttgcatggagtctattatgaaaactgagctcaatctggaatagactgtactgttcttctgtaaacctcacaggtactttctcttagacctctgcataaggatatcaagtgacta

SEQ ID NO: 252115 - DNA, 556 bp, Homo sapiens
ctgctgttttgactgtattgtcaggtgtaccataacagagaaaatgaggtgaaattataacagagtttctgctttctggtatttgtttagtgaatgataagtgaatacttttcatcttcttgatgggctttcatgttgatattacccatttttcagcactagctgtctgtacgtccttgcacaccatgctgctatgagaaactgacaagggacacagaggacctaattactcccccacagttgaagtggcattaaaaaatatcagtcttgacccacatcagtacgcttgctagtgtactttctgtcacaacttgccagagattatttattggactcaatgtgcttccatgtgcctgggaactactctaactagctctgattataacacattttagtagtagacataattttttaggcaagtccaaatactctatttcagcaatgtatgtattgctgtcctaaaataatgcatgattaaagwtggttatagattgtctgctggaaaggtattgttggcgttttcccctagactgcaggtaaaaatagtgaattacaa

SEQ ID NO: 252116 - DNA, 624 bp, Homo sapiens
atcatgtaacatcaaaagtaaagatttagtacatgtccccctagatggccacctctataacccaatgctgggatttgttgcttcaaaatgaactggacatttagtactttgaaaacataaagtatttctataatagtatttgataacagtgctttgcagtttcctgactttaaaaaaaaaagtaggggtgatgaggaatcattgtaaccttaggaaatctattattcttttatgttttggtcaacatttaacagtctttgttaaggaggaacatataattatctttgaaaacataaaagaggaacatataattatctttgaaaatgttacgctagtcttagtttttaccctagaatgtctaaattcatwcttgtggtttaggttaaaggttgccctcatcttatattaaaaatcttttcatttttgtgttattctaatccatgaatagtttctgacatggttcttttttatggtgaatcctcctgaaagagatacagttcttaaagtacatttccctgatacacaaatatggcacaagcactttaagctatattccttgccctgaatatttcctattctccacttcatctgccttaaacataatagtaaggcaaagagagggga

SEQ ID NO: 252117 - DNA, 542 bp, Homo sapiens
tcatctttcatactttttgacttgttttcaattcayttatcgtcataaaaagtatgtcaatgaaagtaatggtccagataataacaacaaagcatatgctgccagaaaatgcctgggaacttcaaagtgtgccctgcaaggcgctctaacctttggtttcaatagcagaaccacaggcctctctttaatttgataagtactattgccatcttgtggttttatgcaatattgcaacaaaacagcactggcatatgaagctattgatttttttgagtcttttgaaccaacaaactaaatcctttttgtatagtatgtttattgaagattaaccacataccacatattagtgacttggatttcctgggagttctattacaataaaattatttaaatccactgtaaagtcaataataatataatcttgaaaacgtgtaatttccctataatgaaatataaggaagtaacatttcccaaagagagatccaaggattgttggtcctaaaagatgcactcaagaaaagtaggcctcatagtcaaaaaaa

SEQ ID NO: 252118 - DNA, 542 bp, Homo sapiens
tcatctttcatactttttgacttgttttcaattcacttatcgtcataaaaagtatgtcaatgaaagtaatggtccagataataacaacaaagcatatgctgccagaaaatgcctgggaacttcaaagtgtgccctgcaaggcgctctaacctttggtttcaatagcagaaccacaggcctctctttaatttgataagtactattgccatcttgtggttttatgcaatattgcaacaaaacagcactggcatatgaagctattgatttttttgagtctttygaaccaacaaactaaatcctttttgtatagtatgtttattgaagattaaccacataccacatattagtgacttggatttcctgggagttctattacaataaaattatttaaatccactgtaaagtcaataataatataatcttgaaaacgtgtaatttccctataatgaaatataaggaagtaacatttcccaaagagagatccaaggattgttggtcctaaaagatgcactcaagaaaagtaggcctcatagtcaaaaaaa

SEQ ID NO: 252119 - DNA, 570 bp, Homo sapiens
gggtctgcctactctggcctggggaagaaatgggaaagaagtctgaggaccttatggccattgcagtsttttccttggcagtccgagggaagcgggaggtgatgcatgtttttacagcaagcatccttgtccctttacattctgtggagctcaggcctcatgcctggtccttgccagcatcatccatacatctctgcctccaaatcctgagatcattgagctgcattctcttgccacctcagcaccaagctcagagattccaaaatcatattgctagaaagaagttaagccagtttcatccctcagctctgcttaaatttgtttttaaaccaagccaaaaggagacatccatattattttctaaaagataaaatatcagaagctattctatgtgtgcctttcagctgatgtgtgaagtgtaaccataagaaatatctcttgccaggacattattgaggaagtcacagtaggttacattcgtgagaatatatggtctgcttcagaagagttgcttcttcgctttcaagccacaagctcaggacccatccttagggaagagtttgaagctag

SEQ ID NO: 252120 - DNA, 611 bp, Homo sapiens
ccctcagctctgcttaaatttgtttttaaaccaagccaaaaggagacatccatattattttctaaaagataaaatatcagaagctattctatgtgtgcctttcagctgatgtgtgaagtgtaaccataagaaatatctcttgccaggacattattgaggaagtcacagtaggttacattcgtgagaatatatggtctgcttcagaagagttgcttcttcgctttcaagccacaagctcaggacccatccttagggaagagtttgaagctagaaaatcatttttgcatgaacaagaagagaatgtggtcaaaatacaggtatgtggatcacctrccactgtttacacaaaactgtcatatcacctgaaaatgttttatttgataatagaatagtcaactaccagcattcctataaacaaatctgactgcatatttttacattatcagtgcccctagtctacttcactaaggctttaaaataggaagcattttgatgatgaatgacttaacctatggtcttctagagagcatttaggagcaccgcagatttgcacagatccacctgctgccaacctagttggacccaaagggatataccttggatcagagttg

SEQ ID NO: 252121 - DNA, 611 bp, Homo sapiens
ccctcagctctgcttaaatttgtttttaaaccaagccaaaaggagacatccatattattttctaaaagataaaatatcagaagctattctatgtgtgcctttcagctgatgtgtgaagtgtaaccataagaaatatctcttgccaggacattattgaggaagtcacagtaggttacattcgtgagaatatatggtctgcttcagaagagttgcttcttcgctttcaagccacaagctcaggacccatccttagggaagagtttgaagctagaaaatcatttttgcatgaacaagaagagaatgtggtcaaaatacaggtatgtggatcacctaccactgtttacacaaaactgtcatatcacctgaaaatgttttatttgataatagaatagtcaactaccagcattcctataaacaaatctgactgcatatttttacatwatcagtgcccctagtctacttcactaaggctttaaaataggaagcattttgatgatgaatgacttaacctatggtcttctagagagcatttaggagcaccgcagatttgcacagatccacctgctgccaacctagttggacccaaagggatataccttggatcagagttg

SEQ ID NO: 252122 - DNA, 539 bp, Homo sapiens
gcttacagcttgcaccctctgaagcagcagccttagctgtacctgagccccttttagccatggttagatctggagcgsctgggatgcagggattactgtcccaaggctgtgcagtgcatcaaggccctgggcccacaaaaccattctgccctcctaggcttcccagcctgtgatggcaggggctgctgtgaaggtctaaagcattggggatttcagttcaacatgagatttgggtggggatgcaaatccaaaccatattaaggcatgagccaccatgtccagttcacatctttatataagtttgtatttgtatttgtgtgtacaatgatggggtatgtgtgtttacacatgtgcgtatttcagaaggtacataataaaatgttaaatagtagttgcctttataaagtagctaggtggaagtagagataggtacacaggtatgtataccctttctctttgttcactgtgtattttaatagatattctaggtattgaggtacagattgtttgcatagaaatatatagaattattctgtggg

SEQ ID NO: 252123 - DNA, 539 bp, Homo sapiens
gcttacagcttgcaccctctgaagcagcagccttagctgtacctgagccccttttagccatggttagatctggagcgcctgggatgcagggattactgtcccaaggctgtgcagtgcatcaaggccctgggcccacaaaaccattctgccctcctaggcttcccagcctgtgatggcaggggctgctgtgaaggtctaaagcattggggatttcagttcaacatgagatttgggtggggatgcaaatccaaaccatattaaggcatgagccaycatgtccagttcacatctttatataagtttgtatttgtatttgtgtgtacaatgatggggtatgtgtgtttacacatgtgcgtatttcagaaggtacataataaaatgttaaatagtagttgcctttataaagtagctaggtggaagtagagataggtacacaggtatgtataccctttctctttgttcactgtgtattttaatagatattctaggtattgaggtacagattgtttgcatagaaatatatagaattattctgtggg

SEQ ID NO: 252124 - DNA, 539 bp, Homo sapiens
gcttacagcttgcaccctctgaagcagcagccttagctgtacctgagccccttttagccatggttagatctggagcgcctgggatgcagggattactgtcccaaggctgtgcagtgcatcaaggccctgggcccacaaaaccattctgccctcctaggcttcccagcctgtgatggcaggggctgctgtgaaggtctaaagcattggggatttcagttcaacatgagatttgggtggggatgcaaatccaaaccatattaaggcatgagccaccatgtccagttcacatctttatataagtttgtatttgtatttgtgtgtacaatgatggggtatgtgtgtttacacatgtgcgtatttcagaagrtacataataaaatgttaaatagtagttgcctttataaagtagctaggtggaagtagagataggtacacaggtatgtataccctttctctttgttcactgtgtattttaatagatattctaggtattgaggtacagattgtttgcatagaaatatatagaattattctgtggg

SEQ ID NO: 252125 - DNA, 605 bp, Homo sapiens
ggcttactgttttcattcagaaatcatgttgagagttagacttcaccagtcaggactcgatagaaaatgggtgaggggaaaactgtgggctagtaacaccaaagagaagactctagagaaatattttacagcattrcatatgtagttttttcaactgttaactgcttactttaaatagaagcccctgggagggatttcttcctgaatctttaaagaagagatatgggaacatagattggatcatctaagttgtgtgctaaaattattttccctttttagatctctttgtctaggcagttcccctacagtcttgtttgtacttttagctgacttatctgacctcttcttcaaagaaaatggaaaaataaatgttgaatacaccacattgaaatactgtcagttctaagtagtgtcagttcttaaatactgacagttcttaaatgttctaaattcaaaaataatggagtaggtgggactctgggagatcaagacttgtcttaatcttttgcagaataatgaaattgtgaaaatacagtcactgttgagagcgaacaaagctagagatgactacaaaacattgggtaagtgagagctttctgaaacaa

SEQ ID NO: 252126 - DNA, 605 bp, Homo sapiens
ggcttactgttttcattcagaaatcatgttgagagttagacttcaccagtcaggactcgatagaaaatgggtgaggggaaaactgtgggctagtaacaccaaagagaagactctagagaaatattttacagcattgcatatgtagttttttcaactgttaactgcttactttaaatagaagcccctgggagggatttcttcctgaatmtttaaagaagagatatgggaacatagattggatcatctaagttgtgtgctaaaattattttccctttttagatctctttgtctaggcagttcccctacagtcttgtttgtacttttagctgacttatctgacctcttcttcaaagaaaatggaaaaataaatgttgaatacaccacattgaaatactgtcagttctaagtagtgtcagttcttaaatactgacagttcttaaatgttctaaattcaaaaataatggagtaggtgggactctgggagatcaagacttgtcttaatcttttgcagaataatgaaattgtgaaaatacagtcactgttgagagcgaacaaagctagagatgactacaaaacattgggtaagtgagagctttctgaaacaa

SEQ ID NO: 252127 - DNA, 605 bp, Homo sapiens
ggcttactgttttcattcagaaatcatgttgagagttagacttcaccagtcaggactcgatagaaaatgggtgaggggaaaactgtgggctagtaacaccaaagagaagactctagagaaatattttacagcattgcatatgtagttttttcaactgttaactgcttactttaaatagaagcccctgggagggatttcttcctgaatctttaaagaagagatatgggaacatagattggatcatctaagttgtgtgctaaaattattttccctttttagatctctttgtctaggcagttcccctacagtcttgtttgtacttttagctgacttatctgacctcttcttcaaagaaaatggaaaaataaatgttgaatacaccacattgaaatactgtcagttctaagtagtgtcagttcttaaatactgacagttcttaaatgttctaaattcaaaaatratggagtaggtgggactctgggagatcaagacttgtcttaatcttttgcagaataatgaaattgtgaaaatacagtcactgttgagagcgaacaaagctagagatgactacaaaacattgggtaagtgagagctttctgaaacaa

SEQ ID NO: 252128 - DNA, 540 bp, Homo sapiens
tgcttcagtggtcaggaaataaagggtcccatgatccaaggaaaattctccaataaaggccatttatgcagttgtttgtggtttatgcagttgttttggtgttagttttcttactcctttagtgtcaaaacaccacagaactaaggtggaagtaaaaggaagactgtcaagggcctaggygtaaaggagggcaactaatgagatggccatggctggactagctcttccaagtcatctttctattactgggtctaatcattcgtcctcaatggaccagacaatttattcttacagtttacccagatctgatctccctaagcatgttaaaaatatttttccaagagtcagagtgccaggaaattaaagcctaaagttccaggtactaaggggaaaacccttttagaatttatgtgagaatgtccctctcaataacaggggctgacccctagattctgagcaccctcccttggccggtgctcaaaggacaagggccaagtttcaatttctaaaatctttttatttcagctaagtagaacattc

SEQ ID NO: 252129 - DNA, 634 bp, Homo sapiens
ctgtgctgtttaaagcagcaaatttgactaattgcttttttttctattgtattcctcacacagacttgattcttagatcaagaattatcatttttgactttttaagtttcagggaccatttttaaaataacatttttaagatgacctacgcataggtcactatatcactaagtcacaaacagggcctgaggcccttgccactctctccaatcctgtttgaggagctgggtccaatatccagaaacatggatgcagctccgacagccaggagccagcctggaagaagctgtaacacgtcctctcaaggtttgagatgggaacaaagtacatgtcatcattcaaaatttcctagctattttgatgaaactgtttaatgcacatgtttgagtctgtcttaagacttttcccccctttattaggaaatatttcaaagaagcatgtaatgtccctgagccagaagagaagtttaatatggacaaatacacagacactggtgacagtcagcaaaccagtatatatatttcaattgaagaaatmatcagcacacactcagtaagtggggatggggagccatcttagcaatggacccatgatttaggcatctgttatcttgaaaatgcttaatctctacagg

SEQ ID NO: 252130 - DNA, 567 bp, Homo sapiens
tttgcctgaaaggtgtgttaaaagagcagtcatttaaagttctttccctggcattcatgagatatttctcattacctggagagcacccagacaagttcatgctgcttttttacaatgaattgccagwtaacattgtgttcttgctgctgaaagatgttcaaacaatttggactctgctactacacttcagtctagtctgttcaagtaaaaaaataaaaaaaaaacaaactgaaaacaaataccaccaatatgaaaggaagtacaaatctatgtgttgtgaagaactgaaatgaacttatctgtttcccaaaaatatcccaggtgtttttactattgaagaatcaatatatattgactagtatattcttcagagtttaaagttttcatcctttattgtgaaactcatatgaatgaaaatgcagtggcactgatgatttttattttcttgttttcttccatttctcatttgaaggaggcttctataggtaacaaacaattctggcataactgtatgttcacatttctatttagaattctatttcagtttaatatactcaaatactttat

SEQ ID NO: 252131 - DNA, 567 bp, Homo sapiens
tttgcctgaaaggtgtgttaaaagagcagtcatttaaagttctttccctggcattcatgagatatttctcattacctggagagcacccagacaagttcatgctgcttttttacaatgaattgccagataacattgtgttcttgctgctgaaagatgttcaaacaatttggactctgctactacacttcagtctagtctgttcaagtaaaaaaataaaaaaaaaacaaactgaaaacaaataccaccaatatgaaaggaagtacaaatctatgtgttgtgaagaactgaaatgaacttatctgtttcccaaaaatatcccaggtgtttttactattgaagaatcaatatatattgactagtataktcttcagagtttaaagttttcatcctttattgtgaaactcatatgaatgaaaatgcagtggcactgatgatttttattttcttgttttcttccatttctcatttgaaggaggcttctataggtaacaaacaattctggcataactgtatgttcacatttctatttagaattctatttcagtttaatatactcaaatactttat

SEQ ID NO: 252132 - DNA, 567 bp, Homo sapiens
tttgcctgaaaggtgtgttaaaagagcagtcatttaaagttctttccctggcattcatgagatatttctcattacctggagagcacccagacaagttcatgctgcttttttacaatgaattgccagataacattgtgttcttgctgctgaaagatgttcaaacaatttggactctgctactacacttcagtctagtctgttcaagtaaaaaaataaaaaaaaaacaaactgaaaacaaataccaccaatatgaaaggaagtacaaatctatgtgttgtgaagaactgaaatgaacttatctgtttcccaaaaatatcccaggtgtttttactattgaagaatcaatatatattgactagtatattcttcagaktttaaagttttcatcctttattgtgaaactcatatgaatgaaaatgcagtggcactgatgatttttattttcttgttttcttccatttctcatttgaaggaggcttctataggtaacaaacaattctggcataactgtatgttcacatttctatttagaattctatttcagtttaatatactcaaatactttat

SEQ ID NO: 252133 - DNA, 600 bp, Homo sapiens
aaaaaaaatggttagcttgagacgtaaaccttaggcaaagagaagtttgtgatttgtaagaaatttaaaattaataggattaaaaagagagctgtgggccttgttatgtatttgctttggaagccctctaagaaaatttcaggtcaattttttattctctgccctactggaatgcccccagattatgtgacaatgaggtcttattttaatatgtgcagaatttgttaagactgacattctttgtttcagatttttacatatcagagaattcttgcatttttctggtgatgtcttattcctcttgtgtgggtcccaagtgagccctgatcctctcagatacattttatatactctgttggtgatgaatattttatctctggcaaatactgtccatgtctaattcccttgaggaccttggtatccaatattattgtaattataaaatcaatgttaacactaaagtcaaagagtcatgagcatgccctttcttgcttgtgaagagccatggggagataagcagtctgttcaggatggagtcataattccttgtrtagaatatcataaattatttccacagattcaccaagcaaatgaggccta

SEQ ID NO: 252134 - DNA, 519 bp, Homo sapiens
tgtctacaaatattcacataaaaattaagtaaagtgattttacttacccaaataagagcttattacaagatatttgtatttgtaaccaaatccggttggaaacattctaggaagaagtcttaattcataaatattttgagaaactctttagtttttgtcttaaatatttgtcataaatatttatttatttgtcttaaatatttagtactattgatgcagggtctcatatataccacttcaaaatgacatttgtagtcccttcccctatactgtctttaggtaagagttaaacacagtagaagggagtgtctcttctccattcccatattcttcarggttgtgttctgaaatgtgggatactcaactcagtgccaacctaaactattgctgtgagttgtaaagtaagtaagacaagtccccagttgtacatttcaccctaaaataattcattttctccaaacattgtgatcactatctgccatcacccctcaatcaaaaagaagacttgcctatttcttt

SEQ ID NO: 252135 - DNA, 547 bp, Homo sapiens
aaaaaaaaaaaaaagaggaaaggaactagagctgcacgtcaagtcacactgtgttgtcagctactttagctgactgagaaatacaattctttggaatggaagaagtttcagtgataaccttgttgggaaatgatatcaaaggacaaaggtgtcatttttaaatgtgtaacttagtactatcagcactgttaatttctctggccactttaactcttaaaactgctgcagtgtgagtgtgtgagtatcacttatgcacaagaccattttatcagtaaggtacaagatgacatattcatagaataagcacattgcctatatagaaaatatgtaatatattgtttaggcttcagcaatgttgaggtaaaagtatttattaaaaggacatactagcttmgttgccttaaattaagtattaatctttggtcctcttggccctaccgttttcatttgagatgcccagtttgtatttggagtttataatcacttacaagatatttagtgatagttctaaaacaagcaggtgattttaatttagtaactgttcaat

SEQ ID NO: 252136 - DNA, 445 bp, Homo sapiens
tagttaatgtctaattaatgattaatatgtcctgttgtcacagattaatcaactttctcaaagtgcctatcctgtaagtagtcaatactttttatggccaacactgaacctcatataatctgtgccaaaacccagttacagagacatcactatctctgttttgcagatagggaaattggggctaaattaagataaatagcttgccaagatcacttcactattaagttgcaaagataggatttcagctatattctccctgacatcaaaagctatgcattttatactataccacattacgtcttaggatctccacagggccaaagtatatttttacttttaaataaattttaaggtatcagggatagtatcaataacatcgtgtattatactctggttaatacaaagagctaaaatgaatactttaygctatatcacttgtatgtga

SEQ ID NO: 252137 - DNA, 584 bp, Homo sapiens
ctttgtgcttatctggacaacactgtctcctgctgtgtccagcacatccttctcgtcctctctcccattcagactgagcactgtggattaaggctctgatctgccaacagtgggggaaagtagcactttgcagctcattaattttgaaagactgcatctttggccaaatctactagtttttatactatattgacagtaggaactctattttattcacctcctgttctctcccagaattaagcataggatcttgaatacattaagaaattaataatatttattaaataatttaatccaaagtaatttatcaatgttcattttatgtttcatggtcagatcaaagaaaagagatttaggattacagttccaaataaattgcattgcatatatacaaaatgtgcatttccccacttgcccatgacaatttagggttccaaagcaagtaattggcctagggacttggaaaaattaatatagcttccaaagggttaacttatctaacaacattgtaacctgttagcttatttatgttttagcattgcttgcttctccacatttttaaragcatattataaaagttaaat

SEQ ID NO: 252138 - DNA, 608 bp, Homo sapiens
aatagtagtttgttgcatgtctgtacaaagattggctagtcattacaccaccttgtgaattttccttcttttctgctctgctcagcattaaatcaaatttcctgcagagtaaggaggaagtggagaactttacctctccttcccacttaaactgagaaggtaggctttcaggtcctgccttaagcagggagacttaaggccccaacttgagtggacccaggctttggtttttggtcatttcctccccacaggaccttggaaaatgaatgccagtttctactggttctacgaatcccctcgggacagaaaaaggtgcagtgttcttcctatctttcagattctctcctccatcaggaggagagattttggcctgatcatttcttactgttgtgtttattatttgatgcttttaagaatattttcaaggtaatggttgccaggacatttaatagtttttaaagagagagtttgcccagatacctatagaattaaatatatatatatatatatgtttatatatacagacatcgatatatacacatacacacaygtacatgtatatgaaaagcacttataaattaataagggctttatgaataaaagatagt

SEQ ID NO: 252139 - DNA, 611 bp, Homo sapiens
tgttcatagtattctcttgtctttttgatgtaaaacagttcatagcaacagcccttggttattttttgtttgtttatttttcctgatattgrtaatttgtgccttctccttctctctttaccagttttgctagatgtacacacggtcaggattctccagagaaacagaacaaacagggtgtgtaaatatatacagaaaaacatttgctcgaaggaattgttgcacacaatagtggaggctggtaaatccaaaatctgcagggcaggccagcaggctagagacccaggcaagagtccacatcgccatctcaaattcagaggtagcctggaggcagaattctttctccttggggacctcagtcttttctctaaagacttgcaactgattgaatgaggccccgccatattatggagagtaatctgctttactcaaagtctactgattaaaaaggtaattacttctaaaaaataccttcatagcaatatctagactggtgttttactgaaaactgggtaccatgtcttagccaagttgacacataaaattaactattacaggaaagatttgccaatttcattaatctttttaaagaatcagtttggttttattaa

SEQ ID NO: 252140 - DNA, 611 bp, Homo sapiens
tgttcatagtattctcttgtctttttgatgtaaaacagttcatagcaacagcccttggttattttttgtttgtttatttttcctgatattgataatttgtgccttctccttctctctttaccagttttgctagatgtacacacrgtcaggattctccagagaaacagaacaaacagggtgtgtaaatatatacagaaaaacatttgctcgaaggaattgttgcacacaatagtggaggctggtaaatccaaaatctgcagggcaggccagcaggctagagacccaggcaagagtccacatcgccatctcaaattcagaggtagcctggaggcagaattctttctccttggggacctcagtcttttctctaaagacttgcaactgattgaatgaggccccgccatattatggagagtaatctgctttactcaaagtctactgattaaaaaggtaattacttctaaaaaataccttcatagcaatatctagactggtgttttactgaaaactgggtaccatgtcttagccaagttgacacataaaattaactattacaggaaagatttgccaatttcattaatctttttaaagaatcagtttggttttattaa

SEQ ID NO: 252141 - DNA, 593 bp, Homo sapiens
agtcagttcttttttacataacttaagaattacattacagttaaaatattattccagattttcatcaatattttcaaatatctatatttagtgtgtactttatctgttactgaaaaatctatttttcttagaagatatatgaataccacaaataaaatatctatttagaactatagtgacgtaacatgttttgagccaagagtataaaattgatattatgttcacaattaatccagatgtcaagtgaatgaacaaagaatagtacatgatattatagaatgtttccatttaaaacatagcaaggtagatacacgttaccatattgtgtttttttttttccaaaaaaacttttattcacaatgatactgttttggttttaaggccttcatctaaatacattttttaggacatttttttaaatgtgcaaatcagtatgcttaattkgcaacccaatcccaaagccagatgtttttgtattcaatctataatttttagctcatttttcacattcacatgcatgaagttatttgatagcacacctaagtatatttctcttctattgaatcgttgtaagccaaattctgccagtttga

SEQ ID NO: 252142 - DNA, 461 bp, Homo sapiens
attcttagaaatgaaaaactgaaacatcagtaatgttaaatgaaggaaaagaaatagctgaaagcaaatgaagaagccctactgctcatgatgaaaaaattaggaagaacaacaatgggtgtctccacagcattgattctactccttcccaatgggacaacaaccatgcatttttatgacagactgacctttttcctctaycacagtgattgtttcagagacggtccaatcaaaacaaaccttagttcttttcttagacgattgagggaagagtccatccctctctctcctctgatatgggcaaggaaggatatattcccagtgctagtaaagatcttgcaaaagtacttactgtctcatttgaataaaaactttaaaatgtaaactaattttctaagctcacctagctagaaaataacaaaataggaatttgaacaactcttcgtgtggccccaaaatct

SEQ ID NO: 252143 - DNA, 634 bp, Homo sapiens
aaagtgaaattcatggctattggaaatagatttaggaaagttaggaggcaatctttaatcatatttatactgtggactttgaacctctcattttcaaaatcattaacaattarttgttctggttctagcacagtgatttagagctggcaagagcattgctcctacctttccaacaaagaaagtgctacgcaaactgcacattaataatttcttgaaaccaccagaaaattgaggctgcccagcaaaaatgtagccccaaatctggggagagataggtctgtataggtgaagacaggatctgactacttccatatctgaggaagatgctaacttatgctttatatggtaagaacatacagttaaattttctaatgctaaataccaattgtaggctattgatagatatactgcacctggggaccacagatatagggtaatttgcaccctttgtaagcttttctccataaaccttaccaggcactcacagggaggatcatggagaatcctgaaaaatatattctcttggtactgactaggggagaggaccagtaaccactgcagaaactagaactagaaccctgtcctttatctcccctagggaaggaaagccttgatgtgagggaggaagagcaac

SEQ ID NO: 252144 - DNA, 485 bp, Homo sapiens
tttgctaaactggcttgtggcaaactcactgccaatgaattgatttttgctatgtgggcctgcttcaacatctagaactgaaatgtgtaaacactgattccattctgcagcccccaacccaatgatcttgaatccttttttactgcaacctgcagtaaggaatacactttacaccataactatgcacacatgcacgcatgtacacacacacacacacacatgaaacaaaagaatcacattgtccttacttcagacaatgcactctgatactttctattgtatttcttttcttcttttcttaaaaaaaatactggcttaaacctgcagtttaraaaaccttataacagcaaacctgtttaaacttgattatatagtggaaggccaatatttctatagaaccaaacatatgtttaacacttttggagaaaataatgattgcaattccaatttcgtgttctgtgatacaattctccactgcaatgtgc

SEQ ID NO: 252145 - DNA, 593 bp, Homo sapiens
cactatcgctatccaaaagaccttcaactgcatggtacctgataggcacttgataaatatttattgactgattaagcagtgcctgattatagtacaaaggatatatttattcctggaagcagcagtgtgtagtgacaaaatactgaatttagaattagaagcctatcctaccaatttgccagctaagtgatttgggaaaatatttttaaaatctaaggttctattttcaagtctgtaaaatgagaagaattatgtctaccttgaagaagagttgtgggagaattaaatggagtgacagtatgcaaaatgcctgacacacaagagttctcagcaaatgctagttgaattgaattctagattactcattctcgggaaggaattcatctctaattttagtctttccatcaataaatttgatamgtttattttgttttctggattattgagtagtcctcctcccttcaaaaataatcaactcattttgggcaaagtacagaagaagcaagtaagaataaaaggaatattaaatattgcaatggcaataaaaagaattaaaatctttgcgatatgaataagctcacagagcagcccag

SEQ ID NO: 252146 - DNA, 539 bp, Homo sapiens
gccaggcacagtggctcatttctgtaatcccagcactttgggaggccgaggcagcagatcacttgagatcaagagttcaagaccagtttggccaacatggtgaaaccccatctctgggtgtggtggcgcatgcttgtaatyccagctacttggggggctgaggcatgagaacagcttgaacccaggaagcagagattgcagtgagccttgcaagatcccaccactgcattccagcttgggtgacagagtgagactccatctcaaaaaaaaaaaaatcaattaataaaaagtgtcagagatcttaaattttttagaagcctatacctaccagcagcataagggagcctggacatctagatctcacaagactaccttacagagttaacttcgtctctttggatatgttagagatttaccttaagttttcacatgtacagtttttacttattataataaaactatttaaaataatgaaagttaaaagttattgaaggtgattcatatatttaggacaagtgacttttaaatgcataatttaa

SEQ ID NO: 252147 - DNA, 539 bp, Homo sapiens
gccaggcacagtggctcatttctgtaatcccagcactttgggaggccgaggcagcagatcacttgagatcaagagttcaagaccagtttggccaacatggtgaaaccccatctctgggtgtggtggcgcatgcttgtaatcccagctacttggggggctgaggcatgagaacagcttgaacccaggaagcagagattgcagtgagccttgcaagatcccaccactgcattccagcttgggtgacagagtgagactccatctcaaaaaaaaaaaaatcaattaataaaaagtgtcagagatcttaaattttttagaagcctatacctaccagcakcataagggagcctggacatctagatctcacaagactaccttacagagttaacttcgtctctttggatatgttagagatttaccttaagttttcacatgtacagtttttacttattataataaaactatttaaaataatgaaagttaaaagttattgaaggtgattcatatatttaggacaagtgacttttaaatgcataatttaa

SEQ ID NO: 252148 - DNA, 539 bp, Homo sapiens
gccaggcacagtggctcatttctgtaatcccagcactttgggaggccgaggcagcagatcacttgagatcaagagttcaagaccagtttggccaacatggtgaaaccccatctctgggtgtggtggcgcatgcttgtaatcccagctacttggggggctgaggcatgagaacagcttgaacccaggaagcagagattgcagtgagccttgcaagatcccaccactgcattccagcttgggtgacagagtgagactccatctcaaaaaaaaaaaaatcaattaataaaaagtgtcagagatcttaaattttttagaagcctatacctaccagcagcataagggagcctggacatctagatctcacaagactacmttacagagttaacttcgtctctttggatatgttagagatttaccttaagttttcacatgtacagtttttacttattataataaaactatttaaaataatgaaagttaaaagttattgaaggtgattcatatatttaggacaagtgacttttaaatgcataatttaa

SEQ ID NO: 252149 - DNA, 565 bp, Homo sapiens
ttatgagaagaaagcgtgtcattttgtgagacgaatttgacagtaggagtccttggtttggattcattatctaaagtgatctggcattttttgtgcatttgattatttgcttaaaatcacgatccatttagtatttggaagtccccttcctctccccaagaactaaaaaatatgcttcgcactgtaccatggcactactgagaccaaaggagatttgtgactgatacagttttgtgtgcacttgtacatgtaatttattcttacaagagttatgtacytctatagttttcccatttctgtgcagattgtattaaaacttaactggaataattctttgaaggcaacttctactttaaatgaattccagataaaaatttttaaccccaaatttaagaaattgtatctattgagacctaactttttggatacaataaataatttagcaaacgtcagcattctagtactcttaatgagctgtgaatatagtagaagagcatccactgtaaaaataatgtactgaaattgtttaatgttgtctcttgacacaaaataagaggactaaggt

SEQ ID NO: 252150 - DNA, 586 bp, Homo sapiens
agagttctgtgatcttttttttaattttagaatttccttctgatctttgaatgtagaaaatatactttgaattagaatttatataaataaataatactcgtatttaaatagaagattttaagtttgtccctctttttcagggtgatagctgaaatcagtgaaagtgcctgtaagtggcgcccaagggtttggaatttttccttatattacagaatttaggggctttttcttcctatttactgtctttgaagaaaaattacagtgttactckccattgaacagcctattgtgagtttggtagatataattaccccatcctatttttgtaacttaaaaaaccaaactatcaatttgctggccccgtgaaagaacaagatatgctgtacttgttaatgttagtttttgtttaaaactaaaggtatttcacaggctgcttttatatcctcatatagccctcagatttcacttcctttttaaagctattaggctaaaaatatgatttagtgaccttttactaaagaggaggtataagagcattattacctaaaaattactcttaaaatattaagtgggtgactttataaaa

SEQ ID NO: 252151 - DNA, 559 bp, Homo sapiens
ataatttgtgatatgtcagcagatttcattgaacttgagtcttaggtcacaatagaactaacaacatattggcttcattctagtccaatttgttttcttttatgcctacacaccaagggtgttcgcttgaaaacaagtcttccttcacctcctgctttttctcctcacctgctctttaaaaaataattgtacctgactcaaattgatagtcttctaggattttcattcgctaactcaaattgctagtcttctagagttttcatttgctaccaagttaacttgcttactaacttgatttgtcttatctcttttagatttatttaaaatccctaccaattttaagagtcactgcatattcttgattacttctgcatggctatatctccatgtccccctctccgaattctgatgtgtatttgacttgtttggattatatttcctcctggcaagttttsacttcgttgcagtttgacgttttcttgacctgtcagtgctcatgattgtttccgtggcttaacaaagtgtacatatttagtttcattattgtataaatttgttg

SEQ ID NO: 252152 - DNA, 597 bp, Homo sapiens
gttctgaacaacatctaaattgcaaatttagtcttaattaaatacagaattataaaaaaagttaataagaatagtcattaaaatttaaaactgggaaggctgtaggactgccagagttaataagtgatcattcacttaatatatgttcatacttattatgagccagacatgcttagatgttaggtgtatagatggcgataacacgtggtcccctcactcatggagcttacagttcataagagaggaacagtttgcaaactgcaktaaccatgttaaaggaaaaatacaagtgctgtgaaagaatggaactgggagttcttaattgaaattgggaaagtctctgaggagttgaggaaaatctagagagtgggtagaaattaggtaaaaagtagacagagaaggaagcagcctgtccagaagccctgagtaggaaagatcttggggttattgaggcagtgaagaaggggggttgcaggtctgatgacaggaattgaggtgagaccacgaggtgcagggccacttaggttgggctaaacattttggattttagtctaagcccggggggaaccactagagcattttaatggaggaagtaac

SEQ ID NO: 252153 - DNA, 532 bp, Homo sapiens
ttggatatctattacttaatgcccttgagcctctgaatcagaatgagtagatagatgttgggtttcaaatcctatcgtcaaggatcacaggaaagaagcaacgcaatgcactttgaaacaaatattcggtcattatagcactcactcaatgactcctagttttaggttctaaaacttacgtccaaagtaagatataaggaagtactccaacgcagatattaataccaaaactacttgttagatttcttgaggcagaagagaaacaaagttagatgacactcagaaccttagtaacatgttatctgtcctattgggaggaggagtatatcagttaaatttacaattttaaaatgtgactttctcagtggacattcatagttcacattagcctgcaccttgcagagtatccctgtagaatgatggtcagggtgagggctgagcatagaggagggagagagccatccctggctctagactttcccaagctccgtcctggctgtgtggyggatttcaagaaataaggatgaactac

SEQ ID NO: 252154 - DNA, 540 bp, Homo sapiens
cttacatacttcttatttttaggcattgaatattattttcctcagatacaattgtctgaattcattttaatctttcckttaataacgactcttgaatgatatgaatgtaatatttatattgattttgtcctcttaatctagcctaaatgaatctaataaaacaaataaaagttatttaagataaaaaaaaaaaaggctgggcatggtggctcaagcctgtaatctcagcactttgggagcctgaggcaggcaggtcacttgaggttaggagttcgagaccagcctgtcctacttggtgaaaccttgtctctactaaaaacacacacacagacacacacacacacacacacacacacacacacaaagccaagtgtggtacgcacctgtagtcccagctacttgggaagctgagacaggagaatcgcttgaacctgggaggcagaggttgcagtgtgccgagattgtgccaccacactcctgcctggacgacagagtgagagtccaactcaaaaaataataataataaaaattaaaattaaa

SEQ ID NO: 252155 - DNA, 540 bp, Homo sapiens
cttacatacttcttatttttaggcattgaatattattttcctcagatacaattgtctgaattcattttaatctttcctttaataacgactcttgaatgatatgaatgtaatatttatattgattttgtcctcttaatctagcctaaatgaatctaataaaacaaataaaagttatttaagataaaaaaaaaaaaggctgggcatggtggctcaagcctgtaatctcagcactttgggagcctgaggcaggcaggtcacttgaggttaggagttcgagaccagcctgtcctacttggtgaaaccttgtctctactaaaaacacacacacagacacacacacacacacacacacacacacacacaaagccaagtgtggtacgcacctgtagtcccagctacttgggaagctgagacaggagaatcgcttgaacctgggaggcagaggttgcagtgwgccgagattgtgccaccacactcctgcctggacgacagagtgagagtccaactcaaaaaataataataataaaaattaaaattaaa

SEQ ID NO: 252156 - DNA, 499 bp, Homo sapiens
cagcttcccaaactgctgggattacagacattwgccaccacacctggtctctgcaaattctgaggacaagcatggtggtctatgtaggcgtgaagggaaaacttccctgttgtccttggaagattcattgacaaaaatcagattaataagggaaaagccatactaatttattatgcgtggggtaaaaattacggagtgattacccaatatctcagtgaggcccagatacctaccatagcctgtttcagagcggagaggagagatggggaacataggtaattctgttgatgggcaataaatgattactaggagggatgaatggaacaaagattaatttgtgaatagttctctttggcaattgaatgagcctgagaggcagacagacattatcctgtgaaagggtctgtttaggtgtggttacattcttggtcttcttttgtgcaatagagaataagatagggaagcaaaggaagaaaagaaaaattgttcttcctgcagg

SEQ ID NO: 252157 - DNA, 499 bp, Homo sapiens
cagcttcccaaactgctgggattacagacatttgccaccacacctggtctctgcaaattctgaggacaagcatggtggtctatgtaggcgtgaagggaaaacttccctgttgtccttggaagattcattgacaaaaatcagattaataagggaaaagccatactaatttattatgcgtggggtaaaaattacggagtgattacccaatatctcagtgaggcccagatacctaccatagcctgtttcagagsggagaggagagatggggaacataggtaattctgttgatgggcaataaatgattactaggagggatgaatggaacaaagattaatttgtgaatagttctctttggcaattgaatgagcctgagaggcagacagacattatcctgtgaaagggtctgtttaggtgtggttacattcttggtcttcttttgtgcaatagagaataagatagggaagcaaaggaagaaaagaaaaattgttcttcctgcagg

SEQ ID NO: 252158 - DNA, 552 bp, Homo sapiens
ctttttctaaattgcatttattgttttactttttctcttcttatttttacccgaacagaaaggagctgggaaaggaaaggccaaagagcagacagctactaactgttgaccaagtaaggcctggcaagtctccagctggactggtcttcgttgtgagtcatagaggttctcttcgttgaatttgcaagtaaagaggagggcgtgaaggtgtttttgtttatattgaatttttgaagtctrtgggttctattattaactcagttttatgtagttttgattagggaagactttagacagcacggacctttccagtgtgaaggagtcttcttctcatgtgaccacgagaccatctcatacaccttttctgtgtcccagtctgcttcctcaaccagtggatttaataaatagctaggtgtacacattattcaaatatgcaaagaaaattaagccttttatttaatatcttaaaaagatgcttattaacataaatgactgtcttatttttgaaatgtgtcatcattttttatgagttaatcttacttcttgaacatc

SEQ ID NO: 252159 - DNA, 558 bp, Homo sapiens
ttaataaatagctaggtgtacacattattcaaatatgcaaagaaaattaagccttttatttaatatcttaaaaagatgcttattaacataaatgactgtcttatttttgaaatgtgtcatcattttytatgagttaatcttacttcttgaacatccaccctattagtttcatatgtgagaaatagtatatcttactgtcttccagtttaacattatctttcatttcaaagtagtggtctgggttgcatgatgtcttccaaagcttttctctcatctcaaatgatcccaaggtaatgctggggcataggaggaggtgggctatattactctgtgaaggttaaagaaaggaggagaaggaggagaaagtaatggatttgtaatcacagttcctaatgctgtactctggatcttggaaagatttggttgaggagtggctgatccaggctagtcttgtctagtttctagtgccctttgcaataactgctgagaccatgttcccatggctgatgttcatggtccactcgatttgcttctggtctgaaatatttgaaacttcat

SEQ ID NO: 252160 - DNA, 572 bp, Homo sapiens
ggtctttcaacaccttggttacatttattcctaggtatttttttttttgtagtatttaagatgattttgctttctcaatttttttttcagctagtttgtcattcatgtatagaaatgctactgatttttgtacgttgattttgcattctgcaattgtattcaatatgtttatcagttctaagaggtttttggtggaatctttagatttctctagatataagattatttcatctgcaaagaaaaacaatttgacttctttttcaatttgaatgtttttgtttctttctcttgcctgattgctcaggctagatcttccagtactatgtyaaataggagtgatgaaagtaggcattcttatcttctagttcttagaggaaaggttttcagtttttccttattcagtataatgttagctttgggcttgtcacacatggcctttattatgttgaggtatgttccgtctattcctaatttgttgagcgtatttatcatgaaacagttgaattttatcaaatgctttttctgagggatattggcctgtagctttctttttttgttatggtcttgtctgg

SEQ ID NO: 252161 - DNA, 572 bp, Homo sapiens
ggtctttcaacaccttggttacatttattcctaggtatttttttttttgtagtatttaagatgattttgctttctcaatttttttttcagctagtttgtcattcatgtatagaaatgctactgatttttgtacgttgattttgcattctgcaattgtattcaatatgtttatcagttctaagaggtttttggtggaatctttagatttctctagatataagattatttcatctgcaaagaaaaacaatttgacttctttttcaatttgaatgtttttgtttctttctcttgcctgattgctcaggctagatcttccagtactatgttraataggagtgatgaaagtaggcattcttatcttctagttcttagaggaaaggttttcagtttttccttattcagtataatgttagctttgggcttgtcacacatggcctttattatgttgaggtatgttccgtctattcctaatttgttgagcgtatttatcatgaaacagttgaattttatcaaatgctttttctgagggatattggcctgtagctttctttttttgttatggtcttgtctgg

SEQ ID NO: 252162 - DNA, 536 bp, Homo sapiens
ttgggttagtatttctactttttaaatgtaggcatttcttgccataaacttctcttttagcactgctttttctatattccataagttttggtatgttatatttacattttaatttgtttcaagatttaaaaaaaaaattgttctgaatttcttcattggcccagtggtcctttaggagcatgttgtttaatatccatgtgttcatatgtgttcatacagtttccaaatttcctcttgttattgatttctagatgtagtcctgaaaaaaatactcsatatgattttgatttttaaaaatttattgagacttattttatggcctaacttatggttaatctgaagaatgttccatgtgctgataaaaggaatgtatattctgcagcttttggatgaaaggctctgtaaatatctgtttggtatatagcacaatttaaatccaatgtctccttattgattttctgtctagaggatgatctgtccaatggtgagagtggggtgctgaagtctccaactattgctgtggtggagtctctctc

SEQ ID NO: 252163 - DNA, 536 bp, Homo sapiens
ttgggttagtatttctactttttaaatgtaggcatttcttgccataaacttctcttttagcactgctttttctatattccataagttttggtatgttatatttacattttaatttgtttcaagatttaaaaaaaaaattgttctgaatttcttcattggcccagtggtcctttaggagcatgttgtttaatatccatgtgttcatatgtgttcatacagtttccaaatttcctcttgttattgatttctagatgtagtcctgaaaaaaatactccatatgattttgatttttaaaaatttattgagacttattttatggcctaacttatggttaatctgaagaatgttccatgtgctgataaaaggaatgtatattctgcagcttttggatgaaakgctctgtaaatatctgtttggtatatagcacaatttaaatccaatgtctccttattgattttctgtctagaggatgatctgtccaatggtgagagtggggtgctgaagtctccaactattgctgtggtggagtctctctc

SEQ ID NO: 252164 - DNA, 536 bp, Homo sapiens
ttgggttagtatttctactttttaaatgtaggcatttcttgccataaacttctcttttagcactgctttttctatattccataagttttggtatgttatatttacattttaatttgtttcaagatttaaaaaaaaaattgttctgaatttcttcattggcccagtggtcctttaggagcatgttgtttaatatccatgtgttcatatgtgttcatacagtttccaaatttcctcttgttattgatttctagatgtagtcctgaaaaaaatactccatatgattttgatttttaaaaatttattgagacttattttatggcctaacttatggttaatctgaagaatgttccatgtgctgataaaaggaatgtatattctgcagcttttggatgaaaggctctgtaaatatctgtttggtatatagcacartttaaatccaatgtctccttattgattttctgtctagaggatgatctgtccaatggtgagagtggggtgctgaagtctccaactattgctgtggtggagtctctctc

SEQ ID NO: 252165 - DNA, 604 bp, Homo sapiens
tggtgttagcaggttgaagcaggcctatctttgggcctccaaaaagcttacttggatgctgaaagtggcagcagcactcaggaaggtgagatagtccttgaggccctaggtggtgtgcgtggtatcagcaatggcagtagcagtggtgagccaactgtcaggcccccaggcagcatgtaggagaacaagcaatggtgttggtgggttgggtaggccagttcccaggccctcaggtttcacatgggggcgggtattgatggtggtggtagtggcaggctgatgggcccatcctcaggcccttgggagaagtgcacaggtgttggtggtggcagtcaaagaggttgatcctcaggcctacagaaagcactcaggcactggtagcaggcttgctgggtctgttgttaggcctcctggtggtacgcatgcataccaaaaatggcaggtagggtaggttgatcctcaggtcaccaagcaacttgctcaggcactgactgaggtgktgctgggcaggatgaacctgtcttcaatcccagggatggtgtacctgtaggctatttccttgacccactgaaggtgcatggaggtacatggtagccctgctgct

SEQ ID NO: 252166 - DNA, 593 bp, Homo sapiens
ctaggggctttttgttattaaggtacacccattcttcagsacctccatcagctttagaactctgtactgtgaattggcatcagactttcttgtctttggtgaggactggttgtatctacaattctctctactttgacatctcttaaaagatatgagcagggcaaaaaagcaaaaagttcaaacaattatgtggcttgaaaaaactccaactaaaaaattctacatacttggtattgaagaaaacatgaggattaatgtcctaagtaaatcaaaataactgcagatgttgttgagagcaaattcttgatatctcagaccattctgaagagtgagcatgttcaacatgcagtgagaattaacacagtaaaatcacggcaaataactaaagtaagacagtagaggacaggtttagctccacctagtgcctttggagcaaagaggaaatggtgaaatatttgatagtatgacagaaagaatgatgttagagtaaggggagtctaagtgataaagatttttagacagtgatgaatctcaaatttgttgtttgatccatgtaaaatcagagatgttatgaaatcctctttactcaatag

SEQ ID NO: 252167 - DNA, 593 bp, Homo sapiens
ctaggggctttttgttattaaggtacacccattcttcaggacctccatcagctttagaactctgtactgtgaattggcatcagactttcttgtctttggtgaggactggttgtatctacaattctctctactttgacatctcttaaaagatatgagcagggcaaaaaagcaaaaagttcaaacaattatgtggcttgaaaaaactccaactaaaaaattctacatacttggtattgaagaaaacatgaggattaatgtcctaagtaaatcaaaataactgcagatgttgttgagagcaaattcttgatatctcagaccattctgaagagtgagcatgttcaacatgcagtgagaattaacacagtaaaatcacggcaaataactaaagtaagacagtagaggacasgtttagctccacctagtgcctttggagcaaagaggaaatggtgaaatatttgatagtatgacagaaagaatgatgttagagtaaggggagtctaagtgataaagatttttagacagtgatgaatctcaaatttgttgtttgatccatgtaaaatcagagatgttatgaaatcctctttactcaatag

SEQ ID NO: 252168 - DNA, 518 bp, Homo sapiens
aatgtgtcacaatatacatattagacaaaatagaccttaagttaaaaagcagggtaggtatatacagagttattatataatgataaacacattcactcataagatttaacaatcctgaacttgcatgtgcttaacaacatagcctcaaaacatatacagcagaattaaatggaataacacagagaaattgactaatttataatagcaataggagaattaagaaacatttttcagaaactgagaggtcaagaaagccaagaattagtgaacttaaagcaactaaagtccagagagatatagtaaagagttttagtggcatactgctagatagagctaaatccagaaacagtaacatttctttatatttgcatagtwctttgtatttaaaaaaataatttcacagataacatgattttattttaaacctccaagcattgagaacacttctggcatgtcagacaatcttttaagcattttaaataacctgtgttgaggagacaagggagtttccttcctat

SEQ ID NO: 252169 - DNA, 518 bp, Homo sapiens
aatgtgtcacaatatacatattagacaaaatagaccttaagttaaaaagcagggtaggtatatacagagttattatataatgataaacacattcactcataagatttaacaatcctgaacttgcatgtgcttaacaacatagcctcaaaacatatacagcagaattaaatggaataacacagagaaattgactaatttataatagcaataggagaattaagaaacatttttcagaaactgagaggtcaagaaagccaagaattagtgaacttaaagcaactaaagtccagagagatatagtaaagagttttagtggcatactgctagatagagctaaatccagaaacagtaacatttctttatatttgcatagttctttgtatttaaaaaaataatttcacagataacatgattttattttaaacctccaagcattgagaacacttctggcatgtcagacaatcytttaagcattttaaataacctgtgttgaggagacaagggagtttccttcctat

SEQ ID NO: 252170 - DNA, 446 bp, Homo sapiens
ttcagtcttctgttgttcttttgaaaataagtaatgtctttaccacttagctgggaaagtggtgaaggaactagtattttatggactctaactacgtgtcgcccacacgcagcagtatgttacaatcatagcatgaaatgcttctattcataatagctttgcaagttgatttataagtttaccattgttaacttgataaggcagaaaaagtatccatagtgtgtggcctctagaatcttcaaaactgggtttggaagctaattctggttcttaggcaccataaaaattacttgacttctttaagtttaaggttgatttttttcwtttcattaaaataggtgtaataccaccattactaataggagtaattatgatatcaatgtattataacaacatattaatagtagtaggtaataataatagtagtgtgaagtaagataatacat

SEQ ID NO: 252171 - DNA, 446 bp, Homo sapiens
ttcagtcttctgttgttcttttgaaaataagtaatgtctttaccacttagctgggaaagtggtgaaggaactagtattttatggactctaactacgtgtcgcccacacgcagcagtatgttacaatcatagcatgaaatgcttctattcataatagctttgcaagttgatttataagtttaccattgttaacttgataaggcagaaaaagtatccatagtgtgtggcctctagaatcttcaaaactgggtttggaagctaattctggttcttaggcaccataaaaattacttgacttctttaagtttaaggttgatttttttcatttcattaaaataggtgtaataccaccattactaataggagtaattatgatatcaaygtattataacaacatattaatagtagtaggtaataataatagtagtgtgaagtaagataatacat

SEQ ID NO: 252172 - DNA, 615 bp, Homo sapiens
ttgaagtggcttggattaatgctctggcactcgatgccagcttcctcatgaagctaccctagaagcagtttaaggaggcatatttttaaaagaagtattcctctatcttatttccaagtcctactgtctaccttggactctatttcatttagctgtgtttgggcctggttatggggtcactttctcagcaggccttcatctccccaacactggggctctgccatgttcttgcttaccttctccctagggctgtattgtttattcaggtttattgtagcataaatgtagcattttaaagctgaaaaaccattaaagaatcattaaattcaatatcctcctttcaggagtgtggaaaccagaggtaaaatcagaggtcaaattttcccaattaagcactaaaggcgtggcttgagtattgcacatcttgcaatacttttcttttccttctcaccgtgactactactagtattactagtgtattttgtacaaagtaagttcttcctcacctaacatatatttcctcccttctcaattatacttyctttctgtgtgtatcttgtgtcttgtcccaccagcagaaagatatctttcttgaacaaaatgcaagtctgtagc

SEQ ID NO: 252173 - DNA, 561 bp, Homo sapiens
tcctgtatgatttttgcaccaaataagccaaatgtcatttttggacttcagaggacctaatatctaaaatattaggtaagaaagagacataatttctgatttgattttggaaagtttgtcaaatatcaaaggtttaaaacattggatatcacaaaatagaatcccaggtcaccataagtcattcatttggccaaaataactgcaaaattttttttaaaaagaaaaacctttactctgatagaggagacttagctttccaaacgagaccctgcgaagatagcataagaccaaatgaatctgtctcttctctstctcctattttttcctgccatttactcataggagaaaacaaaacactttcattttcttttaacagtacataaaaatcatattcacaagagaaaaccaaatttaatgttgcattagtacatctttaatgttaaagctagttttttaatataaaattttatatctctatcgagttttaattagtttgaccataaggtatgattttcacaaaccttttagaaccctttacaattttccatcaaacagcagatc

SEQ ID NO: 252174 - DNA, 472 bp, Homo sapiens
acctagatgagattgaagaatattattctaagtgaagtaactcaggaatggaaaaccaaacattgtatgttctaactcataagtgggagctaagctatgaggatgcaaaggcataagaatgacacaacagacrttggggactcagggggtaagtgtggaaaggggatgaggggaaaaagactacaaattgggtgcagtgtgtactgctcaggtgatgggtgcaccaaagtctcacaaatcaccactaaagaacttactcatgtaaccaaacaccacctgttccccaatagcctatggaaatacattttttttaaaaaaagggcattagtagaaaaatctggtgaaattcaaataagtctgctgtttacctaacagtattgaagcagtgttaatttgcttaattttaacaaatgtacatggttctctatgatgttaacataagagaaaagctggtgaagcatacataggaact

SEQ ID NO: 252175 - DNA, 375 bp, Homo sapiens
agtcctttgccccactagttttgatggacctccatcatccacctaataaaattttagttcctatgctggcattcaaaagcttccaaaatgtgtctccaatttgctttcctaactttatttctaaagttacaaactctgtgatctatggtaccacttatactttctacaaatatgcttcatgctttaaaaaaaattttttatgtctgtggctttgctgatgctcttctgtcagaagtacttttcccccaaaatctctattcaaatcctaactatcattcaaggcacaactcaggggcgatctcttccataacgcttttctccatttatttargcacaatccttccctctttaaaactaaaagcaattgctattttg

SEQ ID NO: 252176 - DNA, 515 bp, Homo sapiens
tgccaagtgacaaaattgtgtagcgcacacaaattctaaaagattcrtggaaaaaaaattatacatttgttaggaagtcttgtacttattgataaatattaaatacaaaataaacggagcaaagagattgctgtatcagaaacataacataaacatgcattttagttcagaataatttaaaattttaattgtttaataatttgaaaattaaagggccctgcctttagtataatttaaatatacctttaatttctcatatctcatttatgttgaaaatatccattttcctttgccaaaattctctaagaagcctcagttaattattatttatatttagtccaagctttattcctgaggcaaaatcctacatttaattacacacacaaacatgtaataaacatacttttatctctggaggtacacattttcttctccacctaaggggattctaataaagagctattgatttgggagatctgtactccaaaaatacattgacccaaacatacagatat

SEQ ID NO: 252177 - DNA, 620 bp, Homo sapiens
ttaatacctggttcatatctggggtatgtagcaagaatgaaaaagatgtttcttatgaaaggcctgtttcttgacagtatatgaatagtgtaaccattactttgtgttctattgaaatgatcaatagacagacaactttttctgcttataattgccaacaacagaaatgatggacattattatttctgtttgaaaacaaaacctatttctgcagttctatgattctggtttattcgtgctatctaatgaatgcttccaattacaacacataaaaaggacaattttatatcttctggttttcaaataaagtttgcatttcatccaatctggaccttagcartaaaattacggatgtcaaatattttttcaggtaagataattttttttaagcacagcagagcaattttatgtgatacagaaaattcttagaccaaaaggcgagagcttaagctattaatggctcaaacaatttgtattgactaaatactaataagacctgattctctatagctaggaatgccatctgaacctaagtttgcatccatcactctttatcctgggctagttcagagcaagttatgtcaatcagtcccacattggtttagtgaatgttttccaaa

SEQ ID NO: 252178 - DNA, 584 bp, Homo sapiens
ggcctagggccagttatttaacccgatctgtaaaatgggaacaataattgttctacttcagagacctgtgaagattaaatgaggtaatgcatataaagctccagtcagagcaggctcagtaaatgctgttattattattgtatcttttcttcatcaaaaattgcactgatcacaatattgtagacctcaaattattgattttccccaccaaaagcctaagttaccagagaagaatgtaactcccaaagtaaaagccaatttttgccatgtttcaaaagtgacttaatctcaagagactgggataaaccaacccaaacatatttctagagacaaagctaaagtaacagtggcagccatctgttgacaaagatccttatcctaggattcagggaatccccaacacccaggtctttgtgctttagcttttatccaattttcgaggatgttcagaatgttaataaaatgtgtgtgctatctttacctcarattaattcaaaagggaaattaatgatgtaaccatttctaataccaaggcatgaatagtaattggtacatgcaacaggtctatatgccaggttcccaca

SEQ ID NO: 252179 - DNA, 563 bp, Homo sapiens
tgttcaaatccacccttgggtcttcattagtggatcagcatctccaggcctgtaagggctactgacaagtttccttgatgaagaagttttggccactctttgtgagtacttacctaagataggtctgggggcctcagggttccagatcaagcaaagtcaagatgtccaaactatgaaaacctcatggacaatgagacttgctcgtctcactacaggtacaagaaagtatgaggcagataacccaaatgcatgatttgaccctcttaaggaacagctaatataatttagtctggagttattatttgggctttggaaaaggtttgctcattcaccaccagcttttgatcctacaacagctgtcatatgctttatascaatattaaagccagtcatgtctgaatttagatattttagaattatttgcacttcgtacttcaaaaattttattttgtgagttatttgatgtctaaaaatccctagaatctttgttgtaatctcttcaaatccattttttcctcctaaaataagaacattctctttttctcttatttttcctttttaga

SEQ ID NO: 252180 - DNA, 591 bp, Homo sapiens
caatccatggaagaactcttctgttccttagctttatatactacctgcagcytaaaatatctgaatttgtataacttcagtatggaaacctctgaacttcagatctgtatatccaactatctatgtgacatctccatttggatgtttcatagcaatacaagactgaacctctagtctccacctcttcctccttcaccaacacactttccacccaaaaaacaaaaacaaaatcctgctccaaccacggtctttcccacttcaggcccaaaaatgtagccatggtgttagacttggggattacgcatgggcccaacagcacaaacttggacttcttctcattgaggctgcatatctgactttgtcaagaatggagtctaaatgttcaatatgttatcaaccctgcaggagaccaatcagccatttggtgacaagttggtttaatctaaccacatgttccctggtggaggaattatgtgtttggataaactatggcataactaacacctcaaaattccttttggatcaggcagaagccaccctttgtctaaaggggcctttgtctaaaatcgcacctggttactctcaacctct

SEQ ID NO: 252181 - DNA, 550 bp, Homo sapiens
atcccctgggtgaggctctgcttctaaagaatccaacctgaggtactatcattaacactggcaaacacactgctcttccattggccccgtcttctcagggtacagctgtagccttgtgcattaagctccagcaccagtagtactacaattttgtgtaagaatctggagtcaccgccacctgatgctacaattcatttacatttagaactgtcccagtgaaagtattttgttcacattgtgtatttggtgtctataacaaggaacccttgtgccttggcatattccattcagatccagaagtagagacctgcagaaagctttattttcaaaggttacattaatttattctgacatatttggtgcaagatgtctgagaaactaatacatggrgccctaactattatgcagccaacttaaaacagatttttaatttttatagttaaatttttaaagtacaaagctaaatacaagttttagatactgttgacatctaccaacagtctaaatacaggttgacatctaccaacaatttaactatctaaaaagaaat

SEQ ID NO: 252182 - DNA, 570 bp, Homo sapiens
actggttttgggaccgtaaaatggtacagcactatgaaaagcggtatggaaattcttcaaaaaactaaaaatagaattaccatatgatctagcaattccacttcttggcatatatatccaaagaattgaaagcaagatctccaagagatttttgcacaccyaagattatagcacattattccacagatgaatggataaacaaaatgtatatatatatatatatatatgaatattattcagccttcagaaaagaataaaatcttgtcacatgctgtattagtctgttttcatgctgctgaaaaagacatacccgcactgggcaatttacaaaagaaagaggtttaatggacttacagttccacatggctgaggaggcctcacaaccatggcagaaggcaaggaggagcgagtcacgtgttatgtggatggcagcagataaagagagagcttgtgcagggagactcccatttttaaaaccatcagatctcttgagacttattcacaatcacgagaactgcacgggaaagacccactcccatgattcaattatctcccacagggtccatccca

SEQ ID NO: 252183 - DNA, 549 bp, Homo sapiens
gttttgtaagaagcctacccataagtgggtttgagaaacactggtgaagcatccctttcctcaggccttagcacacatcttcctgccctccccttttccctctgctctaatgtatatccttcaaccagggaccagcaaaccttttctttaaacagcagrttgtaaatattttagaaagtctctgtggcaaccactcatctctgctgttgtagcataaaggcaaccataggcatggcaaaagcaaatgggtgtcgctatactccattaaacttcatttatagacattgaaatttggatattctatcattttcatgtgctgtgaaatagtcttctttggattgatttccaattttttaaaaatgcaaaaattattcttagctcatgaggaggactggatttggcccatgggccatagtttgccaacctctgcccttcactattaatgaatgtattctttctaaacagtaactttttttgtagaccctgtttgtattagtccattttcacactgctataaagatactacccaagactgagtaatttataaac

SEQ ID NO: 252184 - DNA, 549 bp, Homo sapiens
gttttgtaagaagcctacccataagtgggtttgagaaacactggtgaagcatccctttcctcaggccttagcacacatcttcctgccctccccttttccctctgctctaatgtatatccttcaaccagggaccagcaaaccttttctttaaacagcagattgtaaatattttagaragtctctgtggcaaccactcatctctgctgttgtagcataaaggcaaccataggcatggcaaaagcaaatgggtgtcgctatactccattaaacttcatttatagacattgaaatttggatattctatcattttcatgtgctgtgaaatagtcttctttggattgatttccaattttttaaaaatgcaaaaattattcttagctcatgaggaggactggatttggcccatgggccatagtttgccaacctctgcccttcactattaatgaatgtattctttctaaacagtaactttttttgtagaccctgtttgtattagtccattttcacactgctataaagatactacccaagactgagtaatttataaac

SEQ ID NO: 252185 - DNA, 549 bp, Homo sapiens
gttttgtaagaagcctacccataagtgggtttgagaaacactggtgaagcatccctttcctcaggccttagcacacatcttcctgccctccccttttccctctgctctaatgtatatccttcaaccagggaccagcaaaccttttctttaaacagcagattgtaaatattttagaaagtctctgtggcaaccactcatctctgctgttgtagcataaaggcaaccataggcatggcaaaagcaaatgggtgtcgctatactccattaaacttcatttatagacattgaaatttggatattctatcattttcatgtgctgtgaaatagtcttctttggattgatttccaattttttaaaaatgcaaaaaytattcttagctcatgaggaggactggatttggcccatgggccatagtttgccaacctctgcccttcactattaatgaatgtattctttctaaacagtaactttttttgtagaccctgtttgtattagtccattttcacactgctataaagatactacccaagactgagtaatttataaac

SEQ ID NO: 252186 - DNA, 560 bp, Homo sapiens
cagaaacttttcttggcaccaygggtaagcaggggctatgggtcatgggactcattgccaatgggaaccatacatcaccagaaagactcaggtagtgggggaagaggacaaaagacactcagaaagatggcagtgctagatttgaaggtgactgatgccaaaaggtaacggaagctatgattgaacaaaagctaaaaagtaacaagaagttgagtggagagcacttggttttaatactatcaatagtatagggaataagtaagctaccatcataataggctaggaaacaatgtttccaagagggtagcaagacagccaagtgcatatagaagcattgaatcctgtgatctaactcctgaactacattctgtctctgtgagaactggcagtttggcaattgagatttttgtctttcctaatttcccaggtatccttaccatgaacatctattgctaattatttctttatgttggatgcctaaaagagaaattcttcagacatattatatgagtttaattttcttgggttcttgacacatattgctacattacttttcaaaa

SEQ ID NO: 252187 - DNA, 560 bp, Homo sapiens
cagaaacttttcttggcaccacgggtaagcaggggctatgggtcatgggactcattgccaatgggaaccatacatcaccagaaagactcaggtagtgggggaagaggacaaaagacacwcagaaagatggcagtgctagatttgaaggtgactgatgccaaaaggtaacggaagctatgattgaacaaaagctaaaaagtaacaagaagttgagtggagagcacttggttttaatactatcaatagtatagggaataagtaagctaccatcataataggctaggaaacaatgtttccaagagggtagcaagacagccaagtgcatatagaagcattgaatcctgtgatctaactcctgaactacattctgtctctgtgagaactggcagtttggcaattgagatttttgtctttcctaatttcccaggtatccttaccatgaacatctattgctaattatttctttatgttggatgcctaaaagagaaattcttcagacatattatatgagtttaattttcttgggttcttgacacatattgctacattacttttcaaaa

SEQ ID NO: 252188 - DNA, 560 bp, Homo sapiens
cagaaacttttcttggcaccacgggtaagcaggggctatgggtcatgggactcattgccaatgggaaccatacatcaccagaaagactcaggtagtgggggaagaggacaaaagacactcagaaagatggcagtgctagatttgaaggtgactgatgccaaaaggtaacggaagctatgattgaacaaaagctaaaaagtaacaagaagytgagtggagagcacttggttttaatactatcaatagtatagggaataagtaagctaccatcataataggctaggaaacaatgtttccaagagggtagcaagacagccaagtgcatatagaagcattgaatcctgtgatctaactcctgaactacattctgtctctgtgagaactggcagtttggcaattgagatttttgtctttcctaatttcccaggtatccttaccatgaacatctattgctaattatttctttatgttggatgcctaaaagagaaattcttcagacatattatatgagtttaattttcttgggttcttgacacatattgctacattacttttcaaaa

SEQ ID NO: 252189 - DNA, 603 bp, Homo sapiens
aggcagaggaagtccctctcccccatagtatcctggaataaggggagccagtgtgatttaattcaggcccttccaaaatcttgctaagcaaaarcaactgtccctaagtgttcaggaaacatcaacccatccttcccctaacatgttcttcttctggataaaaacattttcagagtatcacatgctcctgaaaatgtacttccttgtatgcgaaacctgctaacagtccccttgagaagtgtttgaatgtgtaatgagtgcccaggctcctggtgtcagatctgtgatggagaggattctctccccaaggcagcattcactccaagaacttccaccaggtgactctggggagcagttggtgttaactccaggctgctgtggtcaggaaatcactttgcataagaactcaatcctctttttcctcaaggcccctattctgtaatataaaattgggtctcttttaggctggtcagaatctgctttccttccccttccatagaacctgcctctaagggattccaaatctatctttatgggctacaccattttgtgggggacacagatgtgtaattaagtcatgatgatacagtttgaaaagtacca

SEQ ID NO: 252190 - DNA, 550 bp, Homo sapiens
gttcaatatacacacggtccacaatactcaggcaggagcctcctgccgacagggcaaacaaactgtgggaaattaatactccacactatctgcaggccagctcagacatgtcatcctctcatttagctatagaacctgctcttctcygtttattgttttgaaagtttagggttcagattctaagaagatatgcctttaaaaattcttcagaacaggtccatgaaaaatctgagcagatcgtatcactgaggatcagggtcggcaaagataccatgtgcagtaaatgtcctgggtaggattcattcattcacttcttcactcattcattggttcgttcgtttatgtggcaaatactccccaagcccctgctgtatggcaggcatcattctcattctaggaacttgtgatctagtggtaaaattatttattacctggtgtaatgcctcatgacatagctgaatttctaccctgccctaattctgtttaagaaacaggatacctgtgattaaaaagttccctttgtaaccagaccaactgagactgattagtt

SEQ ID NO: 252191 - DNA, 456 bp, Homo sapiens
gagctttggaataccgaaagtttccattcttctctaagatgctttttgaagatgcaggcatatatatcatctttaaagaatgttttagtgtattacgcaggcaattctcaaaaatcttttatcataggagtttccttttcattttgcccaatatcacccaatgatccctttttaaaagttcagtctccttgttctttattccttccaaaaaagaaaaaaaaaaagaaagaaagaaagaaaaggaaagaaaaagggggaaaaaaagcagcaaacccaaawggaaggacttctatgacacttacgaaggaagagtaacattgccttttattttgttttcaactattttaagaagatcgagttttcaccttagctgttgtctacacatctagaattatgtttgataaaataagggtagattggattctgaaagaacggctagctgagaaggaaaggcag

SEQ ID NO: 252192 - DNA, 629 bp, Homo sapiens
ctgctgttaaagtgaggacattgattgggaaagtagaggatactgtaaattggatagagacatgtgagaagaccctgatgaagctgggggacactgagcatctaaactctgaggrgtcttctttgccagtggaagtggactcccaatccctagtagaagcagcctccccatctccagtggtagcagccttttcacctcagtctgagaagattgactctgaattgcctgaggaaactgtattggccttccttgaggcagctgccgtgcacaacaatgctgattctcttcaggagccaccaccattgttcctctgcttctagacctataactagactcaagtcccagcagcccctaaaggtgaggtgcaaaatgtgacccatgaagtacattatattccaaaataattacttgaacttcctaaaaatccaggaaacatgggaatggatactaagggagtgaaataatggtgaaaggaacataaagttagatcaggttgaatttattgatattaactaattaagcagaaattctgcatttactgttgcagctcaggcagttataaagtgttctaacagtcaggttagtgggttgaaacatggaccaaaaagtggcccagggtgagcaaattg

SEQ ID NO: 252193 - DNA, 629 bp, Homo sapiens
ctgctgttaaagtgaggacattgattgggaaagtagaggatactgtaaattggatagagacatgtgagaagaccctgatgaagctgggggacactgagcatctaaactctgaggggtcttctttgccagtggaagtggactcccaatccctagtagaagcagcctccccatctccagtggtagcagccttttcacctcagtctgagaagattgactctgaattgcctgaggaaactgtattggccttccttgaggcagctgccgtgcacaacaatgctgattctcttcaggagccaccaccattgttcctctgcttctagacctataactagactcaagtcccagcagcccctaaaggtgaggtgcaaartgtgacccatgaagtacattatattccaaaataattacttgaacttcctaaaaatccaggaaacatgggaatggatactaagggagtgaaataatggtgaaaggaacataaagttagatcaggttgaatttattgatattaactaattaagcagaaattctgcatttactgttgcagctcaggcagttataaagtgttctaacagtcaggttagtgggttgaaacatggaccaaaaagtggcccagggtgagcaaattg

SEQ ID NO: 252194 - DNA, 502 bp, Homo sapiens
  misc_feature (1)...(502): n = A,T,C or G
nnnnnnatgaaaactaatgcaaaactattttgaaggcagaatggaccagcctaggaaaatgatcagatcttcatgcagttaaaartgcaggaccatcgagaagtgagacctgaagatggtaataaactgctgggcgtgccagattctgcaggccagggtggtagagctgtgctccttctgcctatcccttatgccaagtaagaaaccctctgggttagattttgacaaactatttgaagtgctaaataaccacctttgaaggttattgattcctgattgggattcctaatagctaattaactgccctgaggggtaggggtagattcctgattaggatactttgaatgtttgctaactgctgataaacgtttgctaactactgctaaatgtttgctaactgctgctaagagttaatttatatacacactacagcatactgttcatagccaaatacagcatcactgttttcccaatctcccaagctagacatctcaaagtcatg

SEQ ID NO: 252195 - DNA, 583 bp, Homo sapiens
accaaacctgaaagcatcgccagtctctgtgttgggtccatttgagcaccttgatgccaactctttaagcctgggtgggaggcaagactacctagagtttctttactttttaagtatgtgcaatctgatgacctcytctctctcatcaggttcagctttgtctgaccagtacctaaggcaaatgttggcctcacaaacttttccaaacaccaagcatttaataagagtatcaactctggctcatgcaaaagtgaatgactagtagaaataatggggacagaaacagaggtgttcttgtcatccgatcatcccttttcctggaaaatttgaatattttccataaaattattatacagttattcactttaaagctgttctcaaatgtccatagaggctcagtcatgaacggatattcattgaggcttcacactgtctgggcatgtcaggaaccatccatgtaataaatagacatgagcacacatctatgaaaacttagctggttactcaagacagtgtgtccaagcataacctggaaattcgtcccatgaggactcagaagcaggaaagaaaatgtcactgttaa

SEQ ID NO: 252196 - DNA, 583 bp, Homo sapiens
accaaacctgaaagcatcgccagtctctgtgttgggtccatttgagcaccttgatgccaactctttaagcctgggtgggaggcaagactacctagagtttctttactttttaagtatgtgcaatctgatgacctcttctctctcatcaggttcagctttgtctgaccagtacctaaggcaaatgttggcctcacaaacttttccaaacaccaagcatttaataagagtatcaactctggctcatgcaaaagtgratgactagtagaaataatggggacagaaacagaggtgttcttgtcatccgatcatcccttttcctggaaaatttgaatattttccataaaattattatacagttattcactttaaagctgttctcaaatgtccatagaggctcagtcatgaacggatattcattgaggcttcacactgtctgggcatgtcaggaaccatccatgtaataaatagacatgagcacacatctatgaaaacttagctggttactcaagacagtgtgtccaagcataacctggaaattcgtcccatgaggactcagaagcaggaaagaaaatgtcactgttaa

SEQ ID NO: 252197 - DNA, 583 bp, Homo sapiens
accaaacctgaaagcatcgccagtctctgtgttgggtccatttgagcaccttgatgccaactctttaagcctgggtgggaggcaagactacctagagtttctttactttttaagtatgtgcaatctgatgacctcttctctctcatcaggttcagctttgtctgaccagtacctaaggcaaatgttggcctcacaaacttttccaaacaccaagcatttaataagagtatcaactctggctcatgcaaaagtgartgactagtagaaataatggggacagaaacagaggtgttcttgtcatccgatcatcccttttcctggaaaatttgaatattttccataaaattattatacagttattcactttaaagctgttctcaaatgtccatagaggctcagtcatgaacggatattcattgaggcttcacactgtctgggcatgtcaggaaccatccatgtaataaatagacatgagcacacatctatgaaaacttagctggttactcaagacagtgtgtccaagcataacctggaaattcgtcccatgaggactcagaagcaggaaagaaaatgtcactgttaa

SEQ ID NO: 252198 - DNA, 573 bp, Homo sapiens
tacatccctagtgactcacatattacacatagcacatgcatgaggtatttttgttaaatattacataaacaaactaattacaaatcaaagaaactgttcaaacccttccgctgaatcaaacttcaactctttttcggcacaacccgagttgagtcaytggctacaatgtgaatatcttttttagttaagacaaatttttctcactataattaaagttcttatgaaaggatatgacttccagcaaacaaaatttcagaatttatggaactcttagtaaactagggatccaacaacataatcttcaaagggccactcacatggttctagtagcaggaaagtagcaaataaaactcatctctaatcttctacccttaatttacttacatctacaaggatgagaagccaggttctaaagtactaccaagagttaactttatatcacagtagtcattttacagctcgtcactgtgttccacaaaaatgttttccaaaaaaattatgttgataatgtaagcctaagttatattcaagtcccacaaaacagcttctgccggtaatgaaacacacacattt

SEQ ID NO: 252199 - DNA, 580 bp, Homo sapiens
ttaatataattttattctattttttcaataattaaagccctttatggcatgtgttttctatttttttcctgttatattttaaagtacatatcagagatttgcaattgatttgctctttccaccaatatttacaggtgctttttatgtagtttgcagtgttctagggatacagcagtggacaaaacaatatagtgcataatttcatgtaactttaattttagcagggggagaagagcaagaaacaagtaccaaagakctcatatgtcatgtggtgatagatgctctgaagaaaaataagaacaaggaataaaggttgagcgtgctgttttacataggcatttacagagggcatcccaggaagagtgacatttgaatagagacccagaggacagagggggcacaatagctaatatctggaatgtgtcgcaggtagaggaaatgataatgtaaggtcctgggtgggaagagcctggggcatccaaggtctggcaagagaccaaggtggatcgagtggagtggcaggagctgggactagagagaaggactccagcagtggaattggagcatctggcttcatttt

SEQ ID NO: 252200 - DNA, 580 bp, Homo sapiens
ttaatataattttattctattttttcaataattaaagccctttatggcatgtgttttctatttttttcctgttatattttaaagtacatatcagagatttgcaattgatttgctctttccaccaatatttacaggtgctttttatgtagtttgcagtgttctagggatacagcagtggacaaaacaatatagtgcataatttcatgtaactttaattttagcagggggagaagagcaagaaacaagtaccaaagagctcatatgtcatgtggtgatagatgctctgaagaaaaataagaacaaggaataaaggttgagcgtgctgttttacataggcatttacagagggcatcccaggaagagtgacatttgaatagagacccagaggacagagggggcacaatagctaatatctggaatgtgtcgcaggtagaggaaatgataatgtaaggtcctgggtgggaagagcctggggcatccaaggtctggcaagagaccaaggtggatcgagtggagtggcaggagctgggactagagagaaggactccagcwgtggaattggagcatctggcttcatttt

SEQ ID NO: 252201 - DNA, 569 bp, Homo sapiens
cttaaaataagtcttactggtttttccatcagaggcccatgcctgatctaatctgttacttaacaactgaccaccttctcattgttttactttgttttaatccaaggatcttttctttggcagcattctgctttccttaaaacaaagatttttagtttatggttggacagttttgccaaccaattatccttgataaggttcactaaacttttagctttttgaaaggaagatctgtgatcaatttatatatttatcccttataatgatagctaatattaaaagcttactgtgtagcasgcattgtgtttagggaattatatttactggcttatttaatccttataacatctgtgtgtgtctatgagggagacactgttagctcattttacacatgagaacactgaggcacaagcaggttgagtaacttccttgaggtcacagtcctcacaacagaaggcgaggatttgaacccaggcatcatggctccagagttcatgctcacaactgctacactgttcctagcatagtcagtacctagtaggttttaaataaactcttaattccagcag

SEQ ID NO: 252202 - DNA, 566 bp, Homo sapiens
ttaatacttctttaaaaatcaattttaagttgtcacattagtctttggtctctgcaactggagtttggggccaaaccattatttattttttgataagaattttaaatccagaaaaatgccacctgacggacaactgccttggtggtctaggtaaaacagggagttggtggccagggctgggcctcattgcagaatgggagaatttgctgggtgttggtaaacccaaaggtagtgatgtgcttgtaataatagaaacattacagcttaccaagctttattgcatgcattaatttggtcctaatatctgcccttattagaatttgactgagagtgataatcttggtacataagaagaaatagtttttttatgaacaagttaagggaaagtaaaagaaaggtcaaatatatttctctttaagtctgactttaatgtgtttccatttaraaataaactatgtgttagcatttttgcccttttgtcatatggcaagagtaacagggtggctatctatgattgagggtgaaaagatgactttatctttgaatcaccttgccatattacccat

SEQ ID NO: 252203 - DNA, 603 bp, Homo sapiens
ctgtttctgtcattttcagaggctcctggtgcccagactagctaaatggttaggctgttcaggattttactggtttccgtgtctgaggaaatgattaaaataatgtggcaaagtagtgacggccactgttatggaaatgcccactggtgtggacaggttcccctctggtggactgctggggtggcacagcttgtccttctggcatcctatttcctcctttgttaaaataccagcattgacgtgtttgctatcttattctcaaaagaaaccaagaaacccataataattagatagcggtttgttggggkaaagattttgggatgtagcatttcctgtcttgggaaaaatgaaaaattatccttttacttcagagacttcttaggaaatccctggttattgtggctctgggaaaacatgcctcattatgtttcctatcttgctttttctagatatagttttgtggttagtataatgagtagtagtggtaattatacttattccgggttcattggcacctgaagcttcagtctactctgggattctgaatcagtgtgttccccaggatgcttattgatcagttaattggctattaatggattccct

SEQ ID NO: 252204 - DNA, 645 bp, Homo sapiens
gtctggcatcagtggaatggggaagcctatccttccaatgaaagtagagagtgggaagggtgtatttgctaaacaataatttgatctaccattttttttctcatctctggaagggtttamgagtggactcttctgtatgttgcctataaaggcatctggacttgatatttcctttgttgggggacttttaattgatccaaatttttaatggttataggactattctgatttttaaattttttcttaatcaatttggtattttatgacttcatggaaatttgattatttaagtttgaaaattatctgtttttgcattctatgtggcatcttcagttttaagtctttcttcgttcttaatattgtttagttttgtcttctctctctcactttgttagtttttccagaggtttgtctacttcattaatttgaagtggcttctgaatttcatgtcatgcttagaaaggtattttgccatcttcaattctaccaatactgtctcatattttcttctcatatctttaggggttaatatttagtgtttaacctgtttggaactcatttttcaaaggagtaaaggagcggttcatcttcttcctctttttccagagatagccagttattccagcagtattactgggcaacttt

SEQ ID NO: 252205 - DNA, 564 bp, Homo sapiens
gaaaataaatcagtatgaaaaatcttcacttaatagaacacaagtaaatattcacatacttttttgattgaaaaatatgacttatccagttcaaataaaagttgtaccaaactgttcaaaaccagatataataccagagaagataactccatgtttttgtgtttgcttttttgagacaaggtcttactctgttgcccatgctggagtacagtggtgtgatcacaactcattgcagcctcgacctccggggctcgagtgatcctcctgcctcagcctcctaagtagctggcactacaggcacacaccatcatgcctgcctattttttctattttttgtagagacagaggtttgccatgttgcccaggttggtctcgaactcctggactcaagcgatcctgcctcgsccgctcaaattgctgggattacaggtgtgagcccccacaactggccaacaacagcattttaggccttttaaaataagtatttatttcaagggtgagagtttcccactattcccactatcatgtttctacggcattttattgaaacttctgaaggtccaa

SEQ ID NO: 252206 - DNA, 504 bp, Homo sapiens
catcactttgtgatttttacaagccttataatttttcctaaaatactgacttcctgctgagatgcttcaaatgtagatataccacatttcygttttcctttacccatctgctaattataacgatcaaactataagttatatctaaataattagaagcaaagtctgtacattaagaatgtagaacctgaagaaggaagaaatgagtaagtgaataaatgatgaattgttttgtgtctatgtggatttttttgtgtctatgtggacttttttctaagtgaactctgaacagctattttttataacagggatgagggagaaaaccagggcagactatccatgtagcaataattgaaatagctaatatttactacattccaccctcttttctaaatattttatacacattcacatgcttaatcctcacaaggaccagaggcagatgctatcgttattcccattgtgcagatgagtaaactgaggcatttagaggttaggtaatttatc

SEQ ID NO: 252207 - DNA, 504 bp, Homo sapiens
catcactttgtgatttttacaagccttataatttttcctaaaatactgacttcctgctgagatgcttcaaatgtagatataccacatttctgttttcctttacccatctgctaattataacgatcaaactataagttwtatctaaataattagaagcaaagtctgtacattaagaatgtagaacctgaagaaggaagaaatgagtaagtgaataaatgatgaattgttttgtgtctatgtggatttttttgtgtctatgtggacttttttctaagtgaactctgaacagctattttttataacagggatgagggagaaaaccagggcagactatccatgtagcaataattgaaatagctaatatttactacattccaccctcttttctaaatattttatacacattcacatgcttaatcctcacaaggaccagaggcagatgctatcgttattcccattgtgcagatgagtaaactgaggcatttagaggttaggtaatttatc

SEQ ID NO: 252208 - DNA, 504 bp, Homo sapiens
catcactttgtgatttttacaagccttataatttttcctaaaatactgacttcctgctgagatgcttcaaatgtagatataccacatttctgttttcctttacccatctgctaattataacgatcaaactataagttatatctaaataattagaagcaaagtctrtacattaagaatgtagaacctgaagaaggaagaaatgagtaagtgaataaatgatgaattgttttgtgtctatgtggatttttttgtgtctatgtggacttttttctaagtgaactctgaacagctattttttataacagggatgagggagaaaaccagggcagactatccatgtagcaataattgaaatagctaatatttactacattccaccctcttttctaaatattttatacacattcacatgcttaatcctcacaaggaccagaggcagatgctatcgttattcccattgtgcagatgagtaaactgaggcatttagaggttaggtaatttatc

SEQ ID NO: 252209 - DNA, 576 bp, Homo sapiens
ccaccactatgaaatttccaaaaaaaaaattgaaaggacaagttacrttacagtttccaatgctcaattgccttctagactgttctaattcagagcatagaatccactgtgtgcacctgtccagatccccacattcaagtctgcttcgatagcctgctcattggaacacttccacatcactgtccctctggggcctcatctgcttacactgctggctgtctcagccctctcaggtgtcagctgggctccagcacagccctcacttcctagtaacgaagggacctgcagcagcccaggtgtccagacctacattgaagggacgcatgggggctgtggttcttcccgtcatgtccataatcagatgaagttctgtagaaagcctgagacagaacttcccgagcagctaatgacacaactcagaagtatggggtgtgatgcctcattgttcagcagtgagagacagaagaaagaggttgacaaatccagtttctcaaaaaaaaacatttaatagtgtaaactaaaaataaaattctacacccccccccaacagaatgaatggaccgtttcttggccaag

SEQ ID NO: 252210 - DNA, 504 bp, Homo sapiens
gtatcatttatttgtcaatatcatggaattagatatctacatatattttccagacattcaaatgttacactgtgaaatttaaaaaaaaaataactttgtctaactataaaattataaatgtgatgcaggtggtattatgtagcaactgggtcttaaaaattaatcaaacagtctaaagttaaatagctacaaaatttctgttcaatcttaagtctttcaggatagagaagagaagttgactaaataaaataatttttaaaaacacatccaaaagcaatggacatatgactaaaattggcacctctaagcagattaatttcaaatcttcctygccatatgttccatcttaatgtggagcatacatacgtgtataacctgttgccagctcaaattcagtgaggagtctgtctttcagaggtgatgtctttacttcagcaaaaggagtttaattttctcaatcaaaatcagttttgttttctcagttactaaggcttaaaaatatac

SEQ ID NO: 252211 - DNA, 626 bp, Homo sapiens
tggctgtaactactcaatttctttctcaaatgtatcctcttatacctacatattaaatacttcaagagcaggtatttctttctcctctatatgctttctctcagcaatttattaaggccaaaggcttcaattactatctccatgtattgactcccaaatttacaccttcaggatagatatctttttgctttaaattaacatatcctttttttcttctatatatctccacttaacctgtcccaaagtcatcctttaactctaaataaataaacaacaaaaagcaaaagctgaacttaccatcttgtcctctttcgggattcactagcttagtaattggcaccaccatccctccaatttcacaagccaggaacctaagagtctcttttcacccaccccttgtactttctttcagctctcataccgaatcttttccccaactctattaactatgcctcctaaatgtattccaaatccatttatctctccatttccaatgccatcaccctagtcaaagtaatatagtgatgtaaaagtaactgcagttttygccattaatagtacggcagaaacggcaatcacttttgcaccaacttaatactattttccaccctgccaattgacaaccc

SEQ ID NO: 252212 - DNA, 572 bp, Homo sapiens
tcttttttgcagacatagattttcatttctcttgggcaaataagagtggaattgctgggttctasagcaggtgtatgtttaattttataacaactgctaagccgttttccaaagtacttgtagcattttacattcgaaaagcaatatacgacagtttcaggtgtcccgtgtcctgtcactgttttgcaggactgcagcacagtgagaccatgcaactttgtgtcttgaagaccaaccccaagatttctgaattcagaaaacaatgaaaataagagacttttaaatatgaaatcgcaaggtaatataaaatccttccctttacaggcctgaccccaatatttgatcactcagtaaaatactcatgtaagaggattatttggggaagtgcattttctttgcattgaagctttgtcatatgtaaagccttcataccagctcagaggttcaaagcaggtttctcttcctcaaagcaaagattatctttggtttggaagtttgcttttttacctatgctgacctagcctcagcaactgcaccaggtgaaatgttctccatctattgcttacctacaa

SEQ ID NO: 252213 - DNA, 572 bp, Homo sapiens
tcttttttgcagacatagattttcatttctcttgggcaaataagagtggaattgctgggttctagagcaggtgtatgtttaattttataacaactgctaagccgttttccaaagtacttgtagcattttacattcgaaaagcaatatacgacagtttcaggtgtcccgtgtcctgtcactgttttgcaggactgcagcacagtgagaccatgcaactttgtgtcttgaagaccaaccccaagatttctgaattcagaaaacaatgaaaataagagacttttaaatatgaaatcgcaaggtaatataaaatccttccctttacaggcctgaccccaatatttgatcactcagtaaaatactcatgtaagaggattatttggggaagtgcattttctttgcattgaagctttgtcatatgtaaagccttcataccagctcagaggttcaaagcaggtttctcttcctcaaagcaaagattatctttggtttggaagyttgcttttttacctatgctgacctagcctcagcaactgcaccaggtgaaatgttctccatctattgcttacctacaa

SEQ ID NO: 252214 - DNA, 572 bp, Homo sapiens
tcttttttgcagacatagattttcatttctcttgggcaaataagagtggaattgctgggttctagagcaggtgtatgtttaattttataacaactgctaagccgttttccaaagtacttgtagcattttacattcgaaaagcaatatacgacagtttcaggtgtcccgtgtcctgtcactgttttgcaggactgcagcacagtgagaccatgcaactttgtgtcttgaagaccaaccccaagatttctgaattcagaaaacaatgaaaataagagacttttaaatatgaaatcgcaaggtaatataaaatccttccctttacaggcctgaccccaatatttgatcactcagtaaaatactcatgtaagaggattatttggggaagtgcattttctttgcattgaagctttgtcatatgtaaagccttcataccagctcagaggttcaaagcaggtttctcttcctcaaagcaaagattatctttggtttggaagtttgcttttttacctatgctgacctagcctcagcaactgcacsaggtgaaatgttctccatctattgcttacctacaa

SEQ ID NO: 252215 - DNA, 595 bp, Homo sapiens
gtgaggctacgatttcaggtctgactgagtcccaagtatatattatttctactacatccctctgccaagtattgaaagctatctaggaaaaagcaattaagttaataacgacatttgtttttccttttctaagacagaaaagccattatttactcttgtaagaacyggattctgaaatattaagaaacaggtggagtaattatagaaacatcttcacatagagttacaaggccctccccacaggtcccatttacatcacacatcttcacctcctccttagttcatatttctggtccaactcatattttaaaaatctgaatatcactatttcttatagatcttctcccacttttattttatcaatgttcttttatgtctctaacctgttgtgactaggtcaaaccttctcccttctaccaaagcaaaatttgtaaaatctaaattattgaccttaaaaaggaaggaaagaaagtgatagtgttagaaagttttttcaaagagataattccagtgaaacttcccaaatgtagagaagtatatcaacattcaaatacaagaaggtaatagaaccaagcagattgaatgcaaagaagat

SEQ ID NO: 252216 - DNA, 465 bp, Homo sapiens
aatccagtagagaaactacagagtcacaggggtcatgtacaacaatgattcacggaatcacagtcgataaccttaagcaggtgacaagcagacattcagagcaagacaagcatcagaactcctgttttcccggtagtcccatccatggataagcttggacagattggtacatggtgattttttcttttttwttttttgagacagagtcttgctctgtcacccagactggagtgcagtggtgtgatcgtggctcactgcaacctccacctcccgggttcaagcaattctcctgcctcagcctcctgagtagctgggattacaggcacatgtcaccatgcctggctaatttttgtgcttttagtagagacggggagtacgtggtgattttttgctggtatggcaggcaggaagcttttttagtcaaaagaaggtcaggaatagtatccccaaaacagccagatgccc

SEQ ID NO: 252217 - DNA, 465 bp, Homo sapiens
aatccagtagagaaactacagagtcacaggggtcatgtacaacaatgattcacggaatcacagtcgataaccttaagcaggtgacaagcagacattcagagcaagacaagcatcagaactcctgttttcccggtagtcccatccatggataagcttggacagattggtacatggtgattttttctttttttttttttgagacagagtcttgctctgtcacccagactggagtgcagtggtgtgatcgtggctcactgcaacctccacctcccgggttcaagcaattctcctgcctcagcctcctgagtagctgggattacaggcacatgtcaccatgcctggctaatttttgtgyttttagtagagacggggagtacgtggtgattttttgctggtatggcaggcaggaagcttttttagtcaaaagaaggtcaggaatagtatccccaaaacagccagatgccc

SEQ ID NO: 252218 - DNA, 514 bp, Homo sapiens
atagcctcaaaatataaaaatcaaaactgacagactgaaaaggaaacaatgataaatctacaactacacatttctttcagaaatgtatcaagaagacaaaaacctaatagaagattttaaccaaaaaatttaacaaacttgatttgtagacatatatagaagtctgcactcaataattagagaatactccttctcaaacaaacatgaaacatttagcaaaagttagtcatgtrctaggtcacaaaaccagtctcaataaacagaaagcatcagtaacaatcataccacatttttggacacactgcagtaaaattcaatgatttgtaaccaaagtatttgaactaattagagaattcagtaatgagatatggacttggtggtttatttgggaagttatcccaggaaacagagcaaaggggcaaacagagtgaggcaaggaaggaagcaaggcaaatacaggatgttttattgtgtttgttacctctttgagcaactgtgatactatcctgctttg

SEQ ID NO: 252219 - DNA, 624 bp, Homo sapiens
atttgggaagttatcccaggaaacagagcaaaggggcaaacagagtgaggcaaggaaggaagcaaggcaaatacaggatgttttattgtgtttgttacctctttgagcaactgtgatactatcctgctttgggatctccaaggaatagtatggactgtgcctcataacttttcatgaagagaacaagagcctggaaaatttatcccttgactctgctgctcattagttcagggttgctcctggtattactcctccacagttgtagtctgtgcctgtgcagccaaggaacttccaggtcttcagggaaaaccctgatgtagaagagcagagattcactgaaaattgcttgaaggggacctggcagcattcatgcaactgtcccctacaggttccctaaaatccagtggcttgagggaatttagcatctgctacaaatygcatccttgaaaaattaaaacaaaatgattgtatgcattatttaagatacataaatatgtgtaaaagtgtcaaaaatattcaagggaataatacaaactacttcaaaatcatagttttggggtggatgtaagaatgagtgtgacttcaactgtaggtataattaatttctatagagaaaaaatgaag

SEQ ID NO: 252220 - DNA, 599 bp, Homo sapiens
gagtgtgacttcaactgtaggtataattaatttctatagagaaaaaatgaagaatctaaaggaaatatcacaaaatgttagtatttattaatttaatagatatgggtatctagttattaytttctgtatttttttatatattccacaattaaatattgttttgaaagaataagttctggtgctttcaatagaaagattttgcttgataatacatgccataattactgaaccttcattaaataaagaagctgaactagcaaagctcagttttgtctaggtaggccctggcctcctccagaagcaaaattaaatgttatgttgttttctgtttctttaggggaagtgtccctttaaggatctgaactttgagcacatgagtcaagctcaaacaacagttttcagtcacaagctgtctcagcaggtcatggtggcctccatctttcagtttgtggttatcacttaaattatcctggaagagtattcttagcaatctttcaaattcctttccaagtccctgtcagtttaggttcaccatttttatggtctaattggttaattatcataaaatgatacacagtgtacatgcgatcatgctttat

SEQ ID NO: 252221 - DNA, 487 bp, Homo sapiens
tgtgctgtctaaatgcttgtctacactagtcagaaacaaactatttggcactgccaaagtgcttgaccctgaaggttgcattggagcatctatagactcagagctagtaattttgcaaacagcaaatttccccacttcttaatttagaaagaatgcatcgtggtctatcagcytaaaaaagtagattgaagagggaaaaaatgcaacctggaatgacagggttcagatctggtatcaaactccagctctttcatttaccttctgtgtgaccttgggtaagtttcttaaagcctttgacactcaatttccacaagtctaaaaggaaaataatattaatattaaccaagtcacaaggactttgcacgttaaacaggataatgatttgaaaatccttttgtaaactaagtgctctacatgtaatagtttcattaaaaggtaatagttttaaaagaatagataaatcctaatgatacccccattgaatttt

SEQ ID NO: 252222 - DNA, 487 bp, Homo sapiens
tgtgctgtctaaatgcttgtctacactagtcagaaacaaactatttggcactgccaaagtgcttgaccctgaaggttgcattggagcatctatagactcagagctagtaattttgcaaacagcaaatttccccacttcttaatttagaaagaatgcatcgtggtctatcagcttaaaaaagtagattgaagagggaaaaaatgcaacytggaatgacagggttcagatctggtatcaaactccagctctttcatttaccttctgtgtgaccttgggtaagtttcttaaagcctttgacactcaatttccacaagtctaaaaggaaaataatattaatattaaccaagtcacaaggactttgcacgttaaacaggataatgatttgaaaatccttttgtaaactaagtgctctacatgtaatagtttcattaaaaggtaatagttttaaaagaatagataaatcctaatgatacccccattgaatttt

SEQ ID NO: 252223 - DNA, 437 bp, Homo sapiens
taaataagtgttaatccccacatgattggattttggtatccgacttcctgtacaagacagaatrctacaaaaacccacagtcagggaagaactgagccatttgctgttttcctaggctagctgtgtgactgagccggtcaggccttgggaggctgaggctatggagttccatccatcaaccttggaagagctgtcttggaggcaggcaggtccagagccccacatgccatgggacctgaatcgagagcaagcctgggcctgggcactggataacttccctgtgctgagccgccactcctgccaatgccatcagctctgcgggagctctgctgcgagctggctgctggacggcacccacacggggcacagagcccttcccggaaatgagaggggccaaaaacgccctcgagattcccatgtccaggagtcaatggtga

SEQ ID NO: 252224 - DNA, 620 bp, Homo sapiens
tctaaaacaatccccccatcccagtctgtggaaaatttgtcttccacgaaaccagtccctggtaccaaaaaggttgggcatcactgctctagagggccttgcatgtctgtgatttctttctcaggatgattaaactccttaagaacaagcctggctgagcctgctagagaatgagagaccaagtggcaaagtgacaagagtgataccaactaagtctccagagactgagagcccggcccagatgagtaaaactagctaagccacttacctgaacaatggctaaccgccaatgcattaagaacccagccaagacgagaaaacttgcctacctgatcccagtttawactgctgaccttaaatagcatgagctaaataaatggctgtttcaaagcactgcattttagaatggtctattgtatcacaaaagcttgctgatataggaactaacattgttcattggttcattctttcttttattcaacaaatatttatttctggcctactcaaagccaacccaggtttgacacatttatcctaatcttcagaggtttgttctcattttataaagatgaaatggaagggcagagagataaattgacttgctgaggaccacacaacta

SEQ ID NO: 252225 - DNA, 665 bp, Homo sapiens
gagttagtgcaatgattttggaaattaatttggaaatatctgtcatattcttaaacactttaaataagaaataattgttcawttttgaggtgatgatggtattgtggccatattttgaaagagtcgtctcttggagatacatatggatggtaatattaacagatgaaataacataatgtcagagagttgctttgagatcaattcaaaagtggtgagactagggcagtggatagagatacagatgatataagactgttcatgagttgatttttgaagctatttgaagagtatatggaggcttattatactattcacaaaaatacccaagagatatggtcaagaatgtttaaccattacaaaaagtagaatatggcctctgtctgtctctctctcagtaagagactggttaaataaattacagcatattcaaaaatgaaactgaatgtagctgttaaaaagaatgaggtaggccaggtgcggtagctcacgcctgtaatcccaacactttgggaggccaaggcaggtagattgcctgagctcaggattttgagaccagcctgggcaacatggtgaaaccctgtctctgctaaaacacaaaaaattagccgggtgtggtggcgtgcccctgtaatcccagctactcaggaggctgaagcaggagaact

SEQ ID NO: 252226 - DNA, 599 bp, Homo sapiens
gagccaagtgtgtaataattcacttaggaaggaggggcaaactacacatgatcaaatttattcaacaacaaagaatgatatatggacattttattttctgcatttgatgccagacagataaataatttatttgccagttaaagatagtaataatattagtattgagaatcaagtactgcaggaaactctttacatgtataattgcttttaatatttgcaactattgtatgaaatacatattaatattcatatttttggttaatcttagagcccayatttgagctcaaaatgattattgatttactaaattatacagtataagaaatagcttaatattctgacctctggtttttaggaagaatttaataggccagcattttcaacttacacagtaaagtccaacaacaacaacaacaacaaacagtgtggattaaattttgcaaagagaattaaaagccattgttcaaaattagtgaatggtattctcgtgaagaatttatctatgctccattgtagaaaaatgtggtgagagagccaccttgtgtttaagttttgaaaatacacatttttgaaacattcagttgcagggttctgttctc

SEQ ID NO: 252227 - DNA, 334 bp, Homo sapiens
gctatatattatgatgttctttgattattcttacacaggtgaaaatgaacaactaaaaataagtgctgatcttataaaagagaagttaaagtctcatgaacaggtgagtttatgtatcattctattcagtcaagtccctgtggagatttatcttttcaaattaggaaaaaaaaaagaggtttttaaattaataaacacagccaaatgtttgtgggkgtgtgtgtgtgtggagatatacgtatatatgccaaaatctttagtaaatgacaatttgttttcaaagcaatactagttttaagagtttttttttttacaaaatataatgtactaacaa

SEQ ID NO: 252228 - DNA, 535 bp, Homo sapiens
gctcttgttattttgaggtacgttccttcaatgcctattttttagggtttttattataaagggtgttggattttaccaaatgctttttctgcatatactgaaatgataatatrgtttttgtttttgattctgtttgtgtagcgaatcacatttattgacttgcatatatcgaaccatccttgcatccctgaaataaggccgtttgatcctgatgaattatctttttgaggtgttactggattctgttttgttggggatttttgaatctatgtttatcagggatattggcctgttgttttattttttactgggtccttgccagattttggtatcagcatgatactggtttcatagcatgagttagagaggcctccctcctcctcaattttttggaatagtttcagtaatattggtaccaactcttctttgtacctctggtagaatttggctggcctgtaaatactctagtcctgggattttgttgttgttgttgttgttggtatattttttattatttattcaattttataacaca

SEQ ID NO: 252229 - DNA, 535 bp, Homo sapiens
gctcttgttattttgaggtacgttccttcaatgcctattttttagggtttttattataaagggtgttggattttaccaaatgctttttctgcatatactgaaatgataatatagtttttgtttttgattctgtttgtgtagcgaatcacatttattgacttgcatatatcgaaccatccttgcatccctgaaataaggccgtttgatcctgatgaattatctttttgaggtgttactggattctgttttgttggggatttttgaatctatgtttatcagggatattggcctgttgttttattttttactgggtccttgccagattttggtatcagcatgatactggtttcatagcatgagttagagaggcctccctcctcctcaattttttggaatagtttcagtaatattggtaccaactcttctttgtacmtctggtagaatttggctggcctgtaaatactctagtcctgggattttgttgttgttgttgttgttggtatattttttattatttattcaattttataacaca

SEQ ID NO: 252230 - DNA, 555 bp, Homo sapiens
aacgtaaaaatatttttacctatatttaagttaaactagattctaaaccctgtctgcactatagaatcacgtgatgttttgagaaaaagatgacgctagctgcacaccagaatctctaaagtagtgcccaggcatttggtactttagaaacaaagaaaaaaaaaacctctccaggtaattttrccgtgcaatcagggttaatcttgtttttctgttctttgctctttctgaaaaattatttcttaaagaaagatttttctattgtctatactgtaatttacacctgaattacagattacatgtcaaaggataacatggattataattatagaaacaattgtttctaattgtctagagtttcaataactttcttttcaatttgattcagtttgatgccaaactagcaagagttcagactaaatcaaaatcatatcaggattctactgttttgccacaaagtatctacagaagggtatgtgagttttcctctcagtatttgttgcttaagaaaactttctaagcatgtttctataaaaatcatctaattcttattaa

SEQ ID NO: 252231 - DNA, 528 bp, Homo sapiens
ggctctgaaaatcacttgagcttgtcataactgctaaggcagcacaaatttgacacaacaagaaatcatcacataacaaaaacatctccaagccttggccagtagcccatttatttaaaaatgtatctaatgcaatgaaaatttcagcacaatgaaagtattagaacatgtggcattgtcagaaatggtggggttaaaatgttcttcttgcctacattttacctagtatayatggttttatgtgactatcaaagggttatacttttaggttatcctaaaaattagaagtttaaaggcctaaaagaatgaaatgtgaatttttaaaaatttagtgtaagaccaagtagggctcaccagactccggagagtcaaaaaaaacaaagcaccaactaagaatgtttataatggcataatgcatgaattgagattccctcaaaatataaatgttttatttgttcatagaatcaaaagtagatttgtgcagatcatgcttaaatgattaactcactttacagttcagaaattcag

SEQ ID NO: 252232 - DNA, 589 bp, Homo sapiens
tagactaaagcaattcccatgagggtggcatagtaaataatttccattaaaaaggttttaatatttggcttaaaaggagatgtagaaatgacaaaaagtatttggtgaggtaggggtgagactgaaatgagtaatttccacttagttacttatcttttttttttttttttttttgagatggagtcttgctctatcgctcaggctagagtgcagtggcgtgatctcagctcactgcaacctccgcttcccgggttcaagcaattctcctgtctcagcctcccgagtagttgggattataggtgtccatataggtgttctatttttagtagcaacggggttttaccttgttggtctcaggctggtctcaaactcctgacctcaggtgatccacccacctcagcctcccaaagtgctgggattacaggtgtgagccaccttgcccagccacttatcttttatgattttcaggttaagatttgttatttttttttacattgataggacctttctctrggctgttaggggttgctttctccactctttaggctttgagtgtaatgtatccaggagttgatttctgtaacacata

SEQ ID NO: 252233 - DNA, 514 bp, Homo sapiens
gacatttagtcatttggagccacatgkctgtcccagggcctggtccccaggtcatgtgcttaaagcttccaggcggttctcatcatgatgatgaagtacacatcagtgtcaatggatgcgctcacacctgcatagtagttcatgaactcctcaggggtcacctgcagtggaaaagttagaaacaaaaacgaaactttgcttctcactctgtcaatgggcgcccaccttgtgcacctgtaaatagaagggaaatagaggatttctttgtgtatgtgatcatggctgaggaactgatctaaaacaaaagaacaagtgaagctgaggatggtgtgagaacagcacctaggaagagagaaagaaagtcttgaaagtttctaagccaacctaaatggaaagtgacgcataggttgtcatcttttgtctaagggtgggagcccgtcggttcaggtaagggagactgaaactcagagtaagaaggaagtgctctgcaactgtagttatttctgtctttctg

SEQ ID NO: 252234 - DNA, 532 bp, Homo sapiens
actttgcttgtcataatgttactatgtttttccagtttctttttatcttttcttttggttgtgactttttaaaatttagtaaagaaattaccagcattstaaaactagcacggtagtgctacatatgctgataaagaaaaatgtctatgttattttgtcaaaagcttctagcaagataaaactctccaaaagtctccatctttctcttactccttccccctatcatttccatgaaaaatccgaaatgtgcagtgtatctatcagctattggctacattgatgctcaacaacaaatcatgccaaaactcagcggctttaagcaacatttattctcacaaattgtgttgaatgatctagattgggctctgctgggtgattctatgatattactaacagctaggatgactcagggatctgaaactgaaggaaagttagctgggttcagctggaaatgcctctgttccataagtttcccgtctttctccagagacaagcaggctaacccagctgcctctttttacagcaggggcat

SEQ ID NO: 252235 - DNA, 635 bp, Homo sapiens
atcagctattggctacattgatgctcaacaacaaatcatgccaaaactcagcggctttaagcaacatttattctcacaaattgtgttgaatgatctagattgggctctgctgggtgattctatgatattactaacagctaggatgactcagggatctgaaactgaaggaaagttagctgggttcagctggraatgcctctgttccataagtttcccgtctttctccagagacaagcaggctaacccagctgcctctttttacagcaggggcataagagggcaagcagaaaaatgcaaggctggcctacccatcaattccacttcattttattggcaaagaagatcacatgaccaaacccagaatcaaggagtgaagaaatatatttccccttgggtagaaacttaaaatcacatggtaaaataggtggataggagaaagagtgaagagtcaagccattaatgcaatatcttacagtcatacatgaggacagcttaggttacatttacagaaagacacaaatgtcacctccctatttgaggaagctcttcctatctcatccatattgcagcaagactacagccacatgctttccattactttgtgaaataagttttgtctatatgtgtattgagaa

SEQ ID NO: 252236 - DNA, 562 bp, Homo sapiens
agaactattaaaattgaagagagaacctatgatacatatacatactgaaataatattcagctttaaactacaataaacaaaagcagaataagctaatatggagcaaattccaatatggttaagtaaaaaatagcaaagagtaagagtaactataggatgtatcctctttttttatatagaaaaaggaaagtatgtgtatgggggataatgaaaaaaatacatatctatgtgcaattgcccttgcaaaaacagtgcagagggaataaaccagagtgtgatagattatctatgagggtggtgtttgaatagggtggaaggatccatgtgtttatgtttttacatagtttggattttggaaacgttaatattttgcataccaagtatatgtttaaataaacaaggagagaaaagccaagaactgaaatacaaacggaaacaaatgaaatccattttttccaaatgaaaatgtwactatactggagtgaaaaaaattagcctcattaccttttaaacacagtacttttactattattctggattccatccatccaaaggaaaaaaa

SEQ ID NO: 252237 - DNA, 554 bp, Homo sapiens
tctttttcttttcttttcttttctttttcttttcttttttttttttgagactgaggactgagttttgctcttgttgcccaggctggagtgcagtggtgcgatcttggctcactgcaacctccacctcctggattcaagcgattctcctgcctcagcctcccgagcagctgggattacaggcacccgcctaattttttgtatttttagtagagacagggtttcaccatgttggccaggctggcctcaaactcctgtcctcaggtgatccacctgcctcagcctcccaaagtgttagatttaagtcttttaatccattttgatttgatttttgtatatgatgagatatagaggtctagttttattcttctgcatatgcatatctagkttttttttagcaccattcattgaagagactgtctttatgttcttggcacccttgtcaaaaataagttcaccgcagatgtatggatttattgctgggttgtccattctgttctgttggtctatgtgccttgttttttatgccagtaccatacagttttggttactatagt

SEQ ID NO: 252238 - DNA, 549 bp, Homo sapiens
tagggatataggagccaacttaaatagctctcaagatcaaggctggaacaattaaaccaataaaactatgctggattataacccaaaatataaaaaagaaatccctacatccawactggttaaataaatgatagagtaaataaagatgaagaaaatgacaaatttctcttgcagaaaaattccaaataagttatggatatattctcccctcaaggagggaacatatactccccactctctaagtgtgggctctacaaagaggtttccttccaaaaagtacgatatggaaaagggaaaagggaagcaactttacaatggagaagtctgacaaatactacctcaatcaggtgatcagtgtcaacatcaacagtaataaatcatgttaatcatacatatccttggtataatgtgataaaaatggtgctttatgtctgtggtccctaaaaataataagcccagtttagtcatgaagaaaaaaatcagagaaattccaataggtgggcatcctacaaaatacttgacctctcacattcatcaaaaaccaggaaa

SEQ ID NO: 252239 - DNA, 543 bp, Homo sapiens
gatgtggacccatgatgaatgggatagaggtggaagtgacacaatattgagggcatgggtgctggtcttcccattggactggggcagcctggccaccagggtccatatccccactgcctggccttctgacagagctgggcttagtctgagacttgggactgttcagagttttctcccaggcactcagtaccttgctggaagtgaagccttccgcatcttctgggtccaaggctagatttccctcccattggcaccctgtacttctctaataaacaacttctcacaccactgagatgccatttagatcactcatattgtccatagtcttagtcctccatgggggcttaagaagccttgttcacccacgggtccctgagatgtgtccaatgcctggcccatggcaggctcttgatggagtttcttataatgcacaggacctgccctcaggaggctcacaatctcctttcccttttggtttctcagtccttamaactattcacactcagaggacagagggtgggagaacaggagctacccagctga

SEQ ID NO: 252240 - DNA, 341 bp, Homo sapiens
gttagcatttaaggtaaatcaatgtttttatctattctatgatttaatgtttttttttttcttggtatgtcttagctgagaaaagaagacagtagatgttactctctaaaaagaaaatctaaaagtcttttgagagttcttggactagagaagccatcactaggctgtcagtgcaagaggaaagagcttggtactgggaaagatttttgtaatctttgcaaaaaaaatgcttagataaaaatgyacaaaaataaatttcattcagtaaaggggaaggaagtaaacattactgagcagtcattaggtactaggtatttgagtgtgaagggtttgggtgaatt

SEQ ID NO: 252241 - DNA, 470 bp, Homo sapiens
agctatgtctgtaacctataagaattgttatcaagacttattttataccagacaaattttctgctctaaacaaactgactttgaaaawcttgcaaaacacaggccacccttttaggcagagaacatgggacagagtaagtgtgcagtaaatgtttcctattactgttgttcttatcttttgcatagtcccggaggtcagcaaagtgtttctatataaggccagagagtaggaaatttaggcttcatgggccagaaggtctatgatgcaactatttaacttttgagttgtaatgtgaaagccgccacagaccatatagaaatacacgtatgtggttgttttccagtaaaatgttatttacaaaaccaggtggagggccaaatttggtccatttggtgtggtctgatgtcccaggcctagattattttaggttatgtttgcctgcactgagggcatccttcataactgcccg

SEQ ID NO: 252242 - DNA, 470 bp, Homo sapiens
agctatgtctgtaacctataagaattgttatcaagacttattttataccagacaaattttctgctctaaacaaactgactttgaaaatcttgcaaaacacaggccacccttttaggcagagaacatgggacagagtaagtgtgcagtaaatgtttcctattactgttgttcttatcttttgcatagtcccggaggtcagcaaagtgtttctatataaggccagagagtaggaaatttaggyttcatgggccagaaggtctatgatgcaactatttaacttttgagttgtaatgtgaaagccgccacagaccatatagaaatacacgtatgtggttgttttccagtaaaatgttatttacaaaaccaggtggagggccaaatttggtccatttggtgtggtctgatgtcccaggcctagattattttaggttatgtttgcctgcactgagggcatccttcataactgcccg

SEQ ID NO: 252243 - DNA, 619 bp, Homo sapiens
ttaaacatccctgtctgacagcgctgaagagagcagtggttctctcagcatggcgttcgagctccaaaaatggatagactgcctcctcaagtggatgactgacccctgggtagcctgactgggaaatacctccaagtaggggccgacagacatctcaaacaggtgggtgcccctctgggatgaagcttccagaggaaggatcaggcagcaatatttgctgttctgcagactcctctggtgatatacccrggcaaacagggtctggagtggacctacaacaaactccaacagacctgcacctgaggggtctgactgttagaaggaaaactaaccaacagaaggaaaccaggtatttgaatttttagcacatttttctagtcgcttccaagatggctgagtaggaacagctctggtctgcagctcccagcatgatcgatgccgaagacgggtgatttctgtatttccaactgaggtacctggttcatctcactggtactggttgaacagtgggtgcagcccacagagggcgagctgaagcaggacatcaacatcaacaaaaaggatatccacaccaaaaccccatctgtaggtcaccaacatcaaagaccaaaggtagata

SEQ ID NO: 252244 - DNA, 619 bp, Homo sapiens
ttaaacatccctgtctgacagcgctgaagagagcagtggttctctcagcatggcgttcgagctccaaaaatggatagactgcctcctcaagtggatgactgacccctgggtagcctgactgggaaatacctccaagtaggggccgacagacatctcaaacaggtgggtgcccctctgggatgaagcttccagaggaaggatcaggcagcaatatttgctgttctgcagactcctctggtgatatacccgggcaaacagggtctggagtggacctacaacaaactccaacagacctgcacctgaggggtctgactgttagaaggaaaactaaccaacagaaggaaaccaggtatttgaatttttagcacatttttctagtcgcttccaagatggctgartaggaacagctctggtctgcagctcccagcatgatcgatgccgaagacgggtgatttctgtatttccaactgaggtacctggttcatctcactggtactggttgaacagtgggtgcagcccacagagggcgagctgaagcaggacatcaacatcaacaaaaaggatatccacaccaaaaccccatctgtaggtcaccaacatcaaagaccaaaggtagata

SEQ ID NO: 252245 - DNA, 619 bp, Homo sapiens
ttaaacatccctgtctgacagcgctgaagagagcagtggttctctcagcatggcgttcgagctccaaaaatggatagactgcctcctcaagtggatgactgacccctgggtagcctgactgggaaatacctccaagtaggggccgacagacatctcaaacaggtgggtgcccctctgggatgaagcttccagaggaaggatcaggcagcaatatttgctgttctgcagactcctctggtgatatacccgggcaaacagggtctggagtggacctacaacaaactccaacagacctgcacctgaggggtctgactgttagaaggaaaactaaccaacagaaggaaaccaggtatttgaatttttagcacatttttctagtcgcttccaagatggctgagtaggaacagctctggtctgcagctcccagcatgatcgatgccgaagaygggtgatttctgtatttccaactgaggtacctggttcatctcactggtactggttgaacagtgggtgcagcccacagagggcgagctgaagcaggacatcaacatcaacaaaaaggatatccacaccaaaaccccatctgtaggtcaccaacatcaaagaccaaaggtagata

SEQ ID NO: 252246 - DNA, 566 bp, Homo sapiens
catccacaccttactatgttcatttgcaatacagtaaactcttcaaatacagcaatttaagtccttttattccagttaacttggaaacttaattctttttgggatgacttaatttctcaaatgttttttctgtcatcctcagctgtttgccaacatgccttctggtaatatgatatggggtttacatgtctccatagtggtatcaggatacaaattctgtggaatccagtgattttctttgacctctgctgttggtgtgactagttatatagattatttgaactagtgattgctgtgctgggtcaatggatgcttgggcattgtgctgacatctactattgaaatatatggacaccaccttttgccatcgataagaaaataggtactcagagcattctctttatcccaatcctatattcttccgaaggtccactgtatctctttaggagggtttaagaaaactatttaaacmtctttagggtccccacaattggaagggagccagaggagagggcaaccttaggctatctctctaaccatttcctgctgccaaccctgtatgattc

SEQ ID NO: 252247 - DNA, 616 bp, Homo sapiens
aaatcattaggagtacaattttaattaatattgaaaagttatgtttgaaaaggtaatatttgttcacagaataaaattcaatggatatataggctataaggtaaaaaaataatactcccttccacttttctgtctccaaaacatctggctctttccttagggaaaacccttattaccactctctcccatatctccaggaatattctgtatatgtaatcaaacgtgtacataaatagttacacatacatacatactcccagacatttaacatttctgaaatcagggagatttttttcctggctataacgattatgcttgccatttttgcttgattttgtttttatgtggcataactggacaacttaactgaaatatattttaacggacaaaccakttttaagggttatttacaggctgcgcacggtggctcacacatgtaattccagcactttgggagggtgaggtgggtggatcacttgaggcaaggagttcgagaccagcctggccaacgtgatgaaacccccgtctttacaagtacaaaaattagctaggcatgttggcacatgcctgtaatcccagctactccagaggctgaggcaggataattgtttgaacc

SEQ ID NO: 252248 - DNA, 480 bp, Homo sapiens
tagtgcagatctgagcatgtggtgtatacttaatccatcttcattgacttgatgtggcttaccttatcttaacatgactgtctgcaagatggtgtgggtcggcctacaaagtgatttctctccagataataagattccctaaccccaatgtccttgacattcctttcaagctatccaatatactacctgtgaccctaatcttggtaaaagccaaaggagggtgtgaggatatttgagtcattctatgttctttctctttatatcttatttttttttcagtctatagggccatattatgtgacttattttttgctgcttgtattactgaaacttctcattatattcttagatagattaatggcttgctatttcctcactgttgtatgtttatagatgaatcaagcctcatggctctgcattgttttcttatatccartttggtaaagcaagtcacatggctggtcctaaaatcagaattgg

SEQ ID NO: 252249 - DNA, 603 bp, Homo sapiens
gattggcttttcttacttagtataattgccttgacatttatccaagttgttgtgtatatcaggaattattcaattttattgctaaatagcagttcatggtataaatgtacaacacttcgtttaatatcccctcattatggaacatctaggttgtttttagttttagctataataaataaagctgctatgaacattcatatatacatttttctgatgttttcattctctgggaaaaacagcatatagttagaaatgttattttaaatttaatatttttattattaaggaatagcatrtatactagaaagtatacaaaataaatatactcatgtaatcaccatccatgtcaagttactgcaaagataacacctatctcatctttgaacactctgagttagttttgcaaagttttgaatattcaagaattaaaacctgacattcttttgtcttatttcttcacaatatagttgtcatatttatccagtgatttcatatagttgcagctcatacaatattctatcatataaatatcacacagttttaaaattgacattgtacttgttaagttggggaaattacagaaaatgctgctataattattct

SEQ ID NO: 252250 - DNA, 597 bp, Homo sapiens
cttccttcatttctttcagaaatatcatatactcttattattagcaatatacactacataatagtgtataccaattaatatacaatgatatgtattattatgtatataatatgtagtatattgacatacatattattatagtcatgttttgcttaatgatggggatacattctgagaagtcaatcagatcagatcagatcagatcaatcaggtgatctcctgattgtctgaacaccacagagtatacctacacaaaccacatatattatatagtttaggatatatcatatagcataggtgtgtagtgggcaataccacttgtggtattgctcctaggctgcaatcttgtacagcatgttactrtgctgaatgatggaggcaattgtaacacactgataagtgtttgtgtatctaaacatatataaacatagaagagatacaattaacatatggcataaaagataaaaattggtatgcctatattggacacttaccatgaatgaagcttgcaagactggaagttgctctgggtgagccaggaagtgagtggtgagtgactgtgaagccccaggatgctactatagaattcagaaatgc

SEQ ID NO: 252251 - DNA, 574 bp, Homo sapiens
ttcaccactgtgagaaaataaatttctgttgtttaagccacccagtctgtagtattctattatgacagcctgctgtggtatgaatatgacccccaaagttcaggtgttggaaacttaaccccccgtgcaacaatgttgagaggtgggaactttatataaagggattaggttatgaggctctgctctcatgaatggattaatgttgttatcacaagagtgggttgttttaaaagagggttcattcccctstttctctctctcaccatgttatgatgcagtaagaaggccctcactagatgcatgctttcaatcttggacttcccagccttcagagccaggagccaatatatttttgtcctttataaattaccctgtctcaggtattgtgttatacagtacaaattagactaagacacagcccaagcagactaatgtactcctggttgcccaattattactgtaaatgatcagttacagcaactccagcctaagaatggcatgctgacttgggcccagtttcgtctggtctaagagttcgggtcatgccactaaatagcacctgagaccagcagat

SEQ ID NO: 252252 - DNA, 574 bp, Homo sapiens
ttcaccactgtgagaaaataaatttctgttgtttaagccacccagtctgtagtattctattatgacagcctgctgtggtatgaatatgacccccaaagttcaggtgttggaaacttaaccccccgtgcaacaatgttgagaggtgggaactttatataaagggattaggttatgaggctctgctctcatgaatggattaatgttgttatcacaagagtgggttgttttaaaagagggttcattcccctctttctctctctcaccatgttatgatgcagtaagaaggccctcactagatgcatgctttcaatcttggacttcccagccttcagagccaggagccaatatatttttgtccttkataaattaccctgtctcaggtattgtgttatacagtacaaattagactaagacacagcccaagcagactaatgtactcctggttgcccaattattactgtaaatgatcagttacagcaactccagcctaagaatggcatgctgacttgggcccagtttcgtctggtctaagagttcgggtcatgccactaaatagcacctgagaccagcagat

SEQ ID NO: 252253 - DNA, 500 bp, Homo sapiens
cattgccagtatatggaaatacggtagatttttgtatgttttattgtgtattctgcaatgttactgaattaattggttcttgatattattttgtggattccttggtgtattctatgtagacagtcatgttttctgcacataggaacagttttattacttcctgtaccttctgtatggcactaattttctttctcttttttttttttttttttttttttttgccttattgcactggttagaacttccagtactattttgagtaaraatggtgagagtgattgttcttaccttcttccctatattaggcaagaaagctttcagtctttcactactgctgcatgtttttataaatactctttatcaagttgggaaagttctactctattcctctttttctgagaatttttatcaggaatcattgttgaatgttgccaaacacttgttctgcatcaattgttcatgtgatttctgatcatgtgatcatgatcatgcgatttttt

SEQ ID NO: 252254 - DNA, 496 bp, Homo sapiens
ctttgtttttgctgtcagataggcctggattaaatatttgtattttatatgtacaattcaaatatttaattggtgactctgggtaatcttatcatcataaactcagttttcttacttgtaagatggagataatttcacctaacwtttagtgttgttctaaaaaaaaagtataataaaataatatgagaaagccaaatagcaatactgggacaaagtaggcaatcagtaaatagcggctcttgtcataatcatccatgtgttaaactgttttctgcaattttctcatctccacctgctaaaatcttacttcagttcgaaatttaaaaattacttcttgctccaagatttgttctgttttccctgctgtaaacaaaatattattctaatattttgaaataattaaaaacaaaaacataaaaaggaacaattaaaagtgcaaactttttttttgtcttttattgcatgatttaccccagttttaaaagaaacaaagaat

SEQ ID NO: 252255 - DNA, 496 bp, Homo sapiens
ctttgtttttgctgtcagataggcctggattaaatatttgtattttatatgtacaattcaaatatttaattggtgactctgggtaatcttatcatcataaactcagttttcttacttgtaagatggagataatttcacctaacatttagtgttgttctaaaaaaaaagtataataaaataatatgagaaagccaaatagcaatactgggacaaagtaggcaatcagtaaatagcggctcttgtcataatcatccatgtgttaaactgttttctgcaattttctcatctccacctgctaaaatcttacttcagttcgaaatttaaaaattacttcttgctccaagatttgttctrttttccctgctgtaaacaaaatattattctaatattttgaaataattaaaaacaaaaacataaaaaggaacaattaaaagtgcaaactttttttttgtcttttattgcatgatttaccccagttttaaaagaaacaaagaat

SEQ ID NO: 252256 - DNA, 472 bp, Homo sapiens
gcacatacaacctaccaagattgatccaggaagaaatagaaaacttggtcagacaaataacatgtaatgagattgaatcaataataaaaagtctcctatgaaacaaaagcccagggctggatggcttcactgctgaagtctataaaacttgtaaagaagaacttagcaccagttcttttcaaactattccagatagttgaagaggagagaattcttccwaacttattctgagaccagtattaccctgatgccaaaaccagagaaaaacagaatgtaaagaggagctacaagccaatatccctaatgaacatagatacaaattcctcaacaaaattatagctagccaaattcaatggcacatcaaaaaataatacaccatgttcaagtggaattgatctcagtgatgcaagaattagtttgccatatggaaatcaataaatatgatacatcacataaacagaatgaaggacaa

SEQ ID NO: 252257 - DNA, 472 bp, Homo sapiens
gcacatacaacctaccaagattgatccaggaagaaatagaaaacttggtcagacaaataacatgtaatgagattgaatcaataataaaaagtctcctatgaaacaaaagcccagggctggatggcttcactgctgaagtctataaaacttgtaaagaagaacttagcaccagttcttttcaaactattccagatagttgaagaggagagaattcttcctaacttattctgagaccagtattaccctgatgccaaaaccagagaaaaacagaatgtaaagaggagctacaagccaatatccctaatgaacatagatacaaattcctcaacaaaattatagctagccraattcaatggcacatcaaaaaataatacaccatgttcaagtggaattgatctcagtgatgcaagaattagtttgccatatggaaatcaataaatatgatacatcacataaacagaatgaaggacaa

SEQ ID NO: 252258 - DNA, 588 bp, Homo sapiens
ttatttcctttcttctactaattttaggtktggtttcttcttgtttttctaattctttaagatgtatcattagattatttatttgaaatttttccttttttttgatgtatagctataaacttccctattagtacttcttttgctatatcccatagattttggcatgttgttttcattatcatttgtttcaataaatttttcaattttcttcttaatttctttattgacccactagtcattcaggagtatattgtttaatttctatatatttgtatagtttccaaaattcctcttattaatttcttgttttagtccattgtggtcagggaagatgactgatattatttcagttactttgaatgttttaagacttgttttgtaacctaacgtatggtcagtcattgagaatgatccatgtgctgacgaaaagagtgtgtattctgcagctattggatgcaatgttctgtaaatatctattagatccatttggtctatagtacagattaagtctgatgtttctttcttgatattctatctggaaaatctgtccaatgcaaagcatggggtgttgaagtctccagctattat

SEQ ID NO: 252259 - DNA, 495 bp, Homo sapiens
ttgacaagtataggcaaaattaatcatcccattactttacctgttgttaaaaaccattttttattcaatttttaaaattatwtatttttaccacaatcatggctacatacaatgtttttatgtttaaaatttatttaattcattttgtttgtactttttggtcaaagatatagatagaacaaatcattcattttcctagtcaatgatgaatgggaatccccccacaaaatatataaaaccttaaaattttcagaatgaaacaaataaaaaaagttgtaagttgtacctatgtaactaatcattctatagtctagtaatgcctagatgaatgagcattcctgtttttcaaatacatgtttttaaacaaaatattaataatcaacaaaaagaaaccagctactgcaagaactatactgtgagaccacgttgaatttattaggctggcaattattaaatgcttatactgtggttggaactagtttctcttcatataac

SEQ ID NO: 252260 - DNA, 570 bp, Homo sapiens
tacttaattgtagaaaatacaaatgtaaaacttacacatggaaagaactgtatgcagttgactttactatgtaaattggagggaaacaaagttttagatccattttctttcaaaattttctttattgtaaagtatgcaaaatatatattcataccatttattaaatcagaatgtttatacaaaattgtcgtgtttgagcttattaaatgacacaggtttgaaacttgccttatctctgtgaacataagcatattttatggatgggaaagggaaattagtatgcttttgaacttggtgaatgtattaataatttaatccagtgatttctygtatctcaacagatgtttttaattcaatacaaaccacatgtattatgaaatatatattagggaaattctcttacacaagtttctacatatgacagattaatatataagatttatataagtaggatacattttacagatggtttatttgtaaactatctgataaaaaagtgtgggatgtgtttaatttatctcagtttattgtaatagtaaaatattttaaggaaataatattagatgttaa

SEQ ID NO: 252261 - DNA, 643 bp, Homo sapiens
gtgcttataattctcaaaccatttttggctagccatgggatgaattatgtaatgtgattttcttacaaaatgcctcttccagagttttctttttaagtcaattcaggctttaatatggaatgttgtaactagagttactctcctcaaaaacttaaaatctaactggtgaaataaagcataaatatatgaaaagtttaaaagtaaagcaatacaagatttaaacaaaaagtcaaagacaatacagtcatcttccagaaacatttattgaccctttacttaatgcaaagaactattgtgagctccaaaaatgattgagcaatgggagatagaaaaagagaggtactctgtcaatatttattctcagaggcccatgggtttctgtaaatacaggcatacctcagagatactgtgggtctggttccagatcactgcaacaaagcaaatattgtgataaagtaaggcacacaagtgtttttggtttcccagtgcctataaaagttaatgtttacactacactgtagtctacyaaatatgcagtattatttctaaaagtgggtaaacttaattaaaaatagtttattgttaaaataatattaagaatcatctcagccctcagggagttgtaatctttttgatagtcaag

SEQ ID NO: 252262 - DNA, 471 bp, Homo sapiens
ttgagcttagtgaagaaggcatgtcaaaaagtgaagataggctgaaagctaagcctcccgcaccaaacagccaagttgtcaatgcaaaaagaattagcttttgaaagaaattaaaagtgctactccagtgaacacacaaatgataagaaagcaaaacagccttattaatgatatagagacagtttgagtgttctagrtagaagatcgaaccagccaccacattcccttaagccaaagcctaacccagggcaaggctcaaactctctttaattttttgaaggctaagagaggtgaggaaactgcagaagaaattttaatagtcacgtcaaagagcactgacgacagatcaccagaacagataataatgaagaattttgaaatattgtgagaattaccaaaatgtgacacagagacacaaagggaacctatgctgttggaaaaatggcactgatagagttgttcaacacaggt

SEQ ID NO: 252263 - DNA, 585 bp, Homo sapiens
ctttgagcaattttcggtctagtaaataattgctcttaacaactataactaaagatagtccaggaagtgagcttcaatacttataattaatagcatacatcataaaatttactgtatactaatggaaaccctgaataagtagaaaacaatagarataatctagatttttaaaaaaaattttgactttctttttctggtaactaaataaaaagaaaagaaatacatcaatgcaatcactatatcttaaacttggtaacttttacaaaatatattttacaaaaaatatttaactttcactgggccatctcctaataatatgcctagcactaatgttttcaccctgcctaattaacctttttcaaagatttttaaccaacagaatcatgaccatctcagagacaactactccaaaacatctacagacaacgttactcctacagtcaatctgagagcaaaggataaagatagcccaggaagtgagtttcaatacttataattaatagcatacatcataaaatttactgtatactaatggaaaccctgaataagtagaaagcaatagaaataatctagatttttaaaaag

SEQ ID NO: 252264 - DNA, 585 bp, Homo sapiens
ctttgagcaattttcggtctagtaaataattgctcttaacaactataactaaagatagtccaggaagtgagcttcaatacttataattaatagcatacatcataaaatttactgtatactaatggaaaccctgaataagtagaaaacaatagagataatctagatttttaaaaaaaattttgactttctttttctggtaactaaataaaaagaaaagaaatacatcaatgcaatcactatatcttaaacttggtaacttttacaaaatatattttacaaaaaatatttaactttcactgggccatctcctaataatatgcctagcactaatgttttcaccctgcctaattaacctttttcaaagatttttaaccaacagaatcatgaccatctcagagacaactactccaaaacatctacagacaacgttactcctacagtcaatctgagagcaaaggataaagatagcccaggaagtgagtttcaatacttataattaatagcatacatcataaaatttactgtatactaatggaaaccctgaataagtagaaarcaatagaaataatctagatttttaaaaag

SEQ ID NO: 252265 - DNA, 625 bp, Homo sapiens
ggtccacagctcctgctgtagcttatgatagtaagcaatactaccaacaaccaacagcaactgctgctgctgtagctgccgctgcccaacctcagccttctgttgctgaaacttactatcagacaggtgggttttcttaacctacagagtttctttgtaaactattgaagtatatgacttactgygtttaatgaagataagcttttgagtccatctaaactcatatcacatcatcttaggaggcaggttctagacctgtcctactaaatgccttggagtcacaattcataatcatgcctttctctcctggaaatgtactccatttctggactttcagcccacagtccattcctgctgaaataagctgtgcaaaagaacctgtgatgataacttctgaacacatttttatctttgccagaaatgcccagaacatatgatactgccaacaaacagcctttgtaaccagtggagaccctttaatgggcccatatttttaattaatctttctctgatcgctaatgacagttggttctgttatcagccaccaatcatgttaaatacagtatgtagaatggttcaaatctaggaagcatttcgtttgcaaagaaacctgtatatttacaga

SEQ ID NO: 252266 - DNA, 601 bp, Homo sapiens
ttccagctttttaaggatactggtacagtaactatagtggcttactcttctaattttctgatgtctctttcctacttcagcccccaaagcaggttacagccaaggtgcaactcagtatactcaagcccagcaaactcgacaagtgacagccataaaaccagccacaccaagtccagctaccactactttctccatctatcctgtatcctccaccgtacagccagtagcagctgcggctactgtggtgccatcctatactcagagtgctacttacagtaccacagcagttacatattctggtaagactgataaactgtgtttaaatgagtaaacaaattaggaagagacttagtagaaactatcttgattgtctttgaaattaccttactcccaataataggaattaaattaattgatagacataaatataggtacataatgtgactgttctgtaaattgtatgcttttttgggggcgtggggaggagaagatcttagaagaatataatatgttcttgggggttttaargctcattatgagtcttgggcttagcattgcaattaaaggaagtaacaccgagttttctacaggattgtttact

SEQ ID NO: 252267 - DNA, 529 bp, Homo sapiens
atagtacaggagattccttatttaggaaagaaatcttttgttaagatctcaagaaaatactgaatttatgattcctagatctgtcatttaagatagataggactttactgtctctccctatttggttgactagctataattgtaactaggattatattacaatgaaatctgattagtcacattttttttaaatgtccacattagcttcaacaaaataggaagtaccagagtagcttttcctgttcattgtttctctcttatatgtgcttcctttcctttctctttctctggttgtctatacagtatgaagataatttttatttacatgagtaatatattattatttataaattagaaactatttttttagaaagagaaaaaaagttaaaccactagatttctactcctagacactaattgtcattaacattttagtgcaygtctctgtctacttttcttccatggaatatacatgtgtaaatacggtttataaaaatgcatttgtcttatacgtgctattctgtaaact

SEQ ID NO: 252268 - DNA, 626 bp, Homo sapiens
cccaagtagctggggttacaggcgtgtaccaccatacctggctcatttttgtatttttagtagagacggggttttaccatggtggccaagctggtctgaaactcctgacttcaggttacccacctacctcggcctctccaagtgctgagattacaggcatgagccaccgcacctgcmtccgaatattttcagttcatggttgattgaatccatggttgctgaaccgatggatacagagagcgactatattataatctgttactctcatttctctctttgaggctcacacagttttaaatttgcccagtgagatctgctcaaaccagctcctgagtctttttgacatattctcattcgtctttgaacacatctttcctctttgccactgaaagttattacagatacactttgagctttccctgccctagagtcacggtcagccatgtcacacaggagccatgatttcttataaatgccagtggtatttagaaaccattctaatggccacaaagtattttattgtatggatgtactatgttttaaagtgtgtatttgaggacatttagttgtatatgagacagaaactggaaacagcactaggtagaacatccttacatgtaaagatt

SEQ ID NO: 252269 - DNA, 626 bp, Homo sapiens
cccaagtagctggggttacaggcgtgtaccaccatacctggctcatttttgtatttttagtagagacggggttttaccatggtggccaagctggtctgaaactcctgacttcaggttacccacctacctcggcctctccaagtgctgagattacaggcatgagccaccgcacctgcctccgaatattttcagttcatggttgattgaatccatggttgctgaaccgatggatacagagagcgactatattataatctgttactctcatttctctctttgaggctcacacagttttaaatttgcccagtgagatctgctcaaaccagctcctgagtctttttgacatattctcattcgtctttgaacacatctttcctctttgccactgaaagttattacagatacactttgagctttccctgccctagagtcacrgtcagccatgtcacacaggagccatgatttcttataaatgccagtggtatttagaaaccattctaatggccacaaagtattttattgtatggatgtactatgttttaaagtgtgtatttgaggacatttagttgtatatgagacagaaactggaaacagcactaggtagaacatccttacatgtaaagatt

SEQ ID NO: 252270 - DNA, 581 bp, Homo sapiens
taaagttgggggcttaagaagagaagagggtttgaaaggccagagtagttatgttttgcttatgttgattttggggtgcctgagagaaatatgcaattgaagatgttcacaaaataagtgaaaaataagtctaggtctcaaaacaagtttaactcttatgatatctttaggtaaaaaaacttctatttatttgctcctcaaaatccactctccaccattctccacccttctctgtgtcctgggaggctgaattgtatgcattacagacgcttcttgttaaggttggscaatttggagccctggcagatcagagagagagagagagaggatagtcagcttgaggtatttgttgtctcctgtctccctcccttccaggtcaacagctcctgtctggtggccttctccacacagctctctcgagttcctcaacttatcccttcccttgatagtttaggccaaattgcccaatttgaatataccttctgtttccttttggggtcctgattagtaccccaggagtggctaaggaagaagaaatggaaaaataaattggtttgcacacatatttaaggagtgcatgg

SEQ ID NO: 252271 - DNA, 496 bp, Homo sapiens
cagtcttctgcctgcagaacggggagaagtaatgaggtcaatatcagagtttgtaaatacaggcagcctgaagacaatatacagaggagtgtttcaaaggtccactctggtcaggcatccaagctttgattctcggctccactctttctggttttacgactygggcaagttgctggatctacttgaaactcagtttctgcacctgtgaaaacagggtaatactacatccaggttgctgtgaggattaagaaaaatctcccacctactaaaatttcaatcctatgttagctcttagcagagagtgttgcacagcagttaagaatgatgcctctggagtcagcttaccctcgtttaaatcccagcattgctactcactagctgagtggctttgggcaagttacttaatctctctgtgctccagttccctcttgtgccccaaagggataattatacctacagggctgatgtcatgattaaatgacctaacattaggacg

SEQ ID NO: 252272 - DNA, 496 bp, Homo sapiens
cagtcttctgcctgcagaacggggagaagtaatgaggtcaatatcagagtttgtaaatacaggcagcctgaagacaatatacagaggagtgtttcaaaggtccactctggtcaggcatccaagctttgattctcggctccactctttctggttttacgactcgggcaagttgctggatctacttgaaactcagtttctgcacctgtgaaaacagggtaatactacatccargttgctgtgaggattaagaaaaatctcccacctactaaaatttcaatcctatgttagctcttagcagagagtgttgcacagcagttaagaatgatgcctctggagtcagcttaccctcgtttaaatcccagcattgctactcactagctgagtggctttgggcaagttacttaatctctctgtgctccagttccctcttgtgccccaaagggataattatacctacagggctgatgtcatgattaaatgacctaacattaggacg

SEQ ID NO: 252273 - DNA, 496 bp, Homo sapiens
cagtcttctgcctgcagaacggggagaagtaatgaggtcaatatcagagtttgtaaatacaggcagcctgaagacaatatacagaggagtgtttcaaaggtccactctggtcaggcatccaagctttgattctcggctccactctttctggttttacgactcgggcaagttgctggatctacttgaaactcagtttctgcacctgtgaaaacagggtaatactacatccaggttgctgtgaggattaagaaaaatctcccacctactaaaatttcaatcctatgttagctcttagcagagagtgttgcacagcagttaagaatgatgcctctggagtcagcttaccctcgtttaaatcccagcattgctactcactagctgagtggctttgggcaagttamttaatctctctgtgctccagttccctcttgtgccccaaagggataattatacctacagggctgatgtcatgattaaatgacctaacattaggacg

SEQ ID NO: 252274 - DNA, 599 bp, Homo sapiens
gactagcaacatttcaagtgtccagcagccatgtgtggctagcagctaacatgctgcccagcacagctctgaggatttatattcctcccgtgtgatgatggaccagagagtcttacagccttctcaggtttgtaatgccgagyttgagatgcttagcttctctgccacactctgcaagcagggcactgatgcaggtcttcggaatgtatttattgccaaagatcttagcctcatttcctcggcaggtgcccaacctcactgagaagaatattgtagtagcctctcacccttggagaaatctctgctgactcctggcaagtggaaaaaccatgagccaattagtgttttgcaggctacttcattactatggtcttactaattatgaaaaggaatgccaaggttattttattaattttcccatgttacagttttcttctatttggaaacatccccaggaaaatacaaaaagtgttttttctatgaatatttggactttttctggtagattatctccctccaaccttctgattgtgttattgcatttttattctattctctggactgggtccaatatctccacattcctctaaatcatgctg

SEQ ID NO: 252275 - DNA, 599 bp, Homo sapiens
gactagcaacatttcaagtgtccagcagccatgtgtggctagcagctaacatgctgcccagcacagctctgaggatttatattcctcccgtgtgatgatggaccagagagtcttacagccttctcaggtttgtaatgccgagcttgagatgcttagcttctctgccacactctgcaagcagggcactgatgcaggtcttcggaatgtatttattgccaaagatcttagcctcrtttcctcggcaggtgcccaacctcactgagaagaatattgtagtagcctctcacccttggagaaatctctgctgactcctggcaagtggaaaaaccatgagccaattagtgttttgcaggctacttcattactatggtcttactaattatgaaaaggaatgccaaggttattttattaattttcccatgttacagttttcttctatttggaaacatccccaggaaaatacaaaaagtgttttttctatgaatatttggactttttctggtagattatctccctccaaccttctgattgtgttattgcatttttattctattctctggactgggtccaatatctccacattcctctaaatcatgctg

SEQ ID NO: 252276 - DNA, 599 bp, Homo sapiens
gactagcaacatttcaagtgtccagcagccatgtgtggctagcagctaacatgctgcccagcacagctctgaggatttatattcctcccgtgtgatgatggaccagagagtcttacagccttctcaggtttgtaatgccgagcttgagatgcttagcttctctgccacactctgcaagcagggcactgatgcaggtcttcggaatgtatttattgccaaagatcttagcctcatttcctcggcaggtgcccaacctcactgagaagaatattgtagtagcctctyacccttggagaaatctctgctgactcctggcaagtggaaaaaccatgagccaattagtgttttgcaggctacttcattactatggtcttactaattatgaaaaggaatgccaaggttattttattaattttcccatgttacagttttcttctatttggaaacatccccaggaaaatacaaaaagtgttttttctatgaatatttggactttttctggtagattatctccctccaaccttctgattgtgttattgcatttttattctattctctggactgggtccaatatctccacattcctctaaatcatgctg

SEQ ID NO: 252277 - DNA, 622 bp, Homo sapiens
tattgctgcctgatccttcccctggaagcttggtctctgcctctatgaggtgtcttcccctgcctctgtgaggtgtcagttggcccctactgggaagtgtctcccagttaggctacatgaggttcagagacccacttgaggaggcagtctgtctgttctctgagctcaaacaccattctgggagaaccactgctccttcagagctgtcagacagggaaatttaagtctgcagaagtttctgctgccttctgttcagctatgtgctgcccagaggtgcccccagaggccttgctgagctgcagtggtctccacccagttcgagcttcyctagctgctttgtttacctactcaagcctcagcaatggcggatgcccctcccactgccaggctgctgccttgcaggccgatctcagactactgcgctagcagtgagcaaggctccatgggcatgggacccgctgagctaggtgcgggatacaatctcctggtgttccatttgctaagaccattggaaaagcacagtatttgggtgagagtgtcctgtttttccaagtacagtctgtcactgcttcccttggctaggaaagtgaactcccctgaccccttgtgcttcccgggtgag

SEQ ID NO: 252278 - DNA, 622 bp, Homo sapiens
tattgctgcctgatccttcccctggaagcttggtctctgcctctatgaggtgtcttcccctgcctctgtgaggtgtcagttggcccctactgggaagtgtctcccagttaggctacatgaggttcagagacccacttgaggaggcagtctgtctgttctctgagctcaaacaccattctgggagaaccactgctccttcagagctgtcagacagggaaatttaagtctgcagaagtttctgctgccttctgttcagctatgtgctgcccagaggtgcccccagaggccttgctgagctgcagtggtctccacccagttcgagcttccctagctgctttgtttacctactcaagcctcagcaatggcggatgcccctccyactgccaggctgctgccttgcaggccgatctcagactactgcgctagcagtgagcaaggctccatgggcatgggacccgctgagctaggtgcgggatacaatctcctggtgttccatttgctaagaccattggaaaagcacagtatttgggtgagagtgtcctgtttttccaagtacagtctgtcactgcttcccttggctaggaaagtgaactcccctgaccccttgtgcttcccgggtgag

SEQ ID NO: 252279 - DNA, 591 bp, Homo sapiens
gctgaatacattaccttgcttgggagagcctcatgatattcacatgcaaaattatccaagaataatttattaggataacagttcttaaagtttttggaatcatacaccactcacactcaacattattgaggaccccaaagggtttttgtttgtggattatatctattgaaactttctgtatttaaaaatggaaaaaattaaatatctacttattaattataaaattacagtaataaacccactgtatattaacataattaacatatttttatgaaaaataattatatttccaaaacataatgttaatgagaagaattgcattgttttatatttttgcaaayctcttcagtgtctggcttaatagaagaatgctggattctgatatgtacttcagcattcaacctgctgcaatatgaaattttggttgaagtatatgaagaaaaggcagcttcacaaagatatggctgaaaaaggaaggaacatagttgtggatattctcctgtgatactacaccaagattcaacaagatgttttttaaaagatacaatgtagactctgaaactataccaataaactttttcggctctccta

SEQ ID NO: 252280 - DNA, 591 bp, Homo sapiens
gctgaatacattaccttgcttgggagagcctcatgatattcacatgcaaaattatccaagaataatttattaggataacagttcttaaagtttttggaatcatacaccactcacactcaacattattgaggaccccaaagggtttttgtttgtggattatatctattgaaactttctgtatttaaaaatggaaaaaattaaatatctacttattaattataaaattacagtaataaacccactgtatattaacataattaacatatttttatgaaaaataattatatttccaaaacataatgttaatgagaagaattgcattgttttatatttttgcaaatctcttcagtgtctggcttaatagaagaatgctggattctgatatgtacttyagcattcaacctgctgcaatatgaaattttggttgaagtatatgaagaaaaggcagcttcacaaagatatggctgaaaaaggaaggaacatagttgtggatattctcctgtgatactacaccaagattcaacaagatgttttttaaaagatacaatgtagactctgaaactataccaataaactttttcggctctccta

SEQ ID NO: 252281 - DNA, 651 bp, Homo sapiens
agaacataactagataatcttttaaggcsaaccattcccagttcaacattccattcaacattatctacacagagatcttatgtgtaatattcggaaaacaaaagacttaatttgagaagagccagagtaaaactagaaacagatttacttggcaattaagttagataaatatcagtaattacagcatatataacccaggtgtggtcttatttcatctttcctctcaaaggaattagtatagtcttttggccctgggtggcttaggtcagagtcctcttcttgcatcattatcctttgggattcctgatgacactctctgtgggggttctcagattctggctgcattctctcacggttcccctctacctttagaaagtttctttgttacaacatgttcagctgttggtgctttcaacctgactttttgatctcctctgcacatttaagcagggctttatctgatgctgacagttttgccgtgcttcccatggtaacattctctgcatctagtcccaggtttgcacatcttattgtggttcccctgcctcttagattaggtctcagacatacctcacaatctttctcagctgggctacagaacatctcctggcatctggggagtttaggacaagaggacagagaagatgtgac

SEQ ID NO: 252282 - DNA, 549 bp, Homo sapiens
gtgatcttttctttgtggttagaattctgaaactttacaatgatttctcaataatcgcttcaattatttaatgattatttcatccatgcaccctcaatattctatatctcttttttggacttttactatttggatgttgaccttatattgcgtttttatctatatattttatatattttttctatttctgatttctcrtatatttatttaattttcttttaaataaattttacttagttcttgatggattattacataaatctctttatgagtttttcattttttattctccaaattagctttttaatatctataagtatttcttctcttctgtctctgaaaatatcaaacatttttgaagttttcttctccttgtgaaatctttgtttcttctaagttactgtttttgcttgttggctttgtcttctaaccttcagattcatggctgaagtttagaagaaggtctggcagcccttagctgcctcttggtatttaactatggaggaccaaaaagctttctcagaagctgtgtggcaaaaattcactctg

SEQ ID NO: 252283 - DNA, 568 bp, Homo sapiens
attaaagagggggcccagtgaagagaatgatcaacagtttggggttccaaaaaagctttctagaaaaagatgcttgagctgggtcttaaagtaggaataggagtttgacagataaaattatgtgggaatgatactccaagaaaagaagaggagaacattcaaagccatgggatataaaaacacatgtartggggacctgtgaatagttcaacatcgctaaagtttaggatgagagtaagggtagtagagacattagactaatgaggcttgtcatggaggaccttgtaggtcattcaacgtgagatgatatgccattgaaatcagaagggagattaccacaatagattgggaaagggtggactaggaactcagcaaagcagcagcaccagaagaaatgggttaaagaggaaaggtaataagggaaccaaatcaacataagttaacttaatgactgattagatgagacagtttggcaggtaatagggggtggggaaaagtcatgtggatgatatccaagttcttggtttggttggatgactgaacgagcaagttgggtgaaaagacaagg

SEQ ID NO: 252284 - DNA, 612 bp, Homo sapiens
gcctttcaccaaatacacaatttacgtatgagaaggaggtagaggaatagtcacttatgccttcatctggctccrtaaatctgcattttacatcagagtaagcaatcagatatccatttatctcaggtgagcagagggaggacaaagttctgtcctttgtcccccacctgtgaagataagctgtcaatttacattgtcagggtaaaattcaacagaattgttttagggtgaagatattggagcccacaaggaatttcctagtgggcaaattgtaagggacatatgtagcttttttttctttgtggctatcttatttagaaataaaataggaggcaggtttgcctgacacaattcccagcttgacttttttctttggcttagtgattttggggtcccgagatttattttcttttcacacatttttcactattccactccaacttcctccttctccatgtgcccccaaatatctttctgagccataaagagttaatgttaaaaggaacagcacatttcctgacatccataacactagggaagaggaatagaacacaactgcgtaattatcattgcacaatcacaactggaactgattgtttcagcttgaaaatg

SEQ ID NO: 252285 - DNA, 585 bp, Homo sapiens
ctacgtgtattctgatcattcaaggatgtgagttttgtcatttgcatatggttttgccctgatctcaagttcaaaaaaataaagcgtattttgccgcagcctgatgtagaaactctaaacgttcccagaataaaaataaacttgttctggcaaggccatttggggattattagttggcatcttttgactgtagtcagaaataagcaagcatccatttgtagcaatccttataacattatctctgtttggattgttattatgcttataagtgyttttggaatccatgctagtttttttttttttttaagagatctagggtctctttttacttacttttttttatcaaggaaatcaaaatttcaaaagcaatatatttccatagactacatgagagacatgaaaaaaattcaagtataagtcctgtgaaatatatttgtgatcagtggaattagacctcttcctagtgttctagtgactatcaaaacagatgtgtgatatctgtgtctgtcaggtacctttttaaaaccttacatggttggcttgtccttgctcagctcagagtcatttaaaaaatactttgagagc

SEQ ID NO: 252286 - DNA, 573 bp, Homo sapiens
ataaaggttccaaaagcagtgatcagtaggagcagaaaacaggcaaagatcttcacccgcttggtgacctgctggaactcagagtaataaaatgtgtcagacactctgctagtcactttctcatacattggctcactgaaagcacacagccacctaataagacaccattttttcccctctaatttaaagctaaggatgcttcaatacagaaagattaagggacttgaccaagatcaccaagctcacaaaggtcataacaaaaaggaactaagaaggaaaacctgcttaccacgaatgtctctctctctctctctctctctctcwcacacacacacacacacacacacacacacacatcatatacaattagcatgttagcagggctcaaagtctgattatcagcccattctttccaatctgcatgcacttttcagcccgtgtgctgtcctattttgataaatgccattcttcctttaactggctgaggctttcctaaacgtccatgtgaacctgattttcccattaaacaattgccctggattacttagtggttttctaaagctgaccctggta

SEQ ID NO: 252287 - DNA, 447 bp, Homo sapiens
gtgagtgcctgtccttctatagcccccagcttagtcataattgaggtattacttaatattttcatcaaagaatgtcagatggacttacgaataggtttataaggaaaattatttgggtgcagtaactagttattgaagccaactagttaattgttcattaaagtggaacaaagttcaataaagacagttaaggcatgctatgagtcagaagcacagagcctatcacatgaacagaaaagccacttactaggtacaagtatgtctcaggaaaaatgaagcctacagcagactgcaaatcgaatgtgagttatgctggtctactcrtcaaatctaatcagaagttttgttctcacattttggatctgcattcaaaatgggactccagaaagatgacaaaagttatataaaagacttaaaaccggtcttgtaggaacagccagaggaatt

SEQ ID NO: 252288 - DNA, 617 bp, Homo sapiens
cacacacacacacacagagcatttcctccaaatactacaaatgccttgggaattttacaaccaaaagtcctttcagaaggcgcattgacaaaaggtaatattgtacatggkctcttctccacacctgttagcaatttaacctaattgttcagcagctgggactgatttgggattctttcactatacctcattattcctttttcatgatttttttctggtttggagctgctgctgctgcttctgcacgatgtatgtatttttaaaactgaaaagacatactttgaaatgtctctggagagatacatgaaagtaatttttttatataccattttgcagttgaatttatttaaactgatggtggtgattattaggtgtggaaaatctaagggtaagaagagctttaactagttggccatccttcattgccttagatctctttctggactttaggtagtttggctaaactcataaaggattgtgatttgcacatatttgagaactggaatgccaaggaatattgtcatttatgggtagagaaagaaagttggaaaccatctggagcagaagaacatagcattagctgaattacatcatggaaacaaggtacccttgatgga

SEQ ID NO: 252289 - DNA, 576 bp, Homo sapiens
aaccttttcatgttatcagcttgccttatcttgtttctatcgctactgagatctctgtttaaatgtgtcataggattttctcaaagctatcgcagtgaaaacagaagtcttgacttctcttcccctctgccaacaaagtgattcttccccaatttcagaaagtagcatcaccattcgccttgatgaagtcaaaactctgtttgataatttctcttttccccacaccaaaaacaatccatcagcaagttctggcacctctttctccaaaacataacctgaatctccccactgcccatcatcactgctctcaccgtggcaagcgacccttggcaaatccttctatcctgcaataacctcccaactggtcttccattaggaagacctccattcctgccgccttcaggacacacacstaacaatcagaaaaaaaattatttaatgtaaagcaaaatgcgttatgatcctgcttagtctcgaatgcttcccattgatcacaggataaaataaaaactccttaccatagcctagaaggcccttacaatctctacccttcctactctactgagcttatggcat

SEQ ID NO: 252290 - DNA, 529 bp, Homo sapiens
tccctcaatctctaaaccactttaagcctatcagcccattatccttccctggccacaagtattggttccagggtggaatgtgagcaaaagtgctaaatcagtgaattttagatstgttgtggggggtacttgaaagagctcactatttcttattgcctttatcctcagaggcttgagaccctggagttagtacagtctcttgccaccaccaggactgaaaaaggaagcagcattgaagaggcagagctgggagacggagagaaactgctggcatgatttgagctcaggttagtcatttgtcccttcttaagctggcttcagttggttctgtcccacttgcaatagaaagtgtcctactgatgcagtctgtttaaatcactctatatttctggctaatcagaaactaataagattcacaaattaagtgtgaatgttcaaaaaatgcttcttaaaaccgtaaaattgtctttaaagctgaaggctttgggatcacaatcaccatgtgaccagctggttattccttctccca

SEQ ID NO: 252291 - DNA, 449 bp, Homo sapiens
aaattaatggttaagttactcttattcgtattttacaaatgcagaaaaattcaagattaatgggcttatttatccaaggtcattaaactaatgaatggtgaatccacatctccttccacgcaaaggaaatttagatcagaaaattgctttcccatgggctatttctatagagayaaatgtttgaatctttggtaaaaatagttggttaaactcattctctgtaacttcatagcactaaatggcagcctctgggctatctgggggacatcagcattaatgatcaattaatattataatttattttattttcactccttaaattgataccattgcctctacggaaattgtttccttcttctttaaatgtactttgactttcagtattattgctcctgagtctgactctacaatcagacaggtgagaataagagaaggttacagtgcaatga

SEQ ID NO: 252292 - DNA, 489 bp, Homo sapiens
tctctaagactaaatgtattcagggttttataattcaaatcaaattgatttttctaaataaaaggggtgggggttaacttttgggggctgttgccatagagaaaagtaaaaggaaaacctataggaaagaagctgagcaagtctggtgcagctgcttgcattcacactggtgaaacacagcagggctgtggtattatacctatgtaatcactattgcatgtttgttcttgcataccagcaaaaggataggaaatttgagaagggataagacatgtaaacctttgttacaaagatttaaatttctctgaattaaaatctgctatgagttaatagttggatgtttctctcagcaactaagagttytacaataacctatttcgtctgatagtatggctatcaaatgattggtctttggctggggagtgcagaattgcgacggtttctcaatgcttatttctaaatttcaggaccattttataaatagttgtt

SEQ ID NO: 252293 - DNA, 636 bp, Homo sapiens
ataatctgtgatattgggggttaattttttctatcatttttaatgtattattcagatattactgaattattctgagtagctttgtatcttccaaaagtttagtggaaattttaatttttcaaataattttagaactattttaaaaatacagtaaagcaaaaggcacagtcaaatgatatagtccaytggaaactactaacagaaaatttatgcatgtaggttaacatatatttgcacaggcctcttagtgatctctgggcacatatttgagcttctcgaaactggactattgataaggaagcttgtagctctgatctgtcctttcaataaatttgttcctgcctatatgcactttgtgaagaatgatttgaagaagttcaattacttcaactatgcagtttcagcaactactttaacacaaacctgctgggctctattaatggcagcttagactcaaccagatccatttggtgtagattctattcagaatcagtataacagtcacctgtgcggtaacaagtaagcctagcacgtatcttataataccataatgtaaatagttttaacattttctctaacttttgtaagtttattggcttccttttatgtccatgatgaagaatgcagatatattag

SEQ ID NO: 252294 - DNA, 616 bp, Homo sapiens
cacttccccctaaccccactacctttctcaggtaactatcattctactctctatctccacaagttcgaatgttttaacttttttagctctgacaaatgagtgaaaagagatgaagtttgtctctatgtgcctagtttatttcacttaacataatcacctccagttctagccatgttgctgtaaatgacagtatctcattcatttcgatggctgaatagtactccattgtatatatgtatcatattttttatatccattcatttgttgatggacacttaggctgtttccaaatcttggctattgtgaatagtgctggaataaacatgaaagtgcagctatctcttcaacatactgagatttccttgctttggggctatatacttagccatggaattgctggatcacctgatcattctttttctstctgtgtgtgtgtgtgtgtgtgtgtgtgtgtgtgtgtgtgtgtaacctccaaactgttttccatggtggttgtactaatttacattcctaccagcagtgtatgagggttcccttttctccacatactcaccagcatttgttgttgcctttcttttggatacaagccattttaaatggggtaagaagatagctc

SEQ ID NO: 252295 - DNA, 616 bp, Homo sapiens
cacttccccctaaccccactacctttctcaggtaactatcattctactctctatctccacaagttcgaatgttttaacttttttagctctgacaaatgagtgaaaagagatgaagtttgtctctatgtgcctagtttatttcacttaacataatcacctccagttctagccatgttgctgtaaatgacagtatctcattcatttcgatggctgaatagtactccattgtatatatgtatcatattttttatatccattcatttgttgatggacacttaggctgtttccaaatcttggctattgtgaatagtgctggaataaacatgaaagtgcagctatctcttcaacatactgagatttccttgctttggggctatatacttagccatggaattgctggatcacctgatcattctttttctctytgtgtgtgtgtgtgtgtgtgtgtgtgtgtgtgtgtgtgtgtaacctccaaactgttttccatggtggttgtactaatttacattcctaccagcagtgtatgagggttcccttttctccacatactcaccagcatttgttgttgcctttcttttggatacaagccattttaaatggggtaagaagatagctc

SEQ ID NO: 252296 - DNA, 525 bp, Homo sapiens
aagtctattaggtgacctgagaacctcgttagagacttcatctgtaatttgggcagaggggttattcgtttactaaggctgccgcaatgaaataccgcagactggttggcttaaacaatagaagtttaatttatcacagttctggaggataaaagatcaagatgttggcaggtttgatttcttctgaagcctctctccttggcttgaagacagcaagtgtcctcacttgatctcactgtgtcctcacatggttcccttaggtctgtgtttttttggtcctaatctcctcttctacagatactaggattgaatattagtcatattggatgagggcccacccatatgacttcattttggctctrtctctaaatacagtcacattctgaggtattgacggctagggattcaacatataaatttttattgatttattattaatacataatattcgtacatatttatggagtacatgtgatattttgatacatgcatacaatgtgtaatgatcaaatcagggtttttagg

SEQ ID NO: 252297 - DNA, 583 bp, Homo sapiens
aattttattattggtttgcagtactcatcctttaactgttctccagtctccagtttcttcccactccaattgagccaactgatagcttccagattcatatttttaaaagccagccgtgatcaggacactttcctgcttgatgagcttcagtggctccctatgtgcctcatgggtaaataatattttcctagacagaggttcaaagctgccacaatctgttcccatcctactctccaagctttacttcccattactccttccacattctctgtgctctgaataatttttcatcatgtttccaggagcagcrggcaggtctgttttattccctgcatccctcactcctctaccactgccttgcatattgtaggtgttcaaaataaataccaatgggacaaatgaaggagccagcccttccttcttcaggttctgggtctttgctcacatcgaaagtttctttctccttttctgcctgtggagatcaaagctgcttggaaatgctcactcattttctaggaacaagggccctcattctcttcgaaactgcaggtatacttaatttctaacttggtcggggactaga

SEQ ID NO: 252298 - DNA, 608 bp, Homo sapiens
tgctgacttgtgttattcattcagtgaatcacaaatagctacttgctrtagggtaacctaaagattaagagcacagtgcttaaatcctggctgtaccacctctggattgcatgactttgggcatttacatttgtgttaaatgataaaataattccatctacctacaagggtttcgtgcaggttgcaggggctaattcaggtaaagttacttagagtgtttgcaaccacataataagctgttgggtttaggccttgttattttgaccctggcagaacactagagtgccttaagcacaaacagggaacacaaatctggactccaacaactttcagacaagctcagtgaatctcaccttcctgtgaggtcaacttcttttgttggcttggccagtctattttctaggattattaggatgttcaactaagataaagcatacaaagacactttttcaaacttcacataaatatatcaatacattataatcattattcatttaacaaacagcttggggtactgagtatgtgcaaagcactgtactagatatttggggaccataaaactgacaaatgtccagtctctatgcccaggaatttgcagcctaacacgt

SEQ ID NO: 252299 - DNA, 582 bp, Homo sapiens
tcttgggctattgttagctgcttctttctgtggttgaggaaaaagtagtaattctgcacttcattttggttataatcatttatttttacaggtaccatattgaacttgcagaaaaacagttrttttccttcaatccagggagatgtctatagtgtttaacactgattatcagaaaatgagtatagttatggtcagtgggctagatactgcaagactgatgaattttaaaaaatcaacttacacaacaaaattaaaatgggcgaatataattttccacagcaaagaagaaaaaagcatgattatataaggttaagaagtataaaaaatatgctgttacagttaaaatagaaaatctcagtagactgtcttataaactagccagtactcaatgtcgtgattcagaataaataaaaatatgacaagaaagaccaattaccaaattgtgtctgatgtttatggtctcagtgtcttcagggaagctaatcaattaatattcccaaggtttctttcttctcttatatgacaagatgctaaaagctattatcattttttgtatttcaaaacagttgtatcaatagttta

SEQ ID NO: 252300 - DNA, 610 bp, Homo sapiens
tatggtctgggccttgaagggtgagtaggagttagaggaatattagagagggagaaaacattccaagcaggaacaggaatggcccatgtggagatgagtcagaagccgaytggctgtagcagaagatgagtggtgggattgcctaagtcaggtggggccagctgtgagatggaaggaggaatgttaaggatccaagagagtgttgttgagatctgatgcagcaagcattagatttctgataggtccttgaatgaagatgtgataggatgcgacttggtcatgacagcatcagctctgtactctagaaagggtccctcaggcagggacatttgctccccagaggtggagaagcagagtgcatgagaagggttcttaatacattgcatttgtacctcaacagcctccaatctctctttcagattgtgtaccgcggggatccctatagtgcacacaactccacagagtttctcatctacgaaagaggagtcgaggttggatgttggggcttgtgcatcaactccgtgttttcctcactttattcttgtaagtctttctctctcctaaggatgtcttctaaaagtttctggtctagcacaacttggatttgata

SEQ ID NO: 252301 - DNA, 601 bp, Homo sapiens
aggtctttaaaatggttccaaaagccagctgttttcaacccacagataaggggattcttttgttcctggctcagtatcaaaggatgtctaaaaaggtgaatcttcagaagaaaggattktctgaaattattaaatgttatgaggcactgccagctgtaatttctccctctcttcttcccacagactttcagaaagttttggtatcctacattggattaaagggtctttacttcacgggatatttgctgtttggcctggggacgggatttattgggctcttcccgaatgtctactccaccctggtcctgtgcagcctgtttggtgtaatgtccagcaccctgtacactgtgccctttaacctcattactgagtaccaccgcgaggaagaaaaggaggtgtgctgtcattgaacctctgccttgggtaacatccagactcatctgaaggctggggaggatttggtagcaatgtgtagagcagagctggaaaataagggttcttgaaacagcaacagtcaaatgcccaaccaactgcaaccatgatctggtacaggcatgctcaccagcccagcccagcccagctgtcctgtcctccttattct

SEQ ID NO: 252302 - DNA, 650 bp, Homo sapiens
ttctgccactctaaaactaaagaaataggccaggcgcggtggctcatgcctgtaatccaagcactttcagaggccgaggtgggcggatcatgaggttaggagactgacaccagcctggccagcatggtgaaagcccgtctctactaaaaatacaaaaattagctgggtgtggtggtgcacccctgtagtcccagctactcaggaggctggggcaggagaatcgcttgaatctggaaggtggaggttgcggtgactgaagatggcaccactgtactcccrcctggatgacagagcaagactccatctcaaaggaaaaaaaaaaaaaaaactaaagaaataaaaccaagagttttggacttacaagagatgaagcattttgtggaccagagaagtcctcagacaaagcatccagaaggaagtcttcactcatgggctgcaagaaccaggaaatgtatcaacaaacaccattgcaatcagggccaaaaggaaaagatatcctcagagaaaactggtttgcttactggaagctgttccttagactcttttggcaggagtggctttccatctttatcctatccgggggggaaaacacatggcatgaaatcattttacattttatccaaagtatgaaaccttgtaaacattacaaa

SEQ ID NO: 252303 - DNA, 453 bp, Homo sapiens
gagaccccatctcaaaaacaaaacaccaaacaaaaacaaaaacaaaaaaaaatggctgggcacggtggctcacacctgtaatcccagcactttgggaggccgaggcaggcagatcgcctgccaggagttcaaggccagactggccaacatggtgaaacctcatctctactaaaaatacaaaaatgagtcgggcatsgtggcagagacctgtaatctcagctactcgggaggctgagggaggagaatggcttgagcccaggagctggaggttgcagtgagccgagattgcaccactgcactccagcctgggcgactgagtggagcggaactctgtctccaaaaaaaaaaaaaaaagagtttttttttagatcatcagctattgttagtgttagtgtatgttatgtgtggctcaagacaactttgtttcttttaatataggcagggaagtgaaaa

SEQ ID NO: 252304 - DNA, 523 bp, Homo sapiens
aaagcccctggtgcatgaaaaggctattataatcyagctgggctcagtggctcacacctgtaatcccaagactttgggaggcccaggtgggcagatcacctgaggtcagcagttcaagatcagcctggccaacatggtgaaaccccatctgtagtaaaaatacaaaaattagctgagcctagtggtgcacaccggtaatcccagctactagggaggctgaggaaggagagtcacttgaacctgagaggtgaagattgcagtgagccaagattttgccactgcattccaacctggacgacagagcaagagtctcaaaaaaagaaaaagaaaaaaaggataactattataatcaaggtcctcaaggtagccaagaagggaaaaaagagtcgtgcatgaaacgtttgtccagttccctgtgttgggcactgggcatcacggatgtgcctacaggtgtctgtcaccaagatgggctcctctgtggcagctcccgggccctggcactgccctgtgctcatgacttccc

SEQ ID NO: 252305 - DNA, 523 bp, Homo sapiens
aaagcccctggtgcatgaaaaggctattataatccrgctgggctcagtggctcacacctgtaatcccaagactttgggaggcccaggtgggcagatcacctgaggtcagcagttcaagatcagcctggccaacatggtgaaaccccatctgtagtaaaaatacaaaaattagctgagcctagtggtgcacaccggtaatcccagctactagggaggctgaggaaggagagtcacttgaacctgagaggtgaagattgcagtgagccaagattttgccactgcattccaacctggacgacagagcaagagtctcaaaaaaagaaaaagaaaaaaaggataactattataatcaaggtcctcaaggtagccaagaagggaaaaaagagtcgtgcatgaaacgtttgtccagttccctgtgttgggcactgggcatcacggatgtgcctacaggtgtctgtcaccaagatgggctcctctgtggcagctcccgggccctggcactgccctgtgctcatgacttccc

SEQ ID NO: 252306 - DNA, 523 bp, Homo sapiens
aaagcccctggtgcatgaaaaggctattataatccagctgggctcagtggctcacacctgtaatcccaagactttgggaggcccaggtgggcagatcacctgaggtcagcagttcaagatcagcctggccaacatggtgaaaccccatctgtagtaaaaatacaaaaattagctgagcctagtggtgcacaccggtaatcccagctactagggaggctgaggaaggagagtcacttgaacctgagaggtgaagattgcagtgagccaagattttgccactgcattccaacctggacgacagagcaagagtctcaaaaaaagaaaaagaaaaaaaggataactattataatcaaggtcctcaaggtagccaagaagggaaaaaagagtcgtgcatgaaacgtttgtccagttccctgtgttgggcactgggcatcacggatgtgcctacaggtgtctgtcaccaagrtgggctcctctgtggcagctcccgggccctggcactgccctgtgctcatgacttccc

SEQ ID NO: 252307 - DNA, 472 bp, Homo sapiens
cattaaaatcacagagggatgagtttacttgtttcatgtggccagcatctcctgactggggcatctatgtagaaactgatatagatgatgggaaataagacctatctcttgagttagaagagaaaccccactatagacttggagaagatgagctgtcatcaccaactattaatcaggcacctattcttaagaactaataacatcaagaatggcttggaaacagcttgtttagggatttttaatttgtaatacccactgaaatctctaaacaggtctaatccctgaagggctttttcattgagcaccattagcagaaattagtacaatactttaaaatttgcaagatgttctcctatattctgtttaatttgattatcacaacaacactgtgaggtagaaccagcacaactgttcttgtttcacagctgtagaatrtgagagaaaggataccaggtgatttatctattatacc

SEQ ID NO: 252308 - DNA, 519 bp, Homo sapiens
ggagaaatgatccagcagttatcacaggctcaagaatccagcagttgcacgttatcaaagttatattttagtattataaatgcttgtccctttcttcctactagatcatcctgttttcttttccttcctatctayactctatgaggttgttgctatcaaccttgatagaaatatgcattcaggagattccaggataaatgttcaaaccaagtgattggttgtaggcaggatacatttttcactgcagcaaggcagggcagaaacacagtcttctgatggatcaaccagactggggatgacaagattccaattcttcaaacaaggaataaaaattacagggaaagaaaatgtaatataataaaatacttctaatctaaactatctgagggtaaagttcatgcagaaatggtgaaaagccttaattaattgtatgaactaaataaaaacatagctattgaatgtcaacttggtatgaaataatgttatagggtggcttgatacctgcagatcattgtgatt

SEQ ID NO: 252309 - DNA, 519 bp, Homo sapiens
ggagaaatgatccagcagttatcacaggctcaagaatccagcagttgcacgttatcaaagttatattttagtattataaatgcttgtccctttcttcctactagatcatcctgttttcttttccttcctatctacrctctatgaggttgttgctatcaaccttgatagaaatatgcattcaggagattccaggataaatgttcaaaccaagtgattggttgtaggcaggatacatttttcactgcagcaaggcagggcagaaacacagtcttctgatggatcaaccagactggggatgacaagattccaattcttcaaacaaggaataaaaattacagggaaagaaaatgtaatataataaaatacttctaatctaaactatctgagggtaaagttcatgcagaaatggtgaaaagccttaattaattgtatgaactaaataaaaacatagctattgaatgtcaacttggtatgaaataatgttatagggtggcttgatacctgcagatcattgtgatt

SEQ ID NO: 252310 - DNA, 602 bp, Homo sapiens
ggctagaatggtgaggcatcagcagtgtcagtgaacatgcagtcactcattttctgccccaagagttgatttcacatggccaaatcaatactgttctctaatggtccaaaagtgcaatcagattgtttcctaggttactgttagttggggaagctatgagtgtgagtagtgcgtgtgtgagtgtgcctgtgtgcatgtgtgtgtaaataaatacttaaaacatttttctggcaggataatctaagtttacctcaagttcaagcactctggtgattcacacacagattaactgccrttaaattctttcaaaagaattattttatatatgtatttgggattcttttttgatgttttaatgtacaatttaagctattattctgatcacctggtgatctatcttcaatttgcatttaaagtagacattggcttataaggttctcaaatagtttctctgctattatttcatctcatccaatcaaagaatttttaaaaattatcatggcacagttctcattcttgtaccctgtcttcctctactttgtcccacaggtctgagatgcctcatctcatgctaaatatccctctttccctcattttcagaa

SEQ ID NO: 252311 - DNA, 580 bp, Homo sapiens
tcattaaagtggctagatgctgccagggcacagtctccatcattactcacttttgctacaaatttccaatttgtagaattttagcatctttaaagatactactagttataaaatgtcccaatgaaacttgtgaaactctttgatagattgcctaagtcagacttacaaggacaaacagaaaaggagttgtcatggagacacccatgcctgcattgttggtggattattaaggtacttctagtatttgcaactgaacatttcaaccaatattcatttctctcttgggggactgatttcttaaccaaagatatatttaaatattataaaagtagtcaaaaaagacatatcttctttctcagttcattagctcagattgatcactgtggcttaatagttaatgacaatgttgtatagtttgtgacatctggagtaacacattccttctcggatataaataaaatgtctctttttktcctggtaatgtcatttcctatgaactattgcagtgatgtgctgctttggtatataaaaatcagtgccatgtatctgatatcacaatagatattttaaaatattttaa

SEQ ID NO: 252312 - DNA, 526 bp, Homo sapiens
tttcttatcaattagataagactttaatggtatatatgtgtaagtgtatgtgtgtgtgtgtrtatataagtatacatatatacatatatataccattacataaatacatttgatttgttaatttgtcctttatacccttttgactgtaatcaaaatggtatgataaaactagctagttaaatggagattatatgcatacacatatgcatgtacatatatgcatacatatacatatatacatatacatacatatatacacatgtatatacatgtgtatatacacacacacactcacacatatacatatatctggtctgtacctggcccaggtcagttatttaagtgacctgcatagttttgtaggtgcttaaggacagtgactatgtcttcaatattacagtaggttcaacgcaggtctatctcttgaatcttggctcagtatgtgtggcattttcattctaaaattactatctctcaattcattcttcaactattgttttatgttgcaccagtctacaatgatgat

SEQ ID NO: 252313 - DNA, 517 bp, Homo sapiens
acacagaggaacacttttatcccttattacctsaaacacataatcttttctgctctacaggtattgagtcatttttctgagaagaaaaaaacatttctagaagaattgggaagactggaaacttgactctcagatgtcagatattctgtgttagaacttcctctctctgtgttagaaaggatattctctcactttgtggatcaatgtccttaagcagctattttgcatggctttttatgcatattttatgacctagacgcaaatctgtcaggcaaagatgcaacatgagaaagtaaatattgaaaaactcacttttgttaagtactgttgagataccctacataggtaggtatgtaataattactgtcccttatattttacttggaaatttatggggcatttatttgtatatcctcatttgactgttacacttccttaaaaagtattattaatgttatcgtctattaaaattaaaacaacccaaggtgtacattaagtaaacagtagaaccgggtgt

SEQ ID NO: 252314 - DNA, 583 bp, Homo sapiens
agaaatagaagattcataatagtcttcagttgcattggccctgaagtgacactctacatacacactgtactctagttagtaaatttacttcttatagggtgcgaggttacaaagtaaacctgatacatatgtagagtagagatgaaagtacataagttatagataatgggagtcaggtttttcactgtattatgccattctcatgctgctgtgaagaaatacctgagactgggtaatttataaagaaaagaggtttaattgactcacagttccgcatggctagggaaaacttaggaaacttaaaatgatggtggagggtacctctttacaggttggcaggagagagaatgagtgcccagtgaagggggaagcccttataaaaaaaaaatcagatcttgtgaaaactaactcactattatgagaacaggatgggggaaaccgcctctatgattcaattatcttcacctggtccctcccacgaaaygtgaggattatgggaattacaattcatgattagatttgagtggggacacagccaaatcatattgctgtcagagaaataagctacaaaataaataaatac

SEQ ID NO: 252315 - DNA, 619 bp, Homo sapiens
ctgaatttcagtaatggctttcccagttctcaagtttgctggcagcagatcatgtgacttctttgccttcacaagtgcacaacccaattcttataacactatgataaagataaatttatctctttctctgtttctttttcacacacacacgtgtgtgtatatcctattgtttttggttctttgaatagctctaatacaaatttttgtycaagagtgttcaaaagaaatagaattttaaggatggtttttataaattgattctgagattttgaggtttcagaaattgtctccttagtctgattagatttgaagatgggaatgactattcccagtagaaaagagggcaatgacattctatggcctgaatagggaaatggaaatctgcacttgatattccttatcaaccacttatagaagcaagaagctcagtgactttgtatatgacacttttgaacatttcttttaaattaaggactgtaatgatgttcattggttgctcccactatcactgtacaaagtgggaaagaaaaggaggagttcaaggaatcaaattcccagctccaacctctatttcttctagctgcaaggctagaattgccaaaaataaaatgcagaagct

SEQ ID NO: 252316 - DNA, 467 bp, Homo sapiens
aataagatataaatagaaacaacaaaaagttaaaaagcagaaggatgaaattaaggcatagagtttcattattatcctttttgcttgtttgtttgtttacagaaatactgttacgttgttatcagtttaaaataatggttataagatagcatttgcaagccctatagtaacctaaagcaaaaaaaaaaaaaaaaaaaagaataaattgcacaaaaaacaaaaagcaaggaactaaatcacatcacaagagaaaatcaccttcagtagaggaaaacaggaaggaaagaaagcaggatgagaaaaccacaaaacaactggaaaacaaataacaaattggcaggaataaatccttaattatcagcaataacattgaatgtaaatggagtaaacwccttaataaaaatacattgactggctgaatggataaaaaaaaaacaaaacccatggatttattgcctacaagaaat

SEQ ID NO: 252317 - DNA, 394 bp, Homo sapiens
cctgaagaaataaggagaggcacagaagtgccaggctgagacaaagggaagcacagactgggggagatacagggagaggaagacacagacatactgaaaagagagacagaaaacagacacaaacagaggcagagactgagagaaargagagagagatgggaaaagatggaaagaggagagagagagagatgaacacagaaacatagagactgagcgtgagggaggctgggcacgctggttcatgcctatactcccagcactttgggagaccaaggcagaaagattgcttgagcccaggagttggagaccagcctgggaaacacagtgagaccctgtctcttcaaaaaatacaaaaattggcaggatgtggtggtgtgtacctgtggtcccagct

SEQ ID NO: 252318 - DNA, 394 bp, Homo sapiens
cctgaagaaataaggagaggcacagaagtgccaggctgagacaaagggaagcacagactgggggagatacagggagaggaagacacagacatactgaaaagagagacagaaaacagacacaaacagaggcagagactgagagaaaggagagagagatgggaaaagatggaaagaggagagagagagagatgaacacagaaacatagagactgagmgtgagggaggctgggcacgctggttcatgcctatactcccagcactttgggagaccaaggcagaaagattgcttgagcccaggagttggagaccagcctgggaaacacagtgagaccctgtctcttcaaaaaatacaaaaattggcaggatgtggtggtgtgtacctgtggtcccagct

SEQ ID NO: 252319 - DNA, 394 bp, Homo sapiens
cctgaagaaataaggagaggcacagaagtgccaggctgagacaaagggaagcacagactgggggagatacagggagaggaagacacagacatactgaaaagagagacagaaaacagacacaaacagaggcagagactgagagaaaggagagagagatgggaaaagatggaaagaggagagagagagagatgaacacagaaacatagagactgagcgygagggaggctgggcacgctggttcatgcctatactcccagcactttgggagaccaaggcagaaagattgcttgagcccaggagttggagaccagcctgggaaacacagtgagaccctgtctcttcaaaaaatacaaaaattggcaggatgtggtggtgtgtacctgtggtcccagct

SEQ ID NO: 252320 - DNA, 394 bp, Homo sapiens
cctgaagaaataaggagaggcacagaagtgccaggctgagacaaagggaagcacagactgggggagatacagggagaggaagacacagacatactgaaaagagagacagaaaacagacacaaacagaggcagagactgagagaaaggagagagagatgggaaaagatggaaagaggagagagagagagatgaacacagaaacatagagactgagcgtgagggaggctgggcacgctggttcatgcctatactcccagcactttgggagaccaaggcagaaagattgcttgagcccaggagttggagaccagcctgggaaacacagtgagaccctgtctcttcaaaaaayacaaaaattggcaggatgtggtggtgtgtacctgtggtcccagct

SEQ ID NO: 252321 - DNA, 357 bp, Homo sapiens
atttaggaggcaaaatcaatgactcagggatgggttgcttatggccagtyggggaaagaaatgtgttgagcatgaacctggaacaatggaacagatggaaattttcttagtagagatggggtttcaccatcttggctaggctggtctcaaactcctgacctcaagtgatcagcctgcctcagcctcccaaagtgctgggattacaggcatgagccaaacactcctggcctcagatggaaaatttccaaacacacacagggctgggggctgctgtggtcttgccaactgctccaggcatgcatgttgggggccacagcatccctgtccgtggggatgtcatccagaacagtccctgcc

SEQ ID NO: 252322 - DNA, 539 bp, Homo sapiens
aagtgctgggattacaaggcattagccatcaccttgtaatccttgcctaaaatgatttctttcttttgctgtgaagaaactcttttagtttaagtcccatttgtctattttttgttttattgcatttgtttttgaggacttcatcataaattctttrcctaggcctgtgtccaaaagaatttttcctaggttttcttctaaaatttttatagtttcaggtcttagatttaggtctttaatccatcttgagttcatctttgtatatggtgagaaataccagtccagtttcattcttcagcaaatgattatccaatcttcccagaaatatttattgaataggatgtcctttccccagtgtatatttttgctgactttgtcaaagattagttggttgtaggtaggtggctttattttgggttttctattctgttccattgatatatgtgtctatttttataccagtacaatgctgttttggttactataggcttgaagtataatttgaagtcaggtaatgtaatgcctccagctttgttctt

SEQ ID NO: 252323 - DNA, 539 bp, Homo sapiens
aagtgctgggattacaaggcattagccatcaccttgtaatccttgcctaaaatgatttctttcttttgctgtgaagaaactcttttagtttaagtcccatttgtctattttttgttttattgcatttgtttttgaggacttcatcataaattctttgcctaggccwgtgtccaaaagaatttttcctaggttttcttctaaaatttttatagtttcaggtcttagatttaggtctttaatccatcttgagttcatctttgtatatggtgagaaataccagtccagtttcattcttcagcaaatgattatccaatcttcccagaaatatttattgaataggatgtcctttccccagtgtatatttttgctgactttgtcaaagattagttggttgtaggtaggtggctttattttgggttttctattctgttccattgatatatgtgtctatttttataccagtacaatgctgttttggttactataggcttgaagtataatttgaagtcaggtaatgtaatgcctccagctttgttctt

SEQ ID NO: 252324 - DNA, 390 bp, Homo sapiens
ggcatttcatggttctggctggtctcctagggtctggttttactaacaattttctgaaagggaggcagttaaaaaaaaagaaagctctcaaaaacagtagtctactcaatataagcagctcttcccaagagaagtacaattctctttgaagttacactccactaacacttaaaggaatagaagccaaggaggaaaaagaactaatatttactaagctcctccaaagtgccaggcactttacacatgctcactctctctaatagcctattattctcaytcaaggtggggtaactgaagcaaagaaccattcatgtaactttgctaagttcacacaacttgttggaatgcaatccacatctgtgtgagtataaactccctgctttttcagct

SEQ ID NO: 252325 - DNA, 560 bp, Homo sapiens
gctgcccttgaacttctagaattgtggatcctgaagaacattctaggtgccacgaggactgatcacatgtttcccattttccctccctcaggcatttatttcacaagatactgctgtctaaggtaacctgagcatgtttccagttcttgcagccttacagaacccagggaatccacctgtctccaaccttcctcagtaggtgacaggcccatctaactgctctctagccagtcttctgtattcctgttgcttttacctttgctcgtgtcaacaaggaggtaagtcaccatgacatatttcttaaatttgtatttctttcatcactaatgagactgaayatatgcactgaacatatgttaattagccgtttttgctttgtgttttctcttttgagaattatatgtttatgtttcttgtccatttatctactggagaatcacaattcagttatataaaaattatctatgacacacaagagaaagcaatgaaatttctttaaaatgcaaagtgtcatagtcagtaaagctctactatttcaaagaaaacccacaaatgtgtct

SEQ ID NO: 252326 - DNA, 577 bp, Homo sapiens
ctgtgagatgagagcctatgggactgcatcccagctgtaaggataaacctagaaggaaagtagcctatgtacagactgcagaccagcttgtggtccccaagctggctccagaaattacatgatgattcgagagggctgatgcctttgggtacttgacaaaaggtaatttaaaaatcctctttggaggaaaataataccytaggcctcgaaatgtctctaggaaatttgaagatgtgtgtacccaatgattcccccactccaggtttgtaacttcaaaaaactgtagcatggtgcaccagggaacgtgagcaaggatgctcattgcattatggcagtgactgaaaactggaaacaactcaaatgttcatcagcaagatggaatattcatatgattggacactacagagcagtaaaaataagtgaactattgctacagtaaaaaatgaacattgctacatcaatatagataaatcttgcaaatataattcagcaaacgagcatgtagcagattatatatagtgtgataccaataatatgaagtcgaaagcaagccagacaaagaatattgtttagtaat

SEQ ID NO: 252327 - DNA, 488 bp, Homo sapiens
gaatattgaacaattgagacttattcaacttactcttcatttcaatatttgtatcatcttcaggcaaagtaacgaaaaattcaaagcatatgtttactttgggtgtgtttcaaatattagtctgatttttgcttgagaaaatatttgtattgatatgtaagtttgcatttgactacattggtaaggtgttttcccccattgaaactaatattttctattttcaagaaaaaagcagcaagcctcggcagcagtcartcctccagaacctatgctggtggaacagcctcggccaccaaggtcagtgatttcctgaacacgaaaagacccctactgtattctacagggatatgattagtgggtggggcctgtaggaatggcaaacagtgtccagatatcactgaaggttttttaacaaagtatcatttctgtgctagaagagagaatataatttcttaataatgatgtgaatgatttaaaacctagtaaaa

SEQ ID NO: 252328 - DNA, 557 bp, Homo sapiens
gctcctttccagcctgagcgatccctccttatcctccaatcaccgcatgacaggtcacattatcagaactgcctgtctcaactatcccctgaactgctatggttccctcatctacattctcatggaaccctgtgagtttcctttgtagcaaataattgttgggagtgattatttctactaatgccatctttgactaggctatagctttcatacgggcagggacatgcctactggttttacctctgtgtccccagcacctgacacagtacctggcacagagcatattctggataaacacctgggggagccaatgaactctggtaaaatcttggacatgagattccatttttctcacctgtttaaagcctgtatattaaagcttgtattaaactttatcactaaggtgctttctctttgaagatctatggattaacccttcamaattttttattataaatgttatccacatcaatgatacgaaattcaaacaatgcaaaagagtatacaatgaaagtgtattcattcattcaccagagattacaaatattgaaagttgc

SEQ ID NO: 252329 - DNA, 623 bp, Homo sapiens
cagctcatgccagatggaatccctgggttctaaaacctaatggactttaagtgttaaggaggtttaaatgagtctgggtaggagtttgcaaagattataattatctgtttaatattaaccagtgtaatacaagttaagtactagaatagtactccaaaccatacaagtatccacacacacatcccagtacttagatgactggatcacaggggctgattgcaccactgcaagcatctcaagsaagggtgttccttgaatagttactatttatcacctcttgccttctaaggaagagcctagatgagacataatgcagtagaattccctctgtaaccttgtctccaccttctctttcttacatgacactgaacggacagttcacatccacccaagtctatttacgggagttttgtccttctatcttatgtattaggaataacacactggcaatttaatgagcatctgcaatttgccagacattttgccacactatctcaaatacgaccctgcaaatagatgttactgtactttgtatgtaaatggacctggaaaacaaagctcaaagtcacagagcttgtaactgacagagctggggcttgaacaaaattttgttgagttgcaaa

SEQ ID NO: 252330 - DNA, 500 bp, Homo sapiens
cagttttgtttttgtttttgatcctagatttgattgagttttttaattgaagatattcctctaagtacatttctctacattgaaatgagaatataaattattaattcttgctaaaatggtcttactattctgakcatttaaaaataaatataaaaatgaaagattatactaaatgaacataaaaatatactggttatttcggatgctttcccaagttgttttttctgaaatttgagtcttgtggggtaccattttattgacaaacctttcttgagctctatttgggatttattcttaaaattatttttttgaatttcagaattaaaaataaaagaatttcctctagtggtattgtccactttgttctgaagagctggctgcagctgccttttaaaccctctccctaagttactctagctcaagctgtatctcttgggaatatttcaggggagggaattaaagagggagcattttcaaaattctctcaactaatgtttgtg

SEQ ID NO: 252331 - DNA, 608 bp, Homo sapiens
agttaaacattatagattttgttcatcttaagtcctttagaataaagaaaatttcgtattaatctaaaaacgaaacaattatgccctatagccaaacagcaacacaacaagaaattaactgtatagtaatttcaacatttccaatcattgtctgtactgttttagagcaaagatacttacctttaaaaacataatgaaaataaatggagaaccttaaccagctttattagagcacattagctcaacaggacaatatgtatccataatcatttttattactaaagatcatgtagaaacataagaaaatatttakgattataatgcaatattgatgtgtactttctaatttatgtacacaggcagatgaaaataggcagtaataaatattcacaaatgtatattttaaataatgtatacaggcagatgaaaataggaataaatatttacaaatgaaaagaatcattggagtaggataaaaaaatttttacataagtttaattttgctatatgtgattttcttaagttaaatgtggtgatttaaaaaataaaccatatagcagttccaaagcaataaatttgtgatccagaagcctaggttgttatacaat

SEQ ID NO: 252332 - DNA, 528 bp, Homo sapiens
gctatactaacgttaacatgttagtatccataataaagtttaggtttccatgaagtgctactcttttaaataggcgaggagcccttctcatttaaaattgtacagctcatagttaatagttttatatattcattaggctctcagcaaacactgaagacatgtcaaagccagtaaccttttcatcaatattttgcattttacttgctaatgcaattgattgagtggaattaatttgggaccaattagtgacttcayagtaggtgctaatatcacctgttaacagttcataatttagcccttaattaagggctttgcttcactcacactaggcatagtagagtactatgttgccttttatggaagcatgccagaaaaaaagacagtcatcaatgattcttctattcttatgaataagacattgtcacagtctgtcacagtgtggtactagtgtgcctttggagtcccctgaaacataagattctgtcccaagtaacccagtgcaagaaacgaactccattatcaggttag

SEQ ID NO: 252333 - DNA, 633 bp, Homo sapiens
ttattgtatttaattcaccattcgaaattcaagtgaaagtatgaatctgatattaacagacataaaagtccattgcagctttgaattaacatccccaatgggagtattgtaccatgatgtttagtacattgttaacaaacatgtcttataaagatgagtaaggcatagtctatgctcttgaagcatgttttaattattctgtatgtaaaatgaaacagaggactagattaagtcaatgaaagaagagataatgaatatcaaatttatttctacttataaatgcatactatgcttaaaagtcttaattgtgtcttataaaattatactgttactctattcttctatatattgctctaatgccaagaacatagtttctttaaaataaaaatttttttttacatttacagtgatggagagatctatgatgatattgctgatggtaagtcttaygtagtaccaccctagagaacagtcatagtgaatttactgtttttataaatgctaaaaatagcttgttggattagagacttccaatctgatcagaatttgaatcacttgaaaatgttagaaaaggtaaatgccctggcataatggggggaaaataccgcatttcccacaagatggaaaattaag

SEQ ID NO: 252334 - DNA, 605 bp, Homo sapiens
tggagagatctatgatgatattgctgatggtaagtcttatgtagtaccacccyagagaacagtcatagtgaatttactgtttttataaatgctaaaaatagcttgttggattagagacttccaatctgatcagaatttgaatcacttgaaaatgttagaaaaggtaaatgccctggcataatggggggaaaataccgcatttcccacaagatggaaaattaaggaaaaaccttatttatttctttgaaaacagaagtataaaaatatttgggaaattttttattgtactgtgactcataataagaatttcttttatccaagcaaataaacatttttggcaaataaataggtacttatttcataaccagtaataccaatattctctaagcatcatatagttccaaactgtaatctaaaaaattaatctaactgaaatgatgcagtgttgatcatgatttcctttagtcttttaaacttatgagtctgctctttaatatcttcaacctcgttcagagtgactaccaaaaagtatatgactaagtgccacataaaataatcttgagtctcattttaatagagaataaatctgtccagaaattttgttg

SEQ ID NO: 252335 - DNA, 490 bp, Homo sapiens
accctgtctctacaataaatacaaataattagctgggtgtgggggcacatgcctgtagtttcagctacttaggaggctgtggtgggaggatcactggagcctgagaggtmgaggctgcagtaagccatgattgtgccactgtctcaaaaaaatttaccctgtctcaaaaaaaagaaataaatatatttttttaatattgaggccatcaggcttcctctctcttaacttgatcctacatctacaaaacagtctttctctgcatccaaccttgactctagcttcagcctcagaagacgggatatctcctcttcaagaccaaaccttctaccaagactcctaatactttgactcctattttgtgtcagaaattaagataactaaacgcaattcctttcaattccctacaacctttgaccttaacccatatccagacactgtcccagagaataagatgtcatgccttaaattcaaagccataacctttggatcc

SEQ ID NO: 252336 - DNA, 490 bp, Homo sapiens
accctgtctctacaataaatacaaataattagctgggtgtgggggcacatgcctgtagtttcagctacttaggaggctgtggtgggaggatcactggagcctgagaggtcgaggctgcagtaagccatgattgtgccactgtctcaaaaaaatttaccctgtctcaaaaaaaagaaataaatatatttttttaatattgaggccatcaggcttcctctctcttaacttgatcctacatctacaaaacagtctttctctgcatccaaccttgactctagcttcagcctcagaagacgggatatctcctcttcaagaccaaaccttctaccaagactcctaatactttgactcctattttgtgtcagaaattaagataactaaamgcaattcctttcaattccctacaacctttgaccttaacccatatccagacactgtcccagagaataagatgtcatgccttaaattcaaagccataacctttggatcc

SEQ ID NO: 252337 - DNA, 609 bp, Homo sapiens
tcaaaacatggaggctgctctctttctcctcttttactctctatctgatgaaatatcattaaacagagctcctagaaaacaaataattttgttttatttgtttttatatttcttactttatggcatatttgaagcccttcattatatatttaataattaaagaatcaatgaatgatgtgtctgcaaggactgtgttaatcctgtgggctgccactgtaatttttycttaattactatttcagatgccataagaggttaaataaattgatgaccaagaaatctctatttgatttaccaacatgtaagtcattggccacctgagaaagattcactgaagcaatcaagaccaagctgattgcaatgatgtcgctcatcaggctttctggaaacagatgggatagagtttgagggaagagatgtctattaaggatcaatatttgtgaaaggaaggggaggaggaaagattggtcagagaaagaggttgaacatgatgcaagcctgacaaaaattcagccgaccagactgaggcctctggagtaaatgcggcccaatacttatcgtccttcaggccaacatagccagcctttgtgattttgccttgctcgtggt

SEQ ID NO: 252338 - DNA, 529 bp, Homo sapiens
tatatttactatttaaaaaattatttagagactgggtctcactgtattgatgaggctggtctcaaactcctggcttcaagtgatcctcctgccttgaccctcccgaagtgctggaattataagcatgaggcactgcatctgacctatttactatttttatgtaggctggctgaatgatgtttttataataaaaatttgaccttctttgtctctttttactgtttttggctttaagtctgtttaatctatatatagytattcctgcttgcttttggttcacatttttttggaatatctttttccatccccttacttacagtctatatatgtctttatataggagatgagtttcttgtaggcaacatctagttgagtcatgttttttgtttttgttttaatccattcagccatttttttctgggcttttgtaaatttatcaattagagtctcttgctaaagaactattgtgttccattggaggcatcatatttccttgctttttcaggtttcctgtgtatttacattgata

SEQ ID NO: 252339 - DNA, 612 bp, Homo sapiens
ccatttttttcagcagatcggttttgagaattagtatagaaagatgtaaagcttttgacttctgtgcaactgtttggaaacttgactataacacacatgtgaaaaatctatataaaatagattcactagaaaacttcctaacaaggataacttctacaatttcaggtctgtaaaagatgtaattagtgagtgatttaatttatatacaggcatatgtgttttagatgaaggtgaagggagcmcttaataaacttgagtttaacttgtgcattaaaaacctgctcagatgtggtgctggaaatatatagttgtattttaaattgagttcgtcgagctcctatatatagtggtttctctgcttggtgtcaaaaatgttgagttgtggaagagcttaggtacacatctgatttgataattttggcttactccagttttactgaggcacacaggtaactgtttactatttaaaatgccatattaactgagaatttagtaagcacctatgtccataggtatttccaggttaatatagatagtgcagaaaatgctgttttcggcttgccctgacaaaatgtacttcagtttggaataaagtatacacagccatttaaa

SEQ ID NO: 252340 - DNA, 440 bp, Homo sapiens
agtgcatacagatcaatggggatcttgttgaaattgcagatgtgaggtctgacattctttttttttttgcttatttttttccaccttacatttataaaaatggcatgacattctacagtttatcaagctcccaggtaattgatgctgctggtctttggatcagcatagatcttcacatatcctgagtaacaagratgttatgatctcatcaacaaacatgtatggatatagatggacaggaatagatacggcaccagtgagagaaattcagagaagagactcttatcttcctaggaaccagctgaccttaagaataagtagccattcagaataactgcataatctaatatcattttctatttgaacatcaataattctaagtactattacaaatactacaggcctcctgtcctcttagaatgtgtcatcttctaagaatg

SEQ ID NO: 252341 - DNA, 535 bp, Homo sapiens
tagctctcaaattgttccttagaacctgcattgttttgcttccccatctgctcttgatgtcttcaaatccccatattgatggaaaaaaataagtttttgaaatattaaccatgccaaggaatttctcaaaatattattttgcagtagattgtacagcctcttaacatttatttgttaacttcaactcaaatattaatacatataattcaatataaccaaaatactcagtgattttcagttgtcagtctctctargtatccctttttcagttcccaaccatacttcttctgaccctttacccctcagacctggaatgtttctcaaagaagaaagtctacacaagtccttatcaaacatttgctatgaatatttggggataccctgcaataatgcccagggagggtaacagtcagcttcaatatcttataataaattctacagaaaattcacaaaatctccattatcaagataagccagttttataaattaactaaaaaacccatgctctctactaaaaatatgaggaaaatataat

SEQ ID NO: 252342 - DNA, 548 bp, Homo sapiens
aaataaattattttcactgatatcattgtctcatgatctgcttatgggagaacccatcctaagacatatcttcatgaatcccataaaaatttatattctatattccttttctaaggcctgttatccaacagcaaggaccaaagacagtaatttttaccttctgggatatcaaggtctatggaagggatctcagtctatactgtccagatttatggctatttagctccagggacttcaattcacttgaaagtttccaaaatccatggaagctatcagccatttaaaaggtgctgagtggcttcatatggaagcatatttattatctagccttggtaagatatatagactgtgaatattatacccagaaaacatcagtctgaactctgacaccaaacagtcactagtcttgaaaaaaaaattatttcacctgtctaacatcagtattctaatccacaaaatgaaaagttgaaatagatgctccctcagcagctctccagctgttaggytccatgattctgattctaaataggtctctgaagtccattaca

SEQ ID NO: 252343 - DNA, 553 bp, Homo sapiens
aaaaaacccgaaaactcggaactctgaataagaaaaggtaaatatgtcattctcagtatgaaaaggctcagagcgatgtaggcctgttggttggtttactttctgcacccttgacttcatcttagaaagtaagccaagtgactcaatacagtaagacaattgctgttactgtctgaaaagtttaagctaatgataatttttttttttgatctttggaatttgacattaaaagtcatactaagacaaggatcaggtctaaaagcaaaaggcaaacagatctgtcagattggaatggttccctcagtcagccacacagctcataatcttcagagctacttggccacagagagccagtmcagcagtcatggctggcctgagcaatgcatgcaattcactgaagaaatttgctggtcaatctgggtagctacatgcaaaaattgccaacatctgtataagcgaaaaaggaaaaatggaactaataagggaaatcaggacctaggttgaaatcagctttccaatttaccagaaaatttgttccattttattttacttt

SEQ ID NO: 252344 - DNA, 604 bp, Homo sapiens
cggctcatttgtgcattcaggtacatcttatactttctaattttgcttgttatataatggtgaggagaaggaaacattttactctgtaatcatattctagaatatagaacattaggctacatagtttatgttgacttatgagtatttggatgctatttggctattcataatggggggaaaaaacatttcaaacctgcaatgtataatgtggcacaactcacagttttccaagcatactgagaaggaaaatcatagcctaactgaggtatgcccttacttgtgctgttagtacaaagctatttgggggttcaaagtgaaaaggagattttgcttgctttcataaaaaggtattactccactccactgtcatcccagagagatataaggaaatgtaagttgtaagactaaattttaataagcatgtttgaacttttatatctaaatgaatgttttcttctccaaaacagttactttsggacagtctatgccaatttcacaaggctgcctacattgaaggtgtcagttatttcctttccatccacagtccttctctgataacctgtgtcatctacagcctgtggaagtgcagctttatttactgtgt

SEQ ID NO: 252345 - DNA, 559 bp, Homo sapiens
ggcacccaaaaatcagtgtttaaacaagccattcaggtgatctggatgaatattaaaatttaagaaccattgctctagatttctgcctcatctgtgctgcctttggcactggatacacacacggcctctcttcaaatgaagtaaggctgatggctttttcaatagctagatatttacctgtwtatttgaactatttttctaataatcagtttcttgagaaccaaatcagttgttttacttttatttataaaagatggaatgtatctattactttaggattcaaccaactcaataaagtaatatatctataaagaaaatggaacaaactcagatgtcatttgtaagtggtgaatcctcaagttacctacaactttcatctgacttggctacaaatcagaggtttccatgatgccctccttgggtttgaaaatttgctaaaatgtctcacagaattcaggaagacacttacttacagtttctgggttattataaaatgaaggctacgatgaaggatacagatgaacagccagatgaagaggtacatagagtgaggctgaga

SEQ ID NO: 252346 - DNA, 558 bp, Homo sapiens
  misc_feature (1)...(558): n = A,T,C or G
ctgggcaagtactactttcataatgaaccagaggaagagtgccagtttgtgcagtctgtttttgtaatccacatccttttcactaagttcactctctttaagctcataataaacaggctcaatagcctaagactttctctttgaaaggggactccaatcgatactaaaaatattttataaaattaccatttatatccaagaaggaatctgtaaagacctctaggcttagaatagttccaaaagtctatgccctcaacccnatcatcctgngtatttggagaaaaaccttagtgcttagcactaatgtatccatttttttagcactaaaaaagacatgctgggattttgaagttaaattcatagagagactattagtttacagaggtgaggcaagaattaagaaaactaacaagggatgcagaagcagccagggaccacaccagcaagaaacagtttccaccttcaggcctaaaagagacaaggggagcaaagcagtgtaaccaaaggcatgtcagaattgattggagaggccgggcacrgtggctcatgcttgtaatc

SEQ ID NO: 252347 - DNA, 601 bp, Homo sapiens
aggagaagaaggaataaagggaggaaaaataaacctaaacatatcrtatataaactgctaaaatgcaaagaaaaaatcttcaaggtggtgataagaaaaaaacacactgagaaacaaagatgaaaatcacaacagacttttgccagaagacaataaagtgacataccaaaagaaaaaactttcaaacagaattctatatccagcaaaaataaatttcaaaaataaaagagaaataaaactttctcagaaaaacaaaaccagaaataattcattgtcagaagacttagaagaattgttaaaagaagtttctcaggcagaagaaatataatgcttgacagaaacttggatccacacaaaaaataaaagatgctagtaatggactaaggtatcaaaaatttacttgttcttatttttaattattataaaaggtaactgattatctaaagcaaagatattaacaatgtattatgtgtttatagtatatgcaaaagtaaaattatgaaaaaatggcatgaaggatgagaggaaagaattggaaataaattgttgtaaggttctcccactaaacataaagcagaatattatttaaaggtaagatgtg

SEQ ID NO: 252348 - DNA, 553 bp, Homo sapiens
caatctagggcatttacccaagagacatgaaaatttacgttcaagcaagaatctgtaaataaatatttatatcagttctatcctcaactgtaacaaactagaaacgatttagatgttccttcaccagtgaatggggtggcaaactggttcacacattcagtggaatgctaccaagtaatataaagaaacatcttattgattcctgaaacagcatgaatgcatttcacataaattttgctaactgaagaaagccacacccccatcacatgccctgcgagggggaccagaaaactttttccatttcaataaaatatatcatcatcatatgcatcctgacctacaccaagaagggcacaacaacacttttttggtattctggccaaaaattgataactttgatttaatcatgaaaatatatgagacgaattcaaattgagggacatttaacaaaataactgattgttctttgaaartgtcatggtcataaactacatagaaagactgagaaagtgtcacaaatgaaggagactcaggagaaatgacagctaactgc

SEQ ID NO: 252349 - DNA, 542 bp, Homo sapiens
tttgatgcatttttcatcatcttacttgttttccattccttctgccagcttcccatattcaggcctttattgctctacacctgcctcattgaaatcacctccaaagagaacacatctgctttcgttattagtggtctccactggctaaaaccacagtttcagctttttaacctggcataagtacctccatatacaatctctagcacctttttctgtacttaacactactctgtgaaccttctgctttagctaaaatgttctaattggtatttctaaccagatctgctacttcaaatttaagtggcacattatgtgtaaaaaccaggtggcaaaattataaacattatataagtttgaattttttgccttgtacctacccctggccaccctgttgcaactctttaayggttaatgattctctcctcattctgatgctctcctccttactctgctcaaaactttcttcctctcatctagccattcctttggctttagacccatcttttcctctctcttccaagaccctttcgggttaatacaac

SEQ ID NO: 252350 - DNA, 599 bp, Homo sapiens
aaggtgctttttgcagagatttragttaaatgtcaactctagagctcagatcttctctttctcagggaagtcctaaagcaggttagtctatgacttctccctcctctgaatttcagtggcaattacagtctgccccagtccttatggcataaattgtattttatttatctgcatttacccatataatatctattataggcccatgtgaaggtaaaactgggctcatatgaacagtcacaaacatccttggatatatggacactctatgaactgcagtctccctgctcctggcccttagaaataacctcttccaattctttctgctctttgttgtagctcaccaacagaagccagaccaggcacttttcagtaatcaaagtagtcctttctttcagattctagatcattgctttgtctatcttcttaattaaggtaagttcatcattcatgaggctcctcaatccagagagcaagttgactcccagggaattctctcaccaattcagagtcagaggctgttactgcatgagtatgtctcactccacagctgatcatcagcttcctgaggagagggcgcattgcacttctggttctccctc

SEQ ID NO: 252351 - DNA, 599 bp, Homo sapiens
aaggtgctttttgcagagatttgagttaaatgtcaactctagagctcagatcttctctttctcagggaagtcctaaagcaggktagtctatgacttctccctcctctgaatttcagtggcaattacagtctgccccagtccttatggcataaattgtattttatttatctgcatttacccatataatatctattataggcccatgtgaaggtaaaactgggctcatatgaacagtcacaaacatccttggatatatggacactctatgaactgcagtctccctgctcctggcccttagaaataacctcttccaattctttctgctctttgttgtagctcaccaacagaagccagaccaggcacttttcagtaatcaaagtagtcctttctttcagattctagatcattgctttgtctatcttcttaattaaggtaagttcatcattcatgaggctcctcaatccagagagcaagttgactcccagggaattctctcaccaattcagagtcagaggctgttactgcatgagtatgtctcactccacagctgatcatcagcttcctgaggagagggcgcattgcacttctggttctccctc

SEQ ID NO: 252352 - DNA, 554 bp, Homo sapiens
cactcatttaagaaataaaaattgattgaataccaaagtccaacccctccctaaggggaaaaaaataatgtatcaatccaatttcagtcgactacaatttaaagatgagatgacatgttcatcagtaattatattctggggtttggtgtgatctttagctgtacagagccaagttccataggaattcacctgtgtaacctccagacagatcatgaaaagttttcatcagggagatgaaatgtaagctggactttgaagactatacagcaagagtagagacagagaagggaggtcactgttggtggaagaataccaaaaaaaaggaattttgaggggaggaaagaatgttagctaagctgctaaagcaggaaagtccaggaagtgttytagataatggaaactagtgaagatttttgtggggattcagtagccaagtaaaggtagaggtgtatgaaatgatagcttcaaattggatagtgtgggtatctgaatgccaaaatgaattagctagaaataatggcatccataagaagcaaaatctggcaaagcgtggt

SEQ ID NO: 252353 - DNA, 548 bp, Homo sapiens
tgactgctaagggatataggtttctttgtgggctaatgaaaatattctaaaattcatggtgatggctgcacaactctgaacacatttaaagccatttagctgtaaactttaagtgggttaaccgtatatatgtgaattatatctcagtaaagcagctaaacacacacagagacatttttgcccattcccccgagattctgacacactaggtctgaagtgcagcccatgggtttgtctttgtaatgagctccccattcaatgtgatrttgattctgcaggtccacagaccatactgctccatcccatggaaagatgctcatgtttaatgagcaggataatgtttcatcatccagaactttctccagttctggccatagaggaccaggtgccataatgcttccagggttgtctcacaggaatgagagccaggattgcaaaggcgagatgtgatgtgagtccagagcaagcctagatgatgacagccgtggagctgggaaatgttctgcagctcaatgaagcccctgatgaggcccagagagaagaggaaa

SEQ ID NO: 252354 - DNA, 505 bp, Homo sapiens
ttttttttttttttttagtagagacaggatttctccatgttgctcaggttggtcttgaactcccgacctcaggtgatccgcctgccctgcycttccaaagtgctagaattacaggtgtgagctaccatgcccagccactagctttttaattacaaaatcccactgttgacttgaagtttagagatcctttccatcacacaaatactgttaacattaaactcccagaacaactcaaatttacctagtgcttcctcctcagtgacatgatatcaggtgttttaccagagacacattaagatgggaattaatccgtgaggggtactgttagaaaaggggcaagatctgaatgaggaacaggaatctttcaagtctagagttcagaaagacaaatcacagagcttcactgtggattataaggtgcttcaacacatcaagaacttcttgataaagtcagattagagggaaaaaaaacacaaaatcatggagaactcatcatatgcacgct

SEQ ID NO: 252355 - DNA, 527 bp, Homo sapiens
ccctctgtttcattagcaaataaggcataaaaaatgttcatactttcctaataaaccgttaggatcacaagggatggctgaagttcaaggaaaattakcttaatgcatctttcggagctgtcattagcattggaaagacaaaaaataaattgacagtggcccaaaaaaccctgagttggacctaagaatcacaaatgaatatgccacaaaaagagactttacatctgttaattctgcctaaacaccacaatcatcatctcacagcaataatcattgtgttgaacattacagtttttaaggtgtttctcccaagcaggtcaaagggtagaagggagaaaaatcttcatctgacgttttcaagagtagttagaccttaattccacctgaaactcaaaaagtagtgacttcaaacatcatatttaaatactgttgccacatgtattattttcttttaaatctttctgcaaccagatctcacaagaattctctcaagttactgagaccacgaaagtctcttttttttaact

SEQ ID NO: 252356 - DNA, 525 bp, Homo sapiens
cacatctgtcattccagcactttgggaggctgaaacagaaggatcacttaagcccaggagttcaagatcaggctgggcaacatagggagaccccttctctaccaaaaaaaaaaaaaaaaaaaatagctgggcatggttgtgcatgcctgtagtcccaactactcaggaggctgaggtgggagaatttcttgagcytgggagttagaggctgaagtgagccatgatcgcaccactacactctagcctgagcaatagagcgagaacttttctcaaaaaaaaaaaaggtgactttaaaagatacacattaacaaaaaatcagctttgaagttaaacctagattaagattaaagatttcctatggttttgttgagtctcaatacagcttgaccacactgctagagagaagtgtaggttatctccacagccacagatgagcatttgcagcactttgattctttggagcacagaaatgcagactctgctctcaggcattcctgcctctgctaacgcctttatccatcactg

SEQ ID NO: 252357 - DNA, 567 bp, Homo sapiens
aaatcagctttgaagttaaacctagattaagattaaagatttcctatggttttgttgagtctcaatacagcttgaccacactgctagagagaagtgtaggttatctccacagccacagatgagcatttgcagcactttgattctttggagcacagaaatgcagactctgctctcaggcattcctgcctctgctaacgcctttatccatcactgccatgctctaaaaatggtgcccatcttgccaggggcagggtagggaggcctcctttgctactttatagtccctctgtgtgttacagataacacttgacatactgtgagttacttgttttgctctcacctgaaatctgcaccaagtctcttcggaggcctccaagatcaaagggttgtactgatttagcwactacttcctagagtaaagtagtagccagaatcagattaaggtgttgtgattcagcttttgaaggcaagagtggtgatatatctctgaatagcctgatgcagtctttgaaagctagtgtgagaaaatcaggtacactggttatgttgattgaatacacaggttac

SEQ ID NO: 252358 - DNA, 595 bp, Homo sapiens
aatgccagtgattatatagggccagaaataatttgttgtcccaccagtcaaactggaaaaaaccttgtaatacacaggcctcagaatattgcttcagtaatgaggcaaaattagacctggaataaaagttgctctggtctcacattttacaaaagcaaatcttcaaaggaccaaactttataagtaattgaaatgtgacccaaagtgcaagaaccaagagcaagaatatttaaagaaattttttaaatatccagcatccacaaggtaaaatttaccatgtgtcattcaataaaaataattgccagacataaaaagcggaaaaaatacagttcaaaataaggagaaaagccaaacaacagaaacagacccagaaatgacaatgataagcattagtagataaagatatttttagagttgtaacaattrtattttataagtttaagaaagtagaagagcatgttgaggaaagacatgagagataggaaaaagacccaattccaaacttctggggatgaagaaaacaaaatctgagatgaaaactgcactgcttaatattacactggtattaatagttgattagacactgcagaagaaa

SEQ ID NO: 252359 - DNA, 434 bp, Homo sapiens
gcctcctgccaggaggtggtgctttctagaaagcatcagctgtagcagtgtggagagggaacagtggtggatggggccctagaactcccaagagtatatgccctttgtcttcagttaccagggtgggtagggaagggccattgggtgagtcagggctaggtgtgtctgagcttagactctccttgggmaggtcttgctgtggctcctgtgggggatggggtgaggtttccaggtcaatggagctatgttcctaggaggattatggctgcctctactatgtcgtgcaggttgccagagaagtgggggaaagccagcagtcatagatctcacccagctcccatgcaaaccgaagggcctgtctcactcccaccatgccccacctacccgtgacagcaccgagtctgtttccaggcagtgggtgagcaggggtgaga

SEQ ID NO: 252360 - DNA, 502 bp, Homo sapiens
agggcagttcccctgcatatgttctcttgcctgcctccatgtaagatgtgcctttgctcctcctttgcttctaccatgattgtgaggcctccccagctatgtggaactatgagtccattaaatctctttttctttataaattacyagccttgggtatttcttcatattagtataaaaatggactaatacactgcctttgctgtatcccagaggttttgatagggtatgtcactattattgttcagttcaaagaaccttttaatattcatcttgatttcattgttgacccaatgatcattcaagagcaagttatttaatttccatctatttttatcatcgtgagggttctgtttggagtcaattttcaattttattccactgtcatctgagagagtatttgatataatttcaattttcctaaatttattgagacttgttttgtgaccttttatatggtctatcttggagaatgttctatgtgctgatgaatagactgtctatt

SEQ ID NO: 252361 - DNA, 574 bp, Homo sapiens
taagtttatgtgagtccttatgtgtttggtgagtctcttgaagacagtggatacttggttgatgaattgttatccattctgccattctgtatcttttaagtggagcatttaggccatttacattcaatgttagtattgagatgtgaggtactatttgattcactgtgctagctgttgactgaatacttcattttgttgttgttgttgttttattgtgctattgtttcataggtcctgtgagattatgcttaagggggtctgtttggagtacttcaaggatttaagatttaaagctccttttagcagttcttgtagtgctggctggtagtggcacattctctcagcatttgtttatctgaaaaagactgtatatttccttcattcatgaagcttagttttcctggatacaaaattcttgcctgataatcgttttgtttaaggaggctaaagataggaccctaattccttctagcttgtarggcttctgttaataaatctgctgttaatctgataggttttcctttacaggttacctgatgcttttgcctcacaactcctaagattttttccttca

SEQ ID NO: 252362 - DNA, 537 bp, Homo sapiens
cacgtgtcacgcttaagtattcccagactccctggggcctgccaggactttgtctgattatagagccccctctttaaacaggggaggtagtccttaggatgaccaaaagccctttgcaaggccctaacctcagggcagaatgtctttaggcaagaagaggctaacatcctcagatagagaagaacctaatttttttaagatatggagaaaagatttttcacaattcaaagacagtttgaggatacttyagtgatcattacgttgaacaaaccacgataattgctaatttcaatggagacaaaacattgtgcaagaaaaaaaaaacaattgctatatactgtatggctcaattgttagtaaagtcattacagcataaatgctagaaattgatctttcaaaagtacaacagaaccaaatggggaggtgttagaatgttactagaagtgaaagagcaatgtgtgagaaaaagggctactcaccttccacagtaggaactgaaaaataatgcctaaaatgaaaacatagagtagcaatata

SEQ ID NO: 252363 - DNA, 519 bp, Homo sapiens
ttctatgtttctatctaggtccaaaagtagagctagtttcatttcttaggaaaatttccacttttctaaatgtcacctctctttgtctcaaatcaggaatcaacatgtccagggtgcagagctgtaaacacagcaaataaaagtacaaaagggaaaaactaaagatctcagaactccaatgaggtcacaacctgcaaaggaaaacaagtcatctcttcttgaggaggactgtgtataatatggggaataagaattagaggcttaaaaacttggagaaccactgaaacgatgaataatgtacagtctctctaatctcctatctcatacagttcacacaatgaacaaaccagtgaggtgtggaagagatgtaaacccttaccatactgtgtaagtgaattgcaatataaagttaatgacctagttttatccacttcttcagattaaaacaaacayaaacacaatagaaacttaccttcaaaaagagaccccaatttatattctccactgaaaaattgtggc

SEQ ID NO: 252364 - DNA, 507 bp, Homo sapiens
tctttccctactgccactatctgagtttttaccaccatcatctcacaactggtctcctaaactaaaactaaaacccaaacatattctttcttaaatgatcttggtgctttccacctggcctccatccaacccactctcctcatctgatcatgtcactcccctgctcaaggcccttcaagacctttctactgttctcaggataaaacccctgctctatatcatgacttacaaggcccttcaaggtctggtggctgcaactcagctttcactctctgggaacaacttgaataccacattgtgggcataaggaccttctgttttcattgcgtcagtattctattcaagaacctaaacatctgccccaggaactaggagaygagtcctattgctagttatgttgcttgcttttctagtatcacttacatccattttaaaaggtagaaactgtactccaggatctctgaggttcttcatggcagatctaaattgtaatgattcttacctgtt

SEQ ID NO: 252365 - DNA, 612 bp, Homo sapiens
tgcaaaacttcttgaaacagtacttattttctctcctccatacacaattgaaatggctctcaactcatgcccagaagtcagtgttcagtctctcacctggcagatagcaacttacaaagatgccccaacaatacctccttgtgtctagacagtcatcattatcctttacctttttctgtatttatttctgctcctaaaagggatctctatgtaaagtattgttatactagtgcttsttataattattatcagagttaaagccatcacaatgttcccaattacttaaagacattggaataacattttttttattttccacatcttgccaaaaaatattttgttatcagtaccttaataatggctattatatattgaccattactatttgctagaaaatttatatacctggtcgtatccaatcctcacagaacttctataaagttgtgctattatcacctatattttccagatgtggccgtaagactgaaatcacttaggtgacttgtctaaggtcattcagatacatagtagataacccaggatttgaacacaggcctcctagcacacaagctcatatcttaactactttaatacgttgctcgatgggatctt

SEQ ID NO: 252366 - DNA, 608 bp, Homo sapiens
ccctgggggctggtgtgggcactgtgggtggacttctcagtatctcacacttccacagcaacggggaaactccagggcaggaaccagagatatgcacagcaggagggggcgagatgctcttagggtgggcttgtgagccactgagggcccagaacggctgtcttagaaggccccgacctgtggaggaagtggagacagctccgtggccaaggagcagcaccagctgggccagagccatgtcagccaaagtgggcagcccagagatgacatctgatacgacacagacacatgtcagaggctatgcgcttattttcctgtatcttagaaaaataggaatcyaacatatcacacccatgataacgcagactttatttagacaatgtagataaataagcacacagctggaaggtaatcatgacaccagttgtgaaggggcacaagtgtgaagcgctggggcaggggaggcagggagagagctggctggcttgtgtctgtcctaggccagggtgtctggaaggaagatgcaaggcaggaggctgatgaggagcttggggccggggactggggggcctggcattcacaacaggggacacttgcaggcaggtatg

SEQ ID NO: 252367 - DNA, 608 bp, Homo sapiens
ccctgggggctggtgtgggcactgtgggtggacttctcagtatctcacacttccacagcaacggggaaactccagggcaggaaccagagatatgcacagcaggagggggcgagatgctcttagggtgggcttgtgagccactgagggcccagaacggctgtcttagaaggccccgacctgtggaggaagtggagacagctccgtggccaaggagcagcaccagctgggccagagccatgtcagccaaagtgggcagcccagagatgacatctgatacgacacagacacatgtcagaggctatgcgcttattttcctgtatcttagaaaaataggaatctaacatatcacacccatgataacgcagactttatttagacaatgtagataaataagcacacagctggaaggtaatcatgacaccagttgtgaaggggcacaagtgtgaarcgctggggcaggggaggcagggagagagctggctggcttgtgtctgtcctaggccagggtgtctggaaggaagatgcaaggcaggaggctgatgaggagcttggggccggggactggggggcctggcattcacaacaggggacacttgcaggcaggtatg

SEQ ID NO: 252368 - DNA, 593 bp, Homo sapiens
ttctttcagtccaagaatgaaaactggcttctaaaatgtcaatttccccctgcctgccccaattaatttcatcaaggaggcccaggaggagagatgtagagtctgagctgagccccaaaaratacattttctcctacatagataatgtgtcattaattagacaactgggtgcacccagaattcattttacataattgtctatctcaactccgaaaccgggatttgccctctgggcagggagcagtcagccagcggctctttgtttaaagtagcccaaggtttctaaaacttccacatggaaggggcggtgagaaagtagatccttgaggaaaggaatcaactacccacggactcacagagggtagtggtggggcacccagaccagggcagtcgagaagcgctggcgagaagacaggactcagccaaggcagagctgagagcaaatcccgctcactccacacgtggctgtgggaaaggcagtgacccctctgagctcagcttcctcacctgccacatggggaaagtggtacctgcctccctgggttgttgtgaaggttaaatgagacagagcatttgtaaagagcaagagaaaa

SEQ ID NO: 252369 - DNA, 593 bp, Homo sapiens
ttctttcagtccaagaatgaaaactggcttctaaaatgtcaatttccccctgcctgccccaattaatttcatcaaggaggcccaggaggagagatgtagagtctgagctgagccccaaaagatacattttctcctacatagataatgtgtcattaattagacaactgggtgcacccagaattcattttacataattgtctatctcaactcmgaaaccgggatttgccctctgggcagggagcagtcagccagcggctctttgtttaaagtagcccaaggtttctaaaacttccacatggaaggggcggtgagaaagtagatccttgaggaaaggaatcaactacccacggactcacagagggtagtggtggggcacccagaccagggcagtcgagaagcgctggcgagaagacaggactcagccaaggcagagctgagagcaaatcccgctcactccacacgtggctgtgggaaaggcagtgacccctctgagctcagcttcctcacctgccacatggggaaagtggtacctgcctccctgggttgttgtgaaggttaaatgagacagagcatttgtaaagagcaagagaaaa

SEQ ID NO: 252370 - DNA, 593 bp, Homo sapiens
ttctttcagtccaagaatgaaaactggcttctaaaatgtcaatttccccctgcctgccccaattaatttcatcaaggaggcccaggaggagagatgtagagtctgagctgagccccaaaagatacattttctcctacatagataatgtgtcattaattagacaactgggtgcacccagaattcattttacataattgtctatctcaactccgaaamcgggatttgccctctgggcagggagcagtcagccagcggctctttgtttaaagtagcccaaggtttctaaaacttccacatggaaggggcggtgagaaagtagatccttgaggaaaggaatcaactacccacggactcacagagggtagtggtggggcacccagaccagggcagtcgagaagcgctggcgagaagacaggactcagccaaggcagagctgagagcaaatcccgctcactccacacgtggctgtgggaaaggcagtgacccctctgagctcagcttcctcacctgccacatggggaaagtggtacctgcctccctgggttgttgtgaaggttaaatgagacagagcatttgtaaagagcaagagaaaa

SEQ ID NO: 252371 - DNA, 593 bp, Homo sapiens
ttctttcagtccaagaatgaaaactggcttctaaaatgtcaatttccccctgcctgccccaattaatttcatcaaggaggcccaggaggagagatgtagagtctgagctgagccccaaaagatacattttctcctacatagataatgtgtcattaattagacaactgggtgcacccagaattcattttacataattgtctatctcaactccgaaaccgggatttgccctctgggcagggagcagtcagccagckgctctttgtttaaagtagcccaaggtttctaaaacttccacatggaaggggcggtgagaaagtagatccttgaggaaaggaatcaactacccacggactcacagagggtagtggtggggcacccagaccagggcagtcgagaagcgctggcgagaagacaggactcagccaaggcagagctgagagcaaatcccgctcactccacacgtggctgtgggaaaggcagtgacccctctgagctcagcttcctcacctgccacatggggaaagtggtacctgcctccctgggttgttgtgaaggttaaatgagacagagcatttgtaaagagcaagagaaaa

SEQ ID NO: 252372 - DNA, 568 bp, Homo sapiens
tgagttttaataccaacagactaaatgtaaaattaggaaacgtaagccacttgtttccctactaactggattctggatggcytgttcatcatgaaacttaggtatttggaaaaaggccatgaggaaaatgttatcttctaaacccagacctgggccactggtcctgtgcctacagtgtttcccggacttggcaataggatggattttaataatggtgaagctctgtcctgcaggagcttccatggggccacacttacagatactccatcccccggctgccgggctgccatgttcctgggataacgtcatgattcatccggtttcctgcacctccagaataggccatttatctgagcctggccaggtggcaccggaatgatgactagagaaggggcttcattgttcgataataatttacaccagcctggggaaatactgtctgtcttgtaaaagaatgttctgcatgaagggaagcatgcacgtactggaggatgaaaaacaaacaaaatcaacaacaaaaaaggagaggcttctatcagaaattggtccacataggaaatgaatttaa

SEQ ID NO: 252373 - DNA, 568 bp, Homo sapiens
tgagttttaataccaacagactaaatgtaaaattaggaaacgtaagccacttgtttccctactaactggattctggatggcctgttcatcatgaaacttaggtatttggraaaaggccatgaggaaaatgttatcttctaaacccagacctgggccactggtcctgtgcctacagtgtttcccggacttggcaataggatggattttaataatggtgaagctctgtcctgcaggagcttccatggggccacacttacagatactccatcccccggctgccgggctgccatgttcctgggataacgtcatgattcatccggtttcctgcacctccagaataggccatttatctgagcctggccaggtggcaccggaatgatgactagagaaggggcttcattgttcgataataatttacaccagcctggggaaatactgtctgtcttgtaaaagaatgttctgcatgaagggaagcatgcacgtactggaggatgaaaaacaaacaaaatcaacaacaaaaaaggagaggcttctatcagaaattggtccacataggaaatgaatttaa

SEQ ID NO: 252374 - DNA, 599 bp, Homo sapiens
tgtgccacagtttcttataacttcttaagaagccacaggagaaagcttctgggtgaaatgatcagacatttctaagctgcctgttgctgccagtcatgcttctggtgcagtgtgtgaggatccacctcatgcaccccacaggcatggaggatggctggggtttgttgtgtttcaagatttaaaattaaaatctgctgggcgtggtggctcatgcctgtaatcccagcacttcaggaggcygaggtgggcagatcacgaggtcaggagttcgagaccagcctggccaatacggtgaaaccccatctctactaaaaatacaaaaattagtcgggcgtggaggcgtgggcctgtaatcccagctactcgggaggctgagactggagaaccgcttaaacccggggggcagaggtttcagtgagccaagatcgcgccgctgcactccagcctggttgacagagaaagactctgtcttgaaataaatgaatgaatgaataaattaattaattaaagttaaaatctttcttgaagaacagcttttttctggacatctcattcatgagcccccactggctctgggctccccatcctgctttgtccga

SEQ ID NO: 252375 - DNA, 599 bp, Homo sapiens
tgtgccacagtttcttataacttcttaagaagccacaggagaaagcttctgggtgaaatgatcagacatttctaagctgcctgttgctgccagtcatgcttctggtgcagtgtgtgaggatccacctcatgcaccccacaggcatggaggatggctggggtttgttgtgtttcaagatttaaaattaaaatctgctgggcgtggtggctcatgcctgtaatcccagcacttcaggaggctgaggtgggcagatcacgaggtcaggagttcgagaccagcctggccaatacggtgaaaccccatctctactaaaaatacaaaaattagtcgggcgtggaggcgtgggcctgtaatcccagctactcgggaggctgagactggagaaccgcttaaacccggggggcagaggtttcagtgagccaagatcgcgccgctgcactccagyctggttgacagagaaagactctgtcttgaaataaatgaatgaatgaataaattaattaattaaagttaaaatctttcttgaagaacagcttttttctggacatctcattcatgagcccccactggctctgggctccccatcctgctttgtccga

SEQ ID NO: 252376 - DNA, 571 bp, Homo sapiens
ctcagtgctaacacaagccaaggtttaggttccggtctacatgtctccaaacccattgtctctggaccacaatcatactgtgtrcacagtccctgaccggagtctctcctgggacacttaactttcttttaaggactcttcattctcaccctcatgtccacgctggctcagtcttatcctttaagcccttatgatgcctcattcctccaggaagccttctgagaggaacaatcagagacagaagtcaaaggctggagcccctgtgcttgcttctgggggaacctgagctggaagtcagcagatgacatttgagcctccctggccattgcttattgcctgggcacatagtgaataccactcaggacagggtccagagggcaaggctggctggtgtgtgctggcctctcccccatatcccaggctgggcagcccccactgtgtttccatagtgatgatgacaactatgatgatgaccttattggtcatcattgggtggccacattcgatgctcggcgttttctacgtaatatcttaggtaattcccctaccacctgctgctccacaatcaggt

SEQ ID NO: 252377 - DNA, 549 bp, Homo sapiens
ggatttaacaagaaaagaaagagtagtgtttttctttgtgtgtgtttcccggcaaacgccaagtctgccaaatcttggcttcaagttgaccaaaagttgttcttaaaaatgttctgtgatccgtttctgasccccctaaagttactaattaaaaaaggaaaaatgtcacacagacctactaaatttctaaggtattatttggagttgttgaacccatatcatagggctttcaaactcagtgttgaataaatttcaaatttcccaggagacagaaatggctccaaagagattttccccagggccccgagatctgtaaatcgagataattctacgcattgctgcctgagtatggaaattaccagcaaaagaaattaagagcaggaaccccgtgattagactaatgcattgatcaagtcgttcttctcggtctcactgccagcacagcacataaataacatgtgggcaattaccatgagtaaattatatgtgttttataaccttccgtgaacatttttcccttaaaaaacaacaacaacaataacaaaacaa

SEQ ID NO: 252378 - DNA, 555 bp, Homo sapiens
ggctttcaatagatttgccataaatactccaccttagaagactgtgttacaaacccggggcaaagccaagccaggaactttcatggatttaacaagaaaagaaagagtagtgtttttctttgtgtgtgtttcccggcaaacgccaagtctgccaaatcttggcttcaagttgaccaaaagttgttcttaaaaatgttctgtgatccgtttctgagccccctaaagttactaattaaaaaaggaaaaatgtcacacagacctactaaatttctaaggtattatttggagttgttgaacccatatcatagggctttcaaactcagtgttgaataaatttcaaatttcccaggagacagaaatggctccaaagagattttccccagggccccgagatctgtaaatcgagataattctacgcattgctgcctgagtatggaaattaccagcaaaagaaattaagagcaggaaccmcgtgattagactaatgcattgatcaagtcgttcttctcggtctcactgccagcacagcacataaataacatgtgggcaattacc

SEQ ID NO: 252379 - DNA, 471 bp, Homo sapiens
tctgtcctgaattcggctaaatcaagctgycaatcaacaccaaagcttcccttcgtcccagtcaggctgcaggaaaatggaaagagagggagcctcagggcagactcctgagctgcgtcctggctctgatgtcaccagctatatgaggctgtgggcacagcacatgggacacagcacaggggacagcaagtgacccacacttggagaaatcaggagattcaccacaggggctctgcacggcagggaatggcagtgtcaaaaatcgtgtgtttatacagatggtaacagtacatatctaacacaaacttaccatcttaacttttctacacatgcagttcagtggtattaaatatattccccttgttctgcttccatcaccaccatctacccacaggactcttttcttcctcccaaaatgaaactctgttcccatcaaactcctgggcagagctgccccatctatggcccaca

SEQ ID NO: 252380 - DNA, 605 bp, Homo sapiens
ctctattatatgttattaagtaaaattgccaggcacagacagtatcaggtattggcaagaatatgtagagcaagtgggacccttayacactgctgggagaaaagtgaattcggacataacccctttggaaaacaatttggtattatctaataaaatttaaagatgtgtatgaaccttataacctaccagttttacttattaacagattctagaggaattcttgctcatttccccaggtgacagaaatgttcatagtgccatttataagaaaacaaaacagcaacaaacttctagaaatctgtgtccagagtagaataaataaatgttgagaacactatacagccatgaaaaataaataaattataacaatctgaatcttaaacagtcatgttgagcaagagaaacaaactgtggaaacatacatgtaataagattggattccatttatatgaagtttaatataattcattaaactgtatgaaacattaaacatgttgtttagggggaaaaaaaattgtaaaactacaagcaaggaattaataagcacaaaatcaaggagagtggttacctcaggagagaaaacgagattagagagggcacatggg

SEQ ID NO: 252381 - DNA, 551 bp, Homo sapiens
cagtaaattgacttttagcaaattgacttggatagaatcctgttgttaccttcatgttggagatggtgaaactggggctcagaaaggttaccacacctgtccaaggtcacacagctagtagatggcagagctgtatctcaaacacaaacatattttattataaagctcatcttcagctgggcacaagtggctcacacctgtaatcactttgggaggtcaaggcaggaggatcgcttgagttcaggagttcaagaccagcctgggaaaaatgatgaaaccccaactctacaaaaaatataaaaattagccaggtgtggtggtgtgcatctatagttccagctacttaaaggctgaggtgagaggatcacytgagccaagggaggttgaagctgcagtgagccatgatcgtaccactgcactccagcctgggcaacagagtgagaccctgtctcaaataaaaagaagaagaagataaaaataaagctcatcttcttagctctattcataactcatgtatcccttatgactctatctaccacccactgccccat

SEQ ID NO: 252382 - DNA, 518 bp, Homo sapiens
ctatatataattttaaaactatatataattttgaagtaagttcaaatcttcaaaacctctctgatctttgttgtatttaattctaaattatacagttttaaaaattgcataccatttatatatatatacacataattaaatgtatacatataattttatttatttattaaaacacagatggggtctcactatgttgcccaggctggtctcaaactcctggatgcaagcgatcctcctgtctcggcctcccaaggtgctgggattacaggcrtgagccactgcacctggccaaatttatatatacagttttaatttaaattcagaattggaatcctaaatgtttgaaaaggtatggcttgctggagacaggctgaggactgacactagggcatggctggggtccttcctttcctcttcttcctatttcatcttggaagccaaatgggccaatgggctgaattactttatcctggttgatcaagcagtgtgttatggggtcacttaccaccttcgcccca

SEQ ID NO: 252383 - DNA, 550 bp, Homo sapiens
aaccatcacaatatatatgtgtgtgtgttgcttgtgtgaaacattacatataaaaaactggcctcatacattttacttatgacctataaatggggtctatcactattacctcattttttgctgctaacttgcatcaacatagaaagagacttggtactcggtagtggcctaatcttggggagatggggagaaactctttaaggaaatatatatgactaagaagcaggracttacagctcaggactcaccctcgcctccttcggaagtgcaggagcctcctcaccatctcctggttccccacagagaacacacttggcgggagtttgttgagtggacacatgcatggagagtgaatgaatgtgtgctgtgcctggggctcacagaagtcaggacttaacgattctcttctataacatcattgggacttactttttacaagttggatttcttgaatgcagtaacttaaacagggttcaggggattggcagatttaggaagattatctagtcactttcatgaaggtggagctgggtgtaggagatagctacaa

SEQ ID NO: 252384 - DNA, 596 bp, Homo sapiens
ggacccacagatgtgggcgtcaacctgcctgcagggcccctggagctccagattctcactgggggtgtggggtgggagggatctgaggggacctcagaatgatgctcttttctgggcatcttcagcatgcatggggcgtcccattggctgagtggaggagctttgggaaacagagctggcctgaggctctcagcacagagaggaagggagaaggaggaaggggagtagagctcagtctgaggggtgctgagagctctccctcttctgcttcccctgcccagcacatgcctctgaggtgagtggggtgtgaggattctgtgggcctgatttcagctgcagcaaggacagagagccaggtggatttctccatcccaattgtcatgggatgaagaaatctragatgacaaaagtgtagggccagagttgccagcaggggtggaagtatggggctgagccatggaaaagggcagggtcccaggaagatcccctgagcctcaggagggactcctgtgtgtcttagtcctttttggctgttataaaaatgccatggactggggaacttataaacaacgctgtagattgggcaacttataaac

SEQ ID NO: 252385 - DNA, 578 bp, Homo sapiens
taaataaaaaaaaattggtgattgtagctcatatcacattaaaaactctacattgtatacaaatatttaatgatcttttgatgaaggagaaaatcatgggcaaatagtttcataaaacttaataattttgtagtttggttctgccttatacctgcactgatggtgaaaaagtggtgctttgaagcatttcacctcatttgtataattctcttacaatacttgtcacatacttacacttattgcttatgtttctcttgccagactaggttctcaggaaatagagtctatttatttccagattcctgtgtcttgyggagtgcctggcacacaatagatgctcaatatgggtttgtgggatagaatcgtgtttcaaaaacagcaccgaagcactctgcactggtctgaacacagagtatgtcccagctaagagcattgttaaccttgaggctcttccttcagggccctgatgatggttgccttcaacattgcctcaatactcaacatccaagacagccctggcttagcaactggaatcacggatggggaaaattttttctcaagcacatgtgaaatttggc

SEQ ID NO: 252386 - DNA, 570 bp, Homo sapiens
catgacaacactcagggggagtgaaagcataagtggaaaccggggccagaagatcctggctcagtgaatggtgagtccttggatgcttggtgtgattaatgggtgggttgggataagggtggggaggagaagaggctggaggggtgaggaagaggcagccatggggacaggccctaggagagacatgttgggcccatgccgcagagtccttgaatgtcatgataagatgtccaggcccctcatctcagatgcagtggggaagctctttgcttgtcttcactggcactccacaaggcaaccttctccagtcactatcagccccagggaagttctgctgacattactggcaaaaccactctcctctgtctctgtctctgtctctttctctctctctttctcttttccctttctctctctctctttcacacacacacacacacacacacacacacacgcacacacamacacacattatttgattatttgtcagtgaatctgtaatggctctctccatagaccctatgtctaggttaagaaactgtatctgacttagttaattatttttctcac

SEQ ID NO: 252387 - DNA, 589 bp, Homo sapiens
tattttcctccaagatgaaagtggtgttcttttcttaaatcctatctcccatgcatctggggaagaggagaacaaacacagataaatcacgtccagaactgcctgcttttcatcccagatctgcagaaactggggactgtggagcattcagtcaatttaatgaatgagtcacttctagcaaacagtatgtgacaaagcactagaataatatagaaagacctcctctccttaggaatttattaattcaatcagtgaacattaattgagcattttctacrtgccagtgactatggtctccaagaaaagattgaaaccatcattctaccagtaaaggagcttgtaattatgggaggaacacacagctttattctttactacctctataacctggggcaatttacttaactttctgagcctcagttttcaaatccatacaatcaagatatcgataataatgataataataacaacagtgtagtacagaattgttatgaagattgaatggattaaaattaaaatagcaggtaggacagtttctggagaaggagtaggaaggcccattgggggaatacatggcatataatatccc

SEQ ID NO: 252388 - DNA, 513 bp, Homo sapiens
gacaagggcctttgggaggtagaggtgggtttacagatatgatggcaggtagggctggagggcaaatgtatgagaagaccaattggctttgaatccagctccattaactaccagctgtgtgaccttggacaagttactacctaacctctctgtccttctatttccccaccagctctaaaatgtcgagatgaataatagtatctaacttttgggttgccataaagattagatcagtcagaagtgcaagtgtctgccactgtgttagttctcagagaactttagttaaaaaaagaaaaccaataaacagaatgtaggatcttattttcaacccaggaagatggagakaattggtacaagtggaggtagctagatgatatggaataggaagtcccatgagcttctatagccattagcctgggggaattgataaccttgtcttatatgaagtatcatgacagccccaatgggtactattgaccagaaagaaaatctgtaatactggaagagggaaat

SEQ ID NO: 252389 - DNA, 513 bp, Homo sapiens
gacaagggcctttgggaggtagaggtgggtttacagatatgatggcaggtagggctggagggcaaatgtatgagaagaccaattggctttgaatccagctccattaactaccagctgtgtgaccttggacaagttactacctaacctctctgtccttctatttccccaccagctctaaaatgtcgagatgaataatagtatctaacttttgggttgccataaagattagatcagtcagaagtgcaagtgtctgccactgtgttagttctcagagaactttagttaaaaaaagaaaaccaataaacagaatgtaggatcttattttcaacccaggaagatggagagaattggtacaagyggaggtagctagatgatatggaataggaagtcccatgagcttctatagccattagcctgggggaattgataaccttgtcttatatgaagtatcatgacagccccaatgggtactattgaccagaaagaaaatctgtaatactggaagagggaaat

SEQ ID NO: 252390 - DNA, 583 bp, Homo sapiens
gaaggcagagtttgcagtgagctgagatcgtgccactgcactccagcctaggtgacagagtgagactctgtctcaaaaaataataataataatagcctttctgacagatgtgagatgatatttcattgtggttttgatttgcatttctctaatcatcagtgatattgagctyttttcatatgcttgttggctgcatgtatgtctttttgtgaaaatgttcatgaggagaggactcaatgtagtttcagaaacaccgaagaactgtgtacacttaaaaatgcagcctgagtgtaaggatgtagcttggtagtgcacaaaaacactgcaataacagtattggtttaggtccaaaacttctaattaggtgataaaagaaagagcaagagaaaaagataattctttatgtgctcacatagcatcatactcacaatatactctgttttgagagggaagggaaggacagcttgtagtatagaatgtacagtataatcttgtttatgtttgcatagaaaacttttcaaagtctggaaaaatataccctaaactgttaatggtaggcatctctgagaggagggatcatagt

SEQ ID NO: 252391 - DNA, 557 bp, Homo sapiens
ccaataatcagaccatagcagattctatattgggttgacatgtggctaatatgcagtatgtttcaccagctgtgtgggtatttaaaataataaaatgcttctgtactagctggagaaagccactgtcccaagccccacaagaactctccccaatccactcacgatccagcaggtgaagggttaacaccaagtacatccgggagcttccagattccctaatataattctaagggcagggtccattcagcttgatctgtttacaggctgggaaaattgtaatttttaaaatatcgyctttttcccctccccaaaaaagtggtgattttttttttttttttaaacctcatgttggctccaatcagaattgcataatgacgctcctgctggaagaattttagaacatcggttcgcaatttttattgcggtcatgactcacatgtcaaatgacttttacataaaggactcactctcataggcttacccaaattttaaaaatgattctggtttgcatttcgcccagatgcaagctgctgaattgggattgctacccaagactc

SEQ ID NO: 252392 - DNA, 584 bp, Homo sapiens
aaatacaaaattatacaggattcaaattaatcacatggacaggcataaaacaccagactctaaatattatttacccagcatcaagcagatgtttgtttccaaagctacaatctcctctaattggctgatgctgtgctgcatagactccaatgcaagcttatgttctataatgaatgacaaatgcctagaagaatcctctgtgaattggcagcctcctcctctagcatgcaaattatgccgaaatcccatcagcagacgcagataagctcatctgcatgattggcaaactagtggataaacacaccccaggattcattgtccaaattcaatttggtggtttcatctccattttcagtgatcatttatttgttaatttattcattagccaacatgatgaagcagctattcggaaacaggcactgtcttaggctttaggaatacaaaggtaaataaagatatggtctcttccttcaagaagtccacaatgaaggaagtgagacgaggccgggaaagaaaacgaactaggaacaagtacaaaamtagagatatgggcaaatgtcagtggtgatacagaggaggggtga

SEQ ID NO: 252393 - DNA, 608 bp, Homo sapiens
aaaaatggattctggccaacttaagccaaaaaaacaaaagctaaaatagaaagaaagctcttttgaaaaggctgcctcaaagatctaggcaacaggaactaactgaaaacccattaaggtaccttaccaygtttctccggaatggggcctggggggcacctccaggcctattctagggagagctaatctgattggtttagcctgggtcacatgaccatgcctgggcaggcagagagcctcttgattgacagtcccacccgacagttttgaatgagggagggaggttccccagcgtgagggtgggtgctgttgcctgaggaaggggagttgtttaaaacaagaggagaagctgcaagtagactactagtaacgagagagcagacctgagaagcaaaccagaaaaagggacttctattaatttgtcaccaggacacactgccgtttcatgtgcaatgcagctgtgcttcaaatcggccccctgtgtaatttcaaggataaatatagagctttttcaatagttaaaaaaaatctaatggcaagaactagatacatttctgtgcgttttatgaagaaatttactatttttttgagtagagaatacttgagta

SEQ ID NO: 252394 - DNA, 607 bp, Homo sapiens
aaaaatggattctggccaacttaagccaaaaaaacaaaagctaaaatagaaagaaagctcttttgaaaaggctgcctcaaagatctaggcaacaggaactaactgaaaacccattaaggtaccttaccacgtttctccggaatggggcctggggggcacctccaggcctattctagggagagctaatctgattggtttagcctgggtcacatgaccatgcctgggcaggcagagagcctcttgattgacagtcccaccygacagttttgaatgagggagggaggttccccagcgtgagggtgggtgctgttgcctgaggaaggggagttgtttaaaacaagaggagaagctgcaagtagactactagtaacgagagagcagacctgagaagcaaaccagaaaaagggacttctattaatttgtcaccaggacacactgccgtttcatgtgcaatgcagctgtgcttcaaatcggccccctgtgtaatttcaaggataaatatagagctttttcaatagttaaaaaaaatctaatggcaagaactagatacatttctgtgcgttttatgaagaaatttactatttttttgagtagagaatacttgagt

SEQ ID NO: 252395 - DNA, 513 bp, Homo sapiens
atcatcccagctactggggaggctgaggcgggaggattgcttgaactggggaagaccaggttgccatgagccatgatcacgccactgtattctagcctgggtggcaggaccagaccctgtcccaaaaaaaaaaaaaaaaaaaaaaaatccctcttccctgattggtgggactgtaagctggtgcaacctcttgggaggagcaggtggttagaaaacatgtatcaaatttttatgcaaaatttaaatagacccacaattagaccctaggaatttattctccagatattctcatgcatgcgtgcaaggtatatttgcaaagatttgtatccagcactatctgtaattgcaaaaatccagaagcaacctcagtgtyaatccttagaagactgtgtacatgagatactgtacatgttggttgggttctccgagaagcgcatgcccggatagaatgcaaaagattcattagggagtaacacctctgccagaaaagcagaagagataggattgggcagg

SEQ ID NO: 252396 - DNA, 516 bp, Homo sapiens
gcccaggcaacaagagcaaaactccacctcaaaaagaaaagaaaagaaaagaaaaaccacaacctccaagtttttggggagactgatttgagtgataactccagttcttccacatggccagcctcaagttaattaaactctttcttcactgcaataccacagtctcagcaaactggttttgtctatgcagtgggtaggaaggttgagtaatcacactacagttctttctggattccaggagtctctctccccttcccttttagacctggttggtaagggctctgtgctgttgacagttccagagtacctcacatcctttgtttcatttaacccagtccatgcttctgtaaatactctctttgctaaactstcctcaagtaattgattttaatgtgcatccattgcctgccaggacctgattagtccatttcaagcatccaatatcaaagaatgcacccaaaacaaagatgctgttaggaaacacagaactgggcactgcaaaggtctttgagcatg

SEQ ID NO: 252397 - DNA, 516 bp, Homo sapiens
gcccaggcaacaagagcaaaactccacctcaaaaagaaaagaaaagaaaagaaaaaccacaacctccaagtttttggggagactgatttgagtgataactccagttcttccacatggccagcctcaagttaattaaactctttcttcactgcaataccacagtctcagcaaactggttttgtctatgcagtgggtaggaaggttgagtaatcacactacagttctttctggattccaggagtctctctccccttcccttttagacctggttggtaagggctctgtgctgttgacagttccagagtacctcacatcctttgtttcatttaacccagtccatgcttctgtaaatactctctttgctaaactgtcctcaagtaattgattttaatgtgcatccattgcctgccaggacctgattagtccatttcaagcatccaatatcaaagaatgcacccaaaacaaagaygctgttaggaaacacagaactgggcactgcaaaggtctttgagcatg

SEQ ID NO: 252398 - DNA, 583 bp, Homo sapiens
cttctgtaaatactctctttgctaaactgtcctcaagtaattgattttaatgtgcatccattgcctgccaggacctgattagtccatttcaagcatccaatatcaaagaatgcacccaaaacaaagatgctgttaggaaacacagaactgggcactgcaaaggtctttgagcatgacacaaggatgttgcaagagcggcaggcccagaaggcaagtggggattgaagaaccttaacagcatattcacggggctcagtcctaggattcagcatcatgacatatcacctccaagcttccatgctttcatttgtatagctaagacttgacaagactagtgagggtgtccgatgatgaggacagtcaaggatgttaaattcctgactatacattaacaaggaggaaaaaaactaacaaacctgcatcagtgtgaagaccagaaaggcctgtccacagagccagatgacaaggtacaacaggatgcygttgaaaaaaatcagactagataagagcaggttgctgtgtgagcaaactcagaccatacaagagaactataggcccctctcctccagcccagaattcctgc

SEQ ID NO: 252399 - DNA, 526 bp, Homo sapiens
gggctcccaaattgtataagcttcaagaccaacaaaacctggatctgtccctaacaagaatacccaaaaatatttgtgaaattaataaataaatgttcccaacatattgcaccctcttatgcttttagcagaaagaaaccatctgttagatagtttattcactaagttcttcagaataactttatctcttatcttttgacactaacaaaaaaataacttgatcatgcccttcagatctccctagcttctggaattcagaatcttaatgtatttttctctgcctctatcagagacccactcatgtaagggccccccctttttttcacttctctgaactttattcccagatgaaacctgcctcctactatcacctctcatgagaggccaatccattatgaagtgttcatttctgggtcccactacggttccctacagaaccaatttgaagaaactcagcaattgctcatattcattctaaactgatgttctctgatgtttyttaaaatttcaaatcaaaatgaattct

SEQ ID NO: 252400 - DNA, 637 bp, Homo sapiens
acataagtcagctcctttggtgtataattcatcacctcctttcataagcctagcatatgtccattgtagatctcaccttagttactggtctggcagccagaaaaggaaacacaggcagatcctgtttccttcctatgaggaagacctgcattgtcttgtaaggccccagtgtcatttgaggtgtctgcattgtcttcaaaatggagggtggtggctctattttccacaaggtggaatgagccatttctgcaggctcggagggttctggagaatctgggcaatttaacagactcaagggaaaatatttagaagttccctttccagagctccatctctatggggaccctaactctagtattgcgaattcagactgctttgaaattctgcccctcttaaaactaaatctagtgtgtctagtcttcaggtatgtctgccctccagctacagaagatgaggktctctttatgttcttcccaaaaggcccactcactctcacagtttgctttagattgttgactgattgcccagagcctattttccctcatcagtgaccatccccttccacagccctcctaattgttagtcctcctatgctagagccagtgcatcccctcctacctatatcctgtccaaattg

SEQ ID NO: 252401 - DNA, 570 bp, Homo sapiens
ccagctgcctcccactcaccagctggaaagaactctgggaacaagtggcttgtgtctctgcatattcctcacttggcaaatcaaaaaacagttggattagaggattaggcattaaatgaatggctaatggcttctgtgagacactgcacagaggccataaagcaggtggcagggcacaagctgagctgtagagtttacaaaggcaggcctcaggccttcatcctggagaaactctgagaagaaggagaacatgggagaagatgaatctattcctccttcgtaaggcccagctgggctgttatcttaacccctgctctatggattgctaaatcaaaacaaaggattcgggtcagaggcttgttttccttcagtcaattgatattttttaaacttataccatgtggtaagcttgttccagggtctgaagacagacatgaataacaytggcactcttcctacctttacctgagctatagttgagaatatatatcagaattacatggaacttataatgcagagtccagggcctcattactaaactatcctgacacagatctggagcaggtatca

SEQ ID NO: 252402 - DNA, 599 bp, Homo sapiens
cttgggcaagttcaccccacctctctgtgaccccactttcctcttctgtaaaatgggcatgtaatggtaccaacgacaccatgctaatttaaggtgatgcatgtaaaacatttcagatcgttcccggcacctggtagctgttggggccatttactactgccttcttgctgagccaggaagttactgtcttagctytttttctatcagctggcatgattctgccatacagatccttgtttgggttttaggaatgattttctatttagtttgggagtgtgctatgatctgaattgtgcctacccaaaatatgttgatgccctgatccccagtgggatggtatttggagacggggtctttgagaagcaattaggtttagatgaggtcatgcaatggaattcgtgttcttataagaagagacatcagagcattcacattaatgttctctttctctcattcctgaccatgctggcactctaacctcagaccttcagcccccagaactgtgagaaaatacatttttattgtttaagccacccagtctagggtattttgtagtggcagcctgaactaatacagaatgtttgctaattttccagaac

SEQ ID NO: 252403 - DNA, 599 bp, Homo sapiens
cttgggcaagttcaccccacctctctgtgaccccactttcctcttctgtaaaatgggcatgtaatggtaccaacgacaccatgctaatttaaggtgatgcatgtaaaacatttcagatcgttcccggcacctggtagctgttggggccatttactactgccttcttgctgagccaggaagttactgtcttagctttttttctaycagctggcatgattctgccatacagatccttgtttgggttttaggaatgattttctatttagtttgggagtgtgctatgatctgaattgtgcctacccaaaatatgttgatgccctgatccccagtgggatggtatttggagacggggtctttgagaagcaattaggtttagatgaggtcatgcaatggaattcgtgttcttataagaagagacatcagagcattcacattaatgttctctttctctcattcctgaccatgctggcactctaacctcagaccttcagcccccagaactgtgagaaaatacatttttattgtttaagccacccagtctagggtattttgtagtggcagcctgaactaatacagaatgtttgctaattttccagaac

SEQ ID NO: 252404 - DNA, 618 bp, Homo sapiens
ccttgggcccttcatggagctcagaccaactggatcatctctgaggttttccccacagtgaggaaggatgaagataagacacaaagaatggaagacgtagaggcagagaagtttgctggtggagcggtggaagctttaagctcttcctactgttggccacagctttataggagaaagaagatgtggggtcttaagaactcaccttgaagatatggaagggggagctgaccaggkgcacttgaaaggatggcatagcagcatgagagctctgcagaggttgaagagtttgtatgtagagctgcaccagttcacagtgtggtgtgatttgctttactatggctcagtctcctctgggatggggaaagagaaggcatggttgagggaagccttggtgtatatcccctgtgctattctgccttaactcatagttaatttttcacatgtctctcatcttatcaattcttgtatcccaggtcagacacaaagcctgacacctgggaaggtgtttctcagatgtgagtgatgaatgtttcctttcagctctaaaccctgatggcctttcaaatgctgagtactcctgtacccctttcatgatccatcctactgcctaccctcacc

SEQ ID NO: 252405 - DNA, 562 bp, Homo sapiens
gggaccagcaaactagggcctgtgggccaaatctggcccactacctgattatgcaaaggcctaagagctcagtatgactttatacttttaagtgattgaaaaaaaactcaaagaagaatattttgtgacacatgtaaattaaatgaaatccaaaattcaatgtctataaataaagctttattggaacacagcgacgctcasttgtttacataccatctatggctgtttccatgctacagaatcaaatacttgagaccgagatcgcaagaacctaaactacagcttgcaaagcctgaaatatttacaaccaggccctttacagaaaaactctgccaactcctaatctgtggtgtcccatggatcaataatgtactccctttacttgcagtacagtactccattccattgtagggataggccacaagttgtttatctgtttgtctgttgatggacatttgggttactgcccaattatccttaatccacgtgatgtgctctgatgttttgcatcctatttcattttttaaaaaattgccactcatgacccaatggttgatatcac

SEQ ID NO: 252406 - DNA, 562 bp, Homo sapiens
gggaccagcaaactagggcctgtgggccaaatctggcccactacctgattatgcaaaggcctaagagctcagtatgactttatacttttaagtgattgaaaaaaaactcaaagaagaatattttgtgacacatgtaaattaaatgaaatccaaaattcaatgtctataaataaagctttattggaacacagcgacgctcacttgtttacataccrtctatggctgtttccatgctacagaatcaaatacttgagaccgagatcgcaagaacctaaactacagcttgcaaagcctgaaatatttacaaccaggccctttacagaaaaactctgccaactcctaatctgtggtgtcccatggatcaataatgtactccctttacttgcagtacagtactccattccattgtagggataggccacaagttgtttatctgtttgtctgttgatggacatttgggttactgcccaattatccttaatccacgtgatgtgctctgatgttttgcatcctatttcattttttaaaaaattgccactcatgacccaatggttgatatcac

SEQ ID NO: 252407 - DNA, 562 bp, Homo sapiens
gggaccagcaaactagggcctgtgggccaaatctggcccactacctgattatgcaaaggcctaagagctcagtatgactttatacttttaagtgattgaaaaaaaactcaaagaagaatattttgtgacacatgtaaattaaatgaaatccaaaattcaatgtctataaataaagctttattggaacacagcgacgctcacttgtttacataccatctatggctgtttccatgctacagaatcaaatacttgagaccragatcgcaagaacctaaactacagcttgcaaagcctgaaatatttacaaccaggccctttacagaaaaactctgccaactcctaatctgtggtgtcccatggatcaataatgtactccctttacttgcagtacagtactccattccattgtagggataggccacaagttgtttatctgtttgtctgttgatggacatttgggttactgcccaattatccttaatccacgtgatgtgctctgatgttttgcatcctatttcattttttaaaaaattgccactcatgacccaatggttgatatcac

SEQ ID NO: 252408 - DNA, 562 bp, Homo sapiens
gggaccagcaaactagggcctgtgggccaaatctggcccactacctgattatgcaaaggcctaagagctcagtatgactttatacttttaagtgattgaaaaaaaactcaaagaagaatattttgtgacacatgtaaattaaatgaaatccaaaattcaatgtctataaataaagctttattggaacacagcgacgctcacttgtttacataccatctatggctgtttccatgctacagaatcaaatacttgagaccgagatcgcaagaacctaaactacagcttgcaaagcctgaaatatttacaaccaggccctttacagaaaaastctgccaactcctaatctgtggtgtcccatggatcaataatgtactccctttacttgcagtacagtactccattccattgtagggataggccacaagttgtttatctgtttgtctgttgatggacatttgggttactgcccaattatccttaatccacgtgatgtgctctgatgttttgcatcctatttcattttttaaaaaattgccactcatgacccaatggttgatatcac

SEQ ID NO: 252409 - DNA, 334 bp, Homo sapiens
caatggtgtttatctttgtgcaattctgaacttaaacccaataaatgaagtacatgaaaagcaccataggaattaaacattgtatggttcaaatttcttcgcttcaggctcactgtataaatacaggcagtttttttttgtttttgttttttgttttgttttttactggagctgccacaattccactgaaatgtggagaaaatcattctaaagttctaaaatcattctaagttgctgaagttcaaaaaaagttrtattttgaaaacagatgaaattatataccataccaagattttgatgtaattcactttcttcaaactttcctgcaaccatt

SEQ ID NO: 252410 - DNA, 532 bp, Homo sapiens
accaggccacaaaataaggtcccgatagttccaaagcctttgtgtttcattgccatggctcacgatgacatgagaaatggatatatttagtctctgcccctgtttcctggcacacagctcctgagtttcttgagatctccaragtgataggtgtctttttatttgccaatgacatgacagtggctgggggctcctggatagtctcaggattcagggctggttgtcaggggaaccaaccaagtcattacagggttggaattttcagctccaacccctcccgttcaacatcctgggagaagagagaaggagctaaagattgagttgctcaccaataaccaatgatttcatcaatcatcatggctcatgcaggtggtgcaaacacaggcagaagaggccaggacaagctggcttccccactgacagcctctaccaagctcagcagttgcctggactgggcagtaacactcactctggattctgtgtggctgaggctgctagcctacttcctgcaccagccaggcctgagtagcct

SEQ ID NO: 252411 - DNA, 637 bp, Homo sapiens
ccttgactgttacaggtcacgaaatacacacatggtatcctgaaaccacagatatgaccaaaatccacatttattgacaattacaggctcatgtagtcagtttccctgaaggtagtatatttaatgtgtatctacaagtgatttcatgtagcyctctttgaattgtcatgtcaataaaatcaccccaaagttaggttcttggataaatcatgcatttgatcttggttttagataatgatcatgcgttcctgtttctctccatcagactggacacgtatatgttttcaataaatgttttccgaattgagctggtttggacagaaatcaaaggaaaggagattaaacagcgttctgagcaccaaattttagagtccgactctgtaggtagaagaccaagaatgctcttgggaaccaggagaagaatcagagctctgggtgatgtgatgcaatggtgatttttatgataattctgatttaaggtaaagaaaagcgactttctctcacatgggaattctcacttcaatcttctgttgcatttagcgggggacaaaaggagatgcaaaagtgtatgtgttgcattgatgaatgtagcaagatcttacttggttataaaatccagagcattttcaatcctgaa

SEQ ID NO: 252412 - DNA, 637 bp, Homo sapiens
ccttgactgttacaggtcacgaaatacacacatggtatcctgaaaccacagatatgaccaaaatccacatttattgacaattacaggctcatgtagtcagtttccctgaaggtagtatatttaatgtgtatctacaagtgatttcatgtagctctctttgaattgtcatgtcaataaaatcaccccaaagttaggttcttggataaatcatgcatttgatcttggttttagataatgatcatgcgttcctgtttctctccatcagactggacacgtatatgttttcaataaatgttttccgaattgagctggtttggacagaaatcaaaggaaaggagattaaacagcrttctgagcaccaaattttagagtccgactctgtaggtagaagaccaagaatgctcttgggaaccaggagaagaatcagagctctgggtgatgtgatgcaatggtgatttttatgataattctgatttaaggtaaagaaaagcgactttctctcacatgggaattctcacttcaatcttctgttgcatttagcgggggacaaaaggagatgcaaaagtgtatgtgttgcattgatgaatgtagcaagatcttacttggttataaaatccagagcattttcaatcctgaa

SEQ ID NO: 252413 - DNA, 585 bp, Homo sapiens
ataaactatctcagagcctggtatacagtagatgctcaagaaactctttctttcttctctggaagcattgtttctgtgctagaatatctttgtttttgagaagtaccaccaagttttctattttctttttcaagtttttttaacttttattttaggttcagggattcatgtataagtttgttatataggtaaattacatgtcacaggggtttggtgtacagattatttcatcacccaggtattaaacatagtactcagctgccactctccctccaccctcaagtgggtcctggtgtctgttgtttccttcctggtgtccatgtgtactcaacatttggctcccacttataagtgagaacatgcagtatttagttttctattcctgagttagttcacttaggaaaatggtctctagctccatccatgaagcaccaaatccctccagcccagtagcaaggagacagaatttttactctgtctctgatgagaaragtgtacaaaaggggcataaagtataaacatacagtccaccgtactctgccctgtggccaggaaagacatcgctggtctgtcactgagctgcat

SEQ ID NO: 252414 - DNA, 675 bp, Homo sapiens
tttaatatctttttagaggcatggtctcatgctgttgctcaggatggagttcaatgkcatgatcacggctcattgcagcctacacctccccagctcaagcaatcctcccgccttagcctcctcagtagctgggaccataggtgcatgccaccatgcctggctaacttttaattgtttttattttttgtagagatagagtctccctatgtttcccaggctggtctcaaactcctgggctcaagcaatcctcccacctcatcctcccaaagtgctagaattacaggtgtgagtcaccacacacagccaaagtattttctatatcaccaccctccaatgtgaatagaatgtgggccatgtctataatgttaaattttgtgctagttacacttttaaaaaggtaaaaagaaataggtacaattagtgtcactattttattgaaccagatatattcaaaatattatttcaatatgtgataagtataattatataattgagttctttcctaatcttaattttttcatcctaaatttttgaaatctggaaaatgctttagaattacaacatctcaatttggatgacaaatctttatcgtaaatacctcatctttattaagacctcataaatttatagttgaataagcagattcacatatccaagtcgttccaaatgcagaag

SEQ ID NO: 252415 - DNA, 494 bp, Homo sapiens
aaaggaggagcaaagtcacatcttgcatggtggcaggcaagacagagcttgtgcaggggaactccccttgataaaaccatcagatcttgtgagacttattcactaccacaagaacagcatgggaaagacccacccacatgattcaattacctcccactgggtccytcccaggatatggaattgtgggagctacaattcaagatgagatttgggtggagacacagccaaaccatatcacccacccagtgcaactccctagaaaggacaaaatgcctacccatgcccctcctaggagacagttttgatgctagcatgataaaaggtagggaactgggtctcagtcatgagagtgcagatggggagagccctaggagaagaaataaaccaagagacaagttggagaccagaagccaccaccccaatcatatctattcctgctgaaggtgtgcccattatgcacacacacacatcctctacatgctgatcactgcaag

SEQ ID NO: 252416 - DNA, 588 bp, Homo sapiens
ttatggggcatggcagttacagagtgccttgttttgagttcgttgtgtctggtactcactctgtgtgctgcatctcacttcatcatyatgacaaggtgtgcagacaaggaagaatgttcctctgggctgcttactgataagaatcacacagtgtaagcctttcaagggaacttagagatctcttgatctagggcccttatttttcaattaaggaaagtgacacatgaggagaggaagagtttctccactggtcactttgaaaatcagcagcagccgtggaattagaaacgggtctcttgattaccagtggaggtccctgtccactgcagccagtgtggcctccaagcccagagacattctccttggaagggtatgaagagtccatgtgctttccagatacacctgatcccccttccccagtgctgtgaaattgtctcagcccaggggtttgctaagtgacaattccctgagccctgttagaaattcgaaagccagaatcacaactgatagtaagactgggtgcagtgggagccccaggaccatcagaagtcaactctgaatcaacagctcacagagaagccgcatgtg

SEQ ID NO: 252417 - DNA, 588 bp, Homo sapiens
ttatggggcatggcagttacagagtgccttgttttgagttcgttgtgtctggtactcactctgtgtgctgcatctcacttcatcattatgacaaggtgtgcagacaaggaagaatgttcctctgggctgcttactgataagaatcacacagtgtaagcctttcaagggaacttagagatctcttgatctagggcccttatttttcaattaaggaaagtgacacatgaggagaggaagagtttctccactggtcactttgaaaatcagcagcagccgtggaattagaaacgggtctcttgattaccagtggaggtccctgtccactgcagccagtgtggcctccaagcccagagacattctccttggaagggtatgaagagtccatgtgctttccagatacwcctgatcccccttccccagtgctgtgaaattgtctcagcccaggggtttgctaagtgacaattccctgagccctgttagaaattcgaaagccagaatcacaactgatagtaagactgggtgcagtgggagccccaggaccatcagaagtcaactctgaatcaacagctcacagagaagccgcatgtg

SEQ ID NO: 252418 - DNA, 632 bp, Homo sapiens
ttgtgagcaatcctatccctgtttcaatcactttcttacgttctctgctggtgtgtgtcttttccaccaatggttatagcaatctatccactgtatttctgtctttctgtgcagtgaacattattatgttcatgggtccaaacacctagtaggcatctaccacgtgccaggtgggctgctaggcactgaagaataaaagtgagatgggacatatgatctaggtcctcatggagctcctcacaggcctgtggaagaaagacatggatcagcacagtgagataagagcttaggtggggctggsttgcctgcaggagaaaacactggatctggaagagatgaatgggtgaataggaagtgcatggagaacaggctgattccaggcagaggaaatagtatgcactgggcaagggagcagccaacaacaaggcatgtcatggaccaagcccatcacaatggctgaaatagagattgtctgtcaatcacgcagacatcactgttcctcttttagaaatgcaagcagtttcgaaaggttagttggtttgctcagaagtgaagcttgtgttattggctaaatatttatgtccctaacctcccaaatccgtatgttgaagccctagcccccagtgtgattg

SEQ ID NO: 252419 - DNA, 616 bp, Homo sapiens
tgatcttggaagagatttttaaatcggacagggagggttgatttctataaatattggtggcaacccttcccttgatgctgagatttacacacyataatgccaggggcttgatgaattaatagggttgacttatgtgagtcagacctgttcttatcttctctgtgtgactcctgccccaaaggggaagttagagaagacagaaaagcagaagacaacaatactgaccatctgacccacccccaccgagcacagccagggtcagggttgcccaattccaggtctctcaccaactaaccttctaattttgttgatttccaaatcccaaaagccccacccatgcaggattgtggggagaagagaagcatgtcatccctgctttttaattccttttttcatcttcttatcacaagttccttggtaattttccaatttcaaaggaaatatttggaaggatatctgaggactgaatgagttcatgttttacaccaaatgctttcaacatgagaatccgcccagtcgtatctaataaaaatatccttcctgagctggtaccaggaggtttcattaaaatagcagtcgataagcagagctgatttggcaccaaggaaaaaaaatc

SEQ ID NO: 252420 - DNA, 566 bp, Homo sapiens
taagtggtcaaattgcccatttgaggcaatggctgttgtagctctaaaccatgaactttgtccttcagggcacaggggagtctcataaaaaaccacagacacagagccacgtttgctatcactgagctcagctgtctctgagagttcgggacatgtgtgacatctgtggtcctgctacgacaattccctgcatccctttgtaacctgatgcctttgtcatactgaagagttccagccgggaggaaagggactaattgaaggcccaaggtttccattccttcagggaggaaactcatttcatggctttcttcatctctgcctgtcaatcagcttgcatgtattgtcagccarctgagtgtgggacaccagggtggttgtagaaaatatagaaatttgaagaaataaataccccactggcaacattattacaaatcacctccccaaaataacaagatgtggggcaaaagcgatcatttcttccagggaatcctaaaatgtaatattccctgcaccaacacagtaccttactctgtaatgacgagcttatgttctctcctaacttagcc

SEQ ID NO: 252421 - DNA, 566 bp, Homo sapiens
taagtggtcaaattgcccatttgaggcaatggctgttgtagctctaaaccatgaactttgtccttcagggcacaggggagtctcataaaaaaccacagacacagagccacgtttgctatcactgagctcagctgtctctgagagttcgggacatgtgtgacatctgtggtcctgctacgacaattccctgcatccctttgtaacctgatgcctttgtcatactgaagagttccagccgggaggaaagggactaattgaaggcccaaggtttccattccttcagggaggaaactcatttcatggctttcttcatctctgcctgtcaatcagcttgcatgtattgtcagccagctgagtgtgggrcaccagggtggttgtagaaaatatagaaatttgaagaaataaataccccactggcaacattattacaaatcacctccccaaaataacaagatgtggggcaaaagcgatcatttcttccagggaatcctaaaatgtaatattccctgcaccaacacagtaccttactctgtaatgacgagcttatgttctctcctaacttagcc

SEQ ID NO: 252422 - DNA, 406 bp, Homo sapiens
tgttaggttggtttagccagaaatccttccccttatctctgatgtttcctcttagtaattttccatccgctggccccaaccctgcaccttggctatagattttgacttgtccatatacgttttgagtygaatctaatctctctccctgactgcaaaaccccattacagtagtccctacgcctattgacatgatcctgagtaaagtctactttaccaagagttaacaagtattgaattattttttaacattatgtagccagtcctgcttgtagaatattgtccaacccaggttaaatcctttctaaaccctattccagaaccctggaaaggaaaacttccctttcccacagctccctctctgccctgcattgtctgttctgttcttctctggtctgtccagcagatc

SEQ ID NO: 252423 - DNA, 406 bp, Homo sapiens
tgttaggttggtttagccagaaatccttccccttatctctgatgtttcctcttagtaattttccatccgctggccccaaccctgcaccttggctatagattttgacttgtccatatacgttttgagtcgaatctaatctctctccctgactgcaaaaccccattacagtagtccctacgcctattgacatgatcctgagtaaagtctactttaccaagagttaacaagtattgaattattttttaacattatgtagccagtcctgcttgtagaatattgtccaacccaggttaaatcctttctaaaccctattccagaaccctggaaaggaaaacttccctttcccacagctccctctctgcyctgcattgtctgttctgttcttctctggtctgtccagcagatc

SEQ ID NO: 252424 - DNA, 632 bp, Homo sapiens
gcaagtccccacaaaaccgtgccagggactctttagggctgatcctgctgcttggcataatgaagccctgattaccgcagcactgaggggtgtcgggcttgccagaggcccgcttttaatgaactttcccatccaaagttggccgagacaatgccaatcaattggaattgattacttctcgaaatccatgcctcagcttgcaggaaacacgcgcaaacacacccaacatgtgagggttcatttgatttcttgggagaaaaaggagttctttgcagcctgagataatgatggattagcattttccagattcccaggacactggaaagaactggtgtgtcctgaaggaacctgggaaagatsggataagctttggtggcctcagagttcagattgtgcctggagctcctttattttatttatttatttatttatttatttttattcatccactcatccttccacccatgcatctctatctatcagaacttactgactgagagttgattatgttccaggtttggtgtcaggttctgggatatcagagatgagatggctcctgttccttgaagggactagaccctagacccactgagaggcagtgatggaggctctttctggaggactaggaaaag

SEQ ID NO: 252425 - DNA, 632 bp, Homo sapiens
gcaagtccccacaaaaccgtgccagggactctttagggctgatcctgctgcttggcataatgaagccctgattaccgcagcactgaggggtgtcgggcttgccagaggcccgcttttaatgaactttcccatccaaagttggccgagacaatgccaatcaattggaattgattacttctcgaaatccatgcctcagcttgcaggaaacacgcgcaaacacacccaacatgtgagggttcatttgatttcttgggagaaaaaggagttctttgcagcctgagataatgatggattagcattttccagattcccaggacactggaaagaactggtgtgtcctgaaggaacctgggaaagatgggataagctttggtggcctcagagttcagattrtgcctggagctcctttattttatttatttatttatttatttatttttattcatccactcatccttccacccatgcatctctatctatcagaacttactgactgagagttgattatgttccaggtttggtgtcaggttctgggatatcagagatgagatggctcctgttccttgaagggactagaccctagacccactgagaggcagtgatggaggctctttctggaggactaggaaaag

SEQ ID NO: 252426 - DNA, 632 bp, Homo sapiens
gcaagtccccacaaaaccgtgccagggactctttagggctgatcctgctgcttggcataatgaagccctgattaccgcagcactgaggggtgtcgggcttgccagaggcccgcttttaatgaactttcccatccaaagttggccgagacaatgccaatcaattggaattgattacttctcgaaatccatgcctcagcttgcaggaaacacgcgcaaacacacccaacatgtgagggttcatttgatttcttgggagaaaaaggagttctttgcagcctgagataatgatggattagcattttccagattcccaggacactggaaagaactggtgtgtcctgaaggaacctgggaaagatgggataagctttggtggcctcagagttcagattgtgcctggagctcctttattttatttatttatttatttatttatttttattcatccrctcatccttccacccatgcatctctatctatcagaacttactgactgagagttgattatgttccaggtttggtgtcaggttctgggatatcagagatgagatggctcctgttccttgaagggactagaccctagacccactgagaggcagtgatggaggctctttctggaggactaggaaaag

SEQ ID NO: 252427 - DNA, 506 bp, Homo sapiens
aaggttgaggagtcctggtcaatacttataagaattgcttaaaattagacactttcgagatgggctggcaaggtcagtgtaaaatgcccaamttctgttttgtctctgaacccagatttagctagctcccacaaccagataatatatgacaaagaaaaattattgcttactgccctttggacaaaagtcggtcaagctttttctgtagcttcttggaaaaccaaataggagagcccaactagcagagtccaacagagtaaaagataatgcagctgatgccaatgtgaaggttaaggaacagctgaaaacagcctctttgatttttctcatccagggaaaagcttatggaagtcccagcccattacatcaggaaagtatgaagaatattaagaagtaaacagaaatagccaattttgcatttggatcctatcttttttttttttctgatcagatagcattttgacttgaagatgtgtttggctaagtcatctttctgagtatttatc

SEQ ID NO: 252428 - DNA, 606 bp, Homo sapiens
ccccttctggctccccatccatctgctgagagctacttccaccattcaatgaaacactgcacttattctccatgcccacatgtgatccggtttttccagtacaccagggcaagcaccccaggtacagaaagctctctgtccttgcgataaggcagagggtctaatttaactgatttacacaaaccacttacagacagcaaaactgaaagagcacaytgtaacacacgcccagtggggctttgggaactgtaaacacttaactgtagacactgctgtggggttgtagcccacattccccatgatctgcccatctgcatgctccccctaggagtttgagcagcggcgcacccaataatccagccacacccctgtcccaagccctgtgaggaggataagggaaaactcctcccacgtcactactttaatatctagtccttccaactattgctacaaactgagacattagttactagggctgttacaacagtcacccctatctttgtgaactatttcaaaagaaacccaatggccttaccatattggtattccacagaacacctgcaaagctctcaagcaaacatgtgcctcagtcaatactcattaaga

SEQ ID NO: 252429 - DNA, 609 bp, Homo sapiens
tgcctccaatcaaactctctgccttttatgggcttagcttctgcctgctacctgtggctgtaggtaggatgatttcaacatcagtgagtgaaataaatgccttctcacctaaagtcccaaacagctgatagatacctcattgagcagagacatgggcaccgagatttcacatatgcacctcattacccacccccacccctggcagcaagaacacatggcattcctgtttaacttggccatgcccaggtttctgacatttacattccagcccacactgccagggcaatgcctgtttcatagcattgctggggaaagggtctcgttacatttgcagataygagctggagcttatggaatttctgagcgattctttaaagacaacctccaggaagagaatgttagctcaagttttcacaacaaataaatccccaaacattttgcctttgtccattttgtgttgctataacagaatgcctaagattgagtagtgggtaaagaaatgaaatttatttggctcacagttctggaggctgtaaagtccaaaggcatgcaccaacatctactcagcatccaatgaaggtcttcttgctacattgtcccccagcacaa

SEQ ID NO: 252430 - DNA, 618 bp, Homo sapiens
ccagctcagcagttcagagccaaaaatagaaaggctttgtaagcaggtaggtatctttattatggtaatcaactctgggcctaagaaacaatgaggccatcagagttcctgggatgctccataaaggtggtagtagtgggtgtcctggtaagcacagaaatctgtgatctggcgtacagcactcaagtggggctaccaacttcaggcctctctgcatccagggccaccaacttcaggcctctcygcacccaagacctggctaagttttagcccaccagtgaatcaatgtgaattgatagggaaaatgctaaactggaagaaatacactaaaaaaaaatcataaaatttgagaacaaaatggaattcagattatcaagttaaagccctcattttacagattaaagaaaatgaagctcggggtagagaaatgatttgcttcaaggctacagagctaagtggagtggcagatccaagagcctccctgcttggtggttcttctgccattaaaaaccaaccaaacaagaaaccatgggcaaaacacaggcacaccctgaatactgtcaggaggagacggtcttcattctctcttgtggtgcccttccctcttcctgaggagtg

SEQ ID NO: 252431 - DNA, 586 bp, Homo sapiens
ttagcgagcacaaaaaaggggcacatgaacagagtcagatctatattttgtctcctgtttcctcattgactggatcaacaagatgtttctgctgagggcatgtggctctccagggtgtcatccctagagatccatatactttagtacccaagtaaatggcatccaagacaggaggaaaagtagtttttctggatcccttttttcagtaactgatttaaggaggtcaaatatgtattgcatcctttgacsattttatgcttttaccttttttctccccaaaatatttaatatcaaaccgaaagtacacagagtacagtcctggagaaaggaagagcatacttcaactagttagattacagggaggatttaaacactctaattgagatcctggagcctggaaagaagattaaaattcaaagatacacagaaaaagactccagttcttcatctctacttcaacctggtccatagaggaaatgaaataaagaacaaaagagatttggattgggcgaaacaaaaaggttggagcacaaaggtttttaacttctggcataagatcttaacatctgtgggttaatgtttgtca

SEQ ID NO: 252432 - DNA, 637 bp, Homo sapiens
cctgtttactggcaatttcacagaactcggctcgtccggatcatttataaatctcatcctcagcactgatccttggcttgtactccagtggcaaaacctcccargccagaaaaatgcttatttcctgctttaaaacgagctctctcatccatgacaaagcattccccaatttttggtggctcagaagccaagtttccagtgcaaaggctattaacaaatggaaactctgagtacattttttcccctggttcccatagccatttaccccctcaaataacctccatgccacaccagtcagtcagcctcatgaccctcagcagaaactgtgccctctcatccctgataggctctgggccttccttcatttgcatttactttctagcccagcctttagttcttgggtctcctctggagcctgtgtaaatgggcgccagccgcgattcttgtctactcctggtgctgtgaccgtgtcatgacaatgggatgcacattttggccagcagtgaggcctgcagtgtggttacccagcctggaaggctcccacttttgcttttgtcagagcagttggattcagaagatctcgtgcttctcactgtttcccttcctgctgctgagcctgcctccacttccctgtcaa

SEQ ID NO: 252433 - DNA, 587 bp, Homo sapiens
gcaaacgtggcatgtgggaagcagcttctccctaagtcaacttgattgcctctgtcccctctggacacatttgtggggcttctgctyccctttgtctatgtctgcatgccacccccttctctctgggcctctctccaccctggtttctctacaggggatccttttctggaagagggcatgggaggctgaaagccccactcctccagccccttggacaccactggccacactctctgcccccctctgccagccttgtcccaggcagctccacttggcccgggccccaccttgagggagactttctgggtggtcctggaaggggcatagaggaggaaaaccctctccagaacacagttgggcggggcggagaggcagaagacttggacacgagtcactgtctccgcttggtggatctctccacatggggatctcacaggcatctcagattaacatgtccctacctaatcatctgttttctgccctcctcagccagggcagcctgggctatgctgttgcagctatctgcagcaatctgcagatgtgggaggttgcagacaaccctagttgacttcttactcccgtgacat

SEQ ID NO: 252434 - DNA, 587 bp, Homo sapiens
gcaaacgtggcatgtgggaagcagcttctccctaagtcaacttgattgcctctgtcccctctggacacatttgtggggcttctgctcccctttgtctatgtctgcatgccacccccttctctctgggcctctctccaccctggtttctctacaggggatccttttctggaagagggcatgggaggctgaaagccccactcctccagccccttggacaccactggccacactctctgcccccctctgccagccttgtcccaggcagctccacttggcccgggccccaccttgagggagacttkctgggtggtcctggaaggggcatagaggaggaaaaccctctccagaacacagttgggcggggcggagaggcagaagacttggacacgagtcactgtctccgcttggtggatctctccacatggggatctcacaggcatctcagattaacatgtccctacctaatcatctgttttctgccctcctcagccagggcagcctgggctatgctgttgcagctatctgcagcaatctgcagatgtgggaggttgcagacaaccctagttgacttcttactcccgtgacat

SEQ ID NO: 252435 - DNA, 587 bp, Homo sapiens
gcaaacgtggcatgtgggaagcagcttctccctaagtcaacttgattgcctctgtcccctctggacacatttgtggggcttctgctcccctttgtctatgtctgcatgccacccccttctctctgggcctctctccaccctggtttctctacaggggatccttttctggaagagggcatgggaggctgaaagccccactcctccagccccttggacaccactggccacactctctgcccccctctgccagccttgtcccaggcagctccacttggcccgggccccaccttgagggagactttctgggtggtcctggaaggggcatagaggaggaaaaccctctccagaacacagytgggcggggcggagaggcagaagacttggacacgagtcactgtctccgcttggtggatctctccacatggggatctcacaggcatctcagattaacatgtccctacctaatcatctgttttctgccctcctcagccagggcagcctgggctatgctgttgcagctatctgcagcaatctgcagatgtgggaggttgcagacaaccctagttgacttcttactcccgtgacat

SEQ ID NO: 252436 - DNA, 588 bp, Homo sapiens
tgaataaaaaagttaattccagattccacattgcagttaacccttcagaaatgactattcatcagactttaatctaatatgatagaatagacacagttatttgaaaaggccactaaagccctttgttcatttgtagttgcatatctgtgtggagttgcattttcttcacatacttcagtgaaaacaatctattgcaaaagagtgaaggcagaagcagttrggagagtctagttatcttttaaaccagccactaaagagatttcaaaaatagaaaaactgtactacctttctcactatttttgggtaaaatacagtttttttcatttaaaaatgttatgctaacatgatggctttgtaattaaatgaattaaatatttaaacacttctcagctttaatttctaatatggcaaatatcaatagaagtaatgctcctaagagctttctcttcgggatgcttagtaatttttaagagtgaggacttctgaaacccaaacatttgagacctagtgctgtaaagtacaaaataaaatgtaaacatttacccagtatcttacatagaaagaacatcaaataatatttgatcactc

SEQ ID NO: 252437 - DNA, 545 bp, Homo sapiens
agcaaaaactcagttaaatgcgttcttcctccatctttgcctagtccaaaagraaaaaaaaagaaacagaaaaaagaaaaactgtttggaagagtagcgttgaggtttgctttttacctgtttttcctctagaacagccaggtggattcacatgatccaattttttaattgtcttctatgtcccactccgaataacccggatgccccagcacaatcagagagatcgttttttttaaaaaaaatttcagcctccaaaggtaggaggggagtgttaggggagaaagtactttaattaaaaatcaataactcgaggtttttgggatacggtttgccatttcctaattaagaaatgggtttgacagtccctttgtacacactgctatgcaaaccccaaagggttggcggctgtccgggcgatgacactccggtcccctgcgagaccccgggccagccaggcccgtccgccgccggcctctggggtccgtccccggctcgcgcagacctctcgcttctctcggctctgtctcctgcgctcagctctgctc

SEQ ID NO: 252438 - DNA, 545 bp, Homo sapiens
agcaaaaactcagttaaatgcgttcttcctccatctttgcctagtccaaaaggaaaaaaaaagaaacagaaaaaagaaaaactgtttggaagagtagcgttgaggtttgctttttacctgtttttcctctagaacagccaggtggattcacatgatccaattttttaattgtcttctatgtcccactccgaataacccggatgccccagcacaatcagagagatcgttttttttwaaaaaaatttcagcctccaaaggtaggaggggagtgttaggggagaaagtactttaattaaaaatcaataactcgaggtttttgggatacggtttgccatttcctaattaagaaatgggtttgacagtccctttgtacacactgctatgcaaaccccaaagggttggcggctgtccgggcgatgacactccggtcccctgcgagaccccgggccagccaggcccgtccgccgccggcctctggggtccgtccccggctcgcgcagacctctcgcttctctcggctctgtctcctgcgctcagctctgctc

SEQ ID NO: 252439 - DNA, 545 bp, Homo sapiens
agcaaaaactcagttaaatgcgttcttcctccatctttgcctagtccaaaaggaaaaaaaaagaaacagaaaaaagaaaaactgtttggaagagtagcgttgaggtttgctttttacctgtttttcctctagaacagccaggtggattcacatgatccaattttttaattgtcttctatgtcccactccgaataacccggatgccccagcacaatcagagagatcgttttttttawaaaaaatttcagcctccaaaggtaggaggggagtgttaggggagaaagtactttaattaaaaatcaataactcgaggtttttgggatacggtttgccatttcctaattaagaaatgggtttgacagtccctttgtacacactgctatgcaaaccccaaagggttggcggctgtccgggcgatgacactccggtcccctgcgagaccccgggccagccaggcccgtccgccgccggcctctggggtccgtccccggctcgcgcagacctctcgcttctctcggctctgtctcctgcgctcagctctgctc

SEQ ID NO: 252440 - DNA, 608 bp, Homo sapiens
ctgaattacagtgtgtgtttgggcggtttattgacagttgataactactgaccactagtcctgatagagttacaaaggtcaggtcaagggaggtcagagccacaaaggacrcctcctcttccagctcgcccccctcccagaagggacacgcaagtcaataactaagccacctgtggggtctgaaggcttttccagtctttctccctctggctgtgccatgacataaccccagtgcagcctcgtcctctctggcttttactctggccactgccctgggagtcacccaggcggccgggaagccacggctcacccagtaggcaccgtgcagccgcagagtgggctcagctctgtctgccgctgcaggctcactccccaggcccttccagaagcatcattgccagtacaggctgggcgtctgcctcgtaaccccagagagttaaggacacacagaggcaaagaaagtggcaggctttatggctcccctaggagcatggtccccctgtgtgtatgcaaactgctcttggcaagcaaaagtttaattaaaagcctctcagaatgcctctccagctggggtgggcgtcggttgccaggaggggccttatcaagtg

SEQ ID NO: 252441 - DNA, 582 bp, Homo sapiens
aatcctcttgtatttactaagggccccaggagtggggcacgagaagtgtagatcattcaatgtgtcgcagcacatattttcaatattatgataagaagacaagggaccctgcattttgtcaactttcgagtccaagatcgatcagcaaatagatgggcctccccgtattctgaattacagtgtgtgtttgggcggtttattgacagttgataactactgaccactagtcctgatagagttacaaaggtcaggtcaagggaggtcagagccacaaaggacgcctcctcttccagctcgcccccctcccagaagggacacgcaagtcaataactaagccacctgtggggtctgaaggcttttccagtctttctccctctggctgtgccatgacataaccccagtgcagcctcgtcctctctggcttttactctggccactgccctgggagtcacccaggcggccrggaagccacggctcacccagtaggcaccgtgcagccgcagagtgggctcagctctgtctgccgctgcaggctcactccccaggcccttccagaagcatcattgccagtacaggctgggc

SEQ ID NO: 252442 - DNA, 504 bp, Homo sapiens
gtctcatggaatacttggaatattgggcagcagttactgcagttgtggtaggtcatggcagtagaagccagcatasttaaaatcagctcacatgccatagattgcttctccctgttctacgtgcataagaggaatgtagagcatacacagaactcaagaacaagtaagccaaaaggcttctcagaatactactctcccagcaaataaaaacaaaaatagtttgatccttaagacccatgaccatttgtctgggcttcatttctgccaaatgttctgttttgtgttatttagacaaagcctttcaaagagccttttgagatacggtttcctcaggactgagagttatcttatccccaggaatgtttatgtcctattctttagaaccacaaatatgtgtggagagctatctaagatgtcataatatggactttgatgcgtttggcaaagaaatcgatggcatcgcctccaaggtatgttgatgttgggagtttcaatatttaaata

SEQ ID NO: 252443 - DNA, 504 bp, Homo sapiens
gtctcatggaatacttggaatattgggcagcagttactgcagttgtggtaggtcatggcagtagaagccagcatagttaaaatcagctcacatgccatagattgcttctccctgttctacgtgcataagaggaatgtagagcatacacagaactcaagaacaagtaagccaaaaggcttctcagaatactactctcccagcaaataaaaacaaaaatagtttgatccttaagacccatgaccatttgtctgggcttcatttctgccaaatgttctgttttgtgttatttagacaaagcctttcaaagagccttttgagatacggtttcctcaggactgagagttatcttatccccaggaatgtttatgtcctattctttagaaccacaaatatgtgtggagagctatctaagatgtcataatatggactttkatgcgtttggcaaagaaatcgatggcatcgcctccaaggtatgttgatgttgggagtttcaatatttaaata

SEQ ID NO: 252444 - DNA, 597 bp, Homo sapiens
caaagtctaatgtgaattatgttctcattatgtgccaggaactgtgctaagtgctatctcatttattcagctgaacaactctacaagataaggttattatcgcacagacactttccagagaagaaatggaggctcagagaggttctataacttgcccaaggtcacgtaataaaagaacagatttgaacctggtctccctatctccaaagctcatcagcattctccttacactccttcttgtttctcttttaaaatgagaagtccatgaggtatcagggctacatgtgtcccgtttgactcctgcatgctaaagcaagcaggttgtggatagaaggatttggcttacttctacctttaatagtttatcctacatttaccaggtctacctactcaarctgcattataaataagactaaaaataggggttggatatttgttgtaaatatacatgtttgtagggctcctactgtgtccatgtaagataacagggttaccagctgtctggggaaggacagtgcttttcaacacacatgtaggtttgtcctagagtcagtggctacagcaccaggaacataagagggctcttcattattaaac

SEQ ID NO: 252445 - DNA, 551 bp, Homo sapiens
ggtgtggacatcccacccaacaaggctttctgcagatcccctttctctcacactccctcctggattcctggtttgtagccacatttcggtgcacctggtagggtctcctgctcccctgggggctcaccagaatggtaaatgggtggttgttttgtctctttagccaccactgaccagtaggaccgagaccagccacactggctttgcagagcgggtgtactaggaaaggatgatgcagctcctgcttggggatggcactcaaggtgccctggggacatggcttggattgccagcctaggwcctcagctgtggattagagagcagtacctctgagctgctgagaaatgtttcatgtgccccgtcccctcctgttagagatacatatctggggctcttcacatggcgtgcaaagccaggttttttccccaccttgaaaacacacagctgggcttccctgaagatgctgttttgagtcaccctcttacatccccaccaaaagggtagagtaattgctaatgagggaaccacctacctccccccaccctgccctt

SEQ ID NO: 252446 - DNA, 588 bp, Homo sapiens
tgctgagaaatgtttcatgtgccccgtcccctcctgttagagatacatatctggggctcttcacatggcgtgcaaagccaggttttttccccaccttgaaaacacacagctgggcttccctgaagatgctgttttgagtcaccctcttacatccccaccaaaagggtagagtaattgctaatgagggaaccacctacctccccccaccctgcccttgctctgaatggctggagcaggaacacacacatataatgagttacaggagctttaaatcaccaactaaaaccacacgctcgatttcccctttggagggatgttcagccagacagcggcattttcctccccagccacacggtttttaaatattgcatttcaaataggaacaggccagcgattggaggacctctcccattttaggagaggagcccctcttcagtcctggccttcagttcatacactttctgctttcctttgaaggagtmgggttgattcagtactttggggacttggtgacattaatttatctgttttatgtaacacaaagtcgttattaacagcatcctagatcataaaaaaggtataacaaga

SEQ ID NO: 252447 - DNA, 594 bp, Homo sapiens
gagacctggagtcctgttaagagtgaatcccaagacactaactgttgagaaaattctcatccgcacacgatgtcgcattccaccattttcatttttctcaaaacggtacacgtttcagggaggctttttgtatttgtgcttctgtagcacatttcagtttacaaagtagttttgcagatttgactttgctgaatcttccccacatttcaagtcaatggttttccaagacactgagactcagagagggtaagtaacttgatgaaaattactcatctaggaaatggcagagctggaatttgaaccaaggagaagatacatgttgtcactgactcccagctcagggtggttggcgatggctgctttatagggtggctgatttctctctcctctgagctggacttgcgtgaacttcctattggtatgcgtcgtwacccctggcttggagtttgcttgtgaatcattattaccccaactaaattggaagctcttgggaggcaggttttgggctgtgcttgctgtttggttacagtgtttagggaacatctgttgattgattggttggctggatgggctcttttaccaaaggatacagca

SEQ ID NO: 252448 - DNA, 505 bp, Homo sapiens
caggcatacaatgcataataaccacatcagggtaaatggggtacccatcacctcatgcatttagcytttctttgtattacaaacaattcaatcgtactcttgtagttttgttttgttttgatttgttttgttttgagacagagtctctctgtgttgcccaggctggagtgcaatggtgcgatcttggctcactgcaacctctgcctcccgggttcaagtgattctcctgcctcagcctcctgagtagctggcattacaggcagctgctaccacgcctagctaatttttgtatttttagtagagatggggtttcaccatgttggtcagactggtctcaaactcctgacctcaggtgatccacccacctgggcctcccaaagtgctgggattacaggtgtgagccaccatgcctgcctcttgcagttatttttgaatgtacaataaattattgttgactttagtcaccttatggtgctgtcaaatactagatcttatttattctatc

SEQ ID NO: 252449 - DNA, 527 bp, Homo sapiens
agtgaccccaggaatatataactctgggtccaagttcctcttgtagagatggggtctcactgtgtttcccaggctggtctcaaactcctgggctcaaatcagcctcccaccttggcctcccaaacagttggggattacaggtgtgagtccctgcacctggccactcaagttcctcttacattaaatttctctctaagtatttttaaagttttttaaacttcttaatctcttgtcattttttcccattctcgtttctgggtgcttaatgctagtagagagtgaagcaattgatttttgtgtattyatctttactatctttactaagttgtctaatttatttgactagtgtttcattagagtctcttgggctttctaggtattcagatatatcaacacaaaagtgataattttatctacttttctcaatattgatgacagtgacttcattttcttgtgtcagtgcgtttcactagttctgcagataacataaccatagcaagttacctattctactgagctctttaaaa

SEQ ID NO: 252450 - DNA, 484 bp, Homo sapiens
cacattgtatctgtctgtgacagtggattctggagatggctttcccagattccaatctcagctstgccatttatcagctgtgtgaccttaggcaagttacttgacgtctctgaatttgagtttccttaccagtaaaatggggctggtaataattgcctccatgagttaattgtttcgagaattaaatgaattaatgtggacaaagtgcctagcacataatagatactcaatgaatattgggtcctttaacaacctttgcactcaagaatattacccattacataccgaaataggtatttaaatggtaccttacttaaggatctgaagtgttttcacagcactggataatatagtcaaggtgcaattagccatacattataatatttttaagtgattcaagtgacacttcttatgtctaagtgtaatctttcccactttagcatttatcatagtttaataactactgaatgctgttgaattaaaa

SEQ ID NO: 252451 - DNA, 524 bp, Homo sapiens
gtgaggagatggagataaaatgggagaaaaacaatgccgagtgtctttcttcatagatcgcagtattgaaatgatgtcggctaaacaagtcaatagaatttggaatcgtttttaaaatacgtarcagttagcttttggtgcataacaaaccaccccaaaactctctattttgaaacaacaatcatttatttaatttgtgattctgtgggtcagcagtttgatccgggtcctccgagttgttcttctgctgccctgagccaggctcagtcaatcacggctgggctcatttgtgaaatggtaggttggctggggactggctgaccatcagcctggtgcctcaattctattccgtgtggcctggccaccaggactcacacaatgtcacttgtgctgtcctctacggctgaaagaaaggcatgaggccagcccagatcccagatagagaaatagactccacctcttgatggaatgagttacaaagtattgtgatcatttgtttaatcaaatataacacctttaccaaa

SEQ ID NO: 252452 - DNA, 511 bp, Homo sapiens
aaatagaaaatgataatgaatgtagtaagtcctgtaccagacactgtcctgtgttgcgacatttgcactggctctttgactgcctggaaggatcttacccccagatgcctccatggctcactctttcatctccacgtttttgtgcaagcatcacgtcaatgcagctcattgtcgtcaccccatctaaattgccactgccccttctctgcaacactcctacawctctttatccaattctttttttcctccatggcatttgtcactttttaatcaccttaaatacttttctgatgtcttgtgcttactgtttatttccccctctggaaattaagctccacaagagctggcatttttgtctgatgtgttcattgctgcatctccagctcctaagacagaaactggcatagagcaggactttaaggagtatttttaaagaaatgaatgaataaatgaacaaatggatggtatatcctctcctgggagggaggacactcgagcagacttgatcaca

SEQ ID NO: 252453 - DNA, 577 bp, Homo sapiens
aacacacacacactatacatatatatatatacatatatatatatatatataaaacaaagtacatggggatctatactgtatatttgtacagatgtagaacatttctaaaagaatatccaagaatttagttattgtggttctttcctgaagggggaattggggaacttgaggttcagggtagaaaggaaactcagtttttactgcatatgcttttgtaatgcagtcacgtttactttgtgcaaatattactgatttattttaaagttctccaaaaatcaaaatcataaacattaaaaaaatgaggctccaaatttgaattctcctgggcatattcatgctttcatcttattttcagtcatggtttggcatgcgtgctacttggagtagattaggctgtattgtwatcataggtagactcaaatgtggaatggattaacacatttgatatgtattatttacttatgtaacagtcctgattgagtgttcaaatcaacagggaggcttatctgcacaggaccattcagagactgactccttccagtctgtggctcttccatcttttaatgtcctataacat

SEQ ID NO: 252454 - DNA, 577 bp, Homo sapiens
aacacacacacactatacatatatatatatacatatatatatatatatataaaacaaagtacatggggatctatactgtatatttgtacagatgtagaacatttctaaaagaatatccaagaatttagttattgtggttctttcctgaagggggaattggggaacttgaggttcagggtagaaaggaaactcagtttttactgcatatgcttttgtaatgcagtcacgtttactttgtgcaaatattactgatttattttaaagttctccaaaaatcaaaatcataaacattaaaaaaatgaggctccaaatttgaattctcctgggcatattcatgctttcatcttattttcagtcatggtttggcatgcgtgctacttggagtagattaggctgtattgttatcayaggtagactcaaatgtggaatggattaacacatttgatatgtattatttacttatgtaacagtcctgattgagtgttcaaatcaacagggaggcttatctgcacaggaccattcagagactgactccttccagtctgtggctcttccatcttttaatgtcctataacat

SEQ ID NO: 252455 - DNA, 660 bp, Homo sapiens
tacaatcatatatatatacacacacaatctatttatatatatttatatatttctggtgcatagaataacacacacacactatacatatatatatatacatatatatatatatatataaaacaaagtacatggggatctatactgtatatttgtacagatgtagaacatttctaaaagaatatccaagaatttagttattgtggttctttcctgaagggggaattggggaacttgaggttcagggtagaaaggaaactcagtttttactgcatatgcttttgtaatgcagtcacgtttactttgtgcaaatattactgatttattttaaagttctccaaaaatcaaaatcataaacattaaaaaaatgaggctccaaatttgaattctcctgggcatattcatgctttcatcttattttcagtcatggtttggcatgcgtgctacttggagtagattaggctgtattgttatcataggtagactcaaatgtggaatggattaacacatttgatrtgtattatttacttatgtaacagtcctgattgagtgttcaaatcaacagggaggcttatctgcacaggaccattcagagactgactccttccagtctgtggctcttccatcttttaatgtcctataacatttctaagaaccagcaga

SEQ ID NO: 252456 - DNA, 636 bp, Homo sapiens
gtgcagcaggttgtcaatcagggctcattgagtgaatgagtgtgtgttctcatacatctctcatcatgcagcactgcccccctcctgaagagctagaggatggcagaaatgcactgaactccctgctatgcaaaagaccttggtaccatgacatcagcctgtccctcataaagatggcaaatttatggggtcataaatttgactgcaaactaatatgctagcaataataaacattgattaaacatttatttcaccatgattttgcttgccataatatattttaaaagggcatcaggggctgattttgatgggttgatgatcttaaaaaaatccaaggaagtttgaaataatacatctaattttcctctagatacaattttctatagtaagcagagggtattttttggtagtttactcttcctgctggggcgctacattgtttatttatgtttattcattcacgttttmattcattcatccaacacgtatatgtttaatgtctactaattccaaacactcttccagttttagggatacagtggtaaacactgaggggcaaaggaagacaaacacagaataagtaagaaaatcaacaatacagtttaatgtacagcaaatcctcactcaccgtcggta

SEQ ID NO: 252457 - DNA, 560 bp, Homo sapiens
cctgttggacaggcagaggtgtgtgttcccccacaactcctgactcagatctgcatctgcactttggaattgggaaagtgctacctcacccatctcctgcctttagtctccactcagycaacccaagccttgtctcccttgttgctgagaaactttcaggagagatgggtttgtgactcactgagaatttctctccatatgtgcatttgtaagagtgtgtgtgtatgtgtttgagagagtgagaaggagagagggagggagagaggaaggaagagggagagaagagtcaccgttctttccctcagatgcttcttagtcatggtgtctctctcatgtcatacttcttcgtcatggtttctcctttccaagagaaagtcatggtgtctttctctttccttctactgccttgggtttcctttgtgcttccttcctgacaccactgtgtccatgaggcatggtccaaccattcaagtccagcgactactcttcccttacttcttctagatcttgtaatttctttcctgtctctgtgacttctctggctggcttaaggtgagacc

SEQ ID NO: 252458 - DNA, 636 bp, Homo sapiens
tgaaattccataagaagaaggacctaataatttaccgaggatattttctatcccctcccatgacttcacccaatgttccagttctgagcacttagaaacatttcggcccaatttggagtaatttttaatgggaaaaaaacaaaaagacattgtattcatcaattttaggtgtaataaaatgatgccacttaagacttcaatgtgattaaatttaaaatacaaatgtctaggtataaagtaaaacataatggcttttatttaaccagctccagtcaaaagcccagttcagatttcctgtggtttctcatctgcgtttcctgctgagtcattctttccataaacarcttctgaaatgataaagcatacatttatcaacatggatattgccatcttttcttgtagagaacattatcatgtttattccacccagaaggaaagggggcatgcctatttgtattattacccccaaaataactctgtaatgaataagccctcggcaaatcatggatccgctgttcatctatgctcttattctgataggagcctcgtacgttctttgaaattgctctgagctgctactttgatatcctttggagccatacattttgctatgtaccttaaacttcatttggaggc

SEQ ID NO: 252459 - DNA, 554 bp, Homo sapiens
taccctgtgtttcatattccactgaatttgaatatcccctcatagattttatcctttcccccatagatggatgtgcacatggtatccccttttacaggcagtgctgcaattcacctcctcagccacagctccttcagcacctgtgacaatgtcaaaggtgtatttacctgttagggaaataaaggggaggggaactggtggcattcagcaggaagccaccatctgaatctcagagcacatgctcagagtttggactttgcaactcaactccctgttgtccttccstcctctgcttcttgcaccttgtcccccagcacctgacacagctactgtatcggtcagggttttgccacactaatgctgtgtcataaacaatcccagattccgggggttttcaagtatgtattgttcgctcatgcatcaggctcagctctgcgccagttgtggattagatttgtctgctctgtgggtgtttgattcctgaagggtcagtggtttcctgggacatgctcttctcccggtgaaaggccaagccaaaccatgaaagcacaaaa

SEQ ID NO: 252460 - DNA, 596 bp, Homo sapiens
gttttacaaaccaagttacatttacatgggtaaagatgggattcaaacccaagtctgcccagctcggaatcaatgtcatagcctgtgtaaagatttgggatgggctaaggagatacaaggatgacttctctttccttggcactgattgaatatgtctttataactatgttgagactggccaggagccagtatctcatgcacagtcatttctgcttawttagcatgaggggtctcataattttgagtttcatagtctcataatattaatcctaaacctcagaagcaccctctgtttttcttatccacaaatattgggagggcgtcttagaatggattctcatcacaatttaattagaaaggaaatgtttaaattgctacacatgtatttccaggcagctcggaactggcccgtatctgtaatctcactgagcatacaaaacggtaacaaatgcgcatggaacacctactatgctgagctcccacagaatagtaaagctgcagaaggattatgaaaaatgacaggccccacgctcacataccacagcccacatggtacttgtgccagctatttattgctcggtaaccaatcagcccaa

SEQ ID NO: 252461 - DNA, 590 bp, Homo sapiens
tccaaagaaactagaaatgcggtatacttgaattgttaccagaagcgagagccttctttacatgtatgcagtaatcagttaagtgacactgtgtgcgtatataccgtgtcccgaatattaagaagaacaaaaccaaaatttgcagattaagaaacagacaccaaatttagttggctttctaaaagtcgtatcattaggatagcatttttctacctttagtttcttgcatttttaacagtctttaaaatttctgtgtggaagcagcaatctggtctaaacttccgccataccacttactagctatctgattttgaagaaataatttacaatgtagtcaggacctaatgataccttacagctgtttctcatctttgagactcattgagtctcatctatgttttctcaacattcagcatacacctgtatgaactgtctggctgtgtaactgtgaaagcttctcacagactgtgagtctcattttctacrtatacaaaatgaagaagataattcctacttataacgttgtgagaaatgagtgaagtgctgtaccctctagattctccatcaaaagccatattaaatgttcacta

SEQ ID NO: 252462 - DNA, 376 bp, Homo sapiens
gtctcaaaaaaaaagtaaatagtgctaactgatctctcaacgtttatccaaagtgagcatttgtttttattagttttatagaaattttaatttatttgatggaaggagagaataaggatttttggcatataacactaggaaagctgaaccaaataaattgatttctccaaacaaagagtaactcaggaatttatgccaaaacatgttgataaaatatatggcttcgggaacttccatgtaggatacagtatggaagtgtccccactgtraaactagaaaaatctagataaattataaaaatcagataatataaaaaaatcttaattgtaaaggaatcagggagctgcagaagcagtgacaactagataaactaaaa

SEQ ID NO: 252463 - DNA, 584 bp, Homo sapiens
gcctctgacacactaatgttagagcaccttggacatkttccttaatctgagtgtctagttttcttttctagaaaatgagaaaaaactagaatgtagacccccatgtgctcaaagcaacaacctgcctggtttgcttggacttttcctagactgtatgataacaggtgctcgattcctctatgtaaatcttcaccttttattaatcatattaccctgcttctcttagaaaacgcacagttctgccctccctacaccaagatcacaaaaggctaagtgtaagtcatgagccaaccagaccaagagtaacccaggcaggccaggtggccaacttggccatctcataggcagttatcactgctcaacttgaagaaatacaaggttaattattggagtttgaaatccagcagtggaatccatgtggtcctatcgtggtcatataatgtgctgaggctcttacaagttgtcagtgctgagtgggaacgacaaagccagaaacaagggcaagcagaggtgaatgccaggaagaccgggcagggtgccaagtccatgaagcaaaagcaccgccaggtctaaaaggcatagtc

SEQ ID NO: 252464 - DNA, 457 bp, Homo sapiens
ggggagcaagcatctcacatggtgagaacaggagcaagagagaaagagagagaggtgccacacacttttaaacagccagatctctcaagaactcactcactatcatgaggacaacaccaagaggctggtgctaagccatcatgagaaatccgcccccaaagtccaatcactccacaccagaccccacctccaacactgggaatcacaattctacatgaaacttgggtggrgacaaatatccaaactacatatgtccctcttctcatctttaattcatattctttcaaatttgtacccctacacagatacattggagtttggggttgtttatgttgttgttcaacaactatttatggaggacttaaacacatcagccacaatcttaggttccagtgaaagaaaatgtagtaaagcccaggccctaccaactatgcatcttctttcttcatgtttaatt

SEQ ID NO: 252465 - DNA, 321 bp, Homo sapiens
ctggaggtcacaaggtttgcaacttccccagttatttctgcaaataacatgactattgcaaaacctaacgctggcctttttagatgtctttttaggctttttgcatatctgacaactggatgactccacccagactagcgactctatggtccccacccagargctgactcagcaactgttttccacagctccaggattgcagcaaggcacccattccctagccctcctgcccaccaaactgttcttgaataaccctagcctctgaattttcagggaggctgattcaagtaataaaactcccatctcccatttagctggatg

SEQ ID NO: 252466 - DNA, 611 bp, Homo sapiens
gttatcaaattgttggcttataattattcacatattctctgataatttctttttatagtcctccagtgataatgtctcctgttattcctgaccttagtaatctgagatctctcttttgcctttccactgcccctcctcctttttctttgtttttctttgttgttgttgttgttgttgttttggggggtgcaatctagctagagatttatccattttttttttcttcartgtacaaacttttaggctttttaaattgtctctgttgttcttctattttttattttatttatatccactctaatatctatggtttcctttctttttattgttttggatttagtttacttttctttttccatcttcactgaaatgttaggttattgactacagatcttttatttttattcttttgtaatataagtgcttagagctatgcattttcctctaagcacttctttggctgtatcccacaaattttggtatattgcatttttattttcattcctctcacagtattttctaatttcctttgtgatttcttcttcaatctatttattatttaggagtgtgtgtttcatttccacgtttgtgaatttcctaaattgtcttct

SEQ ID NO: 252467 - DNA, 512 bp, Homo sapiens
cccctgtggactgtgaacttcatacgagtacagcttatgtaaaattcatccttgaaccatcagtacaaatatctgcataagttggtgattttctttttttttataattaagcagattctatactaaaaggagtgaaagtaggcatcaagctgttctcatcctacataccttcctataaatacatttgagttctttcatagaggatgtgtttatcccaattttaccacgttgatcttggaaatgaaaaaaatgttctttccctaaaccttgactaagtatgtttcagctctattcttgagttcaggcaagtgtgagataagtgaccctyttttattgagaggatagatactatgtcattctagctttcttgagtcagaatggaaaaccacgatcaggtcagaatatttatatgggtttagttggatagagactaaacatcaggtctatgcacttgtcaggttcaaactgtttcctgaaagtcaggttaaaaaaatagtactgaattagaaggt

SEQ ID NO: 252468 - DNA, 579 bp, Homo sapiens
tcattcattccttcttagatattttcaggcgtccttatatggatattttggccagtgctacagaagtacccatataactgcactatgaaatgggtcttagatggtgtcatccatgtaaaaccgaagaaagctttaggrttcaaggtgctgttgagatctcaaagggatctcagacatcatctatactagtgtttctcatagttgttctattctcaccttcagatttttatatatgcttttaatcctataaaccatagtttacataatttttaagactttttaaattttggtgcagattatttatctcaatatctagttcatgagaggtgccattcaaatggtagttataattatttttaatactttttcttttctcctttgaatcacaagccagttaaactatcaaaacattgagatggggaaaacaatagcatcaaatctaaacaaaaaagatggaaagcatcccttttcctgaatcctacatgaagcagtccagagcatcgttttcctcattactatgatgtgcatttaacataattcttacacgtttttcctagaatgtttaaacagtttagaaaa

SEQ ID NO: 252469 - DNA, 579 bp, Homo sapiens
tcattcattccttcttagatattttcaggcgtccttatatggatattttggccagtgctacagaagtacccatataactgcactatgaaatgggtcttagatggtgtcatccatgtaaaaccgaagaaagctttagggttcaaggtgctgttgagatctcaaagggatctcagacatcatctatactagtgtttctcatagttgttctattctcaccttcagatttttatatatgcttttaatcctataaaccatagtttacrtaatttttaagactttttaaattttggtgcagattatttatctcaatatctagttcatgagaggtgccattcaaatggtagttataattatttttaatactttttcttttctcctttgaatcacaagccagttaaactatcaaaacattgagatggggaaaacaatagcatcaaatctaaacaaaaaagatggaaagcatcccttttcctgaatcctacatgaagcagtccagagcatcgttttcctcattactatgatgtgcatttaacataattcttacacgtttttcctagaatgtttaaacagtttagaaaa

SEQ ID NO: 252470 - DNA, 585 bp, Homo sapiens
tagggcagcagctggggccctggctttgtctggccctggcacaaggccttgcttgggtggaagtgagggtggcagagcaggccccctccctggaagctccatgccaagctggcttggggccaggccaggctgctggtcgggcaggcattcagtgaggacagatctctgtaagggtcatgaggacccagcaagagccagtctgggcacgggtgcatgcctgggcaggggtgcagctggtccagcaaggccttgttactatttgctgttaaacaaaaacatgaggggagcttggggctggcctggccacagtttgtgaagcctggagacggttgctaagggagggtggtgctgcttggagaatgttgctaagggcaggatggtgtcagggcagctcagggagaagctcccagtgctgaggggctgggctgggctgggaagctggggcccacgggtggggcaygccagcactccctgcgcctagggcataaccgtggcttcctggccccttgccaccgactggtgctgtaacctcccactgtggagttttgggggagcaggaggttgggggctagtagcgtgggggct

SEQ ID NO: 252471 - DNA, 602 bp, Homo sapiens
gtttgtcttgtggtggattcccatatatcaataaaactactttttgtttcatttaacaaacatctatatagtcttcctttgcaaccgacactgtggtgcaaagataattgggacaatatatcaaactctgtgaggaatctctctagcttcaactccttttttctaagaccatttcaccttctttccaatgaatcctctttagtcttcaacsaacatcaatcctctttgtttacagactgagccacaaattcctcaacgttcttggcttcttttcccttcacccccactctgtgttaaacaccattgacctaaacttgacttcaaagattgatcatgcaggaactatcactgagacttggccatgcagaacatgagcctctttttgccactacctacgaagggggtggaagggtagagagggaaagttaccaaggaataatgggaggaaccaatcagatccctcagctagacccaattcctcagctgaactcagctgtgctgcagcatcagagaagcaataagaaatatgatttctacattttgttctatttcagtgagtcacctgatcaggatgattcaggacccttttatgggaaatgcca

SEQ ID NO: 252472 - DNA, 408 bp, Homo sapiens
cactgtccctcaagttttactctccttggattcctgtcttatttcttaatttttgaatagtgtttatttcttaattataatgataatgtactttcacaatcacagcaaaataatcaaaatcaagaaattacaatattaccatgaaatctatagactattttaaaatttgtttagttgttccaataatgttctttttgatctcaggatccaattcaagatcatgcattgtatttagttgtcatgtccttggcctctttcaataagaaatagtttctcagtcttttattaacttttaaaatcttcrcatttttgaagagcatagatcaattacttgtagaatgtctatttagatttgtctgatgattcctcatgatttataaatttttggcaggaatgccccagaagtga

SEQ ID NO: 252473 - DNA, 590 bp, Homo sapiens
caggaatttcactgtccctcaagttttactctccttggattcctgtcttatttcttaatttttgaatagtgtttatttcttaattataatgataatgtactttcacaatcacagcaaaataatcaaaatcaagaaattacaatattaccatgaaatctatagactattttaaaatttgtttagttgttccaataatgttctttttgatctcaggatccaattcaagatcatgcattgtatttagttgtcatgtccttggcctctttcaataagaaatagtttctcagtcttttattaacttttaaaatcttcacatttttgaagagcatagatcaattacttgtagaatgtctatttagatttgtctgatgattcctcatgatttataaatttttggcaggaatgccccagaagtgatgycatgctctcctcagtgaatcacatcacatatgtcaactctcccattaatggtgctgttaactctgattaacttggtgaagatgaggtttatgaaggctctccagtgaaaatttaattaacaagtatgttgtacttatgaattcataagaatattttgaggagatgcattg

SEQ ID NO: 252474 - DNA, 590 bp, Homo sapiens
caggaatttcactgtccctcaagttttactctccttggattcctgtcttatttcttaatttttgaatagtgtttatttcttaattataatgataatgtactttcacaatcacagcaaaataatcaaaatcaagaaattacaatattaccatgaaatctatagactattttaaaatttgtttagttgttccaataatgttctttttgatctcaggatccaattcaagatcatgcattgtatttagttgtcatgtccttggcctctttcaataagaaatagtttctcagtcttttattaacttttaaaatcttcacatttttgaagagcatagatcaattacttgtagaatgtctatttagatttgtctgatgattcctcatgatttataaatttttggcaggaatgccccagaagtgatgtcatgctctcctcagtgaatcacatcacatatgtcaactctcccattaatggtgcygttaactctgattaacttggtgaagatgaggtttatgaaggctctccagtgaaaatttaattaacaagtatgttgtacttatgaattcataagaatattttgaggagatgcattg

SEQ ID NO: 252475 - DNA, 590 bp, Homo sapiens
atgtcttcagttagagaactgcctgctatcaggtgatttcttgctaatgtgtttaaagatttcggacttctcaacttggtagccaaatccaccaccacctccttgctttttctgcttgccttcattgctcttgactttcagatcaataaagggaggcaccttgaaaccaaatgacagagcaacttgagaaaaatttaagttattaacattaaagatctgtttcagagaatgggaatcataggyttgtatgtatgacttacatgtttcctgggctgacttatgaagaaagtaattctttttaatcagtttctcaagttgagactgaatgtcagaaattttagaccaggaaaagtcaaattcatttaatggaacctggatgtttcaagtagcaaagaaaacccaattttctctcccatttaggcctctggctgttctacccacactatgaatatattccttagggtcatccggagggtcatactgaacaatgcagtccacttcagtaatgtccagtcctcttgctgccacatctgtgcacaatagtgttcccaaatctgcgctggagaattggaagaatgtggttgtatgct

SEQ ID NO: 252476 - DNA, 590 bp, Homo sapiens
atgtcttcagttagagaactgcctgctatcaggtgatttcttgctaatgtgtttaaagatttcggacttctcaacttggtagccaaatccaccaccacctccttgctttttctgcttgccttcattgctcttgactttcagatcaataaagggaggcaccttgaaaccaaatgacagagcaacttgagaaaaatttaagttattaacattaaagatctgtttcagagaatgggaatcataggcttgtatgtatgacttacatgtttcctgggctgacttatgaagaaagtaattctttttaatcagtttctcaagttgagactgaatgtcagaaattttagaccaggaaaagtsaaattcatttaatggaacctggatgtttcaagtagcaaagaaaacccaattttctctcccatttaggcctctggctgttctacccacactatgaatatattccttagggtcatccggagggtcatactgaacaatgcagtccacttcagtaatgtccagtcctcttgctgccacatctgtgcacaatagtgttcccaaatctgcgctggagaattggaagaatgtggttgtatgct

SEQ ID NO: 252477 - DNA, 517 bp, Homo sapiens
ctggaaagccatggtaagaaacttggaacatattctaatggcaaggaaagctaatgaagagttttaagtaacagaggctgcttgcacctttttaaatcttcaggtaacaaccacttcatcaaaaggctcttctgcctctctatcaaaatacgaggacaagcttattttcactgcatgtgccctccccagttgtaatctctgtttccctgacgatgaacctaatcccacctacctgtctggagctctaacaggtgcccaagaaaatactacattctctaccrttctttccacagctgctcattcctttttttttttttttcttctttgaggtggagtcttactcttgtcccccaggctggagtgtcagtggcatgatcttggcttacggcaaactccacctcctgggttcaaaggatctcctgcctcagcctcctgagtagctgggactacaggcacgcaccaccacgcccggctaattttggcatttttagtagaggcgggggtttcgccatgttgg

SEQ ID NO: 252478 - DNA, 517 bp, Homo sapiens
ctggaaagccatggtaagaaacttggaacatattctaatggcaaggaaagctaatgaagagttttaagtaacagaggctgcttgcacctttttaaatcttcaggtaacaaccacttcatcaaaaggctcttctgcctctctatcaaaatacgaggacaagcttattttcactgcatgtgccctccccagttgtaatctctgtttccctgacgatgaacctaatcccacctacctgtctggagctctaacaggtgcccaagaaaatactacattctctaccattctttccacagctgctcattcctttttttttttttttcttctttgaggyggagtcttactcttgtcccccaggctggagtgtcagtggcatgatcttggcttacggcaaactccacctcctgggttcaaaggatctcctgcctcagcctcctgagtagctgggactacaggcacgcaccaccacgcccggctaattttggcatttttagtagaggcgggggtttcgccatgttgg

SEQ ID NO: 252479 - DNA, 622 bp, Homo sapiens
tgtgctttaaggcaatattgtgaagtctagcctattaacaacacatcacaagcaaatccctcactatgtatgctcatgactgggattgcaagaacactacacagaaatctacagaagaggggaccatgtgtgcacactgtcttcttacatgtaagcaaggaaaaacataaactttcctgtagtaataagaaataagacttagtgcatgtgaattttggatttatttgagccttttagtttgttatcacctattagagaagtatcmgctaaacctgatccacattcaggaaaaggcaaaattacctgttatagactattcactttccagtcaagacacttaggttggcaggtaagaatacatatattaaagaaacacccaatattttcagcaagacagtaactgagcaattttctcttgtcatcttccctttagcctactctcccagatatgtgtccatattcatacccataacaatagtctaacattatctaactggcttagaagagaaaaaatagtgttactattaaggcaagaccttatagcaattatgaaaatataatctccttcaaattaatttttaaaacaacaatggatattttaagcactagttactcgttgatg

SEQ ID NO: 252480 - DNA, 437 bp, Homo sapiens
gttgggttcctcgggtccagtgttgtcaggcgtaggtgtacagataagatgtggtactcaagagctcctagagtaaaggctaggataacatgagacagagtaattgaaatatagttggacaaatgtattaatacgggaattctcattctcatgccttaatacttaaaccaatttaagagtacaaggtcattgccttcacaattgactttattccttctccatctttgacagatgcatttctgaggaaataggagaatgacagaaagaaagcaggtcaattagaggctggtggggaaaaaaaaaacagaagttgaatggaatacataacatagactgggggwgggggagagagtgagagatggggaaacagaggaataacgtaagggaagaaaagacctcaggtcagtgtaggtctaaagagaaaatacatgtgttgg

SEQ ID NO: 252481 - DNA, 612 bp, Homo sapiens
ctcaaacaaatacatgtacacatattcatagcaacactattcacaatagccaaaaggagaaagcaactcaaacgggcattgatgaatgaatcaataaagaaaatgttttatatccatatgaagtactgatatatgctacaatgccaggaagcctcaaaaacaggaagccaagcaaatgtagtcrgacaccaaggtcatgtagtgtatggttctatttatataaaatatccagaacaggtaaatctatagatacagaaacaaattattcgcttctaggggctggcaggaggcggatgaagagtgactgtttaatgggtgcagagattctttttggggtggttaaaatgttttagaaatagtggtaatggttgtacaacatgagtgtactaaatgccacagagttatatgcttcaaaatggttaactttatgtgaattttacctcaattaaatatgatttaaaacatccatttattttcttacagtttctgtggggcagattaggagcttgggcacattttagctgattattctgctcaaggtcttaaaaaacttcaactaagcattagtcaggctgaattctgatcagaggcttgattggggaagaatctttt

SEQ ID NO: 252482 - DNA, 354 bp, Homo sapiens
ttgcagttttttcactgccagtatcagcagcatattctgattattcatagaacataggcagcaggtgggtgaggagatggaactggcccatttctaagcaggagggagtcctgtgatgaggttggatatgcatggactctagatcaaacagacctggtttctatattcatttgtttatcaccatcaagctatattgttggaaawttttatgacctaggtaaacctcagcttcttcatctttcaaataaaaataacaatttctaagttttagcattgtcttccacaaaacatggctgattgcaggtagctattttgctgttgttgctattgttgttactatcagggttattaaaa

SEQ ID NO: 252483 - DNA, 584 bp, Homo sapiens
ggcaactgtttctgaactattgcgtgaaacatccataatgtatttttctgtggaattttttttycatttccttttattatccctctgctctgattgatatttcctgtttccatggactttctccttttagctacaccttctcctatctgaaacctgaactcaggggtcaagttttccagaatatcttgcctgtccaatcacctatctttttttagccataataacctgtgtgtgtgttctgctgcatatgatattttgtgtctgcctttccagtcactgaagaatgatagctgaataaatgaaggaaaggttgaatgagggctctgattttatccttcatagaaaacctatagaagaggtgttagcttctgaatcttacagatgatgaattaattattagtatcatcatcaactccaggattcaaagccttatctattagaaatatcgttcctgttcttgacactcagcaacactataattgtttaattaaaatacaaccatataaaggagaaaatagttattgcttgggaagaatagttacaccaagaaaaaacaacatagatcttacaaggaaaaccaggat

SEQ ID NO: 252484 - DNA, 597 bp, Homo sapiens
tattatttatgttattatagtagattcaaacaagttacttctctaaatcacaaacatggaaaatcagacaatcacattattgtagtgaggacattgtaagtaatctgctacaaatactgaagcccagcttcagtctgtatttcataagtgagaataagaagaaacttaccctggccacacacagtggctcactcctgtaatcaatcccagcattctgggatttgggaagctgaggcaagtrgattgcttgagcccaggaattcaaaaccagcctggaaaagagcgagaccctatctctctaaaaataataataataataataaaaatgccagaaagcctaatctgataaattggaactttatattttgaatgagttctgagctttaggttgtaattactaaggtgccagtatatttaaattataaaaagttatgtatatttaatattttgtatgtgtgttcactgttatatatgtgtatgtttacatgtgtatatataaatatgtgcttacacacacagatactatgacctttccagaacttgtatctgtctgatggacagtttctcctgctcccttccctgattaaagaaggaaaa

SEQ ID NO: 252485 - DNA, 588 bp, Homo sapiens
tgtgtattctgtgtataatactgcttttgtgctttgtcttactttctatcagcttaaaaggggggcttataaatcggtacatgttttactcgtgaatgaggatgtgtagtaattcctatgcttgtcaaaaccaaagatgtgttttattcttccactcttgtggtattgaatcgtactttgattcatttactcagtctaccaatagtgggtattaaactgcctgtgagcttcaattcaaaaagtcagtaaagacaaccatgcttcccagctttagagaccaggaaaatgaaaaagatagtaattattaragcattatgctgatagaaattaaattgcaccagtgataagtgatgttcaagagtgagatgatttgtgtactgctataggccaatttctaggacaggacatggcacatagtgggtgctcagtttgtgttgaatgaatttgaccttgttaggaatggcctacctaggcaaatcttgaattctgccctggaggcgaaaatgattgacgagagtatggtagagaaacatcattagaaaagttctgtgggccaaaaattatgagttcaagaaaacagagaaggcc

SEQ ID NO: 252486 - DNA, 536 bp, Homo sapiens
aagccaatttcagtgacagcaaagtgctagtgataagggaagactctcatctaaagctttacaagtttgcaggaataaatcaatatgctgtctttgactactgttgccagcggtgcattgtatcatgtaaatttcctcttagaatctattgcctagcacctggaaawatagttgccaagtaatgtaagcactctaaacccaagattaggctgtagagaaagagcagcccctattcctggcagacaaaaataattgtaagcaaaatatccctgatgtactattagttgatatgaaaattattcttgacatagaagactgagaatagaaaaatcgttcggtatgtacagtgtcaggtttggaaaaaataagtgccaacaacatacttcttccacatcgtagtgacaatttaaacaatgaataaatacttcctcttaactctccattctgtacagagctgaggcagtaggggtggaatggaggggagtggggattgttaattgctacatttggccagttttgcactggactctctgata

SEQ ID NO: 252487 - DNA, 603 bp, Homo sapiens
aaagattcctttgcatctatctatctctggtgtataagaattacatctgaatcatcttttaatcatttagcttgggcccaaagcataacaggacttgagaaaatgttcatcataaaaatacagttttgtggatgtagagtagataaggttgtgggattggaagacgcagatctgaaatacagctagaaggattttggccaaactctttatgtccctggtgtcatagagaaagaagggaaggcaaatagtgtgtaagatgtgatgcaataaatgggatttataaaatccctgttatctaaatgmagatacgtgaattttataactattgggtgtttaataattacctaagagcacactgtcttctgtacttagagtgaatgcttaaaatgtcattacaaactggacagattacacattaactcaaatgaatcattacgggggaagaaactttgttgtttttttctgggtgagaggtatcagcttttttttttaatgttttttaatgtttatttcaatagcttttggtgtacggtagtttttttgttatatggatgaattatatagtgcattcataacctgagtagagtacattgcccctaatgt

SEQ ID NO: 252488 - DNA, 533 bp, Homo sapiens
ggcctttcttgcaggaggaaggtggcacctcatggaggttttaatttgcatttccctgatgattactgatgttgagcatgttttcatatgtttgttggctgattggatgtcttcttttgaaaaatattcatgtcctttgcccacttacgggtgagattatttgctgttttgtttgagtttcttgtattatagattctagacaccagtcctttgtcagaggtgtagtttgcaaatattttctcccatgtatttgtcagtcatctgcaatgccagccactgtcatagagtatttcttagagtattttgtttaacctgaataactacctatgaggtataagtaatattttcatttaacacataaggaaaatgaaggtgcagctttagaactcagctkgtgtacaaaacattatttgtgcattttggcgatttttatcagaatctcattttccagggtgtattagtccattttcatgctgctgataaagacatacatgagactgggcaatttacaaaagaaagaggtttattggact

SEQ ID NO: 252489 - DNA, 502 bp, Homo sapiens
cacctacattataaaggacaatccgctcactcaaaattcaccaattaagggttaatctcatccagaaacactctgcaagttgacataaaattaatcacatatgttcccacctaacttcaaagggggtggaaaagctcaatccacaatttgcctagattattgagagctagaaaaatttgctgaattccatttatgtctactacattaaccaatgcagtcaggaatagaagaaccaaagataatatgcccagaaaaactcttacaggccacctaaaatcaaattccaggatgctagatcacaccaaaaaagtrgggctcaagccattagaataaagtgaaagtgtaaatagagaacaattgaaacccaatgaaaaccagattggatgttgatgactgtcatgcctctaaaatattcctgactcattgcctaaaaattaacctctctataggtacaaagtcaaacctggtaacaaatccttgagagtctctgcatcactaacca

SEQ ID NO: 252490 - DNA, 502 bp, Homo sapiens
cacctacattataaaggacaatccgctcactcaaaattcaccaattaagggttaatctcatccagaaacactctgcaagttgacataaaattaatcacatatgttcccacctaacttcaaagggggtggaaaagctcaatccacaatttgcctagattattgagagctagaaaaatttgctgaattccatttatgtctactacattaaccaatgcagtcaggaatagaagaaccaaagataatatgcccagaaaaactcttacaggccacctaaaatcaaattccaggatgctagatcacaccaaaaaagtggggctcaagccattagaataaagtgaaagtgtaaatagagaacaattgaaaccmaatgaaaaccagattggatgttgatgactgtcatgcctctaaaatattcctgactcattgcctaaaaattaacctctctataggtacaaagtcaaacctggtaacaaatccttgagagtctctgcatcactaacca

SEQ ID NO: 252491 - DNA, 416 bp, Homo sapiens
tccatttttaaatatctttgtcttgagtatcagatggtgctacaatttctgcttcataagcaaatatgatttataaaactcacgaggaaaaggatagtcttttatatacccatattcatttctttcattatttctgcgtcattcctaatgctccaaagttatttactttttttctttttgaagaatctgtaagggtaggtctgctcrcaacaaaatattctcatttttccatctgagattttcttcatgtcccattcattcctgaagagtagttttgtcagaaatagaatttgtgattgacagttcttttccttaactgcttgaaaaaatattgtgccactccttctggcttccaaggttttagatgaggaatccattgacatttaaaatggtattccccagaggtaatatattgt

SEQ ID NO: 252492 - DNA, 416 bp, Homo sapiens
tccatttttaaatatctttgtcttgagtatcagatggtgctacaatttctgcttcataagcaaatatgatttataaaactcacgaggaaaaggatagtcttttatatacccatattcatttctttcattatttctgcgtcattcctaatgctccaaagttatttactttttttctttttgaagaatctgtaagggtaggtctgctcacaacaaaatattctcatttttccatctgagattttcttcatgtcccattcattcctgaagagtagttttgtcagaaatagaatttgtgatwgacagttcttttccttaactgcttgaaaaaatattgtgccactccttctggcttccaaggttttagatgaggaatccattgacatttaaaatggtattccccagaggtaatatattgt

SEQ ID NO: 252493 - DNA, 608 bp, Homo sapiens
acacttaggcatacaagccagattaaagagaaaaaatatgtcaaaattgcaatgatgtctgcttgtgtgtgtgtgtgtgtgtgttgggaaaatttaaggtactgattaaaacttcccatttcttgactaattattgatcaattttctagacttttagatacccttaaaatattttcactcttaggaatttgtgcatacagatgactatttagggctacatagaagaaacaatttctgctgccaaatgtacccattttttgtgtggaaaaagatcacattttaatattcctgaagttacaagatcacaagtgctggggatgcatatgactgacatgaaactcactgaacaagtaaaggcattgctagtaattgagtcttcaacaattaaagctgagctttgctggcatactggctagattgaacaaatccaggatacagcatacattgaccagatccttgccacctatagatttaattaacctttcatttaattttaggcagctctgaattttctgagtgtgaacattgttattcataataaacatttatatattatgtagtatayggaaaaaatgaacggggaaagaaataattattttttaaattgc

SEQ ID NO: 252494 - DNA, 579 bp, Homo sapiens
tgcattagttatttcaggccactcggtcttgtactgtattagtgctttgttaattggtatcctagtggcttaaaaacgtcatataaatccagtgaaatctgtgtgcagtcagcacgccttgaaaaaaaattcaatgtggcaagtagctcaaagcccctgaggatcgataggagttatctgggcagagatttcattgtatttatattacacaccttgcctccttcargctgttgcctggttttcttgatctgacatgtgggactgaggacaaagccaaggtcaaaaaccaggaggtaagctgaaggccggaggcattttgcatgcctgtgactagcatgaccaaacctcaggaagagtctcagatgcttctgagtcactgcctcaatcccaatactatttagcaagagaaaaggccatttttattgaggttgtgtggcagcaaatctagcaagaaacacactcactttatatgacacgattttttctttattattttagactgcaatatgtctttccataatcaggtcagatcaattcatattggttctcaatttcctctccaacctcttataagatgtg

SEQ ID NO: 252495 - DNA, 603 bp, Homo sapiens
gagtttgtttgcctctttttcctgtgaggatgcatagaaggcactgtctgtgaggaatagaccttgaatctgccaacaccttgatcttggacttcacagcctccagaactgtgagcaatacatttcttttgtttataaatggcccagtctaaggcattttgctacagcaacctgaatggactaagacagaatctcygggcagtggggcccaggcacttgcattttattattattttttgagacagtttcgctcttgttgcccaggctggagtgcaatggcaccatcttggctcactgcaacatccacctcctgggttcaagcgattctcctggctcagccacctgagtagctgggattacaggcgcctgccaccacgcctagctaattttctgtatttttagtagagatgaggtttcaccatattggtcaggctggtctcaaactcctgacctcaggtgatccacccacctcagcctcccacagtgctgggattacaggtgtgagccaccactcctggtggcatttacattttaaaaatgtttcttaggcaactctaaccacagtggtttaaccactacacttgtaaacacaagcgtctacct

SEQ ID NO: 252496 - DNA, 580 bp, Homo sapiens
acattttcatgcgacaagttcaccttatccagtgcaaccccatcagctgctgcggtgggtagaggaaaaaasatgtttacaattagcacggccattgtctagatggaaattggtccttgtgataaacgggcttaagtatcatttgcagtacacttgctaagacctggtctcactccaccatcccaggagctctgagaggtggcatcattatggtctcctgtcctggtgggacaagcccgaggtggaaggacatgcccacactcaggcgagggccctgcggggaatccacactcagtgttacacacacacacacagctctgtccgccaagctgttcagcaaaagccctcccaggtcatctcagccaaccagagagaaaagggctcctgtgtgtcgtctgctgccgttccccagccatggggtggacatctgcttcttgcatccctcacctcgatatcctcttccccaaggggcagtgatggctcctccacggcaggagggccctgaagtggggaccccagctcccagctgcaggtcgggcatggggtccacgttggacccattggatcacttcttcccgga

SEQ ID NO: 252497 - DNA, 580 bp, Homo sapiens
acattttcatgcgacaagttcaccttatccagtgcaaccccatcagctgctgcggtgggtagaggaaaaaagatgtttacaattagcacggccattgtctagatggaaattggtccttgtgataaacgggcttaagtatcatttgcagtacacttgctaagacctggtctcactccaccatcccaggagctctgagaggtggcatcattatggtctcctgtcctggtgggacaagcccgaggtggaaggacatgcccacactcaggcgagggccctgcggggaatccacactcagtgttacacacacacacacagctctgtccgccaagctgttcagcaaaagccctcccaggtcatctcagccaaccagagagaaaagggctccygtgtgtcgtctgctgccgttccccagccatggggtggacatctgcttcttgcatccctcacctcgatatcctcttccccaaggggcagtgatggctcctccacggcaggagggccctgaagtggggaccccagctcccagctgcaggtcgggcatggggtccacgttggacccattggatcacttcttcccgga

SEQ ID NO: 252498 - DNA, 580 bp, Homo sapiens
acattttcatgcgacaagttcaccttatccagtgcaaccccatcagctgctgcggtgggtagaggaaaaaagatgtttacaattagcacggccattgtctagatggaaattggtccttgtgataaacgggcttaagtatcatttgcagtacacttgctaagacctggtctcactccaccatcccaggagctctgagaggtggcatcattatggtctcctgtcctggtgggacaagcccgaggtggaaggacatgcccacactcaggcgagggccctgcggggaatccacactcagtgttacacacacacacacagctctgtccgccaagctgttcagcaaaagccctcccaggtcatctcagccaaccagagagaaaagggctcctgtgtgtcgtctgctgcygttccccagccatggggtggacatctgcttcttgcatccctcacctcgatatcctcttccccaaggggcagtgatggctcctccacggcaggagggccctgaagtggggaccccagctcccagctgcaggtcgggcatggggtccacgttggacccattggatcacttcttcccgga

SEQ ID NO: 252499 - DNA, 580 bp, Homo sapiens
acattttcatgcgacaagttcaccttatccagtgcaaccccatcagctgctgcggtgggtagaggaaaaaagatgtttacaattagcacggccattgtctagatggaaattggtccttgtgataaacgggcttaagtatcatttgcagtacacttgctaagacctggtctcactccaccatcccaggagctctgagaggtggcatcattatggtctcctgtcctggtgggacaagcccgaggtggaaggacatgcccacactcaggcgagggccctgcggggaatccacactcagtgttacacacacacacacagctctgtccgccaagctgttcagcaaaagccctcccaggtcatctcagccaaccagagagaaaagggctcctgtgtgtcgtctgctgccgttccccagccatggggtggacatctgcttcttgcatccctcacctcgayatcctcttccccaaggggcagtgatggctcctccacggcaggagggccctgaagtggggaccccagctcccagctgcaggtcgggcatggggtccacgttggacccattggatcacttcttcccgga

SEQ ID NO: 252500 - DNA, 529 bp, Homo sapiens
atattaaagatggatgatacatttagtatatatttacagtagatagttattacccaaatatacattaaagagaaaaatgctaaaagtatgtacaacagaatctcaaatgggtattaatcaacattcatggaaaggaatttttttttttcaggcagggtcttattccatcactcaggctagagcacagtggctcactgcagccttgaattcctgggttcaactgattctcctgcttgagcctccagagtagctaggactataggcacatacaccactacactcrgctaattttttaaacttattttttgtagagaaagggtcttgctatgttgcgtaggctggtctctaactcctggcctcaagcaatcctcctgcctcagcctcccaaagcgctgtgattttaggtgaaatatttctgaattgctctactttacctaacattttaatcaaatgaccatctacaaaataaaaatcgtgaaaaaatatttattaatatttaatatccagcaatggtgtatcgattaccaga

SEQ ID NO: 252501 - DNA, 472 bp, Homo sapiens
gatagagctaatctttgttaatcagttatattattttaactggttatagcaagttgaatgtcaatcaactttgaatataaatgtttttaaaacttatcggcacatttgaaattaagactacttcaaaactcattactattactattttattacagatgaacccacaagatcattgagtggtcttatcttgaagaataatgtgaaagcacactttcagaacttcccaaatggtgtaacagactttattaaaagtgaatgtttaaataatattggtgactcctctcctctgattagagccactgttggtaagttatattacaacagttttgcttactttgtttgtaactgggtcatttttagagatgacagattatttccttaggaatttttgtctgtttcatgttaaattgtgwtggggaaactttcattgcctttaaatgcttttgaaatggtgtaatcatggtaaaagcgc

SEQ ID NO: 252502 - DNA, 587 bp, Homo sapiens
acagcctctgtggatgtccgtgccaagcagaatgctcctggccactgtaaatctggctccaatttggacttaaattcatgcatgagtccttttccttgggcttggatgctctgggaccacctgctcccttctgggaaatcaggacttttcctttttatccaaatcaaagggtgactgagccagtggccaaaagggtgtttgcattggtatgaagaggaagagtggttcagtccccctggaagtggactcagcaccctcatccaaattccaaacccatagaacccagcaaggctccrgggccctggctgaatcttatcctttggaatttggactggggtgaaattctttttgaaggtagcatggacctgggtcaaggagaggacttgaacagatctctgtccagcctggaaatttgatgatttacatgaaaggaattgaatgctggcattgaatttctcttggataccatgggacctaaaatgtaaaggaagcaaattgagcaaacaccagcgtgcatttgactataacgaatatactctgaaatgtccttcggaatgttatagcaaaacccaaattggggcatgtca

SEQ ID NO: 252503 - DNA, 602 bp, Homo sapiens
gtgttctattgacccatatgcctcccctcacgccagtgccacagagtcttgattcctgtagctttgtagcagggtttgaattagaatggtgaatcttctaactttgatcttcttttacaagacttttttctttttctttttccttttctgagagagtgtctcactctatcgcccagactggatcacagtggcacaatctcagctcactgcaacctctgcctaccaggctcaagcaattctcctgccttagcctcccaagtagctaggattacaggaaagcaccactatcacctggctaatttttgtatttttaatagagatgggctttctccatgttggccaggctggtcttgaacycctgacctcaagtgatccaccttcctcggcctcccaaggtgcttggattacaggcgtgagccaccacacgcggccacaagacttttttgactattctgggtgacttgcatttctatatgattttagaatccccatatcaatttctacagaacacccagctgggattttgacagtaattacatttaatctgcaccaatttgagggtactgcagtcataacaatattaagtctttcaacccatgaac

SEQ ID NO: 252504 - DNA, 643 bp, Homo sapiens
gccagaagaaccacccagatagtcccagcacaaactgctgtaaaattacgaattaaacaaaggtattgttttaaactgctctgtttctaagctgtttgttatgcagtaaaagctaatttatacaggaagtattcaataattgctagcagttattattattgctgtgattttattagtagcagaattaatcaggctgcttggaccctgagtcatccattcccccacaaatatttgtacagctcttcagagccatggactttccctgtatcatctcattcaatcttcataacaacccttctaggtaggattgtgattcccatgctacagctggasgaactgggcttcagcaaggagacttgatgctggtccaggaggtagaagagtcagacaggccaaagtctaaggctgtcatcgctgggtctcttgggatggtcatttttacattgcctggattttctctaaaatgtgacactatctgaatatcatttgattttaatcaccttgttacagtataaccctgttacaggatggatagttgtatctgcccagtgggttcaccttgcctactgcctagatagagccagtttatcaagacaagggaattgcagtagagaaagagtaattcacacagagccggcacggc

SEQ ID NO: 252505 - DNA, 621 bp, Homo sapiens
acaaagtttctttccatgttttcttgtttctcttttaaaggatgaaggcacagtcaggaaaggtagatatttccgctgtcaaagggaactgctttatatgttttagctctctttagttacatggttaaagaaatttggattcttatgcagcaaacttttcttctctttgaagaagctgttgtgaagtcatcttgggatctgaaaattgccactgttttttatatgatggtggctttaggtttccttttttttttttccacagggcaatgagatacaatgaacactgggtgcccctcccagccaacaatctcattaaaattcattctctcctgtcctcttttyactgtttattttataaacagagacacagtgtctgaaaactccagtagctcaaagacacacttttctggtgaaacctaactactctccacttttatatctgaaaccgaagcaaatcttccttcaaagtatttccatctgaatgaatccactttccagaggaggtgggaatctcgcccagtcatccaaagtccataaacctacacctctctcccaaagccccacaagagacaggtgtccctctgaggaagttaaaatgctgaaatccatgaataagtgagg

SEQ ID NO: 252506 - DNA, 592 bp, Homo sapiens
ttgagtatggctcaaaggtaactcagatctcagagctcaatataaattttatatacatataaatatattttaaatacatatattttacatacatataaagggatcattttatccgtttacctggtctctttccatgtgccctacctcagaaaatgtcactcctacattcattcccaccgccattcattcactttgaaaatgttcattgagcacttactttgtgccagaggctggagatatggtcaacacatggacaaggtccctaccatcttggagcttgtacccagtgagcaggcaaacataaaccaacaaaaagccaaacaccatagaattctaggcaaggatcagtgctacaagcraaactcaagctgggtgaagggagaggcagatggcacttgtgtgtgtataatctcccttgttacaggaagctagtaatcaatctcaacttggttgactacggctatgttctgggggacttgggctgagggctttaccatgatgctaatatgttttggaagagtccaggtgctctctgccctatctgcctttccagcaacacctccaggcacttgccccagcttgttcccattgc

SEQ ID NO: 252507 - DNA, 589 bp, Homo sapiens
aaatagagctggaagaggaagtcatagaagaaacggatgcagagggtggagggatagatgggaccctgctgtctttgaagacgaaggaatgggccatgagccaaagaatgaggcagcctctggaagctggagaaggcaaggactcggcatgacattcawggaaacattttcccaggaaacacactcagggacccctgatcttactgtcccttcctttgccagaaaaggttccagagacatcccaaattcatcttcagaccctggcatcatcagaggggtctccccagaaggaaccagcccttcctacaccttgattttagcccggtgagaccagcactgaacttctacactacagagccctaagatgataaaagcatgtgtgttttaagccactgagttgatgggcatttgttacagcagccacgggacaccactacaagcaggaagaaggtgccatctctgccgctggtgaatagctgagtagatacccgaggctgccttcctccgacatccttactgcatgataaggacaagcctgcccttgtttaagccatcttaagttgggttattgtgatttgaagcccagtgc

SEQ ID NO: 252508 - DNA, 589 bp, Homo sapiens
aaatagagctggaagaggaagtcatagaagaaacggatgcagagggtggagggatagatgggaccctgctgtctttgaagacgaaggaatgggccatgagccaaagaatgaggcagcctctggaagctggagaaggcaaggactcggcatgacattcatggaaacattttcccaggaaacacactcagggacccctgatcttactgtcccttcctttgccagaaaaggttccagagacatcccaaattcatcttcagaccctggcatcatcagaggggtctccccagaaggaaccagcccttcctacaccttgattttagcccggtgagaccagcaytgaacttctacactacagagccctaagatgataaaagcatgtgtgttttaagccactgagttgatgggcatttgttacagcagccacgggacaccactacaagcaggaagaaggtgccatctctgccgctggtgaatagctgagtagatacccgaggctgccttcctccgacatccttactgcatgataaggacaagcctgcccttgtttaagccatcttaagttgggttattgtgatttgaagcccagtgc

SEQ ID NO: 252509 - DNA, 589 bp, Homo sapiens
aaatagagctggaagaggaagtcatagaagaaacggatgcagagggtggagggatagatgggaccctgctgtctttgaagacgaaggaatgggccatgagccaaagaatgaggcagcctctggaagctggagaaggcaaggactcggcatgacattcatggaaacattttcccaggaaacacactcagggacccctgatcttactgtcccttcctttgccagaaaaggttccagagacatcccaaattcatcttcagaccctggcatcatcagaggggtctccccagaaggaaccagcccttcctacaccttgattttagcccggtgagaccagcactgaacttctacactacagagccctaagatgataaaagcatgtgtgttttaagccactgagttgatgggcatttgttacagcagccacgggacaccactacaagcaggaagaaggtgccatctctgccgctggtgaatagctgagtagatacccgaggctgccttcctcygacatccttactgcatgataaggacaagcctgcccttgtttaagccatcttaagttgggttattgtgatttgaagcccagtgc

SEQ ID NO: 252510 - DNA, 591 bp, Homo sapiens
actttccttgccttgttgtgtgtcttatcatttttggttgaaagctatataccatgtttaggacagtcaatactttggtaaataaaatttatgtctgaaaatgggcatgcctccttttttctaggctttgagcatagatttctgttctgttgttattataattaccctcagggaactgctggtttccagttattttagtgttacttggtgcttaggatgggaactgggttgcaasggggtgcttctcagttttgctgttccactttggctttagcttttgcttgtgagcctgcatcacagaaggagtctctctctatgcttttgtctctctgcacagaagactgctgatcattgttagcagtgcctgctagactggtgcttgcgatgagggtagggggtctttgctgggctggttctgcctcagtctttagtaaaccttaagcccctgggtctcagaggtggggctttctctgtgatattgcctatcacagcagtggaggaggatctctaatggtctgggcccatggtggtttcctgctctgtctcccaaaatgttgtttgcctatttccttcccccaaccataatgagtt

SEQ ID NO: 252511 - DNA, 591 bp, Homo sapiens
actttccttgccttgttgtgtgtcttatcatttttggttgaaagctatataccatgtttaggacagtcaatactttggtaaataaaatttatgtctgaaaatgggcatgcctccttttttctaggctttgagcatagatttctgttctgttgttattataattaccctcagggaactgctggtttccagttattttagtgttacttggtgcttaggatgggaactgggttgcaagggggtgcttctcagttttgctgttccactttggctttagcttttgcttgtgagcctgcatcacagaaggagtctctctctatgcttttgtctctctgcacagaagactgctgatcattgttagcagtgcctgctagactggtgcttgcgatgagggtagggggtctttgctgggctggttctgcctcagtcttyagtaaaccttaagcccctgggtctcagaggtggggctttctctgtgatattgcctatcacagcagtggaggaggatctctaatggtctgggcccatggtggtttcctgctctgtctcccaaaatgttgtttgcctatttccttcccccaaccataatgagtt

SEQ ID NO: 252512 - DNA, 346 bp, Homo sapiens
aagaccctcgacttcggaggagcctcaggcgctcctctccccacccctcakcaagggctgcctgggagcctgtggctgcttccgcacctgggagtggggcttccctgcccatggcagaatctttctgtgggcagcatcctctatatgacctccggcggctcacagaccctctctggacctcaatctcatcacctgtagagggaagtttggtctgtcccacagagctctgccaaaacggtagatctcaggaagatggggtcccccttggtgggcctcgcaccaacattcctctgcttctctgggggtcccatcagctgccagagaccctgaccctgccccctcctca

SEQ ID NO: 252513 - DNA, 346 bp, Homo sapiens
aagaccctcgacttcggaggagcctcaggcgctcctctccccacccctcagcaagggctgcctgggagcctgtggctgcttccgcacctgggagtggggcttccctgcccatggcagaatctttctgtgggcagcatcctctatatgacctccggcggctcacagaccctctctggacctcaatctcatcacctgtagagggaagtttggtctgtcccacagagctctgccaaaacggtagatctcaggaagatggggtcccccttggtrggcctcgcaccaacattcctctgcttctctgggggtcccatcagctgccagagaccctgaccctgccccctcctca

SEQ ID NO: 252514 - DNA, 595 bp, Homo sapiens
aagacaatgctggagaggcaggcggaagccagttacacacagcccttgggtgccatcagcaggagttggaattttattcaaagtacaaaggaaaatcactcatgcgggagtatcactagcaggggaatgaaatgatctgggatgtttttcttttctttgttttttttggcggtgaggggtsgggggatgttttccaaaggtcagtctggctccatggtggagagcggatggtagaattataaaaacagagtcgacttcctaggctcaagtgatcctcccaccttggtctcccaaagtgctgagattacaggcatgaaccactgcccttggacaaggcagggttttaacaaacttaatctatcagcaaaacagatgactgttcaagtttcaagaaactgaagaagaaagcacctactggctgtccatgcagtcatgtgtacaggaggatgaggactttgagacgagaggcggtagacaagggggcctcagggcagctcactgctagtcatctccttaccgcctccactgccagccacaggacccacagatgctccacagtcagcccaaattgtccaaggccaaggtatctatgtcc

SEQ ID NO: 252515 - DNA, 595 bp, Homo sapiens
aagacaatgctggagaggcaggcggaagccagttacacacagcccttgggtgccatcagcaggagttggaattttattcaaagtacaaaggaaaatcactcatgcgggagtatcactagcaggggaatgaaatgatctgggatgtttttcttttctttgttttttttggcggtgaggggtggggggatgttttccaaaggtcagtctggctccatggtggagagcggatggtagaattataaaaacagagtcgacttcctaggctcaagtgatcctcccaccttggtctcccaaagtgctgagattacaggcatgaaccaytgcccttggacaaggcagggttttaacaaacttaatctatcagcaaaacagatgactgttcaagtttcaagaaactgaagaagaaagcacctactggctgtccatgcagtcatgtgtacaggaggatgaggactttgagacgagaggcggtagacaagggggcctcagggcagctcactgctagtcatctccttaccgcctccactgccagccacaggacccacagatgctccacagtcagcccaaattgtccaaggccaaggtatctatgtcc

SEQ ID NO: 252516 - DNA, 595 bp, Homo sapiens
aagacaatgctggagaggcaggcggaagccagttacacacagcccttgggtgccatcagcaggagttggaattttattcaaagtacaaaggaaaatcactcatgcgggagtatcactagcaggggaatgaaatgatctgggatgtttttcttttctttgttttttttggcggtgaggggtggggggatgttttccaaaggtcagtctggctccatggtggagagcggatggtagaattataaaaacagagtcgacttcctaggctcaagtgatcctcccaccttggtctcccaaagtgctgagattacaggcatgaaccactgcccttggacaaggcagggttttaacaaacttaatctatcagcaaaacagatgactgttcaagtttcaagaaactgaagaagaaagcacctactggctgtccaygcagtcatgtgtacaggaggatgaggactttgagacgagaggcggtagacaagggggcctcagggcagctcactgctagtcatctccttaccgcctccactgccagccacaggacccacagatgctccacagtcagcccaaattgtccaaggccaaggtatctatgtcc

SEQ ID NO: 252517 - DNA, 455 bp, Homo sapiens
tgagaccccatctcaaaaacaaaacaccaaacaaaaacaaaaacaaaaaaaaatggctgggcacggtggctcacacctgtaatcccagyactttcagaggccgaggcaggcagatcgcctgccaggagttcaaggccagactggccaacatggtgaaacctcatctctactaaaaatacaaaaatgagtcgggcatggtggcagagacctgtaatctcagctactcgggaggctgagggaggagaatggcttgagcccaggagctggaggttgcagtgagccgagattgcaccactgcactccagcctgggcgactgagtggagcggaactctgtctccaaaaaaaaaaaaaaagagtttttttttagatcatcagctattgttagtgttagtgtatgttatgtgtggctcaagacaactttgcttcttttaatataggcagggaagtgaaaaga

SEQ ID NO: 252518 - DNA, 455 bp, Homo sapiens
tgagaccccatctcaaaaacaaaacaccaaacaaaaacaaaaacaaaaaaaaatggctgggcacggtggctcacacctgtaatcccagtactttsagaggccgaggcaggcagatcgcctgccaggagttcaaggccagactggccaacatggtgaaacctcatctctactaaaaatacaaaaatgagtcgggcatggtggcagagacctgtaatctcagctactcgggaggctgagggaggagaatggcttgagcccaggagctggaggttgcagtgagccgagattgcaccactgcactccagcctgggcgactgagtggagcggaactctgtctccaaaaaaaaaaaaaaagagtttttttttagatcatcagctattgttagtgttagtgtatgttatgtgtggctcaagacaactttgcttcttttaatataggcagggaagtgaaaaga

SEQ ID NO: 252519 - DNA, 455 bp, Homo sapiens
tgagaccccatctcaaaaacaaaacaccaaacaaaaacaaaaacaaaaaaaaatggctgggcacggtggctcacacctgtaatcccagtactttcrgaggccgaggcaggcagatcgcctgccaggagttcaaggccagactggccaacatggtgaaacctcatctctactaaaaatacaaaaatgagtcgggcatggtggcagagacctgtaatctcagctactcgggaggctgagggaggagaatggcttgagcccaggagctggaggttgcagtgagccgagattgcaccactgcactccagcctgggcgactgagtggagcggaactctgtctccaaaaaaaaaaaaaaagagtttttttttagatcatcagctattgttagtgttagtgtatgttatgtgtggctcaagacaactttgcttcttttaatataggcagggaagtgaaaaga

SEQ ID NO: 252520 - DNA, 455 bp, Homo sapiens
tgagaccccatctcaaaaacaaaacaccaaacaaaaacaaaaacaaaaaaaaatggctgggcacggtggctcacacctgtaatcccagtactttcagaggccgaggcaggcagatcgcctgccaggagttcaaggccagactggccaacatggtgaaacctcatctctactaaaaatacaaaaatgagtcgggcatggtggcagagacctgtaatctcagctactcgggaggctgagggaggagaatggcttgagcccaggagctggaggttgcagtgagccgagattgcaccactgcactccagcctgggcgactgagtggagcggaactctgtctccaaaaaaaaaaaaaaagagtttttttttagatcatcagctattgttagtgttagtgtatgttatgtgtggctcaagacaactttgyttcttttaatataggcagggaagtgaaaaga

SEQ ID NO: 252521 - DNA, 472 bp, Homo sapiens
ctttatttgtttattttcctctctctaaacagatttaagcaatacaggaaaaccagagcaggagagtaaaacatcctgtcccacatcttttgataagataagcacagattcagaaataagaacagatttagaggagcaaatgtttgtaactaaaaatgcatttcctccatgtgtttaaaatagcacactgcttaggctataaaaagccaaagtttatgttttgggaatggaataagccctactttaattagaggcaggaatcaaactacaaaaattactctcctacatttggtagtaaagtacaaagcttaatgtgtctaaattctcatggtcttgtcattccatgctcttgatccgcctcttccctcactccccagtccttactrccagtactgttagctacttgcatccagttttctcagcatttgctggtatctggctggccaggcttcaaccccacatttgctaccta

SEQ ID NO: 252522 - DNA, 468 bp, Homo sapiens
gttctcattcctcatagattgtgcactagatgagcagtaagtattaacaatccatttaggagtgtcacaagaggggatggcaaaaatttttttttttttttttggtgctcagactttcatacattaagtctttttactatttcaaagatttctttgtcattctttggttgttacatttttctatagaaaaacaaaatagcatttttttttaaagaccatgttggatttgtcaaacctgactccagtgccagagtaaagagcgttgtactaacttaacgcttgtgtctgaatgaagttggccaaatgcttacatatgtttcctggtggtgattctttcagtattctcagttcacatgccactgggtcatcagaagacaagtatctggatttcagagccaacagtttgcttttatttaagctgcaaraccctccattgccataagatctgccactgccataataacaaaa

SEQ ID NO: 252523 - DNA, 170 bp, Homo sapiens
aatctactctgtgttttttaagtgaaacaacaaaacatagatgacagcacatctgtttccagcatagtttcctgaatattttaaccccacttttgagacataccgctcagacagaaagwttcctttcaaaatgttactgctcattgacagtgtacccagtcatccatatg

SEQ ID NO: 252524 - DNA, 360 bp, Homo sapiens
tcttttaaaaacagacctcaccaagctcagccaccaacttaaaaaggactggacaatacttttaccacttttgcttctcagaattcaggcctgtcctcagaatrctacaaggtgtacaggagcccatttaagctcctgtatagacgctcctttttattaggccccagtctcattcgacaccagagcaacttagactgtgcccccaaaaaaacttgtcatccctactatcttttgtctagtcatactcctattcatcgttctcaactactcatacgtgccctgctcttgtttacactgccggtttacactgtttctccaagccatcacagctgatatctcctggtgctatccccaaactgc

SEQ ID NO: 252525 - DNA, 645 bp, Homo sapiens
tggaccttcttatttgtaatgcaatacacatggcccccttggaattttcatcactggtcctcggattgcatttttgaagccatagagaatgaagtactggaagttctaagaggcaatatgcaaaatatagaaataggccatgtgttgggatagtgaaaccatgaggaattgtgttacctatttacagatactwtcaaacatggccaaagtttttcttaaaatttttaatgatggacataccttaagattgaagcatttgaagagaagggattttgcccctcattcttcttaagttatttgttatccagtcaaaacatctccaagtccttccattgcctctcatgaggtataatttccttctctgtatttcatccagcttatcaacatctcatgaaaacatggaactcagaataaacacaataggcaaccctggtctgggagctgaccagggttatcacattcatttatttttctacctgctttgcactaaccccagagcatatgggggaatgtagttcctccatcccgaccccttcatcctgttattccagtggttcctatcagtagataaagaacgacttataaaaatagtcaacatcttttattttaacaatcaccccaggaagcctgtgcctatggaacaac

SEQ ID NO: 252526 - DNA, 645 bp, Homo sapiens
tggaccttcttatttgtaatgcaatacacatggcccccttggaattttcatcactggtcctcggattgcatttttgaagccatagagaatgaagtactggaagttctaagaggcaatatgcaaaatatagaaataggccatgtgttgggatagtgaaaccatgaggaattgtgttacctatttacagatactttcaaacatggccaaagtttttcttaaaatttttaatgatggacataccttaagattgaagcatttgaagagaagggattttgcccctcattcttcttaagttatttgttatccagtcaaaacatctccaagtccttccattgcctctcatgaggtataatttccttctctgtatttcatccagcttatcaacatctcatgaaaacatggaactcagaataaacacaataggcaaccctggtctgggagctgaccagggktatcacattcatttatttttctacctgctttgcactaaccccagagcatatgggggaatgtagttcctccatcccgaccccttcatcctgttattccagtggttcctatcagtagataaagaacgacttataaaaatagtcaacatcttttattttaacaatcaccccaggaagcctgtgcctatggaacaac

SEQ ID NO: 252527 - DNA, 602 bp, Homo sapiens
atgcttttattttcttttgcaactacttcctgtgactttttaacttaacaggccttcctaacatgcccttcatcttatgctggaaaaagcccacattgtcygccacaccaaagaatactcaaacccactgaccaggccaatggagacaggatgtccctgttgtctccacatctggcctctccagcacaagcctctaattttctgtggctctcacttggcctcccttcaatgtgggagggtagtgtggataatgagccccatctgtggggcagctgggttctgaggccccccttctccatgcctttgaagagtacatccatgttctgcctggaggtctcctgttgtgaccagcatttctgtttcccattagcagggggagagcatcaaaatggtaaaaagaggaagcaaattaatgccttattctgggatgtgctgaaatttaccagtatgggggatgttgctgcagatgagagtgtcttagacacagatattaatggcaatgatttcccttccataatggcaaagcatcttggtgtggtggctgaaaaactatgtgatttagagtcaatatattagggtttgagttcaagctattccatgtg

SEQ ID NO: 252528 - DNA, 561 bp, Homo sapiens
ggctgtctggaaaaggtggggagggcaagctgcagtttgtcacctttgctgaattccatactggctgatttcaagctaccaaggagacatcgctggtcacaaagtttggaagaaatgagcatacttggcttatctaagttggtaagagctggctccagtgtagctaggggtcacaggatgaggaattgaccatttcagtrtagttatagaatacggcaagaaggagagagaagggcagagatggagcacaaaacaacaaacaaaaatgaaataaaataaaaaatgaagggaaaaacaaaaaggaaataaaaaaagaaagaaacagcgaccttagatatcatctcttccaattattctattttgcaggcaaaacaacgagggaccagagagaagaaataagcttcctacggtcacccctcacatcagtggtggacttggcataccaagccgagggcttaaatatgtgagagaccaagcattctcaagagaagctagaattaatgagtgaaactgagcaaataacacaatagtttgaaccaaataaagcatcgccccacagtt

SEQ ID NO: 252529 - DNA, 582 bp, Homo sapiens
ctgtttgtgaaagagtgaatattaatgagtcgggactgtgccctatatacacattctagggtagcaagacgaattccagactccactgaaggtagcgatcagtcttgtgagctattcttaagcttgagtggcactggtccccaaagtgggcaaagtaagcccctgtggtgaaagtytttagctgctgaaactaggctaggctagattaggttaagaagtcactggcaaaatgatatacattgaagcacaagctcaatagatatgtcctcatgcctcaaataactaccagagaagagaaagacaaacaaacaaacaaacaaacaaacaaacaaaagagcaatgtgtttacaaggagaagctgtgcaattaaccatgcttgcacttcatttgtatggccttctgctttggggaaaaaacggctgtgagtctagagatggctaggggtagaagtgtctgtgcctaattgaggagaagttccaaagaagctgtgaggcaaagtgtagtgacagcgtccacctcactctgagtagtgaagttctcaggaggagaataaatacattagtgtcattttagaggtgttca

SEQ ID NO: 252530 - DNA, 582 bp, Homo sapiens
ctgtttgtgaaagagtgaatattaatgagtcgggactgtgccctatatacacattctagggtagcaagacgaattccagactccactgaaggtagcgatcagtcttgtgagctattcttaagcttgagtggcactggtccccaaagtgggcaaagtaagcccctgtggtgaaagtctttagctgctgaaactaggctaggctagattaggttaagaagtcactggcaaaatgatatacattgaagcacaagctcaatagatatgtcctcatgcctcaaataactaccagagaagagaaagacaaacaaacaaacaaacaaacaaacaaacaaaagagcaatgtgtttayaaggagaagctgtgcaattaaccatgcttgcacttcatttgtatggccttctgctttggggaaaaaacggctgtgagtctagagatggctaggggtagaagtgtctgtgcctaattgaggagaagttccaaagaagctgtgaggcaaagtgtagtgacagcgtccacctcactctgagtagtgaagttctcaggaggagaataaatacattagtgtcattttagaggtgttca

SEQ ID NO: 252531 - DNA, 641 bp, Homo sapiens
tgtcatttaattttttgcctctttatcaatgatacatctcctgaatctctgacaaaatggcaaaatctcctctcgacatggtctagaccatcagttccattttcttttctggaagacagccycactgaagcctccatcctgctccaatatggactggttgctctcaaagttctctatacaactgtggtttgagacatctcttcaccttcagactggatattccctttgcctctctcctgttaagtgtctgtcatctcctctatgtcaagtcttcatctttcttgactcactctttcatgctggtggtatatctcttccagaggcttcatgagatggtgcatggtacatctaatattttaagattgcatgtctaaaaatatcgtcttaaaactctctcacacttggttgctggtttgcttggatataggatattaggttgaaaataattttaccttaaagttgtgaaagtatttcttcaggtcttaaagatttagctgctgctgagttattattccaaattccttctgtgctccttttccccctctctgtaatcttttgggattatttctttagcctcatattatgaaatctcaggatgacatctcttgtattcatttcccattaaatatgctgggcactca

SEQ ID NO: 252532 - DNA, 452 bp, Homo sapiens
tgcttatcaaaattataggagccaagtgaggaaagggggttggaggtggcgtctcacctctcaagtctgtagagattcacttactctcytcctttttggtatgatgcctcatttatatccttatctgtgcctggtagcccaaggctggagtttctggttcattttctctaggtatcaaacttacagtcttccactgaagttggtaagtgttggttacctggtctccctaaatggtagacgtgacttgaggatctgagcgactttacataaagtcatatgaaaaactcctctgagtttgattctgcaactcattctgccttctgagacaactggagtgtctaacttcaggggctttcttaagttctcagatacaaaggggcttgcgcttcctggattccccagctgcttccattttaggaagtcagttttcactctttcatcagttttctatc

SEQ ID NO: 252533 - DNA, 452 bp, Homo sapiens
tgcttatcaaaattataggagccaagtgaggaaagggggttggaggtggcgtctcacctctcaagtctgtagagattcacttactctcttcctttttggtatgatgcctcatttatatccttatctgtgcctggtagcccaaggctggagtttctggttcattttctctaggtatcaaacttacagtcttccactgaagttggtaagtgttggttacctggtctccctaaatggtagacgtgacttgaggatctgagygactttacataaagtcatatgaaaaactcctctgagtttgattctgcaactcattctgccttctgagacaactggagtgtctaacttcaggggctttcttaagttctcagatacaaaggggcttgcgcttcctggattccccagctgcttccattttaggaagtcagttttcactctttcatcagttttctatc

SEQ ID NO: 252534 - DNA, 633 bp, Homo sapiens
gtctgctctgaacgctaaagtctgaagaaagatatatgtgatttccaaagtttcatgctcatcccttaaatagatctttaatttattgccttgaaatccaaataaataaaatattgtatatgaatgatgtaatggcttcgggccagagctccctgtgatcctgcgacaaattttggattggtgttgccataaaacgtccctgcccacacctcaaaaccacacataagccgtcattaatctctccgcttacgagttgtgttgctatctcagattgattcaaaaatatttgggtgtgggtgcatacaaagagttcacaacattgttatatgaactgtagtagatgtttaaaagttaagtaaaagaaaaaaatgagttaatgctgaatatcagagtccagggagatcatactgattcctttgtttacatttagacattctgcgatcaatctttactttttaccttacttttttctcctaaacattttattataawttttttcaaaaatatggcaaagttgagagcattttacagtgagcaatcatctcttccacctactttctaccataaatattttactatactcatttttaaaatcacgcatctatatatccctctgtccatccatcaattcat

SEQ ID NO: 252535 - DNA, 510 bp, Homo sapiens
ggaattcaagataactggtcagaaggtactgttttccatcaggcacactcatccactcatccataaacccattcatttttcccatttatctcatccagttgtctacctatcaagtcaaacttgtacaagtaaacctagtctcatccaaaagaacaatggatatctaattcaaaaaggagtaaaaatgatgtcttctggctggaaaatgaattgaagagttaaattagctagacaacaaagggttggcagaaagaggtacagtcaccaggcaataaatcactctaccaatatcaataacaattaatgtattgaggaatttgcaaatagctataactagtgccagatcattctccatgcagtgagagagcacaaagagtctaaccactccttaagacacctctgccagcccaaagccttctgatgtctctctcaaatattactkatgttcagtcacaaaaatttacttggaaaaataatccaccattataatgggctacacagacccacata

SEQ ID NO: 252536 - DNA, 548 bp, Homo sapiens
gcctctccagccatgctgaactgtgggtcaattacacctcgttcctttataaattacctagtcttgggtatgtctttattagcagcatgagaacaaactaatgcatcagtgttttagaaattgcttctcattttcctactcaaacatctttcaacaaattagaattattcaggacagagtgcagtgaatattcaccatatgatcaaattcctctagaaggggccaaagagtcacaggcctcacggaaaataattggaatgaattggtagaagggaaatgagattrtaagtgatagaattaatgcctgagagaagcatgggaggtaactgtaggctttatttcatggaataaaataatggtgatcatttgtaggagtactatgctcaagggaatttttattatttttttctttttattttgaaataatgatagactcacaggaagttgccaaaatatgtaccaagaggtcctatatggccttcaccaacttttccccaatgatgacatctcacataactatggtacaacaaaaacatcagaaaattgac

SEQ ID NO: 252537 - DNA, 574 bp, Homo sapiens
ctactctttagcaattttatgaagatttaataaatggattaaacaatccaagtaaagaaagaggaggggctcggtaaattgtatagacacaacggctatcttcccacatgagaatatagatgagaccattatttttaaccactctagaatattatattttatggatgaaacatggttatttagccaatcccatatgtaagcatattatcataacttccatttttttcctttcaaacaatgctaaaataatcactcttgcacccattatctttatacctttacataaatatttttgattaataaattctttgaagtgtagtgcattaaatrtctatcatcgagttgtcctctaaatattctttgaatcttggtgggtgaagggggttgtctagaaggaccaagacatgtttgtgaaaggaagaactctcttgaggggataattttacagagggtagaaacaatgtatataaaagtgtggaggtataagagagtacaggtgtcaccctgtgtttgagtcctagaatgagaaagatgaggcaaggcggggttgatcggcaggaaagggagcagaata

SEQ ID NO: 252538 - DNA, 574 bp, Homo sapiens
ctactctttagcaattttatgaagatttaataaatggattaaacaatccaagtaaagaaagaggaggggctcggtaaattgtatagacacaacggctatcttcccacatgagaatatagatgagaccattatttttaaccactctagaatattatattttatggatgaaacatggttatttagccaatcccatatgtaagcatattatcataacttccatttttttcctttcaaacaatgctaaaataatcactcttgcacccattatctttatacctttacataaatatttttgattaataaattctttgaagtgtagtgcattaaatatctatcatcgagttgtcctctaaatattctttgaatcttggtgggtgaaggggkttgtctagaaggaccaagacatgtttgtgaaaggaagaactctcttgaggggataattttacagagggtagaaacaatgtatataaaagtgtggaggtataagagagtacaggtgtcaccctgtgtttgagtcctagaatgagaaagatgaggcaaggcggggttgatcggcaggaaagggagcagaata

SEQ ID NO: 252539 - DNA, 596 bp, Homo sapiens
atgcgactttggttttagcaggaaaatcattgagtagaaccaactctaggccttggtcttgttcaggtgattctagaaattaaatcaacttaaagcacgaatgactcgagttggagcatagagctcaccgcaggaaagtgattgccctcaaaccctctcccatcaaagttcccatgaccgtgaccacagcaaagaagccagcctgagctctggcctctttatttaaaaatccattcctggagtagaaagaaaataactgaagatgttttgattattggtataccaaatcctatttggggattggtttactagattcaaagagtcacrcccaacctcaataaaaagttttgtaaatccatgcttgctagcgtcctttgaaaaataaacccaagaatagttttattccaatacagcacgctctcagcacaaacatgtggcagatgctagaaacttaggaatcaaatccaaattgcagacacacatgttattgtactccacaagggggggagcaaacccagaattggcctaatttgaatattttttttttctgaatcccgcaaatgaaactacatatttaggaattttttgctcacata

SEQ ID NO: 252540 - DNA, 630 bp, Homo sapiens
aaattaaccttgcctaatttctccaggatcagccaatcctaatcaatgcgactttggttttagcaggaaaatcattgagtagaaccaactctaggccttggtcttgttcaggtgattctagaaattaaatcaacttaaagcacgaatgactcgagttggagcatagagctcaccgcaggaaagtgattgccctcaaaccctctcccatcaaagttcccatgaccgtgaccacagcaaagaagccagcctgagctctggcctctttatttaaaaatccattcctggagtagaaagaaaataactgaagatgttttgattattggtataccaaatcctatttggggattggtttactagattcaaagagtcacacccaacctcartaaaaagttttgtaaatccatgcttgctagcgtcctttgaaaaataaacccaagaatagttttattccaatacagcacgctctcagcacaaacatgtggcagatgctagaaacttaggaatcaaatccaaattgcagacacacatgttattgtactccacaagggggggagcaaacccagaattggcctaatttgaatattttttttttctgaatcccgcaaatgaaactacatatttaggaatttt

SEQ ID NO: 252541 - DNA, 596 bp, Homo sapiens
atgcgactttggttttagcaggaaaatcattgagtagaaccaactctaggccttggtcttgttcaggtgattctagaaattaaatcaacttaaagcacgaatgactcgagttggagcatagagctcaccgcaggaaagtgattgccctcaaaccctctcccatcaaagttcccatgaccgtgaccacagcaaagaagccagcctgagctctggcctctttatttaaaaatccattcctggagtagaaagaaaataactgaagatgttttgattattggtataccaaatcctatttggggattggtttactagattcaaagagtcacacccaacctcaataaaaagttttgtaaatccatgcttgctagcgtcctttgaaaaataaacccaagaatagttttattccaatacagcacgctctcagcacaaacatgtggcagatgctagaaacttaggaatcaaatccaaattgcagacacayatgttattgtactccacaagggggggagcaaacccagaattggcctaatttgaatattttttttttctgaatcccgcaaatgaaactacatatttaggaattttttgctcacata

SEQ ID NO: 252542 - DNA, 711 bp, Homo sapiens
ggtgatttcttgtgtcttaggagagtaagaaaaactctggagcaacaagagccttttaatgtcattctcaacatcctcacctgaccttattccccatcaccaccccttatactccaaagactccagctctgctgaatttcctaacactttctacacagcccagaccctgtggttgcctctttcactttgcacattccattccctctcctgaatgaatgccctttgagggtcagaatcaggtggaaactatgtctcccaatgcccagtgactgctgttggactatggtgctccaagcaaaattaaaaatggaagattctgttaaaaaatgctctgaatgctcatcagagttgggggcagcccaagaccatttgccatttccagagatagatgctgcaagtgaaaaatgagctgacaaacttaaaactctacagaaaccactggggagaggatctggcagcttagcaagccaggttaatacctggaattacaaggagtttgtgagcaccctcagttgcaggactcagctgtgaacaaaagtctctgaggtgggcttcaggtgcctgccctgccaccacmtgactgtgagcaacgggcaacctggttcttttagactccatcaacctccaggctctggggaatcacttttttcctattttagtttttcaaaagcatccactgggtctttcccaaggcataaaagggaacaagaa

SEQ ID NO: 252543 - DNA, 566 bp, Homo sapiens
gaggccagaatatgagtattaacattatygtagatgaaaccctgggcaacccagggggccctaggcagcttgtctgaggttcaggtatctcatccaggctagctcttaaagcacatagcttcactctttaatggaacacacccaaaatgcccttcggtgactttccagcgagtaaaatcttaagcacagtgggatgtccaatgtcttttgaaggttttggctgagagagacaacattcttggaatatggcctggagtatattgagtccatctattcctctgaggactctaagtcaactctggattaaaccagagcatcagccatcagcactgtacctgcagatgatcacattctgtccacccatacccactacattgtgctctggaagtcttctcctggcctttactgggagctgagacaaggtcaggagccatgccaagaacctgattactgggttttcagttgggatgccatcaatgcatgttttgttacttttggctgatgagcatgtttgaatcacatgagactctcattgcattaaaaatcagagctagttttaataattc

SEQ ID NO: 252544 - DNA, 620 bp, Homo sapiens
gagaagcaaggagaggaggttgaaatgatccatgtggtagtggattacagttgaaaatagtaagaaattacatttagcttaatatagatacaaatggttatatacaaaaatatttgacatacatgtatatccatggctttagtrtacacacatatatttcctggctctgccagctgagagggcctagaagcaagaagcaatgacataacagtagcagtaaacacacctaatgtccttaactttgtttctaatactatcctccagtaaaaaagatggggcttatcaggaaaacaaattattccaggattgggatagaatacaggatgagcatgttgtatggccacaaagtaagtgctaaaagtaagtaaataatgaaagtttgtcaaagggactcaggagccgatggaaataattcccaatggccaaggctggaacaatttgagcaagaaaataaagtagtattgaattaaaactctgactataaagtaaatactcatgagtccatactgataaaaataagtccttgaataaataaatcaatgtggaggaacaggcaaatttctatggggaagaattctatgtaatttatgtagatactccacccttcaagaaaatggagc

SEQ ID NO: 252545 - DNA, 583 bp, Homo sapiens
atttcctttctgttttccaaaattctatctgaagttcatcttctatggcttatgcagtaaaattattttataaaaagtgattctcaataaggaaatggattcagaaacttttagcaacttcctcaaaggcacacaggaggtaagagacagagctaggattcaaatgaaagcctgtcttgattcttccattctttttaatcccttatggcttttctgtgaaataagatcaaccatcacaacagtgggcacaagtcacaaaaaaaaaaaatgtttacacagaaacagaagacagatatgtgaatgtggatggaagaatatatattttaaaaaagaaggaaatcaaataggggctatgaaaccaactgcatcacttttgctaaattgagccttaraaatagttgagacttgggggtcagaaaattgatctccctccactgcttgacatccctagctaattcaaagtcacccagttagacattctcttagcactctgaaaatttgttccagggcatttatctcagttgcaattttacatttctttttgcacttatttatggagtgcctttctcctctgttagaccca

SEQ ID NO: 252546 - DNA, 620 bp, Homo sapiens
gagaagcaaggagaggaggttgaaatgatccatgtggtagtggattacagttgaaaatagtaagaaattacatttagcttaatatagatacaaatggttatatacaaaaatatttgacatacatgtatatccatggctttagtatacacacatatatttcctggctctgccagctgagagggcctagaagcaagaagcaatgacataacagtagcagtaaacacacctaatgtccttaactttgtttctaatactatcctccagtaaaaaagatggggcttatyaggaaaacaaattattccaggattgggatagaatacaggatgagcatgttgtatggccacaaagtaagtgctaaaagtaagtaaataatgaaagtttgtcaaagggactcaggagccgatggaaataattcccaatggccaaggctggaacaatttgagcaagaaaataaagtagtattgaattaaaactctgactataaagtaaatactcatgagtccatactgataaaaataagtccttgaataaataaatcaatgtggaggaacaggcaaatttctatggggaagaattctatgtaatttatgtagatactccacccttcaagaaaatggagc

SEQ ID NO: 252547 - DNA, 549 bp, Homo sapiens
gggtttccgtgtaactttgtctcatcccattactctgatgaaaattttgagttccatgagcacttaaaagcaagtctgtcttgtttaatgtttgtttgtttgtttttgagatggaatctcactgtgtcacccgggctggagtgcaacagtgtgatctctgctccctgcaacttctgcctcccgggttcaagcgattctcccgcctcagcctcccaagtggctaggattacaggaacccgccatcatgcccagctaatttttgtatttttgtagagacaaggtttcaccacgttggccaggctggtcttgagctcctgacctgaggtgatctgcacatctcggcctcccaaagtcctgggattacaggcgtgagccacagtgcctggccttgtttaatattttaacccctgtttagcactgtgtctcatatagtaggtgttccrtgaatattggttgagcaaataaaataaatgaatgggctatagaagatacacattgaatgtttgttcattcatctttaaatggatttaattcatctttcaaatgaaa

SEQ ID NO: 252548 - DNA, 612 bp, Homo sapiens
agcaatcccatactgtgtatataccaaacgaatataaatcattctaccataaagacacatgcatgtgaatggtcagtgcagcgctattcaccataataaatacatacaatcaacctaaatacccatcaatgacaaattgggtaaagaaagtgtggtacatacacactatggaatactatgcagacataaaaaataatgagatcatatcttttgtggaaacatggatagagctggaagccactatcctcagtaaactaatgcatgaatagaaaaccaaataccccatattctcatgtataattgggagctaaatgatgaggacacatggaaacatagaggagaacaacagacacatgagcctacctgacggtagatggtgggaggagggagagaatcagaaaaagtaaatattgggtactaggcttggtatctgggtagcaaaataatctgaacaacaaactcccatgacatgagtttatctatataacaaatctgtayatgtatccttgaacctaaaataaaagtttaaaaattaaaataaataaataaataaatttcaaggaaaaaaagcacatccttaattgatgtgacagataacagtttttcaaaata

SEQ ID NO: 252549 - DNA, 613 bp, Homo sapiens
ctccgctcactgtatgtatgtgtttttaaccaatctcaaacataactaggcaaataaaggaagaaccatagttacagcatttaagatgtatgaccagaatttgcaacccaggcatttaaggcagcagcaagagagmatggagaattttagtcaggaacagcagcggagactatcccaaaaggggctctttagtgtgggtgagcactagcttcaagcactagctgtgctatataccagtctgatgaattacagcagactagttatgtaggctggcaaaagtctcccctaggggttggttaatgagaatcctgttgggctgctggggctaccaaatggtgttcacacagacttaagaatagagggttggaaattggttccaatttttaatagctaaatcttacttcaatgggttgtgatcagcggtgatcatatcctcaaaccaataaaccaagaggttgtgatagttaactgtgtttctgcatcttcagaactcaatggtgatctttttaccaatatcactaaggatgaagcagtggtagcctttccagttccctaaaaagactgtaagacaaaaagatgaactcaccctagctccacccctgacttactgtgt

SEQ ID NO: 252550 - DNA, 613 bp, Homo sapiens
ctccgctcactgtatgtatgtgtttttaaccaatctcaaacataactaggcaaataaaggaagaaccatagttacagcatttaagatgtatgaccagaatttgcaacccaggcatttaaggcagcagcaagagagaatggagaattttagtcaggaacagcagcggagactatcccaaaaggggctctttagtgtgggtgagcactagcttcaagcactagctgtgctatataccagtctgatgaattacagcagactagttatgtaggctggcaaaagtctcccctaggggttggttaatgagaatcctgttgggctgctggggctaccaaatggtgttcacacagacttaagaatagagggttggaaattggttccaatttttaatagctaaatcttacttcaatgggttgtgatcagyggtgatcatatcctcaaaccaataaaccaagaggttgtgatagttaactgtgtttctgcatcttcagaactcaatggtgatctttttaccaatatcactaaggatgaagcagtggtagcctttccagttccctaaaaagactgtaagacaaaaagatgaactcaccctagctccacccctgacttactgtgt

SEQ ID NO: 252551 - DNA, 590 bp, Homo sapiens
ttctcactctcaacagttggaaacatactctgcaggcatgaatctcattgtcctgaattgggttccatgtggtccagtctcatccaattcactgggtatagataatggaaatcaccttaggccaatcagtgtcctcccctggaggagtggtgaactcccttcaaaccartgggctgagtgtggggaatgactatttcccaaagaaatttctgggcacttttttttatcagaagaaaagtgaatcgtagtcagaagaaacaacaaaggtttaaccactgaaattcctgggaatctgaagaaagtgttcatcttcccaggcaataaacaaatgtactaacaaaaaaacaaaatcaaaaacaaaggttacataagtaatcaaaaaattaagagacgccataaaacttgcccatggatccaggttacttttagaagatacttcctttaggaattgttctcaaatcatgcttgtcctgctgagaactcacctggctggaaaaggcaaattctcatgttctgcttgagccaaggccaggaaggagcccctcacataaacccatctaactgaggtgccctccagtctaggttttcac

SEQ ID NO: 252552 - DNA, 550 bp, Homo sapiens
acatattgttgcacctaaacactgcaaaaattttgcaaggcaaatattactgggaaactttatatatttggaaactgaggctcagaaaaaagtgaattgttcaagttcacatagtttgtgccaaatgcaacctgcttcaaacctggacatgctgacacctgagacttttctttccaaggcctctgtcgggcgtctctttccctcctgcccctgctgccttgtagaaataacacacaaattggccctgcaaaatcctaacagaggttttagtcattgactaaggtaagcagatctctgaaggcttgccttcaagactgagtcttgccactactggaatgtgagrttttgatgaaggttggtttctttgggttcagattctattgggcatataatttaatagctactacatattagaaaaaaggtccccatttaatcattacaatacttttgtgaaatagaaatttctactcttattttataaatcaaatcaaataaaaataactggggcacatttatctgagtaaggacacctccttctcatcactgctat

SEQ ID NO: 252553 - DNA, 656 bp, Homo sapiens
atctttaccagctcttctgtgtgggctggggaccaggktggattgaatgattgatgggctttattggtgagggaggcccctagtttgactcccttaggccagaactgaacagcataagcaaagtggagggttgataaatactcaaatatttttgcccaagttacccttgaagcttcacaactctaaacagatctgaggacagaggaaatatactgatatgattccacagaacccaaatcaagttcatagtcccattcccctctgaagcagcataaagccctcctttgccatctcctatggaaaacgcttgtggtaaatatcaagaaacttggggtcaagtcaagattctgctataaaacccctgtaacatcagtttccccacgtgtaaaatgtggcttcactttttcatctgatcactgccaaattaatgatgatcatgtcagccagctttcatgaatgaatgaatgtataagggaatcgagaacagaaaggtttaataatctgtcctcaggtctatagatagcatgtgactgagccaaagttccaaacaattttgggcgccaccatacacaatgctgtctctctagggattttgacaagaaatgttgcaccaaaaggttggaagtgaaaagaggaagacttctgcctgcccacgt

SEQ ID NO: 252554 - DNA, 636 bp, Homo sapiens
ctcatgcctgtaatcccagcactttgggaggctgaggtggacagatcacctgaggtcaggagttcaagaccagcctagccaacatggtgaaaccctgtctctactaaaaatacaaaaaattagctgggcacagtggcgggcacctgtaatgccagctacttgggaggctgaggcaggagaatcgcttgaacctgggaggtggagggtrcagtgagccaagatcatgccattgcactctagcctggacgacagagacgtcttaaaataaaaaaataaaaacatcaatcaaaaacaaaaaaaagtgaactgaaagaatgaaggaaagcaggttagtcttgtagactcttcttcagtgggaagtttggttctttctctccctgcagaaatgccctcaaagtacggacagcaccatcttgcaagattcccgtactccattgctcttacgcatccttttgatgaccatgctcaaatggagacattaaaaagactgagggaagaatggacaggagtgtagaaaacttggttatttccatgggtctgctgtttattcatgttgagctgggcctctcctctcatctgttagctgagcattctggcttagattgtctcataagcaccttttaaaagctccaaact

SEQ ID NO: 252555 - DNA, 636 bp, Homo sapiens
ctcatgcctgtaatcccagcactttgggaggctgaggtggacagatcacctgaggtcaggagttcaagaccagcctagccaacatggtgaaaccctgtctctactaaaaatacaaaaaattagctgggcacagtggcgggcacctgtaatgccagctacttgggaggctgaggcaggagaatcgcttgaacctgggaggtggagggtacagtgagccaagatcatgccattgcactctagcctggacgacagagaygtcttaaaataaaaaaataaaaacatcaatcaaaaacaaaaaaaagtgaactgaaagaatgaaggaaagcaggttagtcttgtagactcttcttcagtgggaagtttggttctttctctccctgcagaaatgccctcaaagtacggacagcaccatcttgcaagattcccgtactccattgctcttacgcatccttttgatgaccatgctcaaatggagacattaaaaagactgagggaagaatggacaggagtgtagaaaacttggttatttccatgggtctgctgtttattcatgttgagctgggcctctcctctcatctgttagctgagcattctggcttagattgtctcataagcaccttttaaaagctccaaact

SEQ ID NO: 252556 - DNA, 636 bp, Homo sapiens
ctcatgcctgtaatcccagcactttgggaggctgaggtggacagatcacctgaggtcaggagttcaagaccagcctagccaacatggtgaaaccctgtctctactaaaaatacaaaaaattagctgggcacagtggcgggcacctgtaatgccagctacttgggaggctgaggcaggagaatcgcttgaacctgggaggtggagggtacagtgagccaagatcatgccattgcactctagcctggacgacagagacgtcttaaaataaaaaaataaaaacatcaatcaaaaacaaaaaaaagtgaactgaaagaatgaaggaaagcaggttagtcttgtagactcttcttcagtgggaagtttggttctttctctccctgcagaaatgccctcaaagtacsgacagcaccatcttgcaagattcccgtactccattgctcttacgcatccttttgatgaccatgctcaaatggagacattaaaaagactgagggaagaatggacaggagtgtagaaaacttggttatttccatgggtctgctgtttattcatgttgagctgggcctctcctctcatctgttagctgagcattctggcttagattgtctcataagcaccttttaaaagctccaaact

SEQ ID NO: 252557 - DNA, 584 bp, Homo sapiens
tagggctgatctcagtgaacttctccaaaattctatttgacccttgaattaaaatcttggtatratctttgatcctccctgtaatgtatccccaatgcccattaatttcattgctaagcatatcagttctgcctctacaaagttagtaatatcttattatctattgtgttagccactgtttgagaagataaagtcgaataaacaagatatcacgatggattcgagttgaaggatgtcaggtttcagcaataaaataattctgccttataaatctggtgctttggtggagagaacactggaggaaaatactgagtttggtgaatggactttgatcttggttttagccatgttcagatgttcaagggaagattccaaggagagagttagataatctggttagaaccacgtacttttagcatgaccttgagtaaattgcttattctttcacaaactcagtttcttcatctagaaaatatgtaaacctataatacctctcaagactactgttggatttaaatgatatctctataaaagcatttagtatcataactagaatcctgtaagtgctcaatcattggtagcta

SEQ ID NO: 252558 - DNA, 602 bp, Homo sapiens
agccactgtttgagaagataaagtcgaataaacaagatatcacgatggattcgagttgaaggatgtcaggtttcagcaataaaataattctgccttataaatctggtgctttggtggagagaacactggaggaaaatactgagtttggtgaatggactttgatcttggttttagccatgttcagatgttcaagggaagattccaaggagagagttagataatctggttagaaccacgtacttttagcatgaccttgagtaaattgcttattctttcacaaactcagtttcttcatctagaaaatatgtaaacctataatacctctcaagactactgttggatttaaatgatatctctataaaagcatttagtatcataactagwatcctgtaagtgctcaatcattggtagctaccgtattagttttctagacctgtcataaaaaacaattatcccaggctgagtggtttaatttatagaaatgtattttctcacaggtctggaggctaaaagtccaagatcaagatgttggaagatttggtctcttctgaggcctctctgttggcttgcaaatggccactttcttgctgtgcttcacatgg

SEQ ID NO: 252559 - DNA, 602 bp, Homo sapiens
agccactgtttgagaagataaagtcgaataaacaagatatcacgatggattcgagttgaaggatgtcaggtttcagcaataaaataattctgccttataaatctggtgctttggtggagagaacactggaggaaaatactgagtttggtgaatggactttgatcttggttttagccatgttcagatgttcaagggaagattccaaggagagagttagataatctggttagaaccacgtacttttagcatgaccttgagtaaattgcttattctttcacaaactcagtttcttcatctagaaaatatgtaaacctataatacctctcaagactactgttggatttaaatgatatctctataaaagcatttagtatcataactagaatcctgtaagtgctcaatcattggtagctaccgtattagttttctagacctgtcataaaaaacaattatcccaggctgrgtggtttaatttatagaaatgtattttctcacaggtctggaggctaaaagtccaagatcaagatgttggaagatttggtctcttctgaggcctctctgttggcttgcaaatggccactttcttgctgtgcttcacatgg

SEQ ID NO: 252560 - DNA, 422 bp, Homo sapiens
gcagttcacttacaccgcttctcaacccggtacgcaccagaaaatcattgatatggccatgaatggcgttggatgccgggcaacmgcccgcattatgggcgttggcctcaacacgattttacgtcacttaaaaaactcaggccgcagtcggtaacctcgcgcatacagccgggcagtgacgtcatcgtctgcgcggaaatggacgaacagtggggatacgtcggggctaaatcgcgccagcgctggctgttttacgcgtatgacaggctccggaagacggttgttgcgcacgtattcggtgaacgcactatggcgacgctggggcgtcttatgagcctgctgtcaccctttgacgtggtgatatggatgacggatggctggccgctgtatgaatcccgcctgaagggaaagctgcacgtaat

SEQ ID NO: 252561 - DNA, 565 bp, Homo sapiens
ttttcataatttttatttgaaggtgccatttttcaayatattcagatgcttgtgagtgccattgattctgtatcatatgaacaatggcaataccttccatgtttacataatattaaaaaccatgttaagactgaatatttggtgtaatggtgcatcacattattctagcttccatactagttgttttatttgtttgttttctcctttgttggcatttggtttcaaattcatatgtcaggtctctataatgtaggaatttatttaaaagtgtcttttttgtccattttgatggggcttctaggagacataagaacctcctctgcttgcaacacatttcaaaattacacactaatgtagaacatctgtatttaatcctggtttttagttaattgacaagctctaataagagaattaacttctccattctgggctgattttacatcaggtataggaatataccctaggtgaaagtttgtaccagtaatatgaattattaggtaataacctccacctttatgatttaggtgttattcatcaggaaatagtgttaaatcaggagtctcaa

SEQ ID NO: 252562 - DNA, 565 bp, Homo sapiens
ttttcataatttttatttgaaggtgccatttttcaacatattcagatgcttgtgagtgccattgattctgtatcatatgaacaatggcaataccttccatgtttacataatattaaaaaccatgttaagactgaatatttggtgtaatggtgcatcacattattctagcttccatactagttgttttatttgtttgttttctcctttgttggcatttggtttcaaattcatatgtcaggtctctataatgtaggaatttatttaaaagtgtcttttttgtccattttgatggggcttctaggagacataagaacctcctctgcttgcaacacatttcaaaattacacactaatgtagaacatctgtatttaatcctggtttttagttaattgacaagctctaataagagaattaacttctccattctgggctgattttacatcaggtataggaatataccctaggtgaaagtttgtaccagtaatatgaattattaggtaataacctccacctttatgatttaggtgttattcatcargaaatagtgttaaatcaggagtctcaa

SEQ ID NO: 252563 - DNA, 568 bp, Homo sapiens
ccttgtgggccaaagacagacagagtcatttctctgctcatgtaagtcaaatgcatatctgattgctccctttgctctattrtttcactaagccagattaaggcctacgtgactattcctgtaaattgtgcattcagttaaaggctaatcagaaactcaaataatgcaaccatttctctcaaacctacctatgatctagaagccctctccccacttcaagttgtcctgcctttctgaactaaatcaatgtacatcttatatacatatattgattaatgtctcatgcctccctaaattgtataaaaccaagctgtgcccacaagcttgggcacacatcatcaggactccctgaggcggtgtcacaggcatgtccttaatcttggaaaatgaacttcctaaatctattgagattagtctcagatactctttggtttacaggtttgttttttgtttcataacttcaattatttgacatgctaaagaaaatttgccaaatagcacattctcttgtttatgtgttattgttgttgcaaaaataatatattttatatataatttatcatctatg

SEQ ID NO: 252564 - DNA, 530 bp, Homo sapiens
gaggctgcattgagctatgatcataccactgcactacagcctgagcgacagagaccctgtytctaaagaaacaaagttctatggcttccgccttgtagttttggcccacgagccacacagaagtccttgcattgctctgggcctctcctttggggtaagcatcctccccttcaggccttctctcttgccatacaatgtcccatcagccctgggcatctggtttcttctctgatggaatccccatacatccaaatgtgtgaatgtggcagtgaatgtgtgcgaccctcctggatactccagctcactctggctctgtctcccccacttcagatgacagtgctgcagcccccaaaaccccctggggcatcaacatcatcaagaaaaataagaaggctgccccaagggcatttggggtcaggctggaggagtgccagccagccacggagaaccaggtgggtctctgccacacgccagagcaggcccggcagggggagaccaaggcacagagggtcagagcagcaagggacatg

SEQ ID NO: 252565 - DNA, 530 bp, Homo sapiens
gaggctgcattgagctatgatcataccactgcactacagcctgagcgacagagaccctgtctctaaagaaacaaagttctatggcttccgccttgtagttttggcccacgagccacacagaagtccttgcattgctctgggcctctcctttggggtaagcatcctccccttcaggccttctctcttgccatacaatgtcccatcagccctgggcatctggtttcttctctgatggaatccccatacatccaaatgtgtgaatgtggcagtgaatgtgtgcgaccctcctggatactccagctcactctggctctgtctcccccacttcagatgacagtgctgcagcccccaaaaccccctggggcatcaacatcatcaagaaaaataagaaggctgycccaagggcatttggggtcaggctggaggagtgccagccagccacggagaaccaggtgggtctctgccacacgccagagcaggcccggcagggggagaccaaggcacagagggtcagagcagcaagggacatg

SEQ ID NO: 252566 - DNA, 530 bp, Homo sapiens
gaggctgcattgagctatgatcataccactgcactacagcctgagcgacagagaccctgtctctaaagaaacaaagttctatggcttccgccttgtagttttggcccacgagccacacagaagtccttgcattgctctgggcctctcctttggggtaagcatcctccccttcaggccttctctcttgccatacaatgtcccatcagccctgggcatctggtttcttctctgatggaatccccatacatccaaatgtgtgaatgtggcagtgaatgtgtgcgaccctcctggatactccagctcactctggctctgtctcccccacttcagatgacagtgctgcagcccccaaaaccccctggggcatcaacatcatcaagaaaaataagaaggctgccccaagggcatttggggtcaggctggaggastgccagccagccacggagaaccaggtgggtctctgccacacgccagagcaggcccggcagggggagaccaaggcacagagggtcagagcagcaagggacatg

SEQ ID NO: 252567 - DNA, 500 bp, Homo sapiens
gtgaattttatcatctgtcaattaaaactcataaaatgtattacaagtaaaccaagtgaaattttagacaaaaaagggatgataagaaggaacaaatgaatacattaaatatcagatacaccaaaaatttatctgcctgatgcctagatgtttccgtatttttaggtaaatgcagcaaaatcacacaggttctcgtggcaggaagtggattctgcaaaccacactaggcccatttagctctgtccaatagttggttaagagagcaattgaggccagctgtgaggagcataggcccaggtactaggactcactcatgcyagacataagcccttagacacatacatagcccctccatgtgtgggttcacttttacatctgtaaacaaagaaaccactgactgctaaataacatcatttatacacataggtaaaaataattaaaaatatgatagttgttaaatgtttatcgcacaacaatttcacattaagacagcattttcc

SEQ ID NO: 252568 - DNA, 500 bp, Homo sapiens
gtgaattttatcatctgtcaattaaaactcataaaatgtattacaagtaaaccaagtgaaattttagacaaaaaagggatgataagaaggaacaaatgaatacattaaatatcagatacaccaaaaatttatctgcctgatgcctagatgtttccgtatttttaggtaaatgcagcaaaatcacacaggttctcgtggcaggaagtggattctgcaaaccacactaggcccatttagctctgtccaatagttggttaagagagcaattgaggccagctgtgaggagcataggcccaggtactaggactcactcatgctagacataagcccttagacacatacatagcccctccatgtgtgggttcacttttacatctgtaaacaaagaaaccactgastgctaaataacatcatttatacacataggtaaaaataattaaaaatatgatagttgttaaatgtttatcgcacaacaatttcacattaagacagcattttcc

SEQ ID NO: 252569 - DNA, 672 bp, Homo sapiens
gagtgggtatcagctattggtgctggtggtggcacatactatgcagactccgtgaagggccgattcaccatctccagagacaatgccaagaactccttgtatcttcaaatgaacagcctgagagccgaggacatggctgtgtattactgtgcaagagacacagtgaggggaagtcagtgtgagcccagacacaaacctctctgcagaatgcttgggggaaatcagctgcggggggcrcacagaacccactgatcagagtcatccccagaggcaagttgcagatggaggctggtttcctgtcaggatgtgggacttcatctttttagagtttctctagggaatctctctaagttcagaattctgtgcttaccaatgtcatctctacatatttttaaaatgattattttaatatgaaaacctattctcctatgcacaaaacacagattgatgcttacggagatgaaaagccctcaaccattgtcaccaggatcagagtattgaggaaactcagggatacctggtgagtcttctccagtcagactcagaacagaaacctcagtgagattccctgactaggacggtctttaggaattgtgatcacagccaatagagtctgggccagggtcagtgtcatgtagaacctcacagttttcatgcctgacccttctcctg

SEQ ID NO: 252570 - DNA, 672 bp, Homo sapiens
gagtgggtatcagctattggtgctggtggtggcacatactatgcagactccgtgaagggccgattcaccatctccagagacaatgccaagaactccttgtatcttcaaatgaacagcctgagagccgaggacatggctgtgtattactgtgcaagagacacagtgaggggaagtcagtgtgagcccagacacaaacctctctgcagaatgcttgggggaaatcagctgcggggggcgcacagracccactgatcagagtcatccccagaggcaagttgcagatggaggctggtttcctgtcaggatgtgggacttcatctttttagagtttctctagggaatctctctaagttcagaattctgtgcttaccaatgtcatctctacatatttttaaaatgattattttaatatgaaaacctattctcctatgcacaaaacacagattgatgcttacggagatgaaaagccctcaaccattgtcaccaggatcagagtattgaggaaactcagggatacctggtgagtcttctccagtcagactcagaacagaaacctcagtgagattccctgactaggacggtctttaggaattgtgatcacagccaatagagtctgggccagggtcagtgtcatgtagaacctcacagttttcatgcctgacccttctcctg

SEQ ID NO: 252571 - DNA, 591 bp, Homo sapiens
agtgctgctgtcacttggggcacccagaccagtcttcaggtcggaaagagggtggcaactgaggggtaaagaggaacagcgacttgcccagggccacgcagcaagataatggcagagcagagaggagagcaaacctggatgtctgatcttgcagcgggcaagttgccaggagcctctacctatgtttacraagtcaagtggaacccaaacaaagatcacccagggcatttgctcagggactcactcagcaaaggcagtgacacctaatgtttctcagcttcagcactagtgaccactgaggtccagataagtctttattgtgggaggctgttctgtgtgttataggacatttagcagaatcgctggcttctacctgctggatgctgggaatatcactctagttgtcacaataaaaaatgtctccagacattgccaagtgccccctggggtgggagattgacggcagtggctctagggccagcctgctcctatgtgctgtgtggccttggacaagttccttacctgctgtgcctcagtctccacacctgtaaagtagagatgacaatactgtttacctcacattgttgtgaa

SEQ ID NO: 252572 - DNA, 672 bp, Homo sapiens
gagtgggtatcagctattggtgctggtggtggcacatactatgcagactccgtgaagggccgattcaccatctccagagacaatgccaagaactccttgtatcttcaaatgaacagcctgagagccgaggacatggctgtgtattactgtgcaagagacacagtgaggggaagtcagtgtgagcccagacacaaacctctctgcagaatgcttgggggaaatcagctgcggggggcgcacagaacccactgatcagagtcatccccagaggcaagttgcagatggaggctggtttcctgtcaggatgtgggacttcatctttttagagtttctctagggaatctctctaagttcagaattctgtgcttaccaatgtcatctctacatatttttaaaatgattattttaatatgaaaacctattctcctatgcacaaaacacagattgatgcttacrgagatgaaaagccctcaaccattgtcaccaggatcagagtattgaggaaactcagggatacctggtgagtcttctccagtcagactcagaacagaaacctcagtgagattccctgactaggacggtctttaggaattgtgatcacagccaatagagtctgggccagggtcagtgtcatgtagaacctcacagttttcatgcctgacccttctcctg

SEQ ID NO: 252573 - DNA, 591 bp, Homo sapiens
agtgctgctgtcacttggggcacccagaccagtcttcaggtcggaaagagggtggcaactgaggggtaaagaggaacagcgacttgcccagggccacgcagcaagataatggcagagcagagaggagagcaaacctggatgtctgatcttgcagcgggcaagttgccaggagcctctacctatgtttacaaagtcaagtggaacccaaacaaagatcacccagggcatttgctcagggactcactcagcaaaggcagtgacacctaatgtttctcagcttcagcactagtgaccactgaggtccagataagtctttattgtgggaggctgttctgtgtgttataggacatttagcagmatcgctggcttctacctgctggatgctgggaatatcactctagttgtcacaataaaaaatgtctccagacattgccaagtgccccctggggtgggagattgacggcagtggctctagggccagcctgctcctatgtgctgtgtggccttggacaagttccttacctgctgtgcctcagtctccacacctgtaaagtagagatgacaatactgtttacctcacattgttgtgaa

SEQ ID NO: 252574 - DNA, 591 bp, Homo sapiens
agtgctgctgtcacttggggcacccagaccagtcttcaggtcggaaagagggtggcaactgaggggtaaagaggaacagcgacttgcccagggccacgcagcaagataatggcagagcagagaggagagcaaacctggatgtctgatcttgcagcgggcaagttgccaggagcctctacctatgtttacaaagtcaagtggaacccaaacaaagatcacccagggcatttgctcagggactcactcagcaaaggcagtgacacctaatgtttctcagcttcagcactagtgaccactgaggtccagataagtctttattgtgggaggctgttctgtgtgttataggacatttagcagaatcgctggcttctacctkctggatgctgggaatatcactctagttgtcacaataaaaaatgtctccagacattgccaagtgccccctggggtgggagattgacggcagtggctctagggccagcctgctcctatgtgctgtgtggccttggacaagttccttacctgctgtgcctcagtctccacacctgtaaagtagagatgacaatactgtttacctcacattgttgtgaa

SEQ ID NO: 252575 - DNA, 598 bp, Homo sapiens
tcagagtattgaggaaactcagggatacctggtgagtcttctccagtcagactcagaacagaaacctcagtgagattccctgactaggacggtctttaggaattgtgatcacagccaatagagtctgggccagggtcagtgtcrtgtagaacctcacagttttcatgcctgacccttctcctgacactaaagtatgcaacttagtatcagcactgatctggggccccttttgctcttagcccactctatttctttttatttgttgttgttgttcttgctcttccttgtgctgtttgtgcttcctgtaaagtggggatgtggttcttgctgccaaagctcgaggtctcaagcccattccctgcagctgaggtggggctcaggctgtggctcctgcagccatatgggagaggctgataggactttcctctctcccattgctcagcaccctccagtgtgtcatgtggagactcacctgggaatgcaagtggccaacagtagtgaagaggatgagcttgtgtggtcaaaatgggatgtggatgtgaaatttatcctgtgctgtgcaaagtaccacagagtgagtcaccttcctcaccagtag

SEQ ID NO: 252576 - DNA, 598 bp, Homo sapiens
tcagagtattgaggaaactcagggatacctggtgagtcttctccagtcagactcagaacagaaacctcagtgagattccctgactaggacggtctttaggaattgtgatcacagccaatagagtctgggccagggtcagtgtcatgtagaacctcacagttttcatkcctgacccttctcctgacactaaagtatgcaacttagtatcagcactgatctggggccccttttgctcttagcccactctatttctttttatttgttgttgttgttcttgctcttccttgtgctgtttgtgcttcctgtaaagtggggatgtggttcttgctgccaaagctcgaggtctcaagcccattccctgcagctgaggtggggctcaggctgtggctcctgcagccatatgggagaggctgataggactttcctctctcccattgctcagcaccctccagtgtgtcatgtggagactcacctgggaatgcaagtggccaacagtagtgaagaggatgagcttgtgtggtcaaaatgggatgtggatgtgaaatttatcctgtgctgtgcaaagtaccacagagtgagtcaccttcctcaccagtag

SEQ ID NO: 252577 - DNA, 506 bp, Homo sapiens
ttgttgttgttcttgctcttccttgtgctgttygtgcttcctgtaaagtggggatgtggttcttgctgccaaagctcgaggtctcaagcccattccctgcagctgaggtggggctcaggctgtggctcctgcagccatatgggagaggctgataggactttcctctctcccattgctcagcaccctccagtgtgtcatgtggagactcacctgggaatgcaagtggccaacagtagtgaagaggatgagcttgtgtggtcaaaatgggatgtggatgtgaaatttatcctgtgctgtgcaaagtaccacagagtgagtcaccttcctcaccagtagtgttagaaagaggctgtgaaagttgtcagaatcaaaatagatccacttgtgttaaaaccctgacaaatggaactaggaatgaccatgaaggaggtttcccatgcacatactcctgataacaagaacgaccatgaatggattctgcttaaccacaacctttgatagaagcc

SEQ ID NO: 252578 - DNA, 506 bp, Homo sapiens
ttgttgttgttcttgctcttccttgtgctgtttgtgcttcctgtaaagtggggatgtggttcttgctgccaaagctcgaggtctcaagcccattccctgcagctgaggtggggctcaggctgtggctcctgcagccatrtgggagaggctgataggactttcctctctcccattgctcagcaccctccagtgtgtcatgtggagactcacctgggaatgcaagtggccaacagtagtgaagaggatgagcttgtgtggtcaaaatgggatgtggatgtgaaatttatcctgtgctgtgcaaagtaccacagagtgagtcaccttcctcaccagtagtgttagaaagaggctgtgaaagttgtcagaatcaaaatagatccacttgtgttaaaaccctgacaaatggaactaggaatgaccatgaaggaggtttcccatgcacatactcctgataacaagaacgaccatgaatggattctgcttaaccacaacctttgatagaagcc

SEQ ID NO: 252579 - DNA, 448 bp, Homo sapiens
tccccctctctcactggtttctttcctcagcctttaatttctcatgggctggctgtgtccctctgggcatgttcctctttttaatttttcttccttttttccttgcacccccacctctccctcctcctctccccgtgctctcctcccacccctttctcttctcctccccctcccctcctccagcagacctgttggagatttaaagrgtacagtgcagtgtcgcggcctcggtcactaacagtggcgggtgattataagaaggctgggtgggcacagaggcaggcagaatgtcccggactgtgaggaccccacactgacatgccagttacccctgctttttatccacttaccccagcagtccatgcccctcccatcctagagccccttctcaggaggaaggaggcactcactgggcccagggccctccccgttgcctggacaccggggc

SEQ ID NO: 252580 - DNA, 448 bp, Homo sapiens
tccccctctctcactggtttctttcctcagcctttaatttctcatgggctggctgtgtccctctgggcatgttcctctttttaatttttcttccttttttccttgcacccccacctctccctcctcctctccccgtgctctcctcccacccctttctcttctcctccccctcccctcctccagcagacctgttggagatttaaagagtacagtgcagtgtcgcggcctcggtcactaacagtggcgggtgattataagaaggctgggtgggcacagaggcaggcagaatgtcccggactgtgaggaccccacactgacatgccagttacccctgcttkttatccacttaccccagcagtccatgcccctcccatcctagagccccttctcaggaggaaggaggcactcactgggcccagggccctccccgttgcctggacaccggggc

SEQ ID NO: 252581 - DNA, 581 bp, Homo sapiens
aaaacagttgaagaaaagcaatgaaaccaaaagctggttctttgaaaaaaaatcaatgaaattgataaacctctagccagactaacagaataaaaagaaagatggcacagattatcagtatcagggatgaaagagggacatcactacagacccctaagttattttttattttttatttatttatttttttgagayggagtcttgctgtgtcacccaggctggagtgcagtggcaccatctcggctcactgcaagctccgcctcctgggttcacaccattctcctgcctcagcctcccgagtagctgggactacaggtgcccaccatcatgtccagctaattttttgtatttttagtggagatggggtttcaccaggttagccaggatggtcttgatctcctgacattgtgatccgccccccttggcctcccaaagtgctgggattacaggcgtgagtcaccacgcctggctatagacccctaagttattgaatttatgggcataaagttgcccataaattcaataacttagatgaaatagaccaattctttgaaagattcagactgccaaaactcacttaa

SEQ ID NO: 252582 - DNA, 581 bp, Homo sapiens
aaaacagttgaagaaaagcaatgaaaccaaaagctggttctttgaaaaaaaatcaatgaaattgataaacctctagccagactaacagaataaaaagaaagatggcacagattatcagtatcagggatgaaagagggacatcactacagacccctaagttattttttattttttatttatttatttttttgagatggagtcttgctgtgtcacccaggctggagtgcagtggcaccatctcggctcactgcaagctccgcctcctgggttcacaccattctcctgcctcagcctcccgagtagctgggactacaggtgcccaccatcaygtccagctaattttttgtatttttagtggagatggggtttcaccaggttagccaggatggtcttgatctcctgacattgtgatccgccccccttggcctcccaaagtgctgggattacaggcgtgagtcaccacgcctggctatagacccctaagttattgaatttatgggcataaagttgcccataaattcaataacttagatgaaatagaccaattctttgaaagattcagactgccaaaactcacttaa

SEQ ID NO: 252583 - DNA, 581 bp, Homo sapiens
aaaacagttgaagaaaagcaatgaaaccaaaagctggttctttgaaaaaaaatcaatgaaattgataaacctctagccagactaacagaataaaaagaaagatggcacagattatcagtatcagggatgaaagagggacatcactacagacccctaagttattttttattttttatttatttatttttttgagatggagtcttgctgtgtcacccaggctggagtgcagtggcaccatctcggctcactgcaagctccgcctcctgggttcacaccattctcctgcctcagcctcccgagtagctgggactacaggtgcccaccatcatgtccagctaattttttgtatttttagtggagayggggtttcaccaggttagccaggatggtcttgatctcctgacattgtgatccgccccccttggcctcccaaagtgctgggattacaggcgtgagtcaccacgcctggctatagacccctaagttattgaatttatgggcataaagttgcccataaattcaataacttagatgaaatagaccaattctttgaaagattcagactgccaaaactcacttaa

SEQ ID NO: 252584 - DNA, 578 bp, Homo sapiens
taggaatgaccatgaaggaggtttcccatgcacatactcctgataacaagaacgaccatgaatggattctgcttaaccacaacctttgatagaagccaccatgaccttataaaaatcacttctacaaggacatcttcccagaaaatcactgtttaaccctatattgatgccaaccttggtattgactctacaagcaaggaaaatactctcaaaacaatttatgtaacccacctcattttcactmataaacctatggattgacatcctggagtcactgctgcatttgttgttaattgtaattagccccttttacaatgtttgtgactgtttttctccgatgtctcttggaaaataaataatttacaagttgatggcagtaaagaagctatttaggacatttttaacatcctgttgaatatttctgcatagcacatcgatcccctaaaatacttcgctgtattggcatgtgataaatcagagtataatgctgaaggtaaaatggaaaatacatgggcttttgatgaatcaagtcatagggtgatattgtctttgcccttgaggaagcagaccatgggctg

SEQ ID NO: 252585 - DNA, 560 bp, Homo sapiens
tggggaatgcagagttgtgttcacgaagaagatggcattatgtctgtcttctcctgtgmctggtgacggctcccccagggtgagtgtctcagatgtgggtctatggggtgagtgtaggtacatgtgactgacagggactgattccccatgtactcacatgccctgtcccaggagcagctgcaggagtcagccctggacctgaagagcctgcactgcccctctgcatcacctgcactgtttctggccactccatcacaaccagtccttactactgggcctggatctgccagctcccagggaggggctgaaatgggtaaaatgcattgctagaggtggtgggaatccattcatcttgtggaaaatggcagcatctctttattttataaggcagaatcatgttatattgtgtacacataccacattgtctttatccatttgtccatcgacagacacttagtttccatatcttggctgttgtgaataatgctacaataatcacaggagagcaggtatcttcacaaggtggtaatttcatcccatttgggtatatttccataagc

SEQ ID NO: 252586 - DNA, 560 bp, Homo sapiens
tggggaatgcagagttgtgttcacgaagaagatggcattatgtctgtcttctcctgtgcctggtgacggctcccccagggtgagtgtctcagatgtgggtctatggggtgagtgtaggtacatgtgactgacagggactgattccccatgtactcacatgccctgtcccaggagcagctgcaggagtcagccctggacctgaagagcctgcactgcccctctgcatcacctgcactgtttctggccactccatcacaaccagtccttactactgggcctggatctgccrgctcccagggaggggctgaaatgggtaaaatgcattgctagaggtggtgggaatccattcatcttgtggaaaatggcagcatctctttattttataaggcagaatcatgttatattgtgtacacataccacattgtctttatccatttgtccatcgacagacacttagtttccatatcttggctgttgtgaataatgctacaataatcacaggagagcaggtatcttcacaaggtggtaatttcatcccatttgggtatatttccataagc

SEQ ID NO: 252587 - DNA, 415 bp, Homo sapiens
gtggtaatttcatcccatttgggtatatttccataagctggatcgctggtcatatggtatgtctgttttaatttatttagaagccaccacactgttttgcataatggtaatgatgggaatgtagaatgtcatagccactatgaagaacagttttagatttgaggtataatccaaaaacacatagtgtttgatcatggttctcatatgaggctctaataaacctagtggaagtccagaaagttttcccaccttgggcaaggatgagtttgcccctaattatctttaaggcagaatatttgcagaatgtgagatggagtctgttgrcaggattcaggatgattcagtaataaatagtaatggcacagaaaaatagggagttagagacatgcagagaaagaaagagatagagagaata

SEQ ID NO: 252588 - DNA, 188 bp, Homo sapiens
caaatcccactgggcttcccccgagcggttggggcagggcccgtggctccctccttctgctccttcgtggatggacactacccccccacctccccmacaaagggacattcaactcaggacaatgacggtggggcacacattccagtcacagggctgagggtgggagctgggggcaagcgaagtagcaa

SEQ ID NO: 252589 - DNA, 437 bp, Homo sapiens
cctaattatctttaaggcagaatatttgcagaatgtgagatggagtctgttgacaggattcaggatgattcagtaataaatagtaatggcacagaaaaatagggagttagagacatgcagagaaagaaagagatagagagaatatgaatcttgtaagaggaaaatctgctggatatcagtgttgggttttcattcacagagacatcagtgtgagtgagaaaccawgaagtcaagtgaggagtggagaacatgttcagtctgaaaatcagcatatactcagaggcacccattgccccatgacacaggtggagaattttggaaaccagtgaagtgtgagttcacaataagtgatgaagttatcatttttccaaactttcattaatatgcaaagtatttctatagatcactcatgcatatacacacaaaatgtgtttttg

SEQ ID NO: 252590 - DNA, 437 bp, Homo sapiens
cctaattatctttaaggcagaatatttgcagaatgtgagatggagtctgttgacaggattcaggatgattcagtaataaatagtaatggcacagaaaaatagggagttagagacatgcagagaaagaaagagatagagagaatatgaatcttgtaagaggaaaatctgctggatatcagtgttgggttttcattcacagagacatcagtgtgagtgagaaaccaagaaktcaagtgaggagtggagaacatgttcagtctgaaaatcagcatatactcagaggcacccattgccccatgacacaggtggagaattttggaaaccagtgaagtgtgagttcacaataagtgatgaagttatcatttttccaaactttcattaatatgcaaagtatttctatagatcactcatgcatatacacacaaaatgtgtttttg

SEQ ID NO: 252591 - DNA, 723 bp, Homo sapiens
gttccaggcaaatgtgcacatacttgtctacagcagctaagtgagggtgaggaacaggtccatctccccacaaagtgtcctcttcagtgcttcaagttagttctcccataagkattttttttatttcaactttataatttagaaacagagggttcatgtgtggatttgttacatgggattattgggtgatgctgaggtttggaatacagatttcatcaccctctccctccactgtctagcagtacacagtgtctgttgctcccatatttatccatgtgtgctcaatgctgaggtgccacttaggagaatatgtggtgttcagttttcttttcctgaattaatttgtttaggattaagaactccagctccatttgttttgctgcaaaggacatgatttcattcttttttatggctgtgtagtattatacattttacatataccacattttatatatccactctaccatcgatgtgcatctgggctgatctttgtctttgccactgtgaataacacagcaataaacatacacacacatgtgtctctttggtagaattatttgtttaccttgtagtgtataccatgtagaaggatagctggttcatataatatctccgttttaagttctttgagaaatctccagtctgctttccaaagtgggtggactaatttatattcccattaacagtgtgtaagtgttttcttttcaccacagccccatcagt

SEQ ID NO: 252592 - DNA, 645 bp, Homo sapiens
gtgcacatacttgtctacagcagctaagtgagggtgaggaacaggtccatctccccacaaagtgtcctcttcagtgcttcaagttagttctcccataaggattttttttatttcaactttataatttagaaacagagggttcatgtgtggatttgttacatgggattattgggtgatgctgaggtttggaatacagatttcatcaccctctccctccactgtctagcagtmcacagtgtctgttgctcccatatttatccatgtgtgctcaatgctgaggtgccacttaggagaatatgtggtgttcagttttcttttcctgaattaatttgtttaggattaagaactccagctccatttgttttgctgcaaaggacatgatttcattcttttttatggctgtgtagtattatacattttacatataccacattttatatatccactctaccatcgatgtgcatctgggctgatctttgtctttgccactgtgaataacacagcaataaacatacacacacatgtgtctctttggtagaattatttgtttaccttgtagtgtataccatgtagaaggatagctggttcatataatatctccgttttaagttctttgagaaatctccagtctgctttccaaagtgg

SEQ ID NO: 252593 - DNA, 723 bp, Homo sapiens
gttccaggcaaatgtgcacatacttgtctacagcagctaagtgagggtgaggaacaggtccatctccccacaaagtgtcctcttcagtgcttcaagttagttctcccataaggattttttttatttcaactttataatttagaaacagagggttcatgtgtggatttgttacatgggattattgggtgatgctgaggtttggaatacagatttcatcaccctctccctccactgtctagcagtacacagtgtctgttgctcccatatttatccatgtgtgctcaatgctgaggtgccacttaggagaatatgtggtgttcagttttcttttcctgaattaatttgtttaggattaagaactccagctccatttgttttgctgcaaaggacatgatttcattcttttttatggctgtgtagtattatacattttacatataccacattttatatatccactctaccatcgatgtgcatctgggctgatctttgtctttgccactgtgaataacacagcaataaacatacacacacatgtgtctctttggtagaattatttgtttaccttgtagtgtataccatgtagaaggatagctggttcatataatatctcygttttaagttctttgagaaatctccagtctgctttccaaagtgggtggactaatttatattcccattaacagtgtgtaagtgttttcttttcaccacagccccatcagt

SEQ ID NO: 252594 - DNA, 657 bp, Homo sapiens
aaagaggtttaatagactcacacttccacgttgctggggaagcctcgaaatcatggcagaatgtgaaaggcacatatcacatggtggcatacaagagaagagaggacatgcagggaaactcccctttataaaatcatcagcaagagaggagaactcatgcagggaaactcccctttatcaaatcaccagatctcatgagactaattcactatcatgagaatagcatgggaaagacccccccaccatgattcaattatctcccacggggtccctcccacaacacatggtaattatgggagcaacaattcatgataagatttgtgtggggacacaatcaaaccatatcaagaatgtataggaaacttaaacaaatcaagaatccaaagacaaataaccccattaataaatgggcaaataacaagaacagacacttctgaaaagaagacttacaggtggccagcaatattttaaaagattctcatcatcactaaccatcagaaaaatgcaaatagaaaaatgttctaatttttgtcactataggttaattttttctgttttgaacttatttttgctattttttaggtttatttatgtaatttcatgtctcaaggttttgtcatcatatatatacatatgtaygtactaatacacatatga

SEQ ID NO: 252595 - DNA, 589 bp, Homo sapiens
tactcagaggcacccattgccccatgacacaggtggagaattttggaaaccagtgaagtgtgagttcacaataagtgatgaagttatcatttttccaaactttcattaatatgcaaagtatttctatagatcactcatgcatatacacacaaaatgtgtttttgcatttatggatgtctagagaaaaataagtgagaaaatttttccaggttgcagagatctgtttaagttgcagattccataggagagtgtctttgaacgaatactggtctattgattaaatagttcaaaattctctctgttggagcagccttccaattatgtagatttctttattgcttcttgagttgtgaaacataaacccaaggattgacttactgkaattcaactggtgtgttcataaaatttctgataagttttctcccaatgatttgagaatagctttcctgtttttttactcaaggaaatgaattttcacaaggtttcaggacatcacatttcaggtgttttacttaaagagactctgcctgggtgcagtcagctttcttctaaccatgaactcacttcttcagcaaaccattcagtttgt

SEQ ID NO: 252596 - DNA, 589 bp, Homo sapiens
tactcagaggcacccattgccccatgacacaggtggagaattttggaaaccagtgaagtgtgagttcacaataagtgatgaagttatcatttttccaaactttcattaatatgcaaagtatttctatagatcactcatgcatatacacacaaaatgtgtttttgcatttatggatgtctagagaaaaataagtgagaaaatttttccaggttgcagagatctgtttaagttgcagattccataggagagtgtctttgaacgaatactggtctattgattaaatagttcaaaattctctctgttggagcagccttccaattatgtagatttctttattgcttcttgagttgtgaaacataaacccaaggattgacttactgtaattcractggtgtgttcataaaatttctgataagttttctcccaatgatttgagaatagctttcctgtttttttactcaaggaaatgaattttcacaaggtttcaggacatcacatttcaggtgttttacttaaagagactctgcctgggtgcagtcagctttcttctaaccatgaactcacttcttcagcaaaccattcagtttgt

SEQ ID NO: 252597 - DNA, 582 bp, Homo sapiens
gatcttaggatctcaggcagatgctgaagacactgtctcaggagcacccagyttgtccataggccctgctggacactcacatgggacatccagcattctctttctcagagtcaccagtggtctgtgcgggtggctgatgagaccagaatgaggcaaaggcatctgctcagtgtcgtagtgatggtccaagaaatgatccagattgtctccatgctaatcaaatatgggttcactgtgaggaacgcgtcctgtgggtgctggttcttcagtgaaaggacctctgtccacaaagtgtttggaaatggagcagggcatgcatttcctcaagtgggattaggacttggaccatcaccatctcacttttgtatggctgatgtgccatttatcctctctttcttgtcctgaatcaggtcttgagttataaaattctctgaatcatgaatatgcaaatatcatgagatccactgagattaaatatggttattcttgtgccctgagagcatcacccaacaaccacatccctcctctagagaagttgctgagaacacagctcctcaccatggactggacctgaaggatcat

SEQ ID NO: 252598 - DNA, 477 bp, Homo sapiens
gaatccttaggttcatggggtttttggagacattcaggtgagtggaggggagaaagaggacagggggtggccagccatttcaacaatactgggaatgattaacatctaagtataaaggtctgcatcactcaaaacaccctgcatgacaggctgacagaaagaaatccaaccccacagtggctccatagcaactctttagtatacttggtagtgaagctctttcagggaagaaacrtccactcaagggactcagtgatgcttctctgagctataataaacagtgtattggacccaggtttctctgagttcaatgtgatgattacactcagctgctgctccgatgagtttaaatgagcatgtggcaatttagatgggcctggctgtgtggtatgttatatgtaaatctgaactatgtaaacataaagggcatgtctgaactagtgtgagggtgagagatcttagagggcccacacctca

SEQ ID NO: 252599 - DNA, 635 bp, Homo sapiens
actgagaatcctccattagctgcctctgactgtggcactgaccagattgagaatcctcagagtcatccatggaaaagagaatccttaggttcatggggtttttggagacattcaggtgagtggaggggagaaagaggacagggggtggccagccatttcaacaatactgggaatgattaacatctaagtataaaggtctgcatcactcaaaacaccctgcatgacaggctgacagaaagaaatccaaccccacagtggctccatagcaactctttagtatacttggtagtgaagctctttcagggaagaaacatccactcaagggactcagtgatgcttctctgagctataataaacagtgtattggacccaggtttctctgagttcaatgtgatgattacactcagctgctgctccratgagtttaaatgagcatgtggcaatttagatgggcctggctgtgtggtatgttatatgtaaatctgaactatgtaaacataaagggcatgtctgaactagtgtgagggtgagagatcttagagggcccacacctcacactcttgtgcttatttgctccaggaacctccaggttcttcgagtgaaaatcgacatagatcctttcctggataaatcat

SEQ ID NO: 252600 - DNA, 562 bp, Homo sapiens
aaatgaaaagtagctcatcccctgttcctgtagatcctggtgaggagccaccccacatctgtgcccttccttagtgtccacaccatggggtctgtgctgatctgggcttctcttgtcatcactctcaatatccaggttccccgtggatcaggccctgctgtggctgctcaaaggtggggctgttctcagtctgttgcctctgtgtttgcagaagtcccctgtgamgttaactaacggagtcagacagagaaatactacagaccaggaattctgccttttctgcaaagcctctggattcactttcactgaaaacagcataagcttgatccagcaggcttcatgacaggggtgggtgtgggtaataacaataattcaaatggaagttctcagtgggactctccttgagtaaaaagatgattaacaatcctcaaatacactcagttcaggagattctcttttaagatgattaacctgagagctcaggaaaactccgtgtattactttgagggacacagtgaggggacatctgagtgagctcagacaccaacctccctgcaggggg

SEQ ID NO: 252601 - DNA, 477 bp, Homo sapiens
gaatccttaggttcatggggtttttggagacattcaggtgagtggaggggagaaagaggacagggggtggccagccatttcaacaatactgggaatgattaacatctaagtataaaggtctgcatcactcaaaacaccctgcatgacaggctgacagaaagaaatccaaccccacagtggctccatagcaactctttagtatacttggtagtgaagctctttcagggaagaaacatccactcaagggactcagtgatgcttctctgagctataataaacagtgtattggacccaggtttctctgagttcaatgtgatgattacactcagctgctgctccgatgagtttaaatgagcatgtggcaatttagatgrgcctggctgtgtggtatgttatatgtaaatctgaactatgtaaacataaagggcatgtctgaactagtgtgagggtgagagatcttagagggcccacacctca

SEQ ID NO: 252602 - DNA, 562 bp, Homo sapiens
aaatgaaaagtagctcatcccctgttcctgtagatcctggtgaggagccaccccacatctgtgcccttccttagtgtccacaccatggggtctgtgctgatctgggcttctcttgtcatcactctcaatatccaggttccccgtggatcaggccctgctgtggctgctcaaaggtggggctgttctcagtctgttgcctctgtgtttgcagaagtcccctgtgaagttaactaacggagtcagacagagaaatactacagaccaggaattctgccttttctgcaaagcctctggattcactttcactgaaaacagcataagcttgatccagcaggcttcatgacaggggtgggtgtgggtaataacaataattcaaatggaagttctcagtgggactctccttgagtaaaaagatgattaacaatcctcaaatacactcagttcaggagattctcttttaagatgattaacctgagagctcaggaaaastccgtgtattactttgagggacacagtgaggggacatctgagtgagctcagacaccaacctccctgcaggggg

SEQ ID NO: 252603 - DNA, 560 bp, Homo sapiens
ctgagaaatacacacgtacatttctccagatagaccatccaggggaaagacatatctagaaccttatctgtattgggtaaggtagtccatctccattacagaccctcccagcagccttcctttatcatgaaagtggataaaattagccgatactgaaataatcctataatattatagccagaaaagggaaagcatcagtttcatttctggagactctgcatataggtcacagyccagagaaaaaaaggatgattgaattattaagaatcaattgtaagaacatataatacttccaggatgcacactttgttttctcaccagtataatctgggttaaagatgaaagtgtggcagtgcacagactctatctgaggaggagaacatagggaaactgaaagacaatggcagagaaaaagacaaggacagtaggaaaatctgaagcctctgacataaattttttgaagacaaggtcttggcaaatccattgacctcagattcttttatcatggggcattttcagggttcctagctgagaaaaaatattcatgcacttcccaagtc

SEQ ID NO: 252604 - DNA, 572 bp, Homo sapiens
gcagagaaaaagacaaggacagtaggaaaatctgaagcctctgacataaattttttgaagacaaggtcttggcaaatccattgacctcagattcttttatcatggggcattttcagggttcctagctgagaaaaaatattcatgcacttcccaagtctccacttgtattctgtttgccttagatcgctaagagaaaaaagccataaacctaggcctagtgtctgtgtaggaggygcttttataggctagaaaatagtaagaaaggagaatatgtgttattggaatagcatatacaaaggtgtctttattctgaatgtatctgtacctgcagatattctcagatgcaacattcaactgcaggagcccaacgaagaaactaggcattccccaaatcctacaagtttttgtattcattatgtgtccactgattcaggaaatgtgaagcttcagaaaagggactcccttctgagtcatagaatcttttctgtgggtatccctcagtaggtttagtgaggctaatcaattgttaaaagacatggtgtcggcagcatatggtgtcactggcagagaat

SEQ ID NO: 252605 - DNA, 338 bp, Homo sapiens
gactcccttctgagtcatagaatcttttctgtgggtatccctcagtaggtttagtgaggytaatcaattgttaaaagacatggtgtcggcagcatatggtgtcactggcagagaattctaaatcaggacacagccacttcatgctgggctagagactctgaaggaaaatatctgtgagccccgacagaaacctcattgcaaggcaagagcctgggtgaaagggggcacttgggagccaccaagcacaggttccagccctggagcaggtgcacagctggggtggaagtttcctctcagggcctgggttttcctttgtcaggaaaaaacatctaaaataa

SEQ ID NO: 252606 - DNA, 518 bp, Homo sapiens
ctcagtaggtttagtgaggctaatcaattgttaaaagacatggtgtcggcagcatatggtgtcactggcagagaattctaaaycaggacacagccacttcatgctgggctagagactctgaaggaaaatatctgtgagccccgacagaaacctcattgcaaggcaagagcctgggtgaaagggggcacttgggagccaccaagcacaggttccagccctggagcaggtgcacagctggggtggaagtttcctctcagggcctgggttttcctttgtcaggaaaaaacatctaaaataactgttcaaaaagtcgctgacgtgctttaaatattctatcacatcaaaaccattcatataacttaaggcactgagaactattttttgaagtgggtttctagaactataatatcttagtagtgagaatatgaaggatgggcatgtttttactaattctatgggtacagattagttgaagaaacttcattcctatgaataagaaattcagatttcagtgttaa

SEQ ID NO: 252607 - DNA, 582 bp, Homo sapiens
aaaaaaatttatattaaacaatttttatataatttttgctgagatgcctttcctgatatttggttcatttttatctccattgttttcttttcattagttgtaagtttacttgcatattgattataaaagtcatttaacaaattgaaagaattgatttaacaaatatatgacttggaagtattttctcccagtctgtggttgcctttttctctcttatcagtgggtatttcaaaaaatatgtgtgtgtgtgtgtgtgtgtgtgtgtgtgtgcacaaatttagacaaaaaacataaaaaattattcattcatagatcatgtatttggcattatatctgaagtctcattataaaatacactaatagtgattatttattccatgtctctaatctcaggacacaatcaactcatgartgtttagccttcacctattgattggaggaatatctgcctgagatatttggaatacttctacaagaagacgtgttcttcttcccatcgtttctttgtttaatcatctattaacatccatattggtttatggatgtctgtttcatactctgaagaagatccatgctacatta

SEQ ID NO: 252608 - DNA, 582 bp, Homo sapiens
aaaaaaatttatattaaacaatttttatataatttttgctgagatgcctttcctgatatttggttcatttttatctccattgttttcttttcattagttgtaagtttacttgcatattgattataaaagtcatttaacaaattgaaagaattgatttaacaaatatatgacttggaagtattttctcccagtctgtggttgcctttttctctcttatcagtgggtatttcaaaaaatatgtgtgtgtgtgtgtgtgtgtgtgtgtgtgtgcacaaatttagacaaaaaacataaaaaattattcattcatagatcatgtatttggcattatatctgaagtctcattataaaatacactaatagtgattatttattccatgtctctaatctcaggacacaatcaactcatgaatgtttagccttcacctattgattggaggaatatctgcctgagatatttggaatacttctayaagaagacgtgttcttcttcccatcgtttctttgtttaatcatctattaacatccatattggtttatggatgtctgtttcatactctgaagaagatccatgctacatta

SEQ ID NO: 252609 - DNA, 560 bp, Homo sapiens
gtcatttcaattgcactgtatagtttcatttatttgaaattctgtaaaagtcaaaactatactcaggtaaacagagaggatattccaggaatttagagagtgggtgtgaaataagtaaaacaggccttgtttaagaagagttaagactattttagtgatatgcaatggttgagacaagacacaattaatttgtcccagctcataattttgtgatggacaatataaacctaaatatacacaattaaaaatatatttaggaattcattaacccctggataaaatgcagactgtacaaaattatctaataacatatttgggagtgtggggatattatgagatgcatgcaacaaagraggaagtaattttcctcatttacatataagatgtttccatttactaaagatatttttttgaaaaaaatcaattttctacttgacccaggttttctcttcctgacaagcaagtaacccagaggattccttttctttcctagattgagaaagatttttcccaaacgtcagctgagttcaggcataccctgtccctgaatgctcatttac

SEQ ID NO: 252610 - DNA, 560 bp, Homo sapiens
gtcatttcaattgcactgtatagtttcatttatttgaaattctgtaaaagtcaaaactatactcaggtaaacagagaggatattccaggaatttagagagtgggtgtgaaataagtaaaacaggccttgtttaagaagagttaagactattttagtgatatgcaatggttgagacaagacacaattaatttgtcccagctcataattttgtgatggacaatataaacctaaatatacacaattaaaaatatatttaggaattcattaacccctggataaaatgcagactgtacaaaattatctaataacatatttgggagtgtggggatattatgagatgcatgcaacaaagaaggaagtaattttcctcatttacatataagatgtttccatttactaaagatatttttttgaaaaaaatcaattttctacttgacccaggttttctcttcctgayaagcaagtaacccagaggattccttttctttcctagattgagaaagatttttcccaaacgtcagctgagttcaggcataccctgtccctgaatgctcatttac

SEQ ID NO: 252611 - DNA, 555 bp, Homo sapiens
ttctttcctagattgagaaagatttttcccaaacgtcagctgagttcaggcataccctgtccctgaatgctcatttaccctcaaatgggtacacacacctgtcaacatgtgggctcttctgtcagacaaacacacctttactcatgtggattcttccatcagacaaacacacatgtccccacatggactctttcctcagactaccacatatgtccttacatttactctttcctcagaaaacagacatttcctcacgtttactcttgtctcagacaagcaaacacgtccccatgtgaactcttcactcagataagtacacatatgtccacattgactgtttcctgacacaagtccatrtatctgatgttgaaatatgttgtgaaaagtgatctccagataatgataattataaaccccctccctaacaaggtgtagatctgcattattttcattgtaactcaactttgccacatggtcaggaacagtggtttccagctctaagtgtactgattacagagagatgtctgttttctctggaaatgtatttttatgttc

SEQ ID NO: 252612 - DNA, 555 bp, Homo sapiens
ttctttcctagattgagaaagatttttcccaaacgtcagctgagttcaggcataccctgtccctgaatgctcatttaccctcaaatgggtacacacacctgtcaacatgtgggctcttctgtcagacaaacacacctttactcatgtggattcttccatcagacaaacacacatgtccccacatggactctttcctcagactaccacatatgtccttacatttactctttcctcagaaaacagacatttcctcacgtttactcttgtctcagacaagcaaacacgtccccatgtgaactcttcactcagataagtacacatatgtccacattgactgtttcctgacacaagtccatatatctgatgttgaaatatgttgygaaaagtgatctccagataatgataattataaaccccctccctaacaaggtgtagatctgcattattttcattgtaactcaactttgccacatggtcaggaacagtggtttccagctctaagtgtactgattacagagagatgtctgttttctctggaaatgtatttttatgttc

SEQ ID NO: 252613 - DNA, 555 bp, Homo sapiens
ttctttcctagattgagaaagatttttcccaaacgtcagctgagttcaggcataccctgtccctgaatgctcatttaccctcaaatgggtacacacacctgtcaacatgtgggctcttctgtcagacaaacacacctttactcatgtggattcttccatcagacaaacacacatgtccccacatggactctttcctcagactaccacatatgtccttacatttactctttcctcagaaaacagacatttcctcacgtttactcttgtctcagacaagcaaacacgtccccatgtgaactcttcactcagataagtacacatatgtccacattgactgtttcctgacacaagtccatatatctgatgttgaaatatgttgtgaaaagtgatctcmagataatgataattataaaccccctccctaacaaggtgtagatctgcattattttcattgtaactcaactttgccacatggtcaggaacagtggtttccagctctaagtgtactgattacagagagatgtctgttttctctggaaatgtatttttatgttc

SEQ ID NO: 252614 - DNA, 555 bp, Homo sapiens
ttctttcctagattgagaaagatttttcccaaacgtcagctgagttcaggcataccctgtccctgaatgctcatttaccctcaaatgggtacacacacctgtcaacatgtgggctcttctgtcagacaaacacacctttactcatgtggattcttccatcagacaaacacacatgtccccacatggactctttcctcagactaccacatatgtccttacatttactctttcctcagaaaacagacatttcctcacgtttactcttgtctcagacaagcaaacacgtccccatgtgaactcttcactcagataagtacacatatgtccacattgactgtttcctgacacaagtccatatatctgatgttgaaatatgttgtgaaaagtgatctccagataatgataattataaaccccctccctaacaaggtgtagatctgcattattttcattgtaactcaactttgccacatggtcaggaacagtggtttccagctctaagtgtactgattacrgagagatgtctgttttctctggaaatgtatttttatgttc

SEQ ID NO: 252615 - DNA, 512 bp, Homo sapiens
aatattatttttctgttatcttgtttaaattagcacttcacaatgacgtttatttctctattaacatataatctaattcacttttataaatattatattgtttaccataaggtttacaataagaattgtatataattagattgyataagaagtgtatacaattagattctataagaattgtatataattagattctaatgcagatactgtgatggccttgatatgaagaacagagacagtgtaactgtgtgctttgaattcctccttctcaccactctttcttgtttattcccagtttgcacttacatatgctataaaatataatatgtaattttttattccttttacagttatataatatagcaattacaaagataaaaactgtacttcatcttgattttctcattttgtacagtcttaatttcttcgtatagatttatgttttgaatgtatatcacatggctactagcagagaaagtttgttaaaatgtgcactgaagcatgaatgtgct

SEQ ID NO: 252616 - DNA, 512 bp, Homo sapiens
aatattatttttctgttatcttgtttaaattagcacttcacaatgacgtttatttctctattaacatataatctaattcacttttataaatattatattgtttaccataaggtttacaataagaattgtatataattagattgtataagaagtgtatacaattagattctataagaattgtatataattagattctaatgcagatactgtgatggccttgatatgaagaacagagacagtgtaactgtgtgctttgaattcctccttctcaccactctttcttgtttattcccagtttgcacttacatatgctataaaatataatatgtaattttttattccttttacagttatataatatagcaattacaaagataaaaactgyacttcatcttgattttctcattttgtacagtcttaatttcttcgtatagatttatgttttgaatgtatatcacatggctactagcagagaaagtttgttaaaatgtgcactgaagcatgaatgtgct

SEQ ID NO: 252617 - DNA, 512 bp, Homo sapiens
aatattatttttctgttatcttgtttaaattagcacttcacaatgacgtttatttctctattaacatataatctaattcacttttataaatattatattgtttaccataaggtttacaataagaattgtatataattagattgtataagaagtgtatacaattagattctataagaattgtatataattagattctaatgcagatactgtgatggccttgatatgaagaacagagacagtgtaactgtgtgctttgaattcctccttctcaccactctttcttgtttattcccagtttgcacttacatatgctataaaatataatatgtaattttttattccttttacagttatataatatagcaattacaaagataaaaactgtacttcatcttgattttctcattttgtacagtcttaatttcttcstatagatttatgttttgaatgtatatcacatggctactagcagagaaagtttgttaaaatgtgcactgaagcatgaatgtgct

SEQ ID NO: 252618 - DNA, 576 bp, Homo sapiens
ttctcctgttcacaaaaagttcaggttcctccagtgatacccacttttgtgtcccggtttggctcttcccatttctctccccagagagagcctgtctctttcatctgtggcaggtgcatcctgctgacacttttacttggtgattgtttgtggggtgaaggggcttggacacagggggatgttctccaaccttckgaccgagcctccttcttagctatgggtggtgagagtggctctgaagcatggtcttccaagtgttcctgttccttcccttctccaagtcagagtgtctcttcccagccacagtggtttttcatcagtgtcctcagcttctgacccactgtccttaccccacagactcaggacttcattcctcaggaaagagatgggaggtgattctgggtagagtttccttggtgtcctctgtttccttgtgttctagttgattctaccagtgcctgaaggacacaagatttaataaatgtctcccacatatcatgaagggggattcagcattgaacacagctgctattcttcctccccagtcaacaccacagtacagcaggtgggtgactt

SEQ ID NO: 252619 - DNA, 576 bp, Homo sapiens
ttctcctgttcacaaaaagttcaggttcctccagtgatacccacttttgtgtcccggtttggctcttcccatttctctccccagagagagcctgtctctttcatctgtggcaggtgcatcctgctgacacttttacttggtgattgtttgtggggtgaaggggcttggacacagggggatgttctccaaccttctgaccgagcctccttcttagctatgggtggtgagagtggctctgaagcatggtcttccaagtgttcctgttccttcccttctccaagtcagagtgtctcttcccagccacagtggtttttcrtcagtgtcctcagcttctgacccactgtccttaccccacagactcaggacttcattcctcaggaaagagatgggaggtgattctgggtagagtttccttggtgtcctctgtttccttgtgttctagttgattctaccagtgcctgaaggacacaagatttaataaatgtctcccacatatcatgaagggggattcagcattgaacacagctgctattcttcctccccagtcaacaccacagtacagcaggtgggtgactt

SEQ ID NO: 252620 - DNA, 368 bp, Homo sapiens
aggtgattctgggtagagtttccttggtgtcctctgtttccttgtgttctagttgattctaccagtgcctgaaggacacaagatttaataaatgtctcccacatatcrtgaagggggattcagcattgaacacagctgctattcttcctccccagtcaacaccacagtacagcaggtgggtgacttgtctgggtatttccccaattctgtaggaaaagcctgcaagtgccgggagtttcacactctcacacccttagcacacacatcctcaacaactcatgaaacatttccaggttagctttttcctatcttcaatactatacaacgagtggcacctgctccaggtactctaataaatggaccctagt

SEQ ID NO: 252621 - DNA, 368 bp, Homo sapiens
aggtgattctgggtagagtttccttggtgtcctctgtttccttgtgttctagttgattctaccagtgcctgaaggacacaagatttaataaatgtctcccacatatcatgaagggggattcagcattgaacacagctgctattcttcctccccagtcaacaccacagkacagcaggtgggtgacttgtctgggtatttccccaattctgtaggaaaagcctgcaagtgccgggagtttcacactctcacacccttagcacacacatcctcaacaactcatgaaacatttccaggttagctttttcctatcttcaatactatacaacgagtggcacctgctccaggtactctaataaatggaccctagt

SEQ ID NO: 252622 - DNA, 368 bp, Homo sapiens
aggtgattctgggtagagtttccttggtgtcctctgtttccttgtgttctagttgattctaccagtgcctgaaggacacaagatttaataaatgtctcccacatatcatgaagggggattcagcattgaacacagctgctattcttcctccccagtcaacaccacagtacagcaggtgggtgacttgtctgggtatttccccaattctgtaggaaaagcctgcaagtgccgggagtttcacactctcacacccttagcacayacatcctcaacaactcatgaaacatttccaggttagctttttcctatcttcaatactatacaacgagtggcacctgctccaggtactctaataaatggaccctagt

SEQ ID NO: 252623 - DNA, 589 bp, Homo sapiens
attagtaatttatactaatgacacaggttaaaatattgtataaataatttaattacatttgattggaaaaaaggaatatatgttcctcatgtcttgactttttttcttctctatgaaatgcatgcatattaattattaagtttaagatgttacctttgtctttttgatttctgggatttaattttagtacatatacttgaatgcattttattaattcatataataatgttcatattttggatagggttttaatattaattttattatttactgaattktaaactattctacagttttttattttttgtttttatgagataaaatttacatataataaaatatgcatagatctgaaatgtatcactagagagtttctggcaaatgtgaatacccttgttctcaatacctaaggtagctgaagaacaagtccatccccacatcgcgggttttccctgttcttgcggtcaactcctgcaaggggaaatgttttgatttctgacactacagatccattttttttctgttttgaactttatataaatggaatcaaacattatagaccttttttttgaaaggggctttgatattt

SEQ ID NO: 252624 - DNA, 564 bp, Homo sapiens
ttacctttgtctttttgatttctgggatttaattttagtacatatacttgaatgcattttattaattcatataataatgttcatattttggatagggttttaatattaattttattatttactgaattttaaactattctacagttttttattttttgtttttatgagataaaatttacatataataaaatatgcatagatctgaaatgtatcactagagagtttctggcaaatgtgaatacccttgttctcaatacctaaggtagctgaagarcaagtccatccccacatcgcgggttttccctgttcttgcggtcaactcctgcaaggggaaatgttttgatttctgacactacagatccattttttttctgttttgaactttatataaatggaatcaaacattatagaccttttttttgaaaggggctttgatatttttgagattaattcatactatttaatgtataaaattagatcaacatattgtcatttattcaattcgtagactgactctgatatgaaacctcaaagttttcacgtacgtatggagagagagagagg

SEQ ID NO: 252625 - DNA, 564 bp, Homo sapiens
ttacctttgtctttttgatttctgggatttaattttagtacatatacttgaatgcattttattaattcatataataatgttcatattttggatagggttttaatattaattttattatttactgaattttaaactattctacagttttttattttttgtttttatgagataaaatttacatataataaaatatgcatagatctgaaatgtatcactagagagtttctggcaaatgtgaatacccttgttctcaatacctaaggtagctgaagaacaagtccatccccacatcgcgggttttccctgttcttgcggtcaactcctgcaaggggaaaygttttgatttctgacactacagatccattttttttctgttttgaactttatataaatggaatcaaacattatagaccttttttttgaaaggggctttgatatttttgagattaattcatactatttaatgtataaaattagatcaacatattgtcatttattcaattcgtagactgactctgatatgaaacctcaaagttttcacgtacgtatggagagagagagagg

SEQ ID NO: 252626 - DNA, 589 bp, Homo sapiens
attagtaatttatactaatgacacaggttaaaatattgtataaataatttaattacatttgattggaaaaaaggaatatatgttcctcatgtcttgactttttttcttctctatgaaatgcatgcatattaattattaagtttaagatgttacctttgtctttttgatttctgggatttaattttagtacatatacttgaatgcattttattaattcatataataatgttcatattttggatagggttttaatattaattttattatttactgaattttaaactattctacagttttttattttttgtttttatgagataaaatttacatataataaaatatgcatagatctgaaatgtatcactagagagtttctggcaaatgtgaatacccttgttctcaatacctaaggtagctgaagaacaagtccatccccacatcgcgggttttccctgttcttgcggtcaactcctgcaaggggaaatgttttgatttctgacactacagatccatttwttttctgttttgaactttatataaatggaatcaaacattatagaccttttttttgaaaggggctttgatattt

SEQ ID NO: 252627 - DNA, 564 bp, Homo sapiens
ttacctttgtctttttgatttctgggatttaattttagtacatatacttgaatgcattttattaattcatataataatgttcatattttggatagggttttaatattaattttattatttactgaattttaaactattctacagttttttattttttgtttttatgagataaaatttacatataataaaatatgcatagatctgaaatgtatcactagagagtttctggcaaatgtgaatacccttgttctcaatacctaaggtagctgaagaacaagtccatccccacatcgcgggttttccctgttcttgcggtcaactcctgcaaggggaaatgttttgatttctgacactacagatccattttttttctgttttgaactttatataaatggaatcaaacattatagaccttttttttgaaaggggctttgatatttttgagattaattcatactatttaatgtataaaattagatcaacatattgtcatttattcrattcgtagactgactctgatatgaaacctcaaagttttcacgtacgtatggagagagagagagg

SEQ ID NO: 252628 - DNA, 617 bp, Homo sapiens
gtttatattgaggatatacattttctttaaatagggtctcactctgtcaacgagactggagtgcagtggcacaatcacagctcactgcakcattaacctcccaggcttaagggatcctcccacctcagcctttcaagtagctgctaccacaggtggaaccatacccaggtatttattattattatttttgtatagaaaagacctcactgtgctgccagggtgttctaaaagtcctgagctcaagtgatctgcctgccttagcctcccaaagttctgggattacaggtgtgatttttataattttactattttaataatagtattatttttaatcaagagaatatataaactaagcctaattttaacaaattgtcctgagagatcattgctagtattacttggaaaatatgcagcattaaaagttgaattaaattcctgttctaagttaatgttttgtaggtaaaagtaatcatggatttacaaggaagaaatggtgagagatcctggggaagacttttgcttgaccaggtcgggaatcaccaaggtttaaaagaaaaccacagcttctcaggctcctgatttggagctgcttcctgagaacccccgtgtactgagca

SEQ ID NO: 252629 - DNA, 617 bp, Homo sapiens
gtttatattgaggatatacattttctttaaatagggtctcactctgtcaacgagactggagtgcagtggcacaatcacagctcactgcagcattaacctcccaggcttaagggatcctcccacctcagcctttcaagtagctgctaccacaggtggaaccatacccaggtatttattattattatttttgtatagaaaagacctcactgtgctgccagggtgttctaaaagtcctgagctcaagtgatctgcctgccttagcctcccaaagttctgggattacaggtgtgatttttataattttactattttaataatagtattatttttaatcaagagaatatataaactaagcctaattttaacaaattgtcctgagagatcattgctagtattacttggaaaatatgcagcattaaaagttgaattaaattcctgttctaagttaatgttttgtaggtaaaagtaatcatggatttacaaggaagaaatggtgagagatcctggggaagacttttgcttgaccaggtcgggaatcaccaaggtttaaaagaaaaycacagcttctcaggctcctgatttggagctgcttcctgagaacccccgtgtactgagca

SEQ ID NO: 252630 - DNA, 523 bp, Homo sapiens
atgaggaaatttacttcattcttttttgcatgcatctcatgatatccccaccctcaccaaataagttattagataactttatacagtctgcatttaatcctgggtttaatgaactgctaaatactttttacaaaaattgtatatatttaggtttatattttccatcacacaattatgagcttagacaaattaactgcatcgtgtctcaaccattttatagcactaaaaataattttactattcttaaacagtgccatttttacttatttaatactcattctctaaattccttgaatatcctctatctgtttacttgactatagttttggtttataccgaatttcaaataaatgayattatatggtgtaattgaaatgacttcactgaagaaagtagaaaatgaagttgctagtctaattaactttgaaaatgaggaaattctgtatgtttaaaatgtaaagaaactacacatagcactctattctagtagataaacatatttccaatgagctttacatttctg

SEQ ID NO: 252631 - DNA, 523 bp, Homo sapiens
atgaggaaatttacttcattcttttttgcatgcatctcatgatatccccaccctcaccaaataagttattagataactttatacagtctgcatttaatcctgggtttaatgaactgctaaatactttttacaaaaattgtatatatttaggtttatattttccatcacacaattatgagcttagacaaattaactgcatcgtgtctcaaccattttatagcactaaaaataattttactattcttaaacagtgccatttttacttatttaatactcattctctaaattccttgaatatcctctatctgtttacttgactatagttttggtttataccgaatttcaaataaatgatattatayggtgtaattgaaatgacttcactgaagaaagtagaaaatgaagttgctagtctaattaactttgaaaatgaggaaattctgtatgtttaaaatgtaaagaaactacacatagcactctattctagtagataaacatatttccaatgagctttacatttctg

SEQ ID NO: 252632 - DNA, 595 bp, Homo sapiens
tcaaataaatgatattatatggtgtaattgaaatgacttcactgaagaaagtagaaaatgaagttgctagtctaattaactttgaaaatgaggaaattctgtatgtttaaaatgtaaagaaactacacatagcactctattctagtagataaacatatttccaatgagctttacatttctgataccgctatgcatgtgtcctaaaattgtgcaaccaggtaataataaggcaattggtgggataggattcctcactttaaagtggatggttatggacagtcaaggaaggaaggctagaaaggtccacgtggtagcatagttgggtcaggagaccagtgtgttctcatttttaatataataaagttacagaagattaggtacataagtagttttgatgcgtccataaacatgggttcatataaacatgcacrtctgctaggccagtaggttgagaggtcctagaagtaattatacacggtatcacaatttttttttattttactgctattcgttaacgttagaaacaagcaagctttagaaaaatggctaattctatgtacaaaagaggtaatatagaaaatgaacttagaatttg

SEQ ID NO: 252633 - DNA, 544 bp, Homo sapiens
gaagtgcatgcaggttgttattttcactttctcagctrggaaaccagcaaagtccccataataaaagaagctgagatctatgatggcatttacaagatgttggtcttaaaaatcatgatgtcagaggcttcacattgctgtactgcctttgtctcaccctctgtcattgtcttagtgtttctgtattctcctcagatagagtctgtgcattgccacactttcatctttaatccatagtcatcatcctagttagaatggattgtgcagtgcaggtaagcactgcctgttcttccaatggaaacctagagattcgataggcttcctcttctgggctgtgaccttgaaaaagcatctccaggggaaaagctcatttttggctgttactcccttttgtggttttggcctccctggactatttacgtacatcttaccccttttggctaactttactcattcatataataatggaagaatgggagagaatctggaatgggagatttgtcttccttcacataggataaggttctggaaaagtcattccctt

SEQ ID NO: 252634 - DNA, 544 bp, Homo sapiens
gaagtgcatgcaggttgttattttcactttctcagctaggaaaccagcaaagtccccataataaaagaagctgagatctatgatggcatttacaagatgttggtcttaaaaatcatgatgtcagaggcttcacattgctstactgcctttgtctcaccctctgtcattgtcttagtgtttctgtattctcctcagatagagtctgtgcattgccacactttcatctttaatccatagtcatcatcctagttagaatggattgtgcagtgcaggtaagcactgcctgttcttccaatggaaacctagagattcgataggcttcctcttctgggctgtgaccttgaaaaagcatctccaggggaaaagctcatttttggctgttactcccttttgtggttttggcctccctggactatttacgtacatcttaccccttttggctaactttactcattcatataataatggaagaatgggagagaatctggaatgggagatttgtcttccttcacataggataaggttctggaaaagtcattccctt

SEQ ID NO: 252635 - DNA, 443 bp, Homo sapiens
aatattacaatcttgtttaataagctagtggcagcatgcaagaacactgtgagaattttaagagataaaaaaatttaaaagagaactaaaaaaatttggtgttgaagaatacagtaagtcagccaaaaatttttagacagcacactgtaggagaggctcaggctttcctttcccctacaggaggtagccctgcaatttccttagacgtgaatcactgtttyctcccacccaccttctagattctcttcagagattctcccgactccagagctcatgttctcacatgttgtgcgactttgggttaaaacacacctgaaacatttaatggctgttgtccttgatcatttgatcatcatctgcattttagttgatgtgatttttttaaacctcagtttgaaggaaagaaaaaaaaaatctatagactctatctaggccagaattac

SEQ ID NO: 252636 - DNA, 505 bp, Homo sapiens
ctgtttgggggcatttaagcatcmtagagaatagtattatccccaaaatggcccttctttattaaatttcctactataaaacggaagcataaactacctgctgtttatctcacatcagactgtggagacctaagtcaatgtttccattgttctgctggggccttgtttctggtcaactgtgagggagaaagaactgctggatcacagactcttgttcccgtgatcacatctcctgtcccttaactatatctacatcccctcgtgtcagaacacattgtgcagtgtctcattctaggaataagatattcagtaacttggacagtgactctagtagcttctctatgattaagaaaaatacatgtgaagataagagttaattcttctaagtataaatgactacctatcaggtttgggctttgactaaattttttaaattgtctccttatgactggtgggtatccttacagggtgtaatgattttgttagacaaatgtgatatctatca

SEQ ID NO: 252637 - DNA, 505 bp, Homo sapiens
ctgtttgggggcatttaagcatcctagagaatagtattatccccaaaatggcccttctttattaaatttcctactataaaacggaagcataaactacctgctgtttatctcacatcagactgtggagacctaagtcaatgtttccwttgttctgctggggccttgtttctggtcaactgtgagggagaaagaactgctggatcacagactcttgttcccgtgatcacatctcctgtcccttaactatatctacatcccctcgtgtcagaacacattgtgcagtgtctcattctaggaataagatattcagtaacttggacagtgactctagtagcttctctatgattaagaaaaatacatgtgaagataagagttaattcttctaagtataaatgactacctatcaggtttgggctttgactaaattttttaaattgtctccttatgactggtgggtatccttacagggtgtaatgattttgttagacaaatgtgatatctatca

SEQ ID NO: 252638 - DNA, 505 bp, Homo sapiens
ctgtttgggggcatttaagcatcctagagaatagtattatccccaaaatggcccttctttattaaatttcctactataaaacggaagcataaactacctgctgtttatctcacatcagactgtggagacctaagtcaatgtttccattgttctgctggggccttgtttctggtcaactgtgagrgagaaagaactgctggatcacagactcttgttcccgtgatcacatctcctgtcccttaactatatctacatcccctcgtgtcagaacacattgtgcagtgtctcattctaggaataagatattcagtaacttggacagtgactctagtagcttctctatgattaagaaaaatacatgtgaagataagagttaattcttctaagtataaatgactacctatcaggtttgggctttgactaaattttttaaattgtctccttatgactggtgggtatccttacagggtgtaatgattttgttagacaaatgtgatatctatca

SEQ ID NO: 252639 - DNA, 484 bp, Homo sapiens
taagtctttaacttgaattatatattttcatatttactttataaaatgaatctaacctggagagctgataaagccccttgggaaaactggcatgtaccttttttttttttttacagggccctgaactgtagtaagtaaacaatttaatttctgacagacccaggactcccaagttttcttggaaacttgaaaaaagagaaagtaacccaattcacatagctatctggtggcacagataaaatattgactgggcttgaagattttaaagattctaccctttgactccttacaaaaaatttctagcaaagtcaatttatgaataaaattrcctatgtacaaacaaaaaatagaaaacaaaaaaagagagctaatatgttaaatgattattttgctgcctcttatacaaaaaaaccaggccaagtctcataagcctaaaactgattttacaaataaattggtcctactatgattttatctcaaataa

SEQ ID NO: 252640 - DNA, 594 bp, Homo sapiens
gctcctcagcaggcagcaccccctatggaggggctttacccctaaacttctggagccaggagagggacctggcttagaatacggccaaccaagagcctgggtgagaaatacatggaccagacagggagcagagaaaggagtggcagcgcagtcccaccctagctcagctgggggctctggagcctgctctggcccccatctcttcggcaaccactgtttctagttttctttttctccccgagaagcctgtcctctcaccatgcctgtgccttcaagaaccccacctggctggcagctcccagatctccagcctggccctccttagctgcaaaggtgcttcccaacgtcggcaagacctctccctagggtgccccaggccttcacacagcccctgtcyccaaccgactccaactgtcctgcagcccacggtcaccctcaggacccctgagctcaggccaactgctttatacactgtcagccaggtctctgcctggatgacaatcaccctctgctaattgttctccacacctccaggccaaatgccctccaagccacctcatgcaccacaatgacaccaaacacacagaaaaaaga

SEQ ID NO: 252641 - DNA, 578 bp, Homo sapiens
gatgcccccagctgcaaggaggtacctgggacctggcatggaaactcctccctcctttttcagcacacgcatggtggaaggagataaggaamgtggagcagaccaagctaagtccccacctgcataataaaagcatgagatggggctgccagagacttcgctctatgcagatggcacatctggtcctgtttttgcaccctatgttgataagataccctctccccagtagcacatttataaaaatccttacattttactgcagcacagcaacccatttgggacccctttctgtgacagagagcttttttgttttccttttacatattaaatttctgctccaacctcaccttttgcgtgtctgtgtccttgattttcatagccacgacacaaagaaccttcggtgatattccagaaaacaagggtgttttactggaaagggctttgggcaaacctgcctccctttctattcaaagtcattcctctgaggcccacatgagacagatacatatctgattgcttcctcttcagtatcatttatgaaaaaatgaagattcactaagtctgactaaattgtggat

SEQ ID NO: 252642 - DNA, 542 bp, Homo sapiens
ctgttctcctgctactaataaaaacataaccaagcctgggtaatttgtaaaggaatgaggtttaatggacttatagttccacatggctggggatgcttcacaatcatgtcaggaaagcaagggacatcttacatggtggcagacaagagagagtttgtgcaggggaactccccttgataaaactatcagatctaatgggacttattcactatcatgagaacagcatgggaaagtgctgacttactgcaggagaactacgtaattttatatttccctatgtgcttctttttcattacacatgtaaattttcttaccatccaaayttcccctctacccagcttttcctctgtgtatattgaaagccctaaaaatcgtctttaaggaatggcactaaccacacacagtttctgtggttacttttatttttcttccaggctgtcctaactttgggaaaattaattttaatttgattgagatctgtctcagaaacctttggtttacactaggaaagatcccaaattaggagccaattactgtaaaaa

SEQ ID NO: 252643 - DNA, 435 bp, Homo sapiens
cactgtgtgagtgtgaggtcatgtgggatatttcaaactttgtaaggaaagcctgcaacaatatatggctctagaagcttcacactccaacactgttaatgcgcacatcctcaaggaactctaaatgtttccaggttagcttaaatgccatggagtgacacctgccccaggtacactcatatatgcatcctgggtctccctatcaacccctatcctcaaattttcagttcatgtttgctccatgatatcaactctgatatgctgaggttttttttttttttttttatctgtagttgttcaggtttgctgtttcactctcattactctgggctcagtcctctcctcaggtgtcccacttcaragcttgctatgtaataggagacatgcaaataggaccctcccttttctgatgaaaagcagcccagcccctgaccc

SEQ ID NO: 252644 - DNA, 435 bp, Homo sapiens
cactgtgtgagtgtgaggtcatgtgggatatttcaaactttgtaaggaaagcctgcaacaatatatggctctagaagcttcacactccaacactgttaatgcgcacatcctcaaggaactctaaatgtttccaggttagcttaaatgccatggagtgacacctgccccaggtacactcatatatgcatcctgggtctccctatcaacccctatcctcaaattttcagttcatgtttgctccatgatatcaactctgatatgctgaggttttttttttttttttttatctgtagttgttcaggtttgctgtttcactctcattactctgggctcagtcctctcctcaggtgtcccacttcagagcttgctwtgtaataggagacatgcaaataggaccctcccttttctgatgaaaagcagcccagcccctgaccc

SEQ ID NO: 252645 - DNA, 575 bp, Homo sapiens
gcttcccactgttgcattctccatgtgtcatctctattatttctcatgctagatcaggtatttagctatgaaatattccagttaattaacatgtaartagcttgaagtctactgagttaaatacatatattttctcctgtttttcccaggtgttccctcccacacctccaatagtctctactattatcatcgtcttcttgatcttctgcgatgccctggagattaaggatttgattccatgacagagaggaggtacatttcgatggaactttggtgagaaccttggtttttatcccatttcctctggggctccaccagtgcctctggaatcatggtttcagtggcttgcccctgtatggtaggtaatccctttattctgtagtgctgatgagggaggtgggtctgaacgcatttcggtagtatgggctctccttctgtctcagacagacactttgggaaaggaagatttttctgagtgtcctcattctagaacaaagggattcaattgtataggaatgcggataatagaaaaccttcagccaaattaaggttaatgagattaattgagcaatgga

SEQ ID NO: 252646 - DNA, 644 bp, Homo sapiens
tgtttcactattagaggagttctgtactgatgaagttctggacatgccagcggacaaatatcagtaaacaaacatcagaacttgaacctcagcttcccactgttgcattctccatgtgtcatctctattatttctcatgctagatcaggtatttagctatgaaatattccagttaattaacatgtaaatagcttgaagtctactgagttaaatacatatattttctcctgtttttcccaggtgttccctcccacacctccaatagtctcyactattatcatcgtcttcttgatcttctgcgatgccctggagattaaggatttgattccatgacagagaggaggtacatttcgatggaactttggtgagaaccttggtttttatcccatttcctctggggctccaccagtgcctctggaatcatggtttcagtggcttgcccctgtatggtaggtaatccctttattctgtagtgctgatgagggaggtgggtctgaacgcatttcggtagtatgggctctccttctgtctcagacagacactttgggaaaggaagatttttctgagtgtcctcattctagaacaaagggattcaattgtataggaatgcggataatagaaaaccttcagccaaattaaggtta

SEQ ID NO: 252647 - DNA, 538 bp, Homo sapiens
gcttcccactgttgcattctccatgtgtcatctctattatttctcatgctagatcaggtatttagctatgaaatattccagttaattaacatgtaaatagcttgaagtctactgagttaaatacatatattttctcctgtttttcccaggtgttccctcccacacctccaatagtctctactattatcatcgtcttctwgatcttctgcgatgccctggagattaaggatttgattccatgacagagaggaggtacatttcgatggaactttggtgagaaccttggtttttatcccatttcctctggggctccaccagtgcctctggaatcatggtttcagtggcttgcccctgtatggtaggtaatccctttattctgtagtgctgatgagggaggtgggtctgaacgcatttcggtagtatgggctctccttctgtctcagacagacactttgggaaaggaagatttttctgagtgtcctcattctagaacaaagggattcaattgtataggaatgcggataatagaaaaccttca

SEQ ID NO: 252648 - DNA, 628 bp, Homo sapiens
tttaataaaatattaggaaattgaatactttaaaatttacatataatttttaaggtaatatatcatgacaaatagtttattccaggattataaatatcagtcaatataattcagaatattaacagattaaagagaaacagcttatacatgtctcaatagatacacaaaaagtgtttgacaaaatccaatacttatttatgataaagaattccagcaaacttagaatagaaatgaacttttttcaactgaatacaggttatcaatagaaaacttacagttattgtcatatttaatggtgagcgactgaatattttctccctgagctcaaaaacacagccaggatgcctactctcaccacttcagcactttgctggatgctctaactagtgcatccaagcagaaaaaagaaataaaaggtactcaggttggggggaaaatagaagcaaattattttattttcaggtaacataaacatatgtagacaatcctaaagatgctacaaaaaaayagaactgaaaagtaaaaagctaaaacctagcacagctgcaaggctcaatacacgatgatacattgtattcccacacaccagccacaaaaaaagtagaaattataattataataccaaaaa

SEQ ID NO: 252649 - DNA, 556 bp, Homo sapiens
gctgtcttttaccttgggaacagaaatatcagctcaggcagtcaactaaactgatggccattgacaataacctggtgcctgatggatgagaggtacagagagttccaccagctactgggttcagggaaagaacctgcagctgtgcgaggtgaccatatcccattagggccttcatacaggcccaactcctacaacattgactccactaggaaatagattctccccaccaccagaacactcatgcctgctcccagagagcctcggtctgactaccaagggaccaaggaaatccaatttgtgaccggaaagttatstgtggaatctgaacaaaagatgatggctactcttggaagatattggatctagctatgaataagctcatgaatgcttccaggtccacatctcttgtgtgcttatctccccagattgacagggagagggccacgtccactgatggagacccacgtgcttcatccttagagatagatttatgcccatgcctggggctccctcacaggaccaattccctctccatacagtgacccctctaacgggg

SEQ ID NO: 252650 - DNA, 578 bp, Homo sapiens
aaccccaatcttaacttgccttcaaggaaaagagggatccttgcccatcatgtttaagaaaggctcatggtcaaaaagttaaacactgagttaccaccatatggtccggcaatttcactcctacatacatacccagcggagatgaaaacatatgtccacacacaaaaaaaagggatacacaaatattcatagcagcattattcataatagccaaaatatgtaacaacccaaatgcccattaacttatgaataggtcaacaaaatatggtatattaatgcaatggaatcacacttagccaygtaaatgaatgaagtactgatttcttcatttatatgaatgagtgaaattgtacaaggatgaaccttgaaatcattgcactaagtgaaagaaaccagacacaaaagaccacacattgtatgattccatttatacaaaatgtccagaataggcaaatccacagagatgcaaaagggaattgtagttactagggactggggccaggggaacaggaagtgactgctaatgcatacagcgtttctttttggggtgatgaaaacattctggaattagatagtgg

SEQ ID NO: 252651 - DNA, 570 bp, Homo sapiens
ttacctcacttcacccacagatgttcccctgaggtaagggggctgggggaaccatatgatatggtagcatttgtattatgtttctaagcacttttccatccataaagtcttggaaataaacagcacggacaggaatccccactgggctgatggggaaactgaggccaacccctgcgattaaataattggcaagtggtctcttgggccaggcatcattctattttgtcttgactctcccattcataaggtcaagaaaaaccttattatttaaacaaatgctgagcaaggataacatctaacatccagaacggcccctgttcttccaactacattgagttttsatttggaggaaagcactaagtttctttgtgcccccgtgcctttgtactggctgttcctgctacctggaagttacctcccttcggtattcttccttcaagtttcggctcatgagtcagagcccccagggagcatttcttaatgcttccggctgggtcacctctcccatcacatactctcacagaaccttgcacttctccaaacatgtagcacaattgaaattagttgatt

SEQ ID NO: 252652 - DNA, 551 bp, Homo sapiens
tgtagtccaggccgatctgctcagcacagtgaggaatcaggtctgggaggcgtgttttgttgccactggatgctgtattagttttctattgctgyataactaatcaccacaaatttaatggcttaaagcaacgcccatttattcgtatacagttttgtaggtcagaagtccagcatggtatggctgaattctctgctcagggtatcataagactgatattaaggtacaggctggattgagtcctctactgggagctctggggagacatctatttccaagctcactcaaagtattgacagaattggcttcttatgggtgaaggactggagtctgtttccttgctggaggtcaatcaggagcctctgtgagcaacgtaaggccactcacattccttttcctggggtcgcccgcatcttcaaaccaacaaagacatagcaaatccccttgtgcctcaaatctttctgattcctcttctgccaccagctggagaaaattctgcttttaaatggctcatctgattgggtcaggcccacccagataaccgctgcttt

SEQ ID NO: 252653 - DNA, 602 bp, Homo sapiens
atgaattctattattaatgctaattattatctttagaatctctcaggttttctatatgggcaaacataattgtccatgaaaatggcaattttgcttcttctttccaatccttatacctcctgtttcatattttgtcactgtgaatgagaccatggctaagaccttcaatatcatattgaaaagttaagaatagatgaccttcttaattttaagaaaaatgtgtttttacccaktaagcatgagatattataggtttttgacatatatactttgtcaggttaaagaagttccccatccctaagagtttacaagcacagaaggtagcatccttataggtcccaatttgcaagtttacacatcctggggtaattattaataatgttccctcatcctcaaaaagattctcatttggacaataaattgtatgttacctccaatagaaaagtgatgttagatgacaatgctagggaaataatttgaccatttgaatatgaaatgaataagaggaacttagaggtttctgtcagtgaagagattttagaatcttccctgccaaactgagaaatttccaacctcaagtaacaaagcaataactacctact

SEQ ID NO: 252654 - DNA, 622 bp, Homo sapiens
ctgtgtgaagcactgagtccaaagtgacgcagcaagtgcccagcaaaaggctggagggagcatttgccctgatgactttcttttttttgagacagagtcttgctctgtcaccaggctgaagtgcagtggtgtaatctcggcccactgcaacctccgcctcccaagtttaagtgattctcctgcctcagcctcccaagtagttgggactgcaggtgtgcgccacccatgcccagataatttttrtatttttagtagagatggggtttcaccgtgttggccaggatggtcttgatctcttgacctcatgattggctcacctcgacctcccaaactgctgggattacaagcatgagccaccgcacccagccagatgaccagctttcaattgggggttcaaaaccccatgccccagggctcacaaacacatctgagggttttcagtcattatggtgataaaactgtctgcttcgattttattctttaaaaaacaataaacacaattatcaatggaaatgttttctgtttaaagcggaatgtttcgagagccttccagggctggccaagggcatctgtgaagggttcagcagaggtcagctggcagtgggtctgaaacatcaggttt

SEQ ID NO: 252655 - DNA, 595 bp, Homo sapiens
actcacttacgatcatcacaatagctaagttgtattgacccacattatgcataaggcactgtactcagtacttgcccaaattttcatttaaccctaataacaatcctatgaggaagatgcaattatgcgaaaggcccattttgcaaatgagaaaactgaggcayggaagagtggcaaattttggccaaggttgcccaggcaattagtaatggagttggactcctggctccctgggtctgtaaaaataaattcaaaatcctgctttttctacaagtagtgaggtcctcatccccagaagcaatcagagaccaaggctcagctctcagaacagctataggaaagattcttccaacatgaagtggcctctaaaggttcctctgacactgcgattctgtaattctagatatacagaccaatcatgagggcagtgacttctgacaaaagtgtaaacatttagaagagagaagaaaagatctcatttaccatggaggaaataaaggaaagaactgtgatggcagcagaaatgagcaaaccctctctgatgcagaaagctctgaaagaaatatgattaaattttgtgcttcctgccacgccc

SEQ ID NO: 252656 - DNA, 595 bp, Homo sapiens
actcacttacgatcatcacaatagctaagttgtattgacccacattatgcataaggcactgtactcagtacttgcccaaattttcatttaaccctaataacaatcctatgaggaagatgcaattatgcgaaaggcccattttgcaaatgagaaaactgaggcatggaaragtggcaaattttggccaaggttgcccaggcaattagtaatggagttggactcctggctccctgggtctgtaaaaataaattcaaaatcctgctttttctacaagtagtgaggtcctcatccccagaagcaatcagagaccaaggctcagctctcagaacagctataggaaagattcttccaacatgaagtggcctctaaaggttcctctgacactgcgattctgtaattctagatatacagaccaatcatgagggcagtgacttctgacaaaagtgtaaacatttagaagagagaagaaaagatctcatttaccatggaggaaataaaggaaagaactgtgatggcagcagaaatgagcaaaccctctctgatgcagaaagctctgaaagaaatatgattaaattttgtgcttcctgccacgccc

SEQ ID NO: 252657 - DNA, 578 bp, Homo sapiens
ttcctctgacactgcgattctgtaattctagatatacagaccaatcatgagggcagtgacttctgacaaaagtgtaaacatttagaagagagaagaaaagatctcatttaccatggaggaaataaaggaaagaactgtgatggcagcagaaatgagcaaaccctctctgatgcagaaagctctgaaagaaatatgattaaattttgtgcttcctgccacgccccctttccttcaatggccttttacaagtaccaatttctggaatcaatagcaaaggaatccaaagagggcraatattaaatgtaattcagtggcatattacagtaatctaaaagggaaaaaagaactaatcttctctgtgctttgttattggagtgtgtatttttgaaggaaatgtaagctgtaccctcctctcttcagacacttggggttgggaaaggttgctgggttctttatgggcgaggtcttcatgttcacaaagagcaacatgaagcagaaactatgactcctgattttcagatgacgacatggccttaggacaaaccacttgcctgaagtgcaaggacttggatgtccag

SEQ ID NO: 252658 - DNA, 429 bp, Homo sapiens
cacttctcaactctgtcccctgagatgttgaatatataacagagcagcagtctggccaatctgtgactggtattttgctgcagctaatcaaggtggcttatgtttgcagaccgaagcagaggtaaatatgtagaatttattaccatgagctctgaagctagatggagatgaattccaatgttggttctagtgtgagatgtgtgaccctgggcaagtttattgattttctctaagcctcagtttcatcctctgtaagctgggactcacctatctcacaggaaattttgcaggcccaatgggctactgaatgcygattggtgagcactcaataaatggcagagatatatgtaccatacatattatcttaagtgccaggatcaggctgctgggaagccagtaacatgcttcttgtgcatgtaacaccgcaca

SEQ ID NO: 252659 - DNA, 599 bp, Homo sapiens
ggcatactccaaaagggcaaatgtggcaacccccaaacagaattggacacccctgagaaacagaatagtaactccacactgtgtgtgtatgtgtttgtgaatgtgtgtgttcrtacaaggcattcatacaagtcatagtcttgtagtcaagggaaaagagatgaggaaaatgtatattgtcccctccaaactctggcaagaaaatacagagaacagcttctttagtccaatgtatgagattgccaggtttgaagacatagtttcattttatatccatccatcatccactcatccatccatctatccgtcatccatccatccatcaaacatacattcatccattcatttatttatccatccattcacccatccatcttccatcctctatccatttatccatccatccatccatccatccgtccatccatccattcaagtaagaattattgggtaattgttttatgccacacattatgttacatgggattcccacctaatcttcagagaaatcccaataagatacttgtttttgtctccaaaataagaaagcataggctcaaagaagttagtaacttgtcgaagttatgcagctataagaa

SEQ ID NO: 252660 - DNA, 617 bp, Homo sapiens
gccctaatctctggaacctgtgaatgttacattacctggcaaaaagaaactgtggcataagaagaaatctatatgtggtctctgacccctggtttctggcatgagagcttctaaaactctcagaatttcctgagtgatagaagtaaggtgagcatcttttatttattttttaagacagttctgtcacctagtctggagtgtggtggtgtgatcagggttcactgcaaccttgacctcctgggctcaagtgatcctcctacctcagcttcctgagtagctggtactacaggtgaaagacactatgtcccatttaaaaaaaaatgtttttttagggatggggtctcactatgttgtctaggctggtctccaactgctggtttcaagcaatcctctcaccttggcctcccaaagtgctgggattacaggcatgagccaccgagtttggccacatcttttgctattctatyaccaataaccaatgatttaatcaatcacgcctaccaaatagagcctctgtaaaaactgtaaactacctggtttagagaacttctaggttggtgaacacaccagggtgtctgggggggtgacacgcctggagaggaaaatggaagctccat

SEQ ID NO: 252661 - DNA, 565 bp, Homo sapiens
tatctgtttatgtcagtgcatatagatctgtctctttctttttaaaggctgcagtgagttgcattgtatgagtgtatcataatttatttatctaattaaaaccagagactcttaaagctcagctagtgctttcaggmagaggaatcccctctacagcatctccacaggctgctcgcccagcccacacaggtcttgggtttccttgggtatagaaagttttgatggatctcagtctctggggtgatgtttttattcctgcctcgtttgaaaggctggctattctatcaagacgaagggagatttccagccgtgcctgtgtccaggatattttaaagacgcacagcagttcaggcagatcacctgcagaatcactgccatttcaacattagggttccctgatgggtcatcgttggccctttttatcttttcactctatctgcttttgatttgaaatataactgcctcctggaccacgctaccttgccacacacaggtgtagacacttagacacacccgttccaaaccaacttgtctttcctcatgagatgatggctttcatccttgt

SEQ ID NO: 252662 - DNA, 556 bp, Homo sapiens
tatgatagtggattttatggcgcctacatggggatggtacactgctacattgtcatggaacataggtatgccatgatggtacaacaggatggtagaaaggtatgatggtacaaaggtatgacacaggtaggctggggttgtgcatgggtgcactaagatatgatataggtatgctggggtggtgyacgagcacattaagatgggatacgggtatgctggggtggtgcacaggtgcaccagaatggtatacagatatgctggggtggtgcacgggtgcactagaatgctataccaatgtgctagagtggtgcacaggcacactaggatactataaatatacgctggggtggtgcacaggtgcactaggatgctatacaggtatgctgaggtggtgcacgggtgcattaagatggtgtacaggtgtgctggggtggtacacaggtgcactaagatatagaagtatactggagtggtgcacagatgcactaagatggtatataggtatgctggtgtggtgcaaaggtgtcccatgatgggatacaggtatgccagggtg

SEQ ID NO: 252663 - DNA, 556 bp, Homo sapiens
tatgatagtggattttatggcgcctacatggggatggtacactgctacattgtcatggaacataggtatgccatgatggtacaacaggatggtagaaaggtatgatggtacaaaggtatgacacaggtaggctggggttgtgcatgggtgcactaagatatgatataggtatgctggggtggtgcacgagcacattaagatgggatacgggtatgctggggtggtgcacaggtgcaccagaatggtrtacagatatgctggggtggtgcacgggtgcactagaatgctataccaatgtgctagagtggtgcacaggcacactaggatactataaatatacgctggggtggtgcacaggtgcactaggatgctatacaggtatgctgaggtggtgcacgggtgcattaagatggtgtacaggtgtgctggggtggtacacaggtgcactaagatatagaagtatactggagtggtgcacagatgcactaagatggtatataggtatgctggtgtggtgcaaaggtgtcccatgatgggatacaggtatgccagggtg

SEQ ID NO: 252664 - DNA, 431 bp, Homo sapiens
gatactataaatatacgctggggtggtgcacaggtgcmctaggatgctatacaggtatgctgaggtggtgcacgggtgcattaagatggtgtacaggtgtgctggggtggtacacaggtgcactaagatatagaagtatactggagtggtgcacagatgcactaagatggtatataggtatgctggtgtggtgcaaaggtgtcccatgatgggatacaggtatgccagggtggtgcacaggtatcgtaggatggtatacgggtatgctggggtggtgcccaagtggactaggatgacatccaggtatgctgggatgatgcactggtgcactagaatgaaccctgggatgctacacaaagatgcaggcatttggcattgggatggaacactaggagagaccactggaatgacacacggggatagtacacaag

SEQ ID NO: 252665 - DNA, 431 bp, Homo sapiens
gatactataaatatacgctggggtggtgcacaggtgcactaggatgctatacaggtatgctgaggtggtgcacgggtgcattaagatggtgtacaggtgtgctggggtggtacacaggtgcactaagatatagaagtatactggagtggtgcacagatgcactaagatggtatataggtatgctggtgtggtgcaaaggtgtcccatgatgggatacaggtatgccagggtggtgcacaggtatcgtaggatggtatacgggtatgctggggtggtgcccaagtggactaggatgacatccaggtatgctgggatgatgcactggtgcactagaatgaaccctgggatgctacacaaagatgcaggcatttggcattgggatggaacactaggagagamcactggaatgacacacggggatagtacacaag

SEQ ID NO: 252666 - DNA, 622 bp, Homo sapiens
catgggggccacgttaccactgtctgcaccatcctggcagactctgactgcccctcaatgccaacacccctggcctgcccagggtgagctggggctgagcaggttaaggccaggtttgccctgaggctgcagcatgctggggctgctccagacctgtttctgggacagcaggtgcagtcgttcactgacaccaaaatacattcttgaggcaagagcagacgggccaaacaagagcaggtctcccaccctccacggacttggctccctccagaggacacatttgccatgaggacaccccaagtgctaatcctctcacccaggagatctaagcagagtcagcattttagttgagggctggacacaggcaggggcatccccccagtgccgtctggccggcccagggcagcagtaaatcacacaggggaaggcacttcttggackcctgggctgctggggactccgtgggtgtcataaatcaggagctcaccccatttcacctgtaccttctcgtgagtatgtgcagggccctctgcagcccgggaagagaaaatggcggagaataaattcagccaacccaggcaccaatggctgctgtctctttgtcaacttattacctgagatt

SEQ ID NO: 252667 - DNA, 506 bp, Homo sapiens
gaggcaagactgtttcctcagcaattttgcccttatcagattatctcgtctgattctattaattttcttccatgaatctgctaacagtgatttgtgatttacttaccctgctaactgaagactgttaaaaggatttatctaacactggacctaagaacagtgtacgccttatcgttcagttactctgaagaactctttctcaaatcaatttagttggtttcatagtgaaatttagtggacactggttagttctgccccataaaatcagcccctaaacaaagagtccagacaccatacctgatgcatcccattctattcagattatggatgtctgattccaacawgatatatttgagttgctataactcacaatcggggaaaatatattcctttaagcttttaatctttgtaatttggacatgaacaggggttttgtttttcatttttgcatgaagtcattatgtatgtactgacgtgaaactataattgtgtttctgatgttactg

SEQ ID NO: 252668 - DNA, 570 bp, Homo sapiens
aaggaaagcaagggaattctgctaggttgcataaatattgacataatcttcactctttcttccccaaactggtaatagacatagtttattccacccaacaaaatgctcttataagaccaaaactacccttattaacaacttctctgcagtcacgatgaaaagaaacactacttgtctgaaaaataccgacagcgctgcccttttcagattagggtgtgcctacgaatcttttgggaagtcttccattaaggattcctgggtttgctgaaactgaagtctactaggatcagagaaattaacacaggtctaatatggygcaaggaacgagtgagagacacctgaggttataaatagcaaagcatgctgcggggtggggaagaccattctgaagtgcaatgttcaagacgctggcttaatatatgactaagtgtcagaagtcaggttttctgagaattactttccagataaacaactttatagcactgcacttaatcttacttactagagacatctcatttatcactgaattacaagtaactttaatcctattgatattgccataaagcccgt

SEQ ID NO: 252669 - DNA, 606 bp, Homo sapiens
ttcccccgattgccctgctgagtctcactcttctcttttggaaaatgggtcaatggagctatggtcagaggtcttccatgggtctcacgaaatcagtgaagtgatcagttcatcccagagccagcacttgaactaagagagrtgcatagacgattttgaggtgttagaatggctcattttaatggtgttgatggtgtttttaaaaacattctgcagagaaaagagaataatgtatttagttatcaagtcacaaggatggaggtattcccaaattatttgcacagacttctgcagataccaataaaatatttatttatttgtcatcatcagacacttatttactgtgtgattggggctaaagtagaaacaggactgagggaaaatggtgctggctggaattaaccaagatacttgatcgcacactgtcagactcattgattctcctctaaagcatagtattaaaccacacaaaagtgggcctgctccaaaggcactcttcactctgccttgtaagacaattacgttttaaatttctcatctcctcttggacgctaaactctgtgagcgtgaagttcacgcctcatttatttttgtgtccaacacagc

SEQ ID NO: 252670 - DNA, 606 bp, Homo sapiens
ttcccccgattgccctgctgagtctcactcttctcttttggaaaatgggtcaatggagctatggtcagaggtcttccatgggtctcacgaaatcagtgaagtgatcagttcatcccagagccagcacttgaactaagagaggtgcatagacgattttgaggtgttagaatggctcattttaayggtgttgatggtgtttttaaaaacattctgcagagaaaagagaataatgtatttagttatcaagtcacaaggatggaggtattcccaaattatttgcacagacttctgcagataccaataaaatatttatttatttgtcatcatcagacacttatttactgtgtgattggggctaaagtagaaacaggactgagggaaaatggtgctggctggaattaaccaagatacttgatcgcacactgtcagactcattgattctcctctaaagcatagtattaaaccacacaaaagtgggcctgctccaaaggcactcttcactctgccttgtaagacaattacgttttaaatttctcatctcctcttggacgctaaactctgtgagcgtgaagttcacgcctcatttatttttgtgtccaacacagc

SEQ ID NO: 252671 - DNA, 645 bp, Homo sapiens
cactctctccaattgtgagatacttcagctgtgatggtctcctgttggtttgctcaattcagtgmtcagtttccaggacaggtgtcacattctgaaatgtgaaggtgcatgagagaagctggtgtgcttcccctgaaccgttttcttggtggctgcctcagacattcactgcccttccctgaagcacccatcaggccttggcttaaatgtcacttccctcaggagtccttctcttagtgcccagtgaagttttgagccatggatttaaggacctttagcacccacatgtctccttcataatgctcaacttattgggatgcatctgtgtttctcatcttatatctttgcccatcagagagcactcagcatacagtaggcacttaacacatatgagttgaataaatgaaaaattgcacatgaactttgtctttggaatcataactagcattactggaggttaatcatgtttaggtatgacacaggtcatcccacttaatctttgcaacactctgagggttggctgctattagtatctctattgagcagaggaggaagctgagtctttagggctgtaacatgcccaaggccacgtaagtagtaaacggcagggctgaagtacaaattgtagactagaacaaatgccca

SEQ ID NO: 252672 - DNA, 645 bp, Homo sapiens
cactctctccaattgtgagatacttcagctgtgatggtctcctgttggtttgctcaattcagtgctcagtttccaggacaggtgtcacattctgaaatgtgaaggtgcatgagagaagctggtgtgcttcccctgaaccrttttcttggtggctgcctcagacattcactgcccttccctgaagcacccatcaggccttggcttaaatgtcacttccctcaggagtccttctcttagtgcccagtgaagttttgagccatggatttaaggacctttagcacccacatgtctccttcataatgctcaacttattgggatgcatctgtgtttctcatcttatatctttgcccatcagagagcactcagcatacagtaggcacttaacacatatgagttgaataaatgaaaaattgcacatgaactttgtctttggaatcataactagcattactggaggttaatcatgtttaggtatgacacaggtcatcccacttaatctttgcaacactctgagggttggctgctattagtatctctattgagcagaggaggaagctgagtctttagggctgtaacatgcccaaggccacgtaagtagtaaacggcagggctgaagtacaaattgtagactagaacaaatgccca

SEQ ID NO: 252673 - DNA, 645 bp, Homo sapiens
cactctctccaattgtgagatacttcagctgtgatggtctcctgttggtttgctcaattcagtgctcagtttccaggacaggtgtcacattctgaaatgtgaaggtgcatgagagaagctggtgtgcttcccctgaaccgttttcttggtggctgcctcagacattcactgcccttccctgaagcacccatcaggccttggcttaaatgtcacttccctcaggagtccttctcttagtgcccartgaagttttgagccatggatttaaggacctttagcacccacatgtctccttcataatgctcaacttattgggatgcatctgtgtttctcatcttatatctttgcccatcagagagcactcagcatacagtaggcacttaacacatatgagttgaataaatgaaaaattgcacatgaactttgtctttggaatcataactagcattactggaggttaatcatgtttaggtatgacacaggtcatcccacttaatctttgcaacactctgagggttggctgctattagtatctctattgagcagaggaggaagctgagtctttagggctgtaacatgcccaaggccacgtaagtagtaaacggcagggctgaagtacaaattgtagactagaacaaatgccca

SEQ ID NO: 252674 - DNA, 570 bp, Homo sapiens
tctgcagggttattattgtgggttcaggcaacaatggccagggaccgtggaaagcagaaacccaatacaactctctttctacagtcaacatgctaaaccagatcatggcaaacctgtggactttcagggtatgccttgaggagggagcttgagctaagtggtaaaagctgggtaggaatctactgggtattcaaagggaaatgaagacatttcaaaaaagatggagtagcatgattaaaagcatgaggaagtagtggtatttgatattattgactggatgatataataagcttagagacagtggtatgctgacatctgcttgtaatatcttatacaatcagattgtcaaattttcaggaattttgcaagctgattattaaacagccattatttaaaattaaattatataaaattacaactaaatatattataaacaaatcatcactaaactaaactaaacaaactaaactaaactaaactaaacwaataaaacaaactaaacatcactaaactaaacgaaatcatcacttcctagtgattttactgtattttattgtttatgcccttgca

SEQ ID NO: 252675 - DNA, 570 bp, Homo sapiens
tctgcagggttattattgtgggttcaggcaacaatggccagggaccgtggaaagcagaaacccaatacaactctctttctacagtcaacatgctaaaccagatcatggcaaacctgtggactttcagggtatgccttgaggagggagcttgagctaagtggtaaaagctgggtaggaatctactgggtattcaaagggaaatgaagacatttcaaaaaagatggagtagcatgattaaaagcatgaggaagtagtggtatttgatattattgactggatgatataataagcttagagacagtggtatgctgacatctgcttgtaatatcttatacaatcagattgtcaaattttcaggaattttgcaagctgattattaaacagccattatttaaaattaaattatataaaattacaactaaatatattataaacaaatcatcactaaactaaactaaacaaactaaactaaactaaactaaacaaayaaaacaaactaaacatcactaaactaaacgaaatcatcacttcctagtgattttactgtattttattgtttatgcccttgca

SEQ ID NO: 252676 - DNA, 614 bp, Homo sapiens
ttcttcaccagactgaactcactcacatttctgggctgtaggctcagaggaagccagattccagcctgccctgcagtggagcactttgtgtgtatcagaaagtagtgagagrtgccagggctctgatggtagaaacaggaaaaatcacgcaggatcagtttccaccccagagagaggtagacagagaggccatgagaaactgaggggtcacacgtgatgcccatacaattttcaaacttaagggtacaaaaatcttatttgtgggagcttccccgaaggtcgtttttctgggctcatcttgagaattctgggcctttagaactggggttggagtcagggattgtcttttctcatgagcatcctgggagactgagtaatggggtcactgggccgcatcagtagagacaaaggggccctcacttgtttgcaaatgtcctcatccacctgtgttgtcttcctgtcttctgtcttgttacatgctcttttctaaaatcccatttagattcctagaattctgatcaagtactgtccgtttgcagcttttcctatggctttcaaattctcttgagtcttttcctctgtctaagcatctctgatgtagcccacgtttttct

SEQ ID NO: 252677 - DNA, 614 bp, Homo sapiens
ttcttcaccagactgaactcactcacatttctgggctgtaggctcagaggaagccagattccagcctgccctgcagtggagcactttgtgtgtatcagaaagtagtgagaggtgccagggctctgatggtagaaacaggaaaaatcacgcagratcagtttccaccccagagagaggtagacagagaggccatgagaaactgaggggtcacacgtgatgcccatacaattttcaaacttaagggtacaaaaatcttatttgtgggagcttccccgaaggtcgtttttctgggctcatcttgagaattctgggcctttagaactggggttggagtcagggattgtcttttctcatgagcatcctgggagactgagtaatggggtcactgggccgcatcagtagagacaaaggggccctcacttgtttgcaaatgtcctcatccacctgtgttgtcttcctgtcttctgtcttgttacatgctcttttctaaaatcccatttagattcctagaattctgatcaagtactgtccgtttgcagcttttcctatggctttcaaattctcttgagtcttttcctctgtctaagcatctctgatgtagcccacgtttttct

SEQ ID NO: 252678 - DNA, 614 bp, Homo sapiens
ttcttcaccagactgaactcactcacatttctgggctgtaggctcagaggaagccagattccagcctgccctgcagtggagcactttgtgtgtatcagaaagtagtgagaggtgccagggctctgatggtagaaacaggaaaaatcacgcaggatcagtttccaccccagagagaggtagacagagaggccatgagaaactgaggggtcacacgtgatgcccatacaattttcaaacttaagggtacaaaaatcttatttgtgggagcttccccgaaggtcrtttttctgggctcatcttgagaattctgggcctttagaactggggttggagtcagggattgtcttttctcatgagcatcctgggagactgagtaatggggtcactgggccgcatcagtagagacaaaggggccctcacttgtttgcaaatgtcctcatccacctgtgttgtcttcctgtcttctgtcttgttacatgctcttttctaaaatcccatttagattcctagaattctgatcaagtactgtccgtttgcagcttttcctatggctttcaaattctcttgagtcttttcctctgtctaagcatctctgatgtagcccacgtttttct

SEQ ID NO: 252679 - DNA, 629 bp, Homo sapiens
gtactatttagggaataatgacagggaaaaaaagttctctatgtgtttagtacagacacaatgatcctttttaaaatyttttctcaatattttcttttatattttttcaagacggagtctagcaccatggcccaggctggagtgcagtggtgtgatctgggctcactgcaacctctgcctcccaagttcaagcgattctcctgcctcagcctaccaagtagctgagactacaggtgtgcaccaccatgccttgctatttttgtacttttagtagagatggggtttcaccatattagccaggctggtcttgaactcctgacctcaagtgatctgcccacctcggcctccccaagtgctgggattacaggcatgagccaccatgcccagccctaatttttctcaatattttcaattcccatttggttggatccatgggtggggagcccacaaatatggaaggctgactgcatgtgccttttgttgttgctgttgttgactggcagaaattggcagtgaattccatgttctaaaatttcatggactctgcctgggccaaagttttatgaaaagtaggttggctaccagttttggtaagtaccgccttatatctatatcatgttgagtatagc

SEQ ID NO: 252680 - DNA, 629 bp, Homo sapiens
gtactatttagggaataatgacagggaaaaaaagttctctatgtgtttagtacagacacaatgatcctttttaaaatcttttctcaatattttcttttatattttttcaagacggagtctagcaccatggcccaggctggagtgcartggtgtgatctgggctcactgcaacctctgcctcccaagttcaagcgattctcctgcctcagcctaccaagtagctgagactacaggtgtgcaccaccatgccttgctatttttgtacttttagtagagatggggtttcaccatattagccaggctggtcttgaactcctgacctcaagtgatctgcccacctcggcctccccaagtgctgggattacaggcatgagccaccatgcccagccctaatttttctcaatattttcaattcccatttggttggatccatgggtggggagcccacaaatatggaaggctgactgcatgtgccttttgttgttgctgttgttgactggcagaaattggcagtgaattccatgttctaaaatttcatggactctgcctgggccaaagttttatgaaaagtaggttggctaccagttttggtaagtaccgccttatatctatatcatgttgagtatagc

SEQ ID NO: 252681 - DNA, 629 bp, Homo sapiens
gtactatttagggaataatgacagggaaaaaaagttctctatgtgtttagtacagacacaatgatcctttttaaaatcttttctcaatattttcttttatattttttcaagacggagtctagcaccatggcccaggctggagtgcagtggtgtgatctgggctcactgcaacctctgcctcccaagttcaagcgattctcctgcctcagcctaccaagtagctgagactacaggtgtgcaccaccatgccttgctatttttgtacttttagtagagatggggtttcaccatattagccaggctggtcttgaactcctgacctcaagtgatctgcccacctcggcctccccaagtgctgggattacaggcatgagccaccatgcccagccctaatttttctcaatattttcaattcccatttggttggatccatgggtggggagcccacaaatatggaaggctgactgcatgtgccttttgttgttgctgttgttgactggcagaaattkgcagtgaattccatgttctaaaatttcatggactctgcctgggccaaagttttatgaaaagtaggttggctaccagttttggtaagtaccgccttatatctatatcatgttgagtatagc

SEQ ID NO: 252682 - DNA, 629 bp, Homo sapiens
gtactatttagggaataatgacagggaaaaaaagttctctatgtgtttagtacagacacaatgatcctttttaaaatcttttctcaatattttcttttatattttttcaagacggagtctagcaccatggcccaggctggagtgcagtggtgtgatctgggctcactgcaacctctgcctcccaagttcaagcgattctcctgcctcagcctaccaagtagctgagactacaggtgtgcaccaccatgccttgctatttttgtacttttagtagagatggggtttcaccatattagccaggctggtcttgaactcctgacctcaagtgatctgcccacctcggcctccccaagtgctgggattacaggcatgagccaccatgcccagccctaatttttctcaatattttcaattcccatttggttggatccatgggtggggagcccacaaatatggaaggctgactgcatgtgccttttgttgttgctgttgttgactggcagaaattggcagtgaattccatgttctaaaatttcatggactctgcctgggccaaagttttatgaaaagtaggttgrctaccagttttggtaagtaccgccttatatctatatcatgttgagtatagc

SEQ ID NO: 252683 - DNA, 564 bp, Homo sapiens
ggaccatctggtggcaagaaaacaagcttwgctctcccactgtttctacattatggtgagttgtataattaattcattatatattataatttaataataataaaatgcacaataatgtaatgtgtttgaatcatctggaaaacatccccaccccactcccagtccatggaaaaattgtcttttatgaaactagtccctggtgttagaaaggatggggagtgctgctctagagaacttaaagattcccagatttttagagagatgagatgcagaggatagagattatctcatcttaactccactgcctttcttttatttaatcctatgaagttaggaagacctggactttacccctttgaaccacctaggcaagggtatgcttatacaagctctagcaacagaattaaaatgtctcatgttagtccctgattttcatctagaaagttaagagtacatactttaacaccattgacctttcaaatagctgataaggccggatatttaggaaattagagcttggggaatggcgacattacccagaaacttactggcaggcaagtctag

SEQ ID NO: 252684 - DNA, 564 bp, Homo sapiens
ggaccatctggtggcaagaaaacaagctttgctctcccactgtttctacattatggtgagttgtataattaattcattatatattataatttaataataataaaatgcacaataatgtaatgtgtttgaatcatctggaaaacatccccaccccactcccagtccatggaaaaattgtcttttatgaaactagtccctggtgttagaaaggatggggagtgctgctctagagaacttaaagattcccagatttttagagagatgagatgcagaggatagagrttatctcatcttaactccactgcctttcttttatttaatcctatgaagttaggaagacctggactttacccctttgaaccacctaggcaagggtatgcttatacaagctctagcaacagaattaaaatgtctcatgttagtccctgattttcatctagaaagttaagagtacatactttaacaccattgacctttcaaatagctgataaggccggatatttaggaaattagagcttggggaatggcgacattacccagaaacttactggcaggcaagtctag

SEQ ID NO: 252685 - DNA, 642 bp, Homo sapiens
ttgttctgtctctttgatagaaaaattactctcctgacacttgataaacaaaccttgcatcatcctctattgaaaattaagttaaaataacatttttttttttttgagatggagtttcactcttgttgcccaggctggagcacagtagtgtagtctcggatcactgcaacctccgcctcccaggttcaagcgattctcctgcctcagccttctgagtagctgggattacaggtgtgcaccaccacatctggctaatttttgtatttttagtagagatggggtttcaccacattggccaggctggttttgagctcctgacctgaagtaatccactcgcctcrgcctcccaaagtactgggattacaggcgtgagccaccgcgcccagcctaaaataatatttattgcatgctttgtatccatacttccaactatgaattcagacatttattgaatgtcaaacacctgctgacacgtatccataaattgttccttttaactcttccaaaacaccctctgagatattattaagattggcattgttgttgttattattagtgcccctattaaaaatattttgaaataattatagattcacaggaagttactaaaatagtatgtagatttcagaatatgcttcaccc

SEQ ID NO: 252686 - DNA, 284 bp, Homo sapiens
gctgcaagggctcatgctgtaggtgaggagtgaggctgcacarggagctcactggcagcttggagagaactgggtgtcaaagttgtcctgcagaggtctactgtcagtgtgttaggctctgaagagaacaggctgcaacacatgaaaacaggaaggagacacaggggcgagtcagctctactgaaagtctgtagctgtgactttctggtttgccactccaatttgagtactaattaagtggtagtcacatcttcaacataaaaaccaaaataatgacatcctcg

SEQ ID NO: 252687 - DNA, 284 bp, Homo sapiens
gctgcaagggctcatgctgtaggtgaggagtgaggctgcacaaggagctcactggcagcttggagagaactgggtgtcaaagttgtcctgcagaggtctactgtcagtgtgtyaggctctgaagagaacaggctgcaacacatgaaaacaggaaggagacacaggggcgagtcagctctactgaaagtctgtagctgtgactttctggtttgccactccaatttgagtactaattaagtggtagtcacatcttcaacataaaaaccaaaataatgacatcctcg

SEQ ID NO: 252688 - DNA, 284 bp, Homo sapiens
gctgcaagggctcatgctgtaggtgaggagtgaggctgcacaaggagctcactggcagcttggagagaactgggtgtcaaagttgtcctgcagaggtctactgtcagtgtgttaggctctgaagagaacaggctgcaacacatgaaaacaggaaggagacacaggggcgagtcagctcyactgaaagtctgtagctgtgactttctggtttgccactccaatttgagtactaattaagtggtagtcacatcttcaacataaaaaccaaaataatgacatcctcg

SEQ ID NO: 252689 - DNA, 521 bp, Homo sapiens
agaaatcccctggtgcagatggtagaggtcaggcacagagcagagtgaaaacagagcacgtctggagaggcaaatagaacatgttcattcctgccacactgatccattccaacatggagtccactttgctcaggatcaaaggacattttcccattagcatcagaagtggtctcatgatccttctcagcaagccctccaggcagagtagagtcattggttaaaattggaccgtaagttgggccatatttcccatccttgcccawcacagtcttgaaccttctttcatattcttttttcgttggtttgattgtcttgattttagtaatgccttatcactttttgaaaggtgattttaacttgtgtttgctgaaaccaccatattgataatgctttgtggatataaaatatccagagagacagaaacattgtcatgaaaaaaaaagcactggactttgttttagaaatctccgtatcttactaacgagattggctgatcttggacaagtcatgtgcttcatggg

SEQ ID NO: 252690 - DNA, 521 bp, Homo sapiens
agaaatcccctggtgcagatggtagaggtcaggcacagagcagagtgaaaacagagcacgtctggagaggcaaatagaacatgttcattcctgccacactgatccattccaacatggagtccactttgctcaggatcaaaggacattttcccattagcatcagaagtggtctcatgatccttctcagcaagccctccaggcagagtagagtcattggttaaaattggaccgtaagttgggccatatttcccatccttgcccaacacagtcttgaaccttctttcatattcttttttcgttggtttgattgtcttgattttagtaatgccttatcactttttgaaasgtgattttaacttgtgtttgctgaaaccaccatattgataatgctttgtggatataaaatatccagagagacagaaacattgtcatgaaaaaaaaagcactggactttgttttagaaatctccgtatcttactaacgagattggctgatcttggacaagtcatgtgcttcatggg

SEQ ID NO: 252691 - DNA, 612 bp, Homo sapiens
gaaatcactggtcttggagtcagagaggttggtgcatccatcccccatctgtgctgctaactttcttattgactctataaaccagtaaatttctctggatctcatcaaatttttctgaggagagaaacgaaggaaggaaggcagggagggagggagggaagcattgatttacaccagacaacccactaaaagttttcattttataataactgtaacaccatcaaccattctttgaaagcacatctgttggcttccagagtttcttcatcactcttagacgtggaaggtgttaacaagctcaaaaagacacacaaatatcaagcacctactctgtgactggcatcagatctatatttaatacactttgggtattttctgaaacaagatgattttccataaccaattcccaaamcaagaacatgcatgcatctgtgtccggcagagtggaagtaatgaacatgaatgccacctttgttaaattctgaaatggacctaaaggtgcccgaattctatataaagtcatattgctaagctttgattcatacctaatttcctcaaatgggaagggtggaggattagttgaatgaagggctgctgtagaaagagcaacac

SEQ ID NO: 252692 - DNA, 615 bp, Homo sapiens
ctgttttacctgggctcatttttgcttgtatgttcagctacaagatgggtaggtggctttgccgatcctgtctgagttctttcatgtgtttgggagttggctagctcaagattctagaatggtctttgctggaaaaactgagttttctttctccagtaggctactctggacttgttctcatggtggttggacaaagttctgggggagacagagggtggggagagagagagagagagattgaaagagacaaaaggagagagagtgagtsagtgagagagaggagatggagacagagagaaagagagattcaaaaccttttgaggcttgggctcagatctagtataacaacatctttgccacaaaacaagtccaaaatcagaaggcagttacaaagttgcagcaatgtccacagctacagggaagtcaattattttggccaaaaataccacaaaattcaaaatgcttagcataaagggtgatcatattggtaactgcttaataaaaagttttctgtcatgacagatggatattgaacaatagaattatgctgaggattaaaagctcatagagacaaccctaacgaaagtaacagcatctacgatgaaataggttatc

SEQ ID NO: 252693 - DNA, 594 bp, Homo sapiens
gccctctgccagcagaagcaataacaccawtgttaacagtaagtccctttgtcaactctttggggagagttattatgggggggtgctgttaacatatttcttcctctccattgtttctgacaatggcaataagcccgtggataatattttgttagcataacatgcacagccgaaccggcccttgctcttttgcaacccacaataaaacaatctcatccaatatcagtatcagagaaggctgagtctgcacagtcatcgctgagagttaaataccagtatttacctagctagcatttgttttaaaagaatgtttggaggagcagggggtaatttaataacaacagtttttttataattataattctaagaacaaagccagagagttcttgtttccatttgtgagaagaggggccacgcaacttgcctataatcccttagttattgagtggcagagctgggattaacaccaagtagaacacaattcataacatacaatatacttaagaagcctctatgggcactaataataatgataataataatagtaatagcttactattattattatttacacttaacaaatgttaggtaaat

SEQ ID NO: 252694 - DNA, 618 bp, Homo sapiens
tacttatgggcagttgattaggtagattttataaattaaatacctgagaactcttgcatgggcagtagaaggcaccttgaggaatttcctagcctctgcatttagttactttggcagcacatagtcatggagtatctaggaatgtgctcggtcatgggtgggcactggggtgagaagaggagggatgggtagatgaatgctagggtccagaggcagggcacagaagctcctgcatctcagcctgagcattcacagggccctgaagatcagagcagccatcacactcctcctcataaccctttggtctgcataggagccagcatggaattttgagtgagacccaccttgactgtcgccccattacacaccatcagtgtggcctctgtcctaaaccactgagcctcgctaatctccacctaataaaatctatatgtgggagagtgggttgaggagggcagtggcccaatcrcaggtgcttggtaagtgttaattagtgtaactatagaaaatgggtttttctgtgagactgcagagcacataaaaaggactggactctacaagctacagaaaagtctcttgatatgacacaagaagactgttctcaagagtcacacttgt

SEQ ID NO: 252695 - DNA, 618 bp, Homo sapiens
tacttatgggcagttgattaggtagattttataaattaaatacctgagaactcttgcatgggcagtagaaggcaccttgaggaatttcctagcctctgcatttagttactttggcagcacatagtcatggagtatctaggaatgtgctcggtcatgggtgggcactggggtgagaagaggagggatgggtagatgaatgctagggtccagaggcagggcacagaagctcctgcatctcagcctgagcattcacagggccctgaagatcagagcagccatcacactcctcctcataaccctttggtctgcataggagccagcatggaattttgagtgagacccaccttgactgtcgccccattacacaccatcagtgtggcctctgtcctaaaccactgagcctcgctaatctccacctaataaaatctatatgtgggagagtgggttgaggagggcagtggcccaatcgcaggtgcttggtaagtgttaattagtgtaactatagaaaatgggtttttctrtgagactgcagagcacataaaaaggactggactctacaagctacagaaaagtctcttgatatgacacaagaagactgttctcaagagtcacacttgt

SEQ ID NO: 252696 - DNA, 458 bp, Homo sapiens
actctacaagctacagaaaagtctcttgatatgacacaagaagactgttctcaagagtcacacttgtgtgagagtggtattggctgcttttaagactatggagacttctagacctgcaaatattcaagcagaaattgaattccaagccactcagtgggcttggaaggataggaggcttatcagcattttacaaatgttctttatatgtaagtcaagaaaacttttgtcctaaggacttggcttgcaatatcctaatatacaaaaagagaaaaacacagtgcttctcgtcaatggggaagggtgccagacccccgtgtgtccctcaacatttccccyaccaccgctacctctgcagccttcgtatctcctcacttcagccataatggacattctagaaaacctctggatccgcgatctgaagttttcacttcagattccaagacctggaattcttggat

SEQ ID NO: 252697 - DNA, 542 bp, Homo sapiens
aggttgaggatgaatacgagattccaaaaaatgcagtccctggggagggacaggagatgggatgagagagagaatcatgaagagatatagaatcatgaagagagatagaatcatgctatcrctcctgaagggcagaagaaaaatgtgaagtttgacattgggctttaggtgtttcagagctactgaaaacctttcccctttctcccccagcacactatacattgaaaggctttagggaagggaagtcagggcaaattcatattccacaattggcagtttttgggacagtgttagaggtaactgtcagggcaaatgtaaaagggctggatacaaaggttatattttacttggagatttttgtactctttagtcgagagaaagggcagctaatagattgttgtaaatgggagtaaagaagaagaaaaaaggcaagagaaaactaagggataaatcccacaatgttgtgtgacttggatgtagaaggagaaggaaaaagaacatcggaccagattctggttttgggtgtctgtgtgggtggacag

SEQ ID NO: 252698 - DNA, 604 bp, Homo sapiens
agcattaactggccctttgggaagcccacctagtcaaaggctaaaagctttattgtgcctggaggacaatctgcacttccgctccttcgggactcacctactctcgtggtaattccatgccaaaccacaacctcctaggaaatggatctgactctgagtcagagatgcgttccaagtcctagggctattggccccgccaacttatatcctcaccccttgactgccatttctctcttttgccaatactgacactaattgtagagttccccaactccacgctgccacttgcttatttcgttattattgctcaacctgtgtgactattttggaggacagagattcctaggtctctgtatctggatctttctctaagctggcaagtaacctgctttatctaaccttcctactgtcagtgacccaagcagyagaagtcacctccctaattgtcttctatgagttggaaaccaaataaaaagatttattagaaatatgtatagagttagagcctgtgtgtactgactgaagttctaaaggctcctcccatagtgtgtatgtgtgtgcatatgtgtgtgcgtgtgtgtgtgtgcatctgtgcgtgtgttta

SEQ ID NO: 252699 - DNA, 471 bp, Homo sapiens
caccaacaggcctggcctgtgctgaccctgcaacataaaaagtcaggctgctaacaggaaacacagggcaatttctgacttgcttttaagtccactgtcatccgatgtcgggaatgatactcattaccatctcagaaacagagctaccaggttgcaactctttmtccctcctgctgatacaggaggtagcatgaaagtctttcttctctgggattgatgactgcaatttgtctttctggggcttccactgccgcttggacaggcagcagctggacctgagaagccctcctgatgctttcaagtcagcagattgcttctgggctggccacgcttcagtgccttcccgttaaataccgtattgattttaggactttcttacttccatgcagctcaggacccgtagttggctgggataggaaagtggggaggaaaggtataatggggagagttgctcagcaggtttgcacacac

SEQ ID NO: 252700 - DNA, 471 bp, Homo sapiens
caccaacaggcctggcctgtgctgaccctgcaacataaaaagtcaggctgctaacaggaaacacagggcaatttctgacttgcttttaagtccactgtcatccgatgtcgggaatgatactcattaccatctcagaaacagagctaccaggttgcaactctttatccctcctgctgatacaggaggtagcatgaaagtctttcttctctgggattgatgactgcaatttgtctttctggggcttccactgcygcttggacaggcagcagctggacctgagaagccctcctgatgctttcaagtcagcagattgcttctgggctggccacgcttcagtgccttcccgttaaataccgtattgattttaggactttcttacttccatgcagctcaggacccgtagttggctgggataggaaagtggggaggaaaggtataatggggagagttgctcagcaggtttgcacacac

SEQ ID NO: 252701 - DNA, 523 bp, Homo sapiens
ggatatgagggttaaatttacggaaaacacacaaagaagttgcattaagaaggaacaacatgggattcaatttataggaaacaaaagaataggttgcaccaagaaggaacaaggcatcaaccagatgaaactcccttctcctctgcaggacaccactgcctccctgctatttcatcagctcccacctagaggactgaagtcatcttcatgcatccctccctatggccctgtatttcccctcctacctctatttcttcaggcaattgccaggcatccttttaaaaaattgtagtaaaatacatgtactataaaatgtaccatttcaaccattttaaagtgtaccrttcagtgacattaaatatattctaaacattttgtggccatcactactaatttcataacttagaactctaattcatcaccccgaaaaggaagcctcgcacccattaagcagttactccccatacttccccttccctgttcctgaaaaccactaatctgctttctgtctctgtagatttgc

SEQ ID NO: 252702 - DNA, 523 bp, Homo sapiens
ggatatgagggttaaatttacggaaaacacacaaagaagttgcattaagaaggaacaacatgggattcaatttataggaaacaaaagaataggttgcaccaagaaggaacaaggcatcaaccagatgaaactcccttctcctctgcaggacaccactgcctccctgctatttcatcagctcccacctagaggactgaagtcatcttcatgcatccctccctatggccctgtatttcccctcctacctctatttcttcaggcaattgccaggcatccttttaaaaaattgtagtaaaatacatgtactataaaatgtaccatttcaaccattttaaagtgtaccgttcagtgacattaaatatattctaaacattttgtggccatcactactaatttcataacttagarctctaattcatcaccccgaaaaggaagcctcgcacccattaagcagttactccccatacttccccttccctgttcctgaaaaccactaatctgctttctgtctctgtagatttgc

SEQ ID NO: 252703 - DNA, 602 bp, Homo sapiens
cagtatgtggtcttttgagtctgactttttcacttagcataatgtgtttagtgttcatccatagtgtagcatgtaaaggatatggagaaattagaacccccatacatgatgataggaatgtaaaatggttcagtcacatgtgggaatgtttggaaattccttaataagtcaaacatctaattaccacatgaccccgcaattctactattagttatgtactcaaaagaattgaatcagatagcaaaacaagtgtacaccaatgttcatggcagcactattcatcatagctaaaaggtggaaacaacccacatatctatcaattgatgaatggatgaaaaaaatgtagcatatccagggattcctttgaacaaatcatatcactttcctgctcaaactcttcagtggctttcccttccattttatgttaaataggattggaccatccatggctacaaggtctcaggtcaggcagcccactcaacctttccaacgtgmtctcacactattcctcccttttctcattatcctctcgccttgatactcaatttcttaaaactttcaaaccctgtcctgactcagggtctttggcgatggtgtgtcct

SEQ ID NO: 252704 - DNA, 533 bp, Homo sapiens
tgacaataatttttaaaactttagaagatgaatcaaaaaaacaagctaaaccctaacataatctcaaagttacattaagaaaagcagattctctaaagcatggatatgggaggtaatgaccgcactctactcttcttaggataagcaacaatcatcagtagtattacttttaatattaaccaacttattatcatcatttaccattctttttagaatcaggcactctgccaagcatttcagatgtattgattcctaatctgatcaatctgcacaacctcagtatgagatgaatgtttttatcctcattttccaaataaagaaaacagagcttggttggtatttccaaagccacatgactgctaaatacagaagtacggggttcagagttggttaactttgaggctcacttacatcgtcaatgacctaagctctttccacctttccrcttcaccatccccagtgggttagcctgtcccataatggctgctgcaatcccaggcattaaaagcagagggtgatgtcttgaggcagaa

SEQ ID NO: 252705 - DNA, 592 bp, Homo sapiens
actcttccggcttccttgggacctcttgccctgattaatggtggtctggtaaatgcatttgacaccagtcataggaaaacttgtttttttctggtcagtttaggctttctgaaggggtacacactgtacagaaattaagaacacttatacctaagaatgtatttgtgtgcgtgtttgtgtgtgtattgaaatgggcctttctatgagcccactgtttcattcattcattgaatgaagagattacttctcccaggaaagtgttkcccaaacttatctctgggaaacattgtttctgtggtctgctaataaattagattagaacaaaataaaagaaaagaacattccttagttaaataatttggggaatttctggaataaacaaagttaagcaagttttttaacatagaatttctgagtattttagaggctaatgtacgtcgtgactgtgaaaaagataaatatgatatattataattaacatactctttggcaacagggtgttttcttccccaagaacctcccagagaatgaatgtactgtaccacaattagaggaaaagaacttccatagaggaaaagtaagtgtaccctag

SEQ ID NO: 252706 - DNA, 589 bp, Homo sapiens
cttctactccacacccagaatgcctgtaaccacaccatgccaaaccttcagacaggccctgggccctgatcttccttctctaaatagcttctcccagtgcactctattggaatattctgctctatttttctgcatgggcctgtcatgacccrtaattatgttatgtatttgacttctttttttatagtgactatgttccccgaggaatgggagctccatgagggcaggggcctcccagtctggccacctctgaatgcagcccacagaacagtgctttgtatgtggggcactgagatgatctctgtggaagaagtgaggagtgatgctctgggccctgagagggaagcagagagaccccacacgcagacccagccccgaccaaacactcaggccaagcaggaggatatagcaagtgctggggaagctgtagcacaggtcagaaatgttaaaagaaagtggcaagaagttgtaagaaaggagtggggactctgaagaaaaatgaagaggaagggacagatgtgaggacactacagggaggacccaggaagaccaggccagcagcagtgctatgtgtgctggggatgaaaga

SEQ ID NO: 252707 - DNA, 343 bp, Homo sapiens
aataaataaatgcatgaatgaataaataagtgaatcratgaataaataaatgaatggacaacaaacaattgcttagtgtagtggctctctaccaggggagattttgccccactgtgtacttggcaatgttgtaaaacgttttagtttgtcagaactgggagaggtggtggtagtgctactggtttctagtggatagaggtcatggatgctgctaaacttcctacagtgcaccaaacagtccttcctgccatcctcccagcaaggaattatctcgcccaaatcatgctgaggttataaaattctgtgtatttgttccctagagctgcgtaacaaaacaccagaa

SEQ ID NO: 252708 - DNA, 516 bp, Homo sapiens
ataatgcaagccaattttggtaatgaaaaacagaatactcacatacgtgattgagggagacagatccaagctgtggaaaagggatttccttgtctgagatgatgacagatactttattatcttccttattcttacctgtcttttcaaaagtttcttccagaaactatcttaactttataataaggataagaagataaaagtcattaaaaagaagaatttcatctgtcactagaccactgctgttcattttgatttgactaacaacacaatgtgaagggctttttaacaagtcttaataacccaggctttttagtgagaagattccctctgatgtttggacaccccttgtctttgtagtcacaggttccttggagatcaaggcgccctttgctgacttgagcattccctggggagatgaaagggtgtctggccgcggtcagccgaggagcagtggtgcctgagaagtgcatttcctcatgcgaggcaggacktggcccaggagttggacttagctgg

SEQ ID NO: 252709 - DNA, 570 bp, Homo sapiens
caaaacagtccatatggaaagttctcctgggagttgttctgcctcgagaccacccactggcttgttcttgcatgtaaaatacacatgtgactctgagaacacacggccagacatgtgtaatttacaygcctggatgatgaaacatccgtgttttattaaccccataccttggtccttccaaggtatggctttggtttcccttaactcctgctttgttgcctttacaaagcaacaaattcaaacacaccttgagggaatatttaagaggttctaagtcagggaaccaaaaaaaggtgtggtcactagactccagtttccttaggcgaagaactgggataatgctgttaccttatcaggcagttgtggggctttaggatcaggtttgtaatgcatcttgcatgtgtgcttataacacatccccatggcatggggattttaacagggatcataatggggatcgtggctatcaactttctggacccaggtaggactgaccagtcaaggagactcctggacagaatctcttcccctttggtcctaccagcaccactgctggtacccaccaaccag

SEQ ID NO: 252710 - DNA, 570 bp, Homo sapiens
caaaacagtccatatggaaagttctcctgggagttgttctgcctcgagaccacccactggcttgttcttgcatgtaaaatacacatgtgactctgagaacacacggccagacatgtgtaatttacacgcctggatgatgaaacatccgtgttttattaaccccataccttggtccttccaaggtatggctttggtttcccttaactcctgctttgttgcctttacaaagcaacaaattcaaacacaccttgagggaayatttaagaggttctaagtcagggaaccaaaaaaaggtgtggtcactagactccagtttccttaggcgaagaactgggataatgctgttaccttatcaggcagttgtggggctttaggatcaggtttgtaatgcatcttgcatgtgtgcttataacacatccccatggcatggggattttaacagggatcataatggggatcgtggctatcaactttctggacccaggtaggactgaccagtcaaggagactcctggacagaatctcttcccctttggtcctaccagcaccactgctggtacccaccaaccag

SEQ ID NO: 252711 - DNA, 551 bp, Homo sapiens
tgttctctggattctctgagcatcacagtaagctcatttgtaaaatggtaaagccaggctcacacagtcaaatcaggcaacagatctcagggggagacaccatggtagatacagtaaagactctgcaaaagtcaggggccatcgtacctattccatattcttcacttggtcagtaagaagggcatcaaatccatgccctggcccaggcccctaaagaagccacaatcttagcacatttccatcagaatgtgcttagtgcaaatggcttcctggtttgggtamaaatttagcaactgaatgtgatcttgtgtactcagcccttccccaaacatcgctcccttggaataaatgggaaacaacaaccatgatccataatcataaaagcacagggactgagaatgaataatggctctcctggatgagctaactttgttgttatttataagctcctgggccacattgttatggactaggaaatctgctttacctccttgctactgttccgtctggcctctcaatctgcacttgctggaaaaaaatagttattgtta

SEQ ID NO: 252712 - DNA, 526 bp, Homo sapiens
gctggtctctaaaggacagctcctgacattgcgcggtgaagcaaattgggagactagggtgactctatgatggtggcataagaaggagataaagttctcatagcattcattcttcaacttscagtacagattgctgtggggatgtgctacaggactgcctcaagcactaactatagcaggagtatgctgcttaactgtcctgatacccactccctcttcttctggtacctatgttataattccctcgggcatcaccccttcctcaccctcagtacaggtacagttcaggtgggtggggctgaccccactcctgatctagggatggtcatatggttcaggcctggccaatcagggctttccattcctatcatcatgcgatgaggacataacctaagtgagtccaccctgggagtgaaattcaattccaggacattgtcctttagttctttcagaacgcttagggaaaggaagttatctttctgttaaacttggaggtggttagggcatccatctggagctagtagtg

SEQ ID NO: 252713 - DNA, 526 bp, Homo sapiens
gctggtctctaaaggacagctcctgacattgcgcggtgaagcaaattgggagactagggtgactctatgatggtggcataagaaggagataaagttctcatagcattcattcttcaacttccagtacagattgctgtggggatgtgctacaggactgcctcaagcactaactatagcaggagtatgctgcttaactgtcctgatacccactccctcttcttctggtacctatkttataattccctcgggcatcaccccttcctcaccctcagtacaggtacagttcaggtgggtggggctgaccccactcctgatctagggatggtcatatggttcaggcctggccaatcagggctttccattcctatcatcatgcgatgaggacataacctaagtgagtccaccctgggagtgaaattcaattccaggacattgtcctttagttctttcagaacgcttagggaaaggaagttatctttctgttaaacttggaggtggttagggcatccatctggagctagtagtg

SEQ ID NO: 252714 - DNA, 550 bp, Homo sapiens
gacagtcatattcacatatgagtgcaataaaataaatcaaagcttagcagaggtatgtacaaattcttacggtagcacaagggaaggatacattggcataactctcgtagttcaacaaattttataaataattttagaaaatgaaccaatttctatctcctgaagtaaataaaactttgcacctataatgagaaatagactgattaacctagtagagaatcaattagactgttatgtagataactgcaaagtttgygatgaggtttcaaaagtctaaattttctggcaaacttaaggctgaccttaaaaatatttttagtactgaagtaatatccaattattgtaagcaacataaaaataaaacagtcatttcaaagaactctcctccacccttgcccaaccccacctgtgagaggtaaatattgatagttatctcctttttcctatacaagtggacacacacggaggtacattttaaatacccacatatttaatatacacatttatatacacacacatttcatcaaagtaatactgtttacatagcgac

SEQ ID NO: 252715 - DNA, 597 bp, Homo sapiens
cccctgacttcaacgctttcgttgattctgtaactcattccactgtatactcaagagctccttttaggtaccaaaaccagcctgaatgagtttcagttacttgcaagcaaaggaacttgtggtgaaaacaatgttgtatgttcactggatyctatttccttgggttccaggggcatagggctagactgtacagctcaggcgtccttgcagtcaaatggacttgtgtggctgattgcggtcagtggaacgtgagcagaagttatgtacttggtgtggttcttaaacctcccatgtaacctctcacactttctatttcctcaaaaggaagaaacctggatctccaaatgactatatagctcaaagcccctttggtgacctgctttagactgtgatgtgagcaagacataagccattttttaggtttaagggctgcttatgactgtgcttagcttaccttgtttaatatgaaggctatgtgtcccattttgctttattttgaatgcccatttactatctccctaagtggatgacaaagttttcaagggcaaggaccatgcctttggctgcaacacctagccagtagtcagcacacaaggt

SEQ ID NO: 252716 - DNA, 593 bp, Homo sapiens
caggttcactttcacttgtccagctgccctgtcactaggtgagtgaactcatcagtgagaagggggccccattatcaaggtcaaccccattctcaagatcaagttgtattctccctgggcctcacctgattctgtgtttctttggttcaaggctcagaggaaagacgaatgtaatcaactgcaactccaaacagcttttgagctgaattttgcaaaaggtgctgctctgccgggaagaagcagcttggctgccaaggactggagctttgatggcccctgacttcaacgctttcgttgattctgtaactcattccactgtatactcaagagctccttttaggtaccaaaaccagcctgaatgagtttcagttacttgcaagcaaaggaacttgtggtgaaaacaatgttgtatgttcactggatcctatttccttgggttccaggggcatagggctagactgtacagctcaggcgtccttgcagtcaaatggacttgtgtggctgattgcggtcagwggaacgtgagcagaagttatgtacttggtgtggttcttaaacctcccatgtaacctctcacactttctatttcctca

SEQ ID NO: 252717 - DNA, 567 bp, Homo sapiens
tttcagttacttgcaagcaaaggaacttgtggtgaaaacaatgttgtatgttcactggatcctatttccttgggttccaggggcatagggctagactgtacagctcaggcgtccttgcagtcaaatggacttgtgtggctgattgcggtcagtggaacgtgagcagaagttatgtacttggtgtggttcttaaacctcccatgtaacctctcacactttctatttcctcaaaaggaagaaacctggatctccaaatgactatatagctcaaagcccctttggtgacctgctttagactgtgatgtgagcaagacataagccattttttaggtttaagggctgcttatgactgtgcttagcttaccttgtttaatatgaaggctatgtgtcccattttgctttattttgaatgcccatttactatctccctaagtgsatgacaaagttttcaagggcaaggaccatgcctttggctgcaacacctagccagtagtcagcacacaaggtgggcgatttactttcattattgataatgatgatatattactgtttccctgaactaaatta

SEQ ID NO: 252718 - DNA, 571 bp, Homo sapiens
ttttattttatactttgtgttctctttaatatggtttttcagcaccagtattttacaaatcagctctataagctgagaatctcattgtttttaaacttaagatcagttttattgctttgctaatagagatcttgccaatttcatctcagaaatctctctctctctctctctctttgtgtgtgtgtatatatatatatatagaaaaatgttaatagtaagccaacaaaaagtctggtggaaaataagtttgcaataatataacgccaggtttccgtgtatactatacttgatgtagaactgaagcaattatccacataatttgggctgaaaaattattttagaagagacaataatgtaaaactaaactgttgtacaaaaattcaactttttggtttttttttccattccactgactttagakaaaagaaaaaaagggaaataattaattttgaggccatgtttaaacatgacagtttcattttattcattcagtcaataaccatttactgggactctaccctctgcctggatggaaatgtgctaatgtcaatggtacaggtgcctgctcttg

SEQ ID NO: 252719 - DNA, 545 bp, Homo sapiens
attaaaattacttattttatttttattttattttttaggtggggtctcgctctgtcacccaggctggagtgcagtggcgttagctcactgcaacctctgcctcccagggtcaagcgattctcctgcctcagcctcctgagtagctgggactacaggcatgcacaaccacgcctggctaatttttgtatttttagtagagaaggggtttcaccatgttgrcctggctggtatcgaactactgaccttaagtgacccacctgcctcagcctcccaaagtgctgggattacaagcgtgagccactttgctggttatagtgcattaaaattactgataacagtttgtaaaatcaagttagcctaaagctgccttcttaaatatgctaagttccgcctaaaggtttccctgtacatagtgaactataatctgaatggaggtgtaaacagactgtcacctactctcgtgccagtctcggagtttgagccaatcaaagggccaactgttcaaatagcgttcaaataaggcaaatgccgagtgtaaccaatcc

SEQ ID NO: 252720 - DNA, 545 bp, Homo sapiens
attaaaattacttattttatttttattttattttttaggtggggtctcgctctgtcacccaggctggagtgcagtggcgttagctcactgcaacctctgcctcccagggtcaagcgattctcctgcctcagcctcctgagtagctgggactacaggcatgcacaaccacgcctggctaatttttgtatttttagtagagaaggggtttcaccatgttggccwggctggtatcgaactactgaccttaagtgacccacctgcctcagcctcccaaagtgctgggattacaagcgtgagccactttgctggttatagtgcattaaaattactgataacagtttgtaaaatcaagttagcctaaagctgccttcttaaatatgctaagttccgcctaaaggtttccctgtacatagtgaactataatctgaatggaggtgtaaacagactgtcacctactctcgtgccagtctcggagtttgagccaatcaaagggccaactgttcaaatagcgttcaaataaggcaaatgccgagtgtaaccaatcc

SEQ ID NO: 252721 - DNA, 545 bp, Homo sapiens
attaaaattacttattttatttttattttattttttaggtggggtctcgctctgtcacccaggctggagtgcagtggcgttagctcactgcaacctctgcctcccagggtcaagcgattctcctgcctcagcctcctgagtagctgggactacaggcatgcacaaccacgcctggctaatttttgtatttttagtagagaaggggtttcaccatgttggcctggctggtatcgaactactgaccttaagtgacccacctgcctcagcctcccaaagtgctgggattacaagcgtgagccactttgctggttatagtgcattaaaattactgataacagtttgtaaaatcaagttagcctaaagctgccttcttaaatatgctaagttccgcctaaaggtttcyctgtacatagtgaactataatctgaatggaggtgtaaacagactgtcacctactctcgtgccagtctcggagtttgagccaatcaaagggccaactgttcaaatagcgttcaaataaggcaaatgccgagtgtaaccaatcc

SEQ ID NO: 252722 - DNA, 585 bp, Homo sapiens
gcaagttaacgatggtgtcacttctgcccgttgcaaagcatggtagggactgcagggaacatgatttgctttgctttgttccttatgtagaactcttatcactcacctttcctggcaaaattggcccatcagcaaacagggattgcccttccttggaacaagatgctgagagtctgtctaaatgctcagaaggtacttgagaatatgtgaatggttacaggactagctacgtgctctctctctgcagccatgcattttttgttaggttcttattgaaacatagaaatcttcatgtatcaaacacacagtttgaagaattttcacaatctgaacacacccatgtagtctagtactaccagatcaagaaacccatccacaaggtgatctgctggctaggattaatttcgcctgggtttgagctttatataaatgcagtcatttagcatgtgtgttcttgtttcagccttcttttgctgcacactatgtttgtgagattcacccatgatgttgtgaatagttgcagttcattcactcattattattgtacagaygccattttgtgaatgtatcacaatttattattca

SEQ ID NO: 252723 - DNA, 507 bp, Homo sapiens
gggattgggactttgcatggtattgcattgaatccctcaggtcggtttgaaaagaattgtcatttcaataccattgagmcttccaatccatgaacatggtatatctctccgttaatgtgggcttaaatagggagacaaaaattatcttaggcagtcatttgtagttttcattgtagaggacttgcatatctttctttaaatttataccttgctatttggtgtttctgatgatattgcaaacagtatcttttagaattttattttccatttgcttactgctggggtatataaaacaattaattgtgtatactgatcttatacctgatgacctttactaaaatcagtaatagattctctgaaaattcttttagattattttaggcatatcatttatgaataaagagatttcttacttttaattcctaagcctagtatttcttttgtttgccttctcgctctggctgggactgaggtcacaaaaaaagtttttactatttcaccattgag

SEQ ID NO: 252724 - DNA, 507 bp, Homo sapiens
gggattgggactttgcatggtattgcattgaatccctcaggtcggtttgaaaagaattgtcatttcaataccattgagccttccaatccatgaacatggtatatctctccgttaatgtgggcttaaatagggagamaaaaattatcttaggcagtcatttgtagttttcattgtagaggacttgcatatctttctttaaatttataccttgctatttggtgtttctgatgatattgcaaacagtatcttttagaattttattttccatttgcttactgctggggtatataaaacaattaattgtgtatactgatcttatacctgatgacctttactaaaatcagtaatagattctctgaaaattcttttagattattttaggcatatcatttatgaataaagagatttcttacttttaattcctaagcctagtatttcttttgtttgccttctcgctctggctgggactgaggtcacaaaaaaagtttttactatttcaccattgag

SEQ ID NO: 252725 - DNA, 507 bp, Homo sapiens
gggattgggactttgcatggtattgcattgaatccctcaggtcggtttgaaaagaattgtcatttcaataccattgagccttccaatccatgaacatggtatatctctccgttaatgtgggcttaaatagggagacaaaaattatcttaggcagtcatttgtagttttcattgtagaggacttgcatatctttctttaaatttataccttgctatttggtgtttctgatgatattgcaaacagtatcttttagaattttattttccatttgcttactgctggggtatataaaacaattaattktgtatactgatcttatacctgatgacctttactaaaatcagtaatagattctctgaaaattcttttagattattttaggcatatcatttatgaataaagagatttcttacttttaattcctaagcctagtatttcttttgtttgccttctcgctctggctgggactgaggtcacaaaaaaagtttttactatttcaccattgag

SEQ ID NO: 252726 - DNA, 537 bp, Homo sapiens
agaaagaggtttaattgaatgtacagtttcacatggctggggaaacctcacaatcatggtggaaggcaaggaggagcaagtcccatcttacagggatggcagcaggcaaagagagaatgaggaagacgcaaaagtggaaacccctgataaaaccatcagatctcrtgagacttattcactaccatgagaacagtatgggggaaactgcccccatgattcaattatctcccactgggtccctcccacagcacatgggaattatgggagtacaattcaagatgagatttgggtggggacacagagccaaactgtatcagatggagccttgcttcatcaacttagtaagggcttgaaaagggtcaggccgcattgcaagttgaacaagactgagtcaacttctggcttactcctgttgctgggcatggccctactgggattttgattgaaagtctggagtatcttagtctgaaaggctccaggaaatccaattcttcccttcagtggttaccatcttaactctccagccatcccacaccc

SEQ ID NO: 252727 - DNA, 537 bp, Homo sapiens
agaaagaggtttaattgaatgtacagtttcacatggctggggaaacctcacaatcatggtggaaggcaaggaggagcaagtcccatcttacagggatggcagcaggcaaagagagaatgaggaagacgcaaaagtggaaacccctgataaaaccatcagatctcatgagacttattcactaccatgagaacagtatgggggaaactgcccccatgattcaattatctcccactgggtccctcccacagcacatgggaattatgggagtacaattcaagatgagatttgggtggggacacagagccaaactgtatcagatggagccttgcttcatcaacttagtaagggcttgaaaagggtcaggccgcattgcaagttgaacaagactgartcaacttctggcttactcctgttgctgggcatggccctactgggattttgattgaaagtctggagtatcttagtctgaaaggctccaggaaatccaattcttcccttcagtggttaccatcttaactctccagccatcccacaccc

SEQ ID NO: 252728 - DNA, 595 bp, Homo sapiens
tagtgaacatttaatatggcttttgatggagaatctagagggtacagcacttcactcatttctcacaacgttataagtaggaattatcttcttcattttgtatatgtagaaaatgagactcacagtctgtgagaagctttcacagttacacagccagacagttcatacaggtgtaygctgaatgttgagaaaacatagatgagactcaatgagtctcaaagatgagaaacagctgtaaggtatcattaggtcctgactacattgtaaattatttcttcaaaatcagatagctagtaagtggtatggcggaagtttagaccagattgctgcttccacacagaaattttaaagactgttaaaaatgcaagaaactaaaggtagaaaaatgctatcctaatgatacgacttttagaaagccaactaaatttggtgtctgtttcttaatctgcaaattttggttttgttcttcttaatattcgggacacggtatatacgcacacagtgtcacttaactgattactgcatacatgtaaagaaggctctcgcttctggtaacaattcaagtataccgcatttctagtttctttggatttat

SEQ ID NO: 252729 - DNA, 525 bp, Homo sapiens
accatcacattatgcctcataaatatatacaattattatttgctaattacaagtaaagcaatacaagaagaaaaaaaggaatcataagtaaatccatgacaagtgaaaacgcaatggagagaagggaatcaatgattgaagaagagaaaggacagtggatttacaactgcttcgaaagagtgatttgactggcaaaggactggggagaggtcctttgggaaatggacaaarccctcgaatggttaggaaagacaatctctttataaatgcagggcataagctgagcacaaggtgaagtttggcatgtactgccgtgggatgttgtaaaaattatgtcaaaagcaaagcaattcttggttcatctgtgttcactgtgagactagcctattattggggttaaacttataaacaaacttctattcatcatttttttctccaaaataaagtgatcaaattgtcccacagaactgacgcttatgtttttttttttttgaataaccacagaaattgttccttccagacttt

SEQ ID NO: 252730 - DNA, 525 bp, Homo sapiens
accatcacattatgcctcataaatatatacaattattatttgctaattacaagtaaagcaatacaagaagaaaaaaaggaatcataagtaaatccatgacaagtgaaaacgcaatggagagaagggaatcaatgattgaagaagagaaaggacagtggatttacaactgcttcgaaagagtgatttgactggcaaaggactggggagaggtcctttgggaaatggacaaagccctcgaatggttaggaaagacaatctctttataaatgcrgggcataagctgagcacaaggtgaagtttggcatgtactgccgtgggatgttgtaaaaattatgtcaaaagcaaagcaattcttggttcatctgtgttcactgtgagactagcctattattggggttaaacttataaacaaacttctattcatcatttttttctccaaaataaagtgatcaaattgtcccacagaactgacgcttatgtttttttttttttgaataaccacagaaattgttccttccagacttt

SEQ ID NO: 252731 - DNA, 625 bp, Homo sapiens
gtttctccaaaacccgaacagacaccccggtcttgtcacaaacttggcctgtgacctgcagcacatgactgtcactgcttgggcctcagtttccccatctaaaaaacagaggtcatgtgaaatgatggtctctaaggtgccttctaactgatacattatgacaatctttccaaaagcaattgttattcaatggctgagcaaaaaagttataaaattatcccttgtgggaagattcagaccaaggtccagttttctctayatgaaaatgcaacactttacaatgttgtgtaagtgcagaaagtgaaaagacaatcattaaaaagctgagaaaaataaagtcaggaaagaatgctacataaatcgctcagtctgacttcaaagggaaatttttttccaaagtaagatcatgagaattgatttatgtcctcagagccaatgcaaatgcaggatttgtacaatatccatttatcagttccaaaggagctgatttacggcccacctcttctagtttgtattctgtccagctcagaaagttaactgacaacacagaaagaaatatcctctgtctcattgcagatgacgggttataaatgagcacaacttgattctctgttctggaaaatta

SEQ ID NO: 252732 - DNA, 548 bp, Homo sapiens
ggtgactctgctggacaaagaccaaaagccttgcgagggtgtgggacagacaacaggatacatcagtgcagttggctcagttttgcaaggttagacttctctcatttgatttcacytacctctggctattttccttttctttgccagaggaacactggcaaatgtttaacatctgattctctggaggtggggaaagcttgaattaatagtgtttgtctaattccatgatagaagtatttccaatgtggccagtttcgagttactcccacgatgtcactgaatgcacagctacaaagagatggtaacaactggcccctgcaaactgctatgaattggctctagggcaacactgctacaccatctccctacgaataacagggatcccctttgtggggttggacactgtacatatgtagctggcactacatgcatgatatttcatataatcttaactatcattgtttgaggctgggattactattgccatttcagggatgagaatagcaaggctcagagagattgtgtagccagcatcggttcacataatt

SEQ ID NO: 252733 - DNA, 548 bp, Homo sapiens
ggtgactctgctggacaaagaccaaaagccttgcgagggtgtgggacagacaacaggatacatcagtgcagttggctcagttttgcaaggttagacttctctcatttgatttcacttacctctggctattttccttttctttgccagaggaacactggcaaatgtttaacatctgattctctggaggtggggaaagcttgaattaatagtgtttgtctaattccatgatagaagtatttccamtgtggccagtttcgagttactcccacgatgtcactgaatgcacagctacaaagagatggtaacaactggcccctgcaaactgctatgaattggctctagggcaacactgctacaccatctccctacgaataacagggatcccctttgtggggttggacactgtacatatgtagctggcactacatgcatgatatttcatataatcttaactatcattgtttgaggctgggattactattgccatttcagggatgagaatagcaaggctcagagagattgtgtagccagcatcggttcacataatt

SEQ ID NO: 252734 - DNA, 548 bp, Homo sapiens
ggtgactctgctggacaaagaccaaaagccttgcgagggtgtgggacagacaacaggatacatcagtgcagttggctcagttttgcaaggttagacttctctcatttgatttcacttacctctggctattttccttttctttgccagaggaacactggcaaatgtttaacatctgattctctggaggtggggaaagcttgaattaatagtgtttgtctaattccatgatagaagtatttccaatgtggccagtttcgagttactcccacgatgtcactgaatgcacagctacaaagagatggtaacaactggcycctgcaaactgctatgaattggctctagggcaacactgctacaccatctccctacgaataacagggatcccctttgtggggttggacactgtacatatgtagctggcactacatgcatgatatttcatataatcttaactatcattgtttgaggctgggattactattgccatttcagggatgagaatagcaaggctcagagagattgtgtagccagcatcggttcacataatt

SEQ ID NO: 252735 - DNA, 542 bp, Homo sapiens
agtgcagaaattggagacagtgggggatccctcacagggttgctgggatgactgaatgaggtaatagacttcacagatcccacatagggtctggtacgcagtggtccctcaacagtggacagacattattaggatctggtcatattctgagaacaaagcttgacaagttctggaatcaaatgtcattgtcaaatgtgcctgctcaatgcaattctacttggctactggactctctgcaataatttgtctgaaagagaggcagaagcccccaagagatgaatgrgctggttttaaggagagaatgattttaagaggcattgagggtgccctggaagccatccccctacagtgcatatcaggccaaatgcacctgtcagcacctgcattcctttgccagagaacttgcaccagcagccaaaggcctttgctcatctatgcagcaggctgaatgcgatgagaatcagcacctctctcaggagcaaccctcacccaatgactggggtacttatacctcagctcccttgctccccatgagacaagaa

SEQ ID NO: 252736 - DNA, 530 bp, Homo sapiens
aaattcctttcccatactctatttaagaatcggggaaacctatgttttagaaatgaagtcaatatatagaaagatayagcacttgaagtggtgagcttcagtttcacagaaaactcatctaagtgagataacttattcttggatgttgccagaaaaatctacaagtttctaaatgattggaaacaaaagtttttaaatgattgttggagttcaactccagggagcactggcctctgccctgtgttggaggacagctttgatgctgcataacaaacagtgtgatttcactcatgctgaaactattttcctgaaattggagccttattattaagttactgggaaaaaattccaattgaactttggaaattttttttctattgtagtaccattatagagttcagtttggtgaaaaatgagcactgaaggctttcaacaattttctatcagagcttaaattcaattctaaggatagtgaccatgtaattggcaaggaaggagtacttaattcttagaattgcactgatggggag

SEQ ID NO: 252737 - DNA, 530 bp, Homo sapiens
aaattcctttcccatactctatttaagaatcggggaaacctatgttttagaaatgaagtcaatatatagaaagatatagcacttgaagtggtgagcttcagtttcacagaaaactcwtctaagtgagataacttattcttggatgttgccagaaaaatctacaagtttctaaatgattggaaacaaaagtttttaaatgattgttggagttcaactccagggagcactggcctctgccctgtgttggaggacagctttgatgctgcataacaaacagtgtgatttcactcatgctgaaactattttcctgaaattggagccttattattaagttactgggaaaaaattccaattgaactttggaaattttttttctattgtagtaccattatagagttcagtttggtgaaaaatgagcactgaaggctttcaacaattttctatcagagcttaaattcaattctaaggatagtgaccatgtaattggcaaggaaggagtacttaattcttagaattgcactgatggggag

SEQ ID NO: 252738 - DNA, 544 bp, Homo sapiens
cttacaatggaacaacaccgctttaattaaaaattacaaagacaccactgtaaacaatccatttacatttcaaactctgtgtttgttgacttaaaaaagaaaaaaatcttaactcattaaaaacaagaaccaaaaaaatgacctcatcccagatcctgttattgaggtcagtaaccacatttaattaagatgaagtgttaataatatagtttagaagatgaaggccttctcttaatttccccaggtagaaatgttacaatttggcctttaacttctgattaaaatttaaaaggtgggagtcaccccaatttaaactcttaaatctggttttgaaacctggttttgggattagaaatcctccttcctcccaataaatggtaggctactacatatttytgaacccctgtgtttctgagaatgccagtgatgacaaaatttgcattttcaagagagctgatttttgcctttttcttccaaaggtcttagaagatacagaataaaatgtcccatcgccagtcaatgatggtttttgcttaatttccca

SEQ ID NO: 252739 - DNA, 544 bp, Homo sapiens
cttacaatggaacaacaccgctttaattaaaaattacaaagacaccactgtaaacaatccatttacatttcaaactctgtgtttgttgacttaaaaaagaaaaaaatcttaactcattaaaaacaagaaccaaaaaaatgacctcatcccagatcctgttattgaggtcagtaaccacatttaattaagatgaagtgttaataatatagtttagaagatgaaggccttctcttaatttccccaggtagaaatgttacaatttggcctttaacttctgattaaaatttaaaaggtgggagtcaccccaatttaaactcttaaatctggttttgaaacctggttttgggattagaaatcctccttcctcccaataaatggtaggctactacatatttttgaacccctgtgtttctgagaatgccagtsatgacaaaatttgcattttcaagagagctgatttttgcctttttcttccaaaggtcttagaagatacagaataaaatgtcccatcgccagtcaatgatggtttttgcttaatttccca

SEQ ID NO: 252740 - DNA, 516 bp, Homo sapiens
ataatgcaagccaattttggtaatgaaaaacagaatactcacatacgtgattgagggagacagatccaagctgtggaaaagggatttccttgtctgagatgatgacagatactttattatcttccttattcttacctgtcttttcaaaagtttcttccagaaactatcttaactttataataaggataagaagataaaagtcattaaaaagaagaatttcatctgtcactagaccactgctgttcattttgatttgactaacaacacaatgtgaagggctttttaacaagtcttaataacccaggctttttagtgagaagattccctctgatgtttggacaccccttgtctttgtagtcacaggttccttggagatcaaggcgccctttgctgacttgagcattccctggggagatgaaagggtgtctggccrcggtcagccgaggagcagtggtgcctgagaagtgcatttcctcatgcgaggcaggacgtggcccaggagttggacttagctgg

SEQ ID NO: 252741 - DNA, 594 bp, Homo sapiens
ctgcctctttccttggggttccatgttgagagagatgggcctgaaagccaccgtgagctggcaagatggggtacagttagattctttgtaagcagtgtgctgacttgccttaaaatttagcaaaactttttgaaaattctgccctgttttcattatgcttcttttggggctggagctgaccaggagaggcagcaagagccagaatcagagtgagggtcctcaaatggaaagtgacatttaagaggctcaattcaagggcccttgatcaggcatccctctaaaccaggggatcccccttcttgtattaaattgtggagattcagagttttgtgttgttgaataatagcaatataataacagcagccatgatgccctgtattgagcatttactgagtaacaccatgctatgtatttgcttgccttacctcactaatcctcatatgacctctaggaggaggaaactatcatctgtctctgttgaagagatgaacagaggttaagcgatttgcccaggatcacacttgtaattagtggcagagctgkgctatgaagcagtgctactgtaggaacagaatcgccaggccaatgcagcat

SEQ ID NO: 252742 - DNA, 618 bp, Homo sapiens
tcaaatgatctctgcctcctggtgcctttgtagaatcttaccccttgcaggataggaaggacctgtgacttccttctaacccatataatggccatggtgacaggatgacactctcatgattatatgacagaagaccatagcatctgtcttgctagcagactgtctctctttctggctttgatgaagcaagtgagtatgctgtggaggcccatgagcaaggatctgagagaggctcctgtccaacaaacagctgagaactaagagggaccaacagccagcaagaaactaagcctgtcagtccaacagcccacaaggacctgaatcctgccaacaaccacatgaacttggaagtggcttcttccccagtcaagtcattggatgagatcacagagctggctgacatcttaactgcagccttgtgaaactctgaagtagcraacccaggtaagccatgatcagacaccaaaccactgtcagaaactgtgagacaataaatgtgagttatttcaagctgctcagttggtggtattataatattgttatgtaacaatagataactaacacacatgccttttggtcttggagtttcaacaattaactcatggtttagaactgcta

SEQ ID NO: 252743 - DNA, 576 bp, Homo sapiens
agtcttcttctggagaccagaatacatctcagaagtgtaggtcacctgagttgcttttacctggctgccctattgctctgttgcttttctccttgatggttcacaggcactaggctctgctcaggggctttatcaccctcctttgaggctgattgctcagccaaactggattgttagctggaaacagacaatgcttttacccatattaagcccayaaaatgcatattaaattaaatggaagtggattactaaaagctagattgtgtcttcttttaccagccttctctggaatggaaaactggagtcctgcagggaagagagtgtgtggcatcaattctggaaacagattacctcagtcttgatggctgattctcagattctcatgtattcattcactcactcattcagcaaacatttctggggatgccaagcactttcttaggactggggatattaagatgaaaaagatcttatcttgccattacctcaagtctagtgtagtgggggatgcagacatttacattctgggtgatagaacaggcaacaaagtcttagaaaagagtatgagtgttggtg

SEQ ID NO: 252744 - DNA, 604 bp, Homo sapiens
tgcttaaaactaaaggtgaatacaaaagagtggtgagcatggacaagaatggtctcggggagtttgtggcaaaaaaaaaaaaaaaaagagctaaggcttgcaaaaatgttaaggacgagaagaattgatttgggggcacatttgaagcaagaagataaattacaggaccgcgccaacacatgacagattaaaagcagcacttgggttttagtttgtttccggcaaagaaaatgctcttcagatttgaaataagaaatccttaaaaaygaaacttaaagaccaagggaggtatgaaaagagacaacattttgctttgttaaataatattgagcccccgaacctggcataactgtcaactcaatctccttctccatttcttgggccttttattttctcccccaggcttggcactcaggttagctattgagttctgggtgtatttccggccagttcttagctcagtctgatgaaagagagattagggaaccacatcaaatgaagacttgttagaaagaataactctgctctagaggggcctctcctgatccttatgatcaggcttgaagaggcatgaccagttgagcatgtgacatgcttgtttgtg

SEQ ID NO: 252745 - DNA, 604 bp, Homo sapiens
tgcttaaaactaaaggtgaatacaaaagagtggtgagcatggacaagaatggtctcggggagtttgtggcaaaaaaaaaaaaaaaaagagctaaggcttgcaaaaatgttaaggacgagaagaattgatttgggggcacatttgaagcaagaagataaattacaggaccgcgccaacacatgacagattaaaagcagcacttgggttttagtttgtttccggcaaagaaaatgctcttcagatttgaaataagaaatccttaaaaatgaaacttaaagaccaagggaggtatgaaaagagacaacattttgctttgttaaataatattgagcccccgaacctggcataactgtcaactcaatctccttctccatttcttgggccttttattttctcccccaggcttggcactcaggttagctattgagttctgggtgtatttccggccagttcttagctcagtctgatgaaagagagattagggaaccacatcaratgaagacttgttagaaagaataactctgctctagaggggcctctcctgatccttatgatcaggcttgaagaggcatgaccagttgagcatgtgacatgcttgtttgtg

SEQ ID NO: 252746 - DNA, 626 bp, Homo sapiens
tctgacacccatgcatctggtttgaagcccaggaatttgtgtttttaatcagtacaaggcttgatcttgcctacaatagtgagataaaaataatcatcttctaccaatgtgaaaaggaatccccttcactgttctctttcttcccgtatctaactctgggaaaatgtctcactcaaaacaggtgcatttttggtagtttgtttaccagtgttcaccactgagtaataaggtatttagtctttagacctgtgcctttttatgcagcgatggctttgttcattgtccttaggggctctcctctgtatttttctcccatgtaaaatgtacattttagaatgtagccctactgcattccctggagttgatatggtattgacattccctgtctgtagatccactagtgtggaggttaggaaagcaatgtgacatggagtaactactgtcacttataaggagggtcccaggatgctctttgaatggctctcctggcttatgtcartcctttttttgagaccagcaggtaaggactctggattaatccattctcatcagccatatcaacatatctgggagatctccattctctctctggaccagacattcttcttgaaattcttttgggggtc

SEQ ID NO: 252747 - DNA, 552 bp, Homo sapiens
ttgctgtgccggaccccggtcgtgcagaagagaccaccccctcactgtgtgccaagcacctcactggggacgtcaccaaatcttgccagcaccctgtggaaatggagagaactattcccatcctaggaaaatgacctgaagttcaaggtcaccaaacggctgagtgtcagggacagtrcctgtttacacaaagggataggagctgtttcttctgcttccataaaagcctgccagctctgaccattcaccttcagtccctcggcaggatcaaacccaggcctgatgcccgaaggagctgggcaaatgtttactgttgaatttgagggcggagaaagggccaaaccacagctatgactcgcctgcaggggccacccaacagagtcgtcctctcctgatggctcccagtcacaaaccaagctctaaggtgcccaccaccctcttccccttcccaccctactcctgtgtctcactcggctccagggcattgccactgaagaaccccctaccccagaaggggacacacccagcccatttcacaccagacaaggccac

SEQ ID NO: 252748 - DNA, 599 bp, Homo sapiens
cctctctcagtgcttgatagagcaaaaagaatatcatcaaagaagtaaatgactagaaaaacactatcaaccaacctgacctgattgacatttacacaaaactacactcaactatagtcaaatatacattttctgcaagtgcacatggaacatagcccagtaaagaccatatggtgggccatgtaaaagaactcaataaatttagaagaaatgaaagcattagagtacatttctgatctgatcacargggaattaaaatagaactcaacagaaaaaaagtatctggaaaatctccaaatatttggaaattaaacagcatgcttaaaaaaaagaaaacctaagaataaatcacctaggaaattagacaacactttgaaccgagcagcaatgaaaacaaaaatatataaaaattgtggaatgcaaataaaataatacttagaggaaattttatggctttaaatgcttatattagaaaatttgttaaaagatctaatattaattatctaaccttaaaaagttagaaaagaagagaaaatgaaactcattgtaggtaggagaatgcaaataataaagataatagaagaaacaaataaaataga

SEQ ID NO: 252749 - DNA, 500 bp, Homo sapiens
tactacctttaagacgtactatgcagcttcactaataaaaacaactttgtaataagaatagaatagaagcaaatggaacagaatagagattctaggaaaagattaacacgtatcaagttattaccaagccaagtcagttggttttctattaagattccaaagttccaatttaattcaatgggaagagayagtcttttgaacaaaaggttctgaaagaactagaggtctattggaaattaaccttaacccttatctcacatcaaacaattttattaactcaagatggatcttagacctgtatctaaaagattaaaatttctggaagacaggagaagtctttgcaaactgtggagcagacaatggttacttagaatatagaagacgctaaacatttaaaacagttaataaattgggcttcaacaaaattttaaacttttactctttgaaaaacacttgaaatcacaagacacagactcgaataaaatatgtgcaatgcctat

SEQ ID NO: 252750 - DNA, 639 bp, Homo sapiens
gggccaacaagattacctgtaaatgaacaacaacagaagccagaagataagaagatatgtcttcaaagttttgtgaaaaaaataatcttaaatcagccaggcatggtggcgtgtgcctgtaatcccagctacttgggaggctgaggcatgagaattacatgaacccgggaggcagaggttgcagtgagccgagatcatgccgctgcactccagcccgagagtgagagtctgtctcaaaaaagaaaaagattaaaaaaaaaaaaacccataaatctagaaccttctattcattcaaattaagagaggggaaggataatttgggaaaaataaagactgaaaaaaaaatagcacgagcaaatactcatggaaagaattactgaaggctacagtacttttaggaaatcaaattcagaaggaagcacatacaaggaataatagtaagtagasaagctggtaaacatatcaataaaaatgataatgttaataacagctgttgagggaataaatacaaaatggtggtatactagttagtaataaaaaggaacaaactattgatatactcaacaacttggatggatgtcaagggcattatgctgtgggaagagagtcaatctcagatggccacatactgcatgatcc

SEQ ID NO: 252751 - DNA, 529 bp, Homo sapiens
tggtttctccctcatatttaaatctttacctgtaagttttcagatagtgtttttaaatacttgaaaaaataatgttattaaagaagagtaatgtgtccagaataaaatgcagacctggctacgctggagaattctatagaattctcagaattctgcttttcttggccatgacctcattcaaactcaaatctggtatctggaggtaaaaactgattcattaatctctttccaaagctctacttaaattatgttcaaactgtcctattctcgtcaattcagaggaaaaatgcaaatgactaawatgaaaaaattgttcagcactcaactaatcaaagaaatgcaaattaaaacaaggtaatatttttcatctatcaaatttgcaaatgttttttaaatgccaatatgagatgttgacaaaggtgagatacaactcacataatagtgctcacggtagcacaaactgaaaaatgtattcacaaaatagaacaagagccttaaaaatagccatacccctttgaccccctaaatt

SEQ ID NO: 252752 - DNA, 596 bp, Homo sapiens
gagttacaaaattggctatggtcggctgggcacagtggctcacacctgtaatcccagcactttgggaggccgaggcgggtggatcacccgaggtccggagtttcagaccagcctgacgaacatggagaaaccccatctctactaaaaatacaaaattagacggatgtggtggcgcatgcctgtaatcccagctatttgggaggctgaggcaggagaatcactttaacccaggaggcagaggttgcggtagcaccattgcactccagcytgcgcagcaagagaaaaactctatcttaaaaaaaaaaaaaaaaattggctatggtccaatggaggcaggcagctcattttgttctgacaattagaaaggcttacaatgaggaggtgacaatctgtgtgggccttgaatgatgagtagaagttcaacagtagagacaatagcttgggcaacagggtgaagactggtgtatgcagggtacccagtccaaaatgcctgcttccacccaaaatattccaacctcttgggttaaaaacgctttggaaaattatattatgtaaaaagtatgtcaatgctcctgtgaataccaaccaaactgaag

SEQ ID NO: 252753 - DNA, 569 bp, Homo sapiens
ctgattgccaatcatgtagtcaagagaaagagccagagcggaagttgcctgagcccactttccttcctccttcccatcttctgctgggagacctcccctcccactactygtcaccattggccaatcccaaccataagccaggggtactggagcctgatgctttccatacaattcagcctctgcagccagagcaagatggagacgggtacagagcaaagaggggtctgaacaggcagatgggggctatctggaacatccccctggtgcagtctgagcacaagtgtgcaattattatttgttaagttaagttggttaaatgaccctaaactaactctctacacctggagtctggctacagaggcagatcttgaggactttgtacacctcctcctttgctctaaaggggaacctgcagaaatgattcctatgctcttgttttgctaccatgtaacctttgacagtcagcaacatgttgttcaacaaccacaaatcctgccacccactccaaggacatctaggtactattcccgatttagacaaagaaaggcaactagtcttgggtccctgtc

SEQ ID NO: 252754 - DNA, 664 bp, Homo sapiens
gagtcaagccacaaaaagcttatatatcacttaaaggcatttaatcaggaaagagacataataaaatggacattgttgaaagactcatgagtatagtccagagaaaaatggaagtaggaagggctagatgcagaaayatcagctgagaggtactagaaagacccaagcaatggcagttttctcctgaattaaagtggtgagagtattaaggaaaaaggatggagtcaagaaatatgcaggatgctgattcaatagaacacacatggcatctgcgcaaaacaaaggaggctgcacttctaccttgggaacaggtggatgggggtgctactgaggctaggaatccagaaggaagatcctaacttcaacttttgatattttgagtttaaagagcccaagtgaagttagatagatagttccagagctcaggagaaaaatccaggcaaatgtccaagacttggcaatcatccatacaatcactatagtacaatgaaagaacagaagaaccctgggacaaaaccatgagaaactgcaatgtttaaggaacaggcagcaggagatgaggacacaaaggcaactgagagtggagggccattctaggaaaatatttcaagaacaagaggtggcgacccaaaagaagtcacagcctctgaaatatttacctata

SEQ ID NO: 252755 - DNA, 657 bp, Homo sapiens
gtgatagtcacctaagtgatttaaatagaattaaggagaggatctacgtatacatgaagtgacctgtccatcccagcagaactcaataaaggtgatttgtatctgagtctcaacctggactgccctcatggagagtgagatggcagaggggctcgataaattgtttaatcctgaggttgtcaaactttgaaaagtcaccaaattttttaatccaaaaaaaaaaaaaaaaaaaaaaaactccatggaacctgaagcatgtctggctcattccaggacacatggatttgcatttgctgttccccctgcctaraatgtccttccacattgaatccatctggaacattcttgttcttcgtataggggcttgtttatctttgtatcgcaagcatcttccactgttcctgagagagagtaggtacacagtgattgtttttcgaactatgccaatataacaaattttataccaatttctagttaaaatcccgcatgaagataaggaaaaaatggtgaggataaggaattaataaatcagaaagcatatttggcttagaaactgttgaaattgttatagaacttctctcttcatattgatattttcccggtggtcatggttttaaataataacagtaataataagcagttctctatctgtaggta

SEQ ID NO: 252756 - DNA, 582 bp, Homo sapiens
acgtgctgaagttctagatggatataaccttgggggccatgaagaactcttccacttactgcagagatccatcaccctaaatagttaagaacaagagaaatgtagaataaaatctcaagctcccaggatgacgttccggggtcttcctattccaccctcaacccttatttttgacctcctgtcctgcagccacactccggcccacacgctgttcctggctcccaaaccgctgcactgggctgcctcaacactgtctttataaagttgwcattcactgaaacttccttcattccttgagtgtgctgccccacgtagttgccacatatgagacaggtaccatcattacttccattttacacatgagggaggtgagggttacagaacataaagaatttcccaatatcacacagctagcaataagtggaacttgagttcaaaaacagatttggctgggttcagagcttgtgctcttgactatgaagaataaccttagcatgttcctataacagaaaagacagtggagttcccgaagcaagacaaaaagtggtaggagacagaaagctaagaagaccagcacctgat

SEQ ID NO: 252757 - DNA, 512 bp, Homo sapiens
agctaagcagaaaatttggagatgaaaaataraatgaacaaaataaaaacgaaatagagcacatcaatagcaaaattaatgaagcagaaagaatctgtgaacttaaaaaacgggttatttgaaggtacacaaacagaggagaaaaaagaaaaggaattaagaagcttatgagatcttatgcaacagcatcaaaagaacaaatttggggtcacaatatttcaagaaagcaaagagaaaaaaaggagtagaaagcttgcttaaagaaattatattagaaaactttccaaacctggagaaaagatataaatatccatgggcaggaaggtcaaagatctccaattagatccaatccaaaaaagactacaccaagacatgttataatccaactatataaaatcaaagacaaaaagaggatcctgaaacacaagaaaagaagcaagttacatataaaggagtgtcaatatgactagcagtggatatctcagcagaaatctactgagaacagaccaggg

SEQ ID NO: 252758 - DNA, 475 bp, Homo sapiens
aggcaggagaatcgcttgaacctgggaggcagaggttgcagtgagctgagatcacgccattgcactccagcctgggtgacagagcaatactccaactcaaaaaaaaaaaaaaaaaaaaaaaaagaaagtaattaaatcagacttacggtaaaacttttattattaacatagtcataagtctatattgggaaataatgccaaggaaagaaaaagttggttgagataagattactgatccaagatacgacataaaatttttgcaaaacactaacagctattagaaggatttttttgctcagggatgctaataaacactgtcaggtttttatcaatagaagtatcaattaggcatatattagagaatttgctagaaattcttctctgctttrgacattaaccaggcaaactctattttatttccagcttatgctgaaatataaattaggtctgattgaataacactaaattggaaagc

SEQ ID NO: 252759 - DNA, 645 bp, Homo sapiens
aggtgacatgatttttcaaattcttattttatagtcctttaggcaaatctaagtgagatgtgttaaactattaaatgtaaaaaattagactatttagtaatatcttctcactcaccatttattctgattcttgtgacaggcaaataataaaatttctttgatgttatctttcagwattggtctgagtccatgcaatggttaaccagataagttttgctttaacaaggggaaccgtttccttctacatggcaaggatctataatttgtgtgcagataaatcatcaaacaatctattggggacatttgtcaaacactggtgataaaaccctcatatagtcctattgatcttagaactaaagtgtccttgagacatgcacttataccagataatacaagtatacagaataagtatggttcttgaactaaacaatcaaataataccatgcagtatatagacaggtataatcctgagtcgcacatttatcataggtgatattcttgctgctgccattgctctgaattgcaattaccacatctataaaatggaaaaccttactgaaattcaaagttttcttcaggttcaacgtttaatgatattttttaaaagatcattaatctttaagcacataaaattaagtagacata

SEQ ID NO: 252760 - DNA, 645 bp, Homo sapiens
aggtgacatgatttttcaaattcttattttatagtcctttaggcaaatctaagtgagatgtgttaaactattaaatgtaaaaaattagactatttagtaatatcttctcactcaccatttattctgattcttgtgacaggcaaataataaaatttctttgatgttatctttcagtattggtctgagtccatgcaatggttaaccagataagttytgctttaacaaggggaaccgtttccttctacatggcaaggatctataatttgtgtgcagataaatcatcaaacaatctattggggacatttgtcaaacactggtgataaaaccctcatatagtcctattgatcttagaactaaagtgtccttgagacatgcacttataccagataatacaagtatacagaataagtatggttcttgaactaaacaatcaaataataccatgcagtatatagacaggtataatcctgagtcgcacatttatcataggtgatattcttgctgctgccattgctctgaattgcaattaccacatctataaaatggaaaaccttactgaaattcaaagttttcttcaggttcaacgtttaatgatattttttaaaagatcattaatctttaagcacataaaattaagtagacata

SEQ ID NO: 252761 - DNA, 623 bp, Homo sapiens
aggtgcatgcttactaagaatgcgtgaggctgtttcttatgttttaagctaattgtgcttaatatgtctatgaagtttaattcaattataataaaaataataaatatgagggaaagacaataattgtttcttctaagaaaattaatttgaatgctttggaaaggtacataatttaaacatgcttttgaattagacatgaatgagagtccaggaaaagcttaggaacataattaaaaagattttgccaggtgcaggtgctcacacctgtaatctcagcactttgggaggcwgaggcaggaggatcacttgaggtcaggactttgagaccagcctgggtaacatagtgaaactccatctccacaaaacctgaaaaataaatagtagcagggcacaacagtgcacacctgtagtcccaggtactttggagcctgaggcaggaagatcacttgagcacgggagttcaaagctgcagtgagctatgattatgccactgaactccagcctgaatgacagagcaagaccccatctcaaaaaagaaacaaacaaacaaaaccttgctcctagatggctacacaggttttttaatcgtactttacacacacactcacacacacacaaaaagc

SEQ ID NO: 252762 - DNA, 398 bp, Homo sapiens
tcacattactatgattagaaaaaggggaggggggaggacaatctcaaatcaattttacattaaagcaaagaatttttggcagtattgctttcccttgcaatctctgtaggcaccaacaaaagcaccacttgtggtggggggagaaggtgttttatgaaaaaaaaatmgctttttcaaaggctgtttattgctttaagtgttgtttaaaagctttttaaaaagcagcttttttcttctccttaggcatcaacaggggataattgccttaacacgcttttaaataaccctgtttaagacacataggagcatcaaaagcctctgcttagaaaactttttacttaactggattgtgtgggagtggagctggggtcagccatagaaactctctctacaaataa

SEQ ID NO: 252763 - DNA, 398 bp, Homo sapiens
tcacattactatgattagaaaaaggggaggggggaggacaatctcaaatcaattttacattaaagcaaagaatttttggcagtattgctttcccttgcaatctctgtaggcaccaacaaaagcaccacttgtggtggggggagaaggtgttttatgaaaaaaaaatagctttttcaaaggctgtttattgctttaagtgttgtttaaaagctttttaaaaagcagcttttttcttctccttaggcatcaacagggsataattgccttaacacgcttttaaataaccctgtttaagacacataggagcatcaaaagcctctgcttagaaaactttttacttaactggattgtgtgggagtggagctggggtcagccatagaaactctctctacaaataa

SEQ ID NO: 252764 - DNA, 570 bp, Homo sapiens
tgcatattcttcactgtttctggttgctacaaatggcagccaggtcgcctgatcatttgcattgaaacccccagtgctacctttgacactgctgtctctcctctattgatccttctgccttattggctttcacatctaccacaatctttacattccagtgaccaacctctcatttaaggctacaattaccctctcctaggatgcagcaaatagtcttttcacttctagtctcctgaagtcagtcaaggctttgcaaactattagtctttttatactaagtggacagcactactcatgttattttttatgtcaaaaaccttaattggtttctgctgtctagagaatgaaccttggtatccttagcttaacctgcaaggccattccaaatctatccctgaactaatttccaacaatcatgctgtattccagtaatgcagcaggaatgacagcacctcacttttctgcctgtttctttaattatattatttccctcatccaaaataggttttttcccattttttgcaattctaactcttcyacaacctttaaaactcaatttgccatgaagtg

SEQ ID NO: 252765 - DNA, 547 bp, Homo sapiens
tataatgtttcttgaacacatcaaaaagccaaggtaataggacaaccaactactctgatatcaaaggaaagacagagctcgagcactgacttgatacctgcagcaggaggaagatgagatcttcacaggaaaggataaaaagaattcatctggctaaatttttaatgaattgcaaaaggttcagtgtgagctagtgtaaaagaatagaaactctggaagtcacagacgcaggggactttgcatgcacttacaggctcttctccacagacttcaccaggcacacaggacacagtggaggcaggaagaaggctgcagaagggtcccctcggtgytgtaggccaggaggagggccacagcaagccctggagaaagacactaagtaccacctggggccctcttcccaggtaatgaaaagcataggccagttggtaaagggtgatgaaccctaaaccacaggacagaaaacaagatccactgtggttgggaaaccagagaaagggaaaagaaaaataatttcatttccttgaagaaggagcaggaactcatc

SEQ ID NO: 252766 - DNA, 520 bp, Homo sapiens
aacagactagtacagctctggaggcaggaaagctaaggcaaatttcacactgacctcctagactaaatcagcaggaaaaccccaaaattccatgcccaagtaacaaaaggatcagaggctaccccctctgcaaacctctcccctttctgcctcacaggtgagaaatggaaactacctctgactggtcccctcctgcaaccaatcagactggtcacgggcctagtcttcatttgcatagggatgtcactttgtaactttacttcggccctctgattggtcccctccagcaaccaatcagaatggccattggccaattcttcatttgcacagggggtaaaccaagtaaccaatgagaaacctctagagggtatttaaaccccagaaaattctgtaaccagkgctcttgaaccacttgctcaaacctgctgcactctatggagtgtacttttatttcaaaaaaatctaagttttcgttgcttcattctctcattgctttgtgtaatttctccaattctttgtt

SEQ ID NO: 252767 - DNA, 499 bp, Homo sapiens
ggcaacaggccagggccactctccagtgttacctgaaggccatggagtgaatggggtagctgacctgcccaraacagggaaggactcttctatctttcatagttatagtcccttatccctacatgtgatacaattggcagcggcagctcatccagggcaaactcacacacatatcaggtaacttaaatccttttttcttatgctaaattattatttggagttagcctgtaataacaaaagataatgtctcttaggagttttgaactcccttctcctgctcaatctatttgattggctaaggacaagagaaacccacctaaccccctagctatgcagagaaggttatagagaaaagagatttttatataagaaagaatcctgtatgatgaatttttgtcctaaagtaaaatgaccagttgtttaaaaaaagggatgtttaggacacatcataaagcccaaacatatcgtagatggtctgtgtaagtcatgaaaaagattc

SEQ ID NO: 252768 - DNA, 499 bp, Homo sapiens
ggcaacaggccagggccactctccagtgttacctgaaggccatggagtgaatggggtagctgacctgcccagaacagggaaggactcttctatctttcatagttatagtcccttatccctacatgtgatacaattggcagcggcagctcatccagggcaaactcacacacatatcaggtaacttaaatccttttttcttatgctaaattattatttggagttagcctgtaataacaaaagataatgtctcttaggagttttgaactcccttctcctgctcaatctatttgattggctaaggacaaragaaacccacctaaccccctagctatgcagagaaggttatagagaaaagagatttttatataagaaagaatcctgtatgatgaatttttgtcctaaagtaaaatgaccagttgtttaaaaaaagggatgtttaggacacatcataaagcccaaacatatcgtagatggtctgtgtaagtcatgaaaaagattc

SEQ ID NO: 252769 - DNA, 499 bp, Homo sapiens
ggcaacaggccagggccactctccagtgttacctgaaggccatggagtgaatggggtagctgacctgcccagaacagggaaggactcttctatctttcatagttatagtcccttatccctacatgtgatacaattggcagcggcagctcatccagggcaaactcacacacatatcaggtaacttaaatccttttttcttatgctaaattattatttggagttagcctgtaataacaaaagataatgtctcttaggagttttgaactcccttctcctgctcaatctatttgattggctaaggacaagaraaacccacctaaccccctagctatgcagagaaggttatagagaaaagagatttttatataagaaagaatcctgtatgatgaatttttgtcctaaagtaaaatgaccagttgtttaaaaaaagggatgtttaggacacatcataaagcccaaacatatcgtagatggtctgtgtaagtcatgaaaaagattc

SEQ ID NO: 252770 - DNA, 499 bp, Homo sapiens
ggcaacaggccagggccactctccagtgttacctgaaggccatggagtgaatggggtagctgacctgcccagaacagggaaggactcttctatctttcatagttatagtcccttatccctacatgtgatacaattggcagcggcagctcatccagggcaaactcacacacatatcaggtaacttaaatccttttttcttatgctaaattattatttggagttagcctgtaataacaaaagataatgtctcttaggagttttgaactcccttctcctgctcaatctatttgattggctaaggacaagagaaacccacctaaccccctagctatgcagagaaggttatagagaaaagagatttttatataaraaagaatcctgtatgatgaatttttgtcctaaagtaaaatgaccagttgtttaaaaaaagggatgtttaggacacatcataaagcccaaacatatcgtagatggtctgtgtaagtcatgaaaaagattc

SEQ ID NO: 252771 - DNA, 611 bp, Homo sapiens
tgggtcacctaataaaccctacgcttttcaaagtctttttttcttttctagaccactgggggaaactctccatccattctacctgattctccgctwggctacattctcaaccattggaatcagtttgaccctgataatctaaggaaaaaacatctgactttttattgtaatgctgtttggccgcattaccagataggaagccaggaacaataggtggtcaatggtagccttaattatgatatcatcctgcagttacatctattttgcaaaagtcagggtaaatggtcagaaatcccaaatgtacaggccttcatagtcctataccaaaatccaacaatctgcaaaactcccagaacctgccccacaaaggaaagtcctaaggcagaactagatattggaggtgacccccttttacaagggccacctgtctctcagggggaattgcaaccacccccatatagctgcttgccaagtgctcgtgagactaaaacccaagggcaaacactagggaccttgctaagtcccttcatactcataggggaacaacctattcaagtctccctccagcctttaaggaagtagcaggagctgagcggccagtctgaatgcag

SEQ ID NO: 252772 - DNA, 611 bp, Homo sapiens
tgggtcacctaataaaccctacgcttttcaaagtctttttttcttttctagaccactgggggaaactctccatccattctacctgattctccgctaggctacattctcaaccattggaatcagtttgaccctgataatctaaggaaaaaacatctgactttttattgtaatgctgtttggccgcattaccagataggaagccaggaacaataggtggtcaatggtagccttaattatgatatcatcctgcarttacatctattttgcaaaagtcagggtaaatggtcagaaatcccaaatgtacaggccttcatagtcctataccaaaatccaacaatctgcaaaactcccagaacctgccccacaaaggaaagtcctaaggcagaactagatattggaggtgacccccttttacaagggccacctgtctctcagggggaattgcaaccacccccatatagctgcttgccaagtgctcgtgagactaaaacccaagggcaaacactagggaccttgctaagtcccttcatactcataggggaacaacctattcaagtctccctccagcctttaaggaagtagcaggagctgagcggccagtctgaatgcag

SEQ ID NO: 252773 - DNA, 594 bp, Homo sapiens
aatccatgcatttacagccacctgatttttgtttgtttgtttgtttgagacagagtgtccctctgtcacccaggctggagtgcagtggctcgatctctgctcactgcaacttccacctccccggttcaagcaattctcctgcctcagcttcctgagtagctgggataacaggtgcatgccaccacgcccagctaatttttttttttttttgtatttttagtagagacagggtttcagcatgttggtcgggctggtctcgaactcctgaccttgtgatccacccaccttggccttgcaaagtrctgggattacaggcacgagccaccacacccagcctacagccacctgatttttcaacagagacattaataacataccacccagaaagacagtctcttcaataaagggtgtttggaaaattggatttccaaatgcagaagaatgaaattagacccttatcccataccgtatacaaaaatcaactcaaagtggattaacacttaaatgtaagacccaaagctatgaaactacaataaatcatagggggaaagctacatgacattggtctggagagtgacttcttggatgactcca

SEQ ID NO: 252774 - DNA, 594 bp, Homo sapiens
aatccatgcatttacagccacctgatttttgtttgtttgtttgtttgagacagagtgtccctctgtcacccaggctggagtgcagtggctcgatctctgctcactgcaacttccacctccccggttcaagcaattctcctgcctcagcttcctgagtagctgggataacaggtgcatgccaccacgcccagctaatttttttttttttttgtatttttagtagagacagggtttcagcatgttggtcgggctggtctcgaactcctgaccttgtgatccacccaccttggccttgcaaagtgctgggattacaggcacgagccaccrcacccagcctacagccacctgatttttcaacagagacattaataacataccacccagaaagacagtctcttcaataaagggtgtttggaaaattggatttccaaatgcagaagaatgaaattagacccttatcccataccgtatacaaaaatcaactcaaagtggattaacacttaaatgtaagacccaaagctatgaaactacaataaatcatagggggaaagctacatgacattggtctggagagtgacttcttggatgactcca

SEQ ID NO: 252775 - DNA, 552 bp, Homo sapiens
cacaccctccttgccctcccaaagtgctgggactacaggcatgagctactgcaccgagccacttttaatatctcatactctcttccctccaattactctttctctaacatgcatcttaagaatttatgctattcaaattctaaaacttaagtgtagttcatcttaagtgtagctcatctttgtcacattctcctatttctcttttagcctgctccaccaaaagtgtatcctccccaattcaaggattcaaagatcagtgggaatcagtaaggaacccacaataggacctgccagccaaaccaaacattctgcttcttcccctgtcaacatccccctacatccacwcccaacccatccaccgtttgccacaggctgtgaaagaagtgcttccatctggctagacaagtagctgtgggaatgggaaatgactccagtataaatacatacaaacatatgtacacatgaagatatgtagatacatttttttaaatggaaaaagagcaaatgtacacaacaaggcacacaaatagaaaaaccagaacagatgttaag

SEQ ID NO: 252776 - DNA, 568 bp, Homo sapiens
ttagtctttttaaaaaaaataagtaaagcaggccgggcacagtggctcatgcctgtaatctcggcactttgggaggccgaggcgggtggatcacctgaggtcaggagttcgagaccagcttggccaacatggtgaaaccccgtcactattaaaaatacgaaaattagccgggtgtggtggygggtgcctgtagtcccagctacttctgaggctgacgcaggagagtcacttgaacttggaaggcggaggttgcagtaagccgggatcataccactgcactccagcctgggtgacagagtgagactctgtctcagaaaaataaaataaaataagtaaagcattgataataaagtattgctcagtggaatttgaggctcctcattcctcattagtttcaatgtttagtaacctatttgagaaaacatgtgatttctcaaaatttaacttgtggttattaatccgttacagaactaccaagaacttctgttggttttgttacaataagaaatgggatatcttttatcatcattctttagaaatgttgttttcccatatgattgaaagagct

SEQ ID NO: 252777 - DNA, 425 bp, Homo sapiens
taccaggttttaaaaggttatgtacattagatattacatcattgtttgaagtacattagtgcttttgaaaacagctgccttcaatctccattctcataaaaagagcaaccacacagtctgtgctttttataatggctttaaaatgtatattaacttagaaattctgatccacactaatgtttgtgtaccgtaatgtagaatattaatggagaacataaaggacgaaaastctttacaaaatagggcagaaggagaaacttatgcttctcaaagtgtttttggtctcaaaatcgtttttctttggcaatgaatatgttttttataaaagcttcatgaggcaaaattactaataaatgtgcgtatttagtacattatgttagaagagagtagagccattgagtttgagaaacttttctagatgaagg

SEQ ID NO: 252778 - DNA, 545 bp, Homo sapiens
ttttctttggtctttttatttatttgaattggttgaattttttttttcctttgatgctgtgcatttgccttcacactcacttctaaaaatttatccaaaatattcttaatattgattctcaacctctcctgcaatgtttcctgaacattcctcagctattcactatatcttcattgatatttcaaagttgtrccaaacaacttacagggtgaagtacttgcgaaatgacagaattggtaaagacaaggttccagaaccttgtttttatattcaaatcaaaataattggtgtttctaaaaagaaagactaaaagacattgtgtgacttctaatgatctagattaatgttttcctgacttactggcacactgttatgacttgagacttttcattaaaaaaataaaaaaaataggtcctggattcttcttcctccatgcccggagtagaagggcaccttctgtcatccaaggagcacaaggagcatctcaggtctgacttgcaagactcctgggagtcagcctgtgttgcggcactaaggaaacacca

SEQ ID NO: 252779 - DNA, 551 bp, Homo sapiens
gtctttttatttatttgaattggttgaattttttttttcctttgatgctgtgcatttgccttcacactcacttctaaaaatttatccaaaatattcttaatattgattctcaacctctcctgcaatgtttcctgaacattcctcagctattcactatatcttcattgatatttcaaagttgtaccaaacaacttacagggtgaagtacttgcgaaatgacagaattggtaaagacaaggttccagaaccttgtttttatattcaaatcaaaataattggtgtttctaaaaagaaagactaaaagacattgtgtgacttctaatgatctagattaatgttttcctgacttactggcacactgttatgacttgagacttttcattaaaaaaataaaaaaaataggtcctggattcttcttcctccatgcccggagtagaagggcaccttctgtmatccaaggagcacaaggagcatctcaggtctgacttgcaagactcctgggagtcagcctgtgttgcggcactaaggaaacaccaggaatttggtttgag

SEQ ID NO: 252780 - DNA, 532 bp, Homo sapiens
atctatttaaattttaaagaattcttattcattcattcagccagtaaagaytgcaggctcttgatagctaaagcaccatgctagacatggggtacacactgagcagtgatgtgaccctctcaaggaccaaagggagccaggagtttccttggggagacaaatgttgattacatcatcacatcacacatggatgttgggacatggatgctgggacatggatgctgggaaatgccatatgcattcagacacatggaaaatctgcctctgcctttttaaaaacgcaacaatgaggttaagacataaagaaggaatatgatgatattagtcagaccaaacatggggaaagaacattttaggcagaaggaacagctgtggtggccaaacacatcttatttagtataagatcatctcaacatataaagataaaagtgactcgaactcctgacctcaggtgatccacccgccttggcctcccaaagtgctgggattacccaacatggtgaaaccccatctctattaaaaatacaaaaat

SEQ ID NO: 252781 - DNA, 532 bp, Homo sapiens
atctatttaaattttaaagaattcttattcattcattcagccagtaaagactgcaggctcttgatagctaaagcaccatgctagacatggggtacacactgagcagtgatgtgaccctctcaaggaccaaagggagccaggagtttccttggggagasaaatgttgattacatcatcacatcacacatggatgttgggacatggatgctgggacatggatgctgggaaatgccatatgcattcagacacatggaaaatctgcctctgcctttttaaaaacgcaacaatgaggttaagacataaagaaggaatatgatgatattagtcagaccaaacatggggaaagaacattttaggcagaaggaacagctgtggtggccaaacacatcttatttagtataagatcatctcaacatataaagataaaagtgactcgaactcctgacctcaggtgatccacccgccttggcctcccaaagtgctgggattacccaacatggtgaaaccccatctctattaaaaatacaaaaat

SEQ ID NO: 252782 - DNA, 545 bp, Homo sapiens
caatgaacattcactacacgtctcaacttataatgctgttacatctgaataaactcatcataagttaaaaattaaaaacacaacttcaacttatgatactttcaacaggatgggtttatcacagtgtaactccattgtaaatcgaggagcatctgtatatactatgaagcattttggaggcaggggcatgagaacataaaccacacctttggcaaaatgatgaacaatggggagctgtggcrcttcctgcaacttaccagggactatgtagtagcttgaaatggtcactaattaaatggtttcataaaaccaaccacagcctggaggcttctgcttataaattattttttgtttgtaaaaatgtattacatcattcattgaaaaaaatccccaaatattttattttctaaatttaaaatagaaagtttttatttgatccagcaatctgattactgagcatatatctgtaagaaaataaattttctgcccaaaagacatcggcactcgcatgctcatcactgcgctattgacaatagcaaagacat

SEQ ID NO: 252783 - DNA, 590 bp, Homo sapiens
atttgttcacaaatgtatacaaatgaatactttgatatatagacatatttaaataaaatgtaaaaagcacttatatattttrggggctttttagatttaaaatacattgttgatcacatctgctaatattccatatttacaaaggcaacgccaccatctaaattaatggtcgtaattagcagattgagttttccaccacaggcaaatatctgttttttagagttgtaaatgagcatttaaaggttgaagcagcgggtagtacattctctgagaacaaaatgattatttaacaaaacttataaagaatgaagtattcatactaattaattcttaaatatagattatgtacatgaattcttaatattccattttaaattttatttaatattaatttagccagtgagaagaaattgtgaaagttttatttggtaattttgcttgatttctgttctgtttatatagagtttctgagtattattctcaagaattaggtgaaaaaaattttaaattaattattatatatagatttagaaactcactttaacatgaaagatagctttaatattttaatatttaatgtaattgacaca

SEQ ID NO: 252784 - DNA, 590 bp, Homo sapiens
atttgttcacaaatgtatacaaatgaatactttgatatatagacatatttaaataaaatgtaaaaagcacttatatattttgggggctttttagatttaaaatacattgttgatcacatctgctaatattccatatttacaaaggcaacgccaccatctaaattaatggtcgtaattagcagattgagttttccaccacaggcaaatatctgttttttagagttgtaaatgagcatttaaaggttgaagcagcgggtagtayattctctgagaacaaaatgattatttaacaaaacttataaagaatgaagtattcatactaattaattcttaaatatagattatgtacatgaattcttaatattccattttaaattttatttaatattaatttagccagtgagaagaaattgtgaaagttttatttggtaattttgcttgatttctgttctgtttatatagagtttctgagtattattctcaagaattaggtgaaaaaaattttaaattaattattatatatagatttagaaactcactttaacatgaaagatagctttaatattttaatatttaatgtaattgacaca

SEQ ID NO: 252785 - DNA, 527 bp, Homo sapiens
tgtttttcagaaatgttttaaacttttctttaaataatcctattaattgtttgttaattatacatctaaataacttactgagttttaaaagttagtttcatcattgatttttaagagttttccaggtatatgttcctgtcagctacaaataaagatagttttacttcttcacctattcttatgcctcagccatttctcttgattaattgcgttgattaatacttgcattaatgtgctgaatagaagcagatgttgtgggcatactgccctagttcttggaaacattactactcattaaatgttactgamtttaaaagatatgtgggtgtctgtgcatgcaggtaaacgtatgtgtgtagatatgtctgtgtgtgtatatacataatacacatatatatacaaaacatgtattatgtatatatatgtaatacacatatgtgtattacatatatgcatgtgtgtatacatgtatacatatatacacacacgtatatatgtaatatacgtaatacataatacatatgtat

SEQ ID NO: 252786 - DNA, 673 bp, Homo sapiens
cccctgtgacacacaatttactcatgtaacaaacctgcacatgtacttcttgaacctaaaataaawgttggatgggaaaaaaatttttaaaaagaaaatttagttccattaatctatagtctcattccatttcgcatgtattcttacactattttattttgtcaacttgttacatttttcatgttatctatagaccataaattactatcaaggagagattcatacactctgttctttaatagcattctagtaaatagtgtgggacctgagaataggttaaaatatgaatgcaatgtattaataaatggataaaactaatgtaatcctttatgtcatctaacagctaattttaggcacaaactacaaaaatagtagaaggaagatacaaaattgcaattttctttctctcctaactattttcataaatctagaagttttaaaaataagtttcaaagttgtatgggaccaaaattttccaaagataaaacccaaaatagttccagagattcatctgttcatgacttgctcacagtgatttgtccacccacctgacctgcagaatttcaactatcacatcagaagaactttagagtcagcaattgtggcaaaatgcaacttgtagccagcactgagaatatggattgtccacatcaaaaactcagagagttcgtta

SEQ ID NO: 252787 - DNA, 597 bp, Homo sapiens
taattctactcattcaaagaaagaaattacttcatttctaactgaatacaagattcctttttaaagtaacgattggcaaacaatattatttggctttgatatgaaataaacctaaatgtactttgagggttattaaatcactgggmtcttcaataccaagacgaataagaagatacaattgcttcattttcttcatgctttcccctgtggactgaatgttctgatcttatttacaaagtgattttttgtattggaaaggtaattttaaaaatcatgcttttaccagaaaggactgggaatgaaagttaatatggtaaaagaaaaaaaaatgagccagagtaatacattctatttccatttcacccatttcttgtccctcacatgagtggaaaaaaatggatatttacattgaatttttgagagtttgacatgttcttaactaaatacatcttcaatagaacattttcaaaattctcttataaacatctctctatgagcattttccaaggaacagaagaagtctatttttaacaaagtctgtaagctctgccagaaggagacgctttgcctcttggaggaagccgcttcactgagcac

SEQ ID NO: 252788 - DNA, 597 bp, Homo sapiens
taattctactcattcaaagaaagaaattacttcatttctaactgaatacaagattcctttttaaagtaacgattggcaaacaatattatttggctttgatatgaaataaacctaaatgtactttgagggttattaaatcactgggatcttcaataccaagamgaataagaagatacaattgcttcattttcttcatgctttcccctgtggactgaatgttctgatcttatttacaaagtgattttttgtattggaaaggtaattttaaaaatcatgcttttaccagaaaggactgggaatgaaagttaatatggtaaaagaaaaaaaaatgagccagagtaatacattctatttccatttcacccatttcttgtccctcacatgagtggaaaaaaatggatatttacattgaatttttgagagtttgacatgttcttaactaaatacatcttcaatagaacattttcaaaattctcttataaacatctctctatgagcattttccaaggaacagaagaagtctatttttaacaaagtctgtaagctctgccagaaggagacgctttgcctcttggaggaagccgcttcactgagcac

SEQ ID NO: 252789 - DNA, 532 bp, Homo sapiens
ttcactgatgagcttttggcccctttctcgccctaagcagaaatgagatggattattatgcagaggcctttaacttctgagtttgaaaatcccacttccgaattccagatatgccaccctagtttaaagaaraaataacagcttggacattaaaagtttatcaaattctgtaatcccagcactttgggaggctgaggtgggcagatcacttgaggctaggagtttgagaccagcctgaccaatgtggtgaaaccccatctctactaaaaatacaataattagctaggtgtggtggtgtgcacctgtaatcccagctatttgggagcctgaagcaggagaattgcttgaatctgggaggtggaggctgcgatgagccaagatcatgcctctgcactccagcctgggtgactgaatgagaatgtgactcaaaaaaaaaaaaaaagtttatcaactccagtcaaatgtgctttcacgaattgccctcctcccatcactaccaccatatcccaaagctacccacgggaagaggaag

SEQ ID NO: 252790 - DNA, 649 bp, Homo sapiens
taataaaattgaagaaaacacagataaacaaaaagctatcccatgtttatgaaccaaaataattgatattgttaaaattttcatactacccaaagcaatctaaagatttgatgcaatctctaccaaaattccaatggcattattcacagaaatagaaaaaaaaataaaattaatgtgtagtcataaaagaccctgaatagccaaagaaatctttatgaagaagaacaaagttgctggtacatcatgctgcctgacttcaaaatatagtacaaaattgtagcaatcaaaatagtatggtactggcataaatacagacatagaacgatggaacagaatagaaagtccagaaataaatttaaattacacgtttgtggtcaatttatcttggacaaaggtgccaaaactacacaatgagaaaaggatagtctcttcagtgaatggtgggaaaactgaatatctacatgcaaaagaatgaaattgtaccattatcccatacaatatacaaaatcaactcaaaatatattaaatatttaaatgtgagacttgacattctctctagtaggagaaaacagagatgaaaagctcayaacattggtcttggcacagactttatgtatatgaccccaaagcacaggcaacaaaagtaaaa

SEQ ID NO: 252791 - DNA, 607 bp, Homo sapiens
tagtttagtccatgcagttaattcctgttctgcttgatattcatgaacatttcagccctccctgaatcctgaaagtttttcctttatgctgatgtcacaatctccaaagttatcagaaacctgcattcaagagcacctgttaggccagacacagtgactcatgcctataatttcagcactttgggaggctgaggccagcggatctcttgaggccaggagttcaagaccagcctggccaacatggcgaaaccccatctctactaaacatacaaaaattagccaggcgtggtggtacatgcctgcagtcccagctacttgggagactgatctcctcatgcttccctcttcatgctcaygctttttttctgagacagagtcttgctctgtcgcccaggccggagttaagaatcacttgagcccaggaggcagaggttgcagtgagctgagatcatgccactgcactccagcctgagcaacagagggagactctttccctgcccaaaaaaagagcacctgttagagttttagagttttacagctgattataaaactaccttttataaaatcagttttatagctgattgtaaaaccaaagaggaccaaaaca

SEQ ID NO: 252792 - DNA, 629 bp, Homo sapiens
atcagaattataggagtttctcataattttgggacacataccaataacatatttataggaatacagcccaaagaaaaccaaacaccattttatatttgacaatgcttcctgtataatttttagaccaaataagccaaatatgtcatttttggattttagrgaacctattaataacattttaaaagactagttaggtcagaaaaaaacataatttataattttatcttggaaagtttgtcaaatatcaaaggtataaaacacttgatattacaaaataggattacaagtcattgcaaaataattcatttaactggctgggcgtgctggctcatgcctgtaaccccagcatttaaggaggccaaggtgggtggatcacctgaggtcaggattttgagaccagcaggccaacatggtgaaaccccatctctactaaaaatacaaaaattagcctggtgtagtggcgcatgcctgtaatcctagccacccaggaggctgaggcaggagaatcacttgaacctgggaggcagaggttgtagtaagccaagattgcacaattgcactccagcctgggtgacagaacaagactctgtcgaggcgggtggactttgcaaggctgaggtgggcagatc

SEQ ID NO: 252793 - DNA, 629 bp, Homo sapiens
atcagaattataggagtttctcataattttgggacacataccaataacatatttataggaatacagcccaaagaaaaccaaacaccattttatatttgacaatgcttcctgtataatttttagaccaaataagccaaatatgtcatttttggattttagagaacctattaataacattttaaargactagttaggtcagaaaaaaacataatttataattttatcttggaaagtttgtcaaatatcaaaggtataaaacacttgatattacaaaataggattacaagtcattgcaaaataattcatttaactggctgggcgtgctggctcatgcctgtaaccccagcatttaaggaggccaaggtgggtggatcacctgaggtcaggattttgagaccagcaggccaacatggtgaaaccccatctctactaaaaatacaaaaattagcctggtgtagtggcgcatgcctgtaatcctagccacccaggaggctgaggcaggagaatcacttgaacctgggaggcagaggttgtagtaagccaagattgcacaattgcactccagcctgggtgacagaacaagactctgtcgaggcgggtggactttgcaaggctgaggtgggcagatc

SEQ ID NO: 252794 - DNA, 629 bp, Homo sapiens
atcagaattataggagtttctcataattttgggacacataccaataacatatttataggaatacagcccaaagaaaaccaaacaccattttatatttgacaatgcttcctgtataatttttagaccaaataagccaaatatgtcatttttggattttagagaacctattaataacattttaaaagactagttaggtcagaaaaaaacataatttataattttatcttggaaagtttgtcaaatatcaaaggtataaaacacttgatattacaaaataggattacaagtcattgcaaaataattcatttaactggctgggcgtgctggctcatgcctgtaaccccagcatttaaggaggccaaggtgggtggatcacctgaggtcaggattttgagaccagcaggccaacatggtgaaaccccatctctactaaaaatacaaaaattagcctggtgtagtggcgcatgcctgtaatcctagccacccaggaggctgaggcaggagaatcacttraacctgggaggcagaggttgtagtaagccaagattgcacaattgcactccagcctgggtgacagaacaagactctgtcgaggcgggtggactttgcaaggctgaggtgggcagatc

SEQ ID NO: 252795 - DNA, 629 bp, Homo sapiens
atcagaattataggagtttctcataattttgggacacataccaataacatatttataggaatacagcccaaagaaaaccaaacaccattttatatttgacaatgcttcctgtataatttttagaccaaataagccaaatatgtcatttttggattttagagaacctattaataacattttaaaagactagttaggtcagaaaaaaacataatttataattttatcttggaaagtttgtcaaatatcaaaggtataaaacacttgatattacaaaataggattacaagtcattgcaaaataattcatttaactggctgggcgtgctggctcatgcctgtaaccccagcatttaaggaggccaaggtgggtggatcacctgaggtcaggattttgagaccagcaggccaacatggtgaaaccccatctctactaaaaatacaaaaattagcctggtgtagtggcgcatgcctgtaatcctagccacccaggaggctgaggcaggagaatcacttgaacctgggaggcagaggttgtagtaagccaagaytgcacaattgcactccagcctgggtgacagaacaagactctgtcgaggcgggtggactttgcaaggctgaggtgggcagatc

SEQ ID NO: 252796 - DNA, 581 bp, Homo sapiens
aatgcacagggaataaatatgagcaaaatggtaagaagtgcaggtcctaggtcagatttcttgcatttagttgcaggctacaccaactttagagaaaagatttagtgaaaaataaaaatgaatcattaatacaccacttggcacagataagttattcagtaaacattaacatatktgcatttatgtttaaccatgggcttaagtgattatccagaaatctccctctctttgactatgtttgaatattagatacttcttaatttatctttgctctgaatttgttttttttcactcgttgtatactcatggaccattttatgtgtttcaggaattgatattttatttaaaaactgttactatagaaaattaacttttggatagtcctgttcagactaaaactatcatttgtaagatctgtattactgcaatcattggtgttaatactttgcattaattaaaattttttatggacatataataagtatttctcccaccttgatttttgtggctatcattttattcattccattgcttttttctcccacgtttgctatgaggaagttgataagtacgtaggcaaa

SEQ ID NO: 252797 - DNA, 427 bp, Homo sapiens
catatttgcatttatgtttaaccatgggcttaagtgattatccagaaatctccctctctttgactatgtttgaatattagatacttcttaatttatctttgctctgaatttgttttttttcactcgttgtatactcatggaccattttatgtgtttcaggaattgatattttatttaaaaactgttactatagaaaattaacttttggatagtcctgttcagactaaaactatcatttgtaagatctgtattactgcaatcattggtgttaatactttgcattaattaaaattttttatggacatataataagtatttctcccaccttgatttttgtggctatcattttattcattccattgcttttttctcccmcgtttgctatgaggaagttgataagtacgtaggcaaacgatagattgttttg

SEQ ID NO: 252798 - DNA, 427 bp, Homo sapiens
catatttgcatttatgtttaaccatgggcttaagtgattatccagaaatctccctctctttgactatgtttgaatattagatacttcttaatttatctttgctctgaatttgttttttttcactcgttgtatactcatggaccattttatgtgtttcaggaattgatattttatttaaaaactgttactatagaaaattaacttttggatagtcctgttcagactaaaactatcatttgtaagatctgtattactgcaatcattggtgttaatactttgcattaattaaaattttttatggacatataataagtatttctcccaccttgatttttgtggctatcattttattcattccattgcttttttctcccamgtttgctatgaggaagttgataagtacgtaggcaaacgatagattgttttg

SEQ ID NO: 252799 - DNA, 516 bp, Homo sapiens
tagttttacagttttatgtttaaacctttaatccattttgaattgatttttktgtatggtgtgagataaggatacacaccatacacattcgtgttcttctgcatgtggatatctagttttcttaacaccatttattgaaacaaatgtctattcttcattacgttttctgggcacctttgtcaaaaatttattggtcataaatgcatgagtttatttctgggctccttattctgttcccctggtcaatgtgtctgtttttgtgcaagtgtcatgttgttttgattactatggttttgtgatacgtatttgttttggggggggatcgatttttatttgggtttctcacagtggttagagaacaaccacagcacaggaaatgcatcgccaagattgcccagaaaactgaccagctgcatcttattgcttaaaaatacacatattcacaataactgacaaatgttgatgtgcctcacacaggaatgtgttcacatttgcaatgctgtgtacagacttcac

SEQ ID NO: 252800 - DNA, 556 bp, Homo sapiens
aaaactgaccagctgcatcttattgcttaaaaatacacatattcacaataactgacaaatgktgatgtgcctcacacaggaatgtgttcacatttgcaatgctgtgtacagacttcacttcgttcaacatagattttggtttaatggaattcaaatgcggatgcttgttcacagccttggatttgtctgtttttggagagatacaacctccatgagtatatctgcatgaaaaccacagacaatgaaggtatttcttcattgatttatttattcttttgactgtagcaacaaaccctggatgacacccttccttttaattcacctggaaaccagactcaatcaaatctccctggtcccctcactattccttcaaattccctatttctatctcttcctgaggagggtaacctcctgtagcaggggtcagactgtgacttgggaatcaagcctaggtctgcaggttgccttttcatcttcttgtaaaatattgtaggacactgcagtgaatccaacagttaacactcagagcagttccctgctctaactcaggaaagag

SEQ ID NO: 252801 - DNA, 477 bp, Homo sapiens
  misc_feature (1)...(477): n = A,T,C or G
ttcaagcccttgccaatgtggaagccccctcccccccaccaaagctctagtgtcctaggtcaaacctcaagactgctgtgcaagaatttcaaagccagtggatcttagcttgctgggctctgtagggntgggacctgccgagccagaccacttggctcactggcttcagccccctttccaggagagagaatggttctgtcttgttggcattccagttgccactgtggcatgaaaaaaaaaaaacctcctgcagctagctcggtgtctgcccaaacagctgcctagttttgtgcttgaaacctagggccttggtggcagaggcactggagggaatctcctggtctgtggattgtgaagaccrtgagaaaagcatagtttctgggtggagtgcaccgttcctcatggtacagtccctcggggcttcccttggctaggggagggaattcccccaaccccttgcacttcctgggtgaggca

SEQ ID NO: 252802 - DNA, 585 bp, Homo sapiens
acagctgcctagttttgtgcttgaaacctagggccttggtggcagaggcactggagggaatctcctggtctgtggattgtgaagaccatgagaaaagcatagtttctgggtggagtgcaccgttcctcatggtacagtccctcggggcttcccttggctaggggagggaattcccccaaccccttgcacttccygggtgaggcaatgccccattctgctttggctcaccctccgtgggctgcacccactgtccaaccagtcccagtgagatgaaccaggtacctcagttggaaatgcagaaatcacctgcattctgcattgatctcactgggagctgcagactggagctgttcctatttggccatgttgccagcaaattctgagatttttttcaaaagtgcaaagaaagacatctgaggggtgctgacatattcgggtcacctcaagccacatgccagcttgcttgcccctgttggattcagcagagggagataggccttgccatacctgtggtgtctgccaaagcttcctcctggcaattcttgggagtgctgatacctgggccacagttagtccaagtttatc

SEQ ID NO: 252803 - DNA, 585 bp, Homo sapiens
acagctgcctagttttgtgcttgaaacctagggccttggtggcagaggcactggagggaatctcctggtctgtggattgtgaagaccatgagaaaagcatagtttctgggtggagtgcaccgttcctcatggtacagtccctcggggcttcccttggctaggggagggaattcccccaaccccttgcacttcctgggtgaggcaatgccccattctgctttggctcaccctccgtgsgctgcacccactgtccaaccagtcccagtgagatgaaccaggtacctcagttggaaatgcagaaatcacctgcattctgcattgatctcactgggagctgcagactggagctgttcctatttggccatgttgccagcaaattctgagatttttttcaaaagtgcaaagaaagacatctgaggggtgctgacatattcgggtcacctcaagccacatgccagcttgcttgcccctgttggattcagcagagggagataggccttgccatacctgtggtgtctgccaaagcttcctcctggcaattcttgggagtgctgatacctgggccacagttagtccaagtttatc

SEQ ID NO: 252804 - DNA, 581 bp, Homo sapiens
gtacctcagttggaaatgcagaaatcacctgcattctgcattgatctcactgggagctgcagactggagctgttcctatttggccatgttgccagcaaattctgagatttttttcaaaagtgcaaagaaagacatctgaggggtgctgacatattcrggtcacctcaagccacatgccagcttgcttgcccctgttggattcagcagagggagataggccttgccatacctgtggtgtctgccaaagcttcctcctggcaattcttgggagtgctgatacctgggccacagttagtccaagtttatcactgaagatcctatcaaagttttgtctgaaattccacttttgccttttgtcctaagtggttgtggacatctccaggggctgataccaaggactaggaacagctgagggaggcagaaaggttcagagtacatctctatttacagggaacagaacaccggcctccgagagtccatggagcaatgggaaaattgcagtgattactcatcactgtgaaacttctactttgaatacagtatcttctggcaagcataggggactgcagtcgacaatgctg

SEQ ID NO: 252805 - DNA, 581 bp, Homo sapiens
gtacctcagttggaaatgcagaaatcacctgcattctgcattgatctcactgggagctgcagactggagctgttcctatttggccatgttgccagcaaattctgagatttttttcaaaagtgcaaagaaagacatctgaggggtgctgacatattcgggtcacctcaagccacatgccagcttgcttgcccctgttggattcagcagagggagataggccttgccatacctgtggtgtctgccaaagcttcctcctggcaattcttgggagtgctgatacctgggccacagttagtccaagtttatcactgaagatcctatcaaagttttgtctgaaattccacttttgccttttgtcctaagtggttgtggacatytccaggggctgataccaaggactaggaacagctgagggaggcagaaaggttcagagtacatctctatttacagggaacagaacaccggcctccgagagtccatggagcaatgggaaaattgcagtgattactcatcactgtgaaacttctactttgaatacagtatcttctggcaagcataggggactgcagtcgacaatgctg

SEQ ID NO: 252806 - DNA, 573 bp, Homo sapiens
cccttacattcctttgcacctactttaagctatttactcaaggaaggattaggccgccttcattcagatctattactgaagctatacacacccccagccttccatgaaggtttgtgtcgatttcttataactatctttaaaatttttcccaccagcctgactgaactcccacagttgttgctactttttgaaattgaaatacttctaggaagactgattaagaacatatagagaaaagacatatttttcaactcctgatgaagaagaaacatccgtattaatatatagctaataaaaagataagagatgttgtggaaaacttcatacaagggtgcccactctcagaacttctattcaacatagtactggatgtcctagccagagcaattaggccaaagaaagaaataaaaggcatgaaaattggaaaggaagaagttaaattgtttctgtttgcagttgacatgatcttatatayagaaaacaccaataactctgccaaaaaatttagaattcataaatgaatttagtaaagttgcaggatactatgtgaacatacaaattcggtagcatttc

SEQ ID NO: 252807 - DNA, 562 bp, Homo sapiens
caaattgcaataataatcaaataatatgagcaatcatccagtaaaaataatctagtaaaaacagcaaaactcaaaagagtgatttttcctggttaagaccaaactaaccatagattgctatacatagtatctattataaatactgaattatatagcagcctgacaataaatacataaaatgtgtacacaaagattattgaacctgtacaatacagtagtaaatagtaactttatatttgcaaagtgactgatcattactatcagaatttgtacccattcttcatattttgttggtcatataaccagttactacaactgcaaaaacaacctaaggtcatgtttctgtgaagtccatccttttggtctttaaattttattatyctcaaaggtcaattatgatctcaatcttttcttgtaattttactgacaattctccttcacactgatttgttctttctctaattcctgtaaatagaaagaaccaaaaaaagttgaaaaaacatgtattgtacatataacaaacaatcatatgtggtatacaatatatatcaaatgagtatta

SEQ ID NO: 252808 - DNA, 538 bp, Homo sapiens
aatagaaagaaccaaaaaaagttgaaaaaacatgtattgtacatataacaaacaatcatatgtggtatacaatatatatcaaatgagtattaagataaacattcaaagagttttaaagaaaaaagtgttatagatattggagggcagaagagacgattgccattaagaacaggtggaggaggttatgccaaggacattgacctgaccctttaggaattagtgaaaattgaataggagaagaatgaggtatacaatgtgtgaaaaatacctaaattgatataacaggaggagaccttttcatatcaattatcattacttctgtgtatataaccatattagatacccacaaaygaatagaaagtggatagttcttgattgacaagtaagactaataatcccagatcatagtaaggtcttaacttcaagtcaataatctttattacttatggttcattcctctccctcatgttttccaataattttaaaatgcataattaaaacaattctcatttaaaaacatagtagccatgactaatga

SEQ ID NO: 252809 - DNA, 628 bp, Homo sapiens
taagcaagccccagaaagataaacgttgcatgttgtcacttatttggtgacatttaaaaatcaaaacaactgaacttatgaagacagagaagaatggttaccagaagcttggaagggtacttgggggaacaagcgggggtgtgaggtttggtaatgggtataaaaaaatagaacaaatcaaacctagtatttgacagcacaagagggtgactctagtcaataataatttaattacacatttgaaaatcactaagagtatagttggatggttggtaacacaaagaataaatgcttgagggtatggatacctttttccatgatgtgattattacacattgcatacctgtaccaaaatatctcatgtaccacatatataatatatatactgtatatatatagcatatatatactatttatacatatacagtgtgtgtatatatatatatatatacacacacatactatttacccacataaattaaaaacaattattttttttaaagtagggctttgtgagtggtgttttggatttaattttcaaattagaatttcaaatgccaatggcagagaatgctatgtttttcttaaaaggggtttctccattsactaacacacatttacaaaaagg

SEQ ID NO: 252810 - DNA, 617 bp, Homo sapiens
agcactcgcttatgcattttatttacttgtragtaagagcctttcttctttgttcaagggtgaattcctttagagaaccagaatctgcaaaaatctttgtctttggaactggaaattaacaatttaacttaaaaaacatcattgggacagtttaaccagggtggtggtggggttctaattattttttttcaaatgaaagtaaaaatggtggccagaagttaagccaagtattagattcaaagagaaggataaaataaaatttatttttattttatggcaaaataaaatttatttttattttatggcaaaataaaattaggagaatagaggacatagtgtgttaaacaatatagcttagtaaacattgcttaagactgaagctgttagaagaaccttacagaaacctgcaacatgtgcttagagataaaaaaagtaattcacgtttttgagtgttgtccactaagcactattttatgtattttgcatataatgtcccatttaattttcaaactatttgagatgttgtaggaaatagaggtaccaagagtcaaagtcaattgtttatagttccaagtctacctttagtgcagcactgtttagtacaactatctgtgact

SEQ ID NO: 252811 - DNA, 617 bp, Homo sapiens
agcactcgcttatgcattttatttacttgtaagtaagagcctttcttctttgttcaagggtgaattcctttagagaaccagaatctgcaaaaatctttgtctttggaactggaaattaacaatttaacttaaaaaacatcattgggacagtttaaccagggtggtgrtggggttctaattattttttttcaaatgaaagtaaaaatggtggccagaagttaagccaagtattagattcaaagagaaggataaaataaaatttatttttattttatggcaaaataaaatttatttttattttatggcaaaataaaattaggagaatagaggacatagtgtgttaaacaatatagcttagtaaacattgcttaagactgaagctgttagaagaaccttacagaaacctgcaacatgtgcttagagataaaaaaagtaattcacgtttttgagtgttgtccactaagcactattttatgtattttgcatataatgtcccatttaattttcaaactatttgagatgttgtaggaaatagaggtaccaagagtcaaagtcaattgtttatagttccaagtctacctttagtgcagcactgtttagtacaactatctgtgact

SEQ ID NO: 252812 - DNA, 617 bp, Homo sapiens
agcactcgcttatgcattttatttacttgtaagtaagagcctttcttctttgttcaagggtgaattcctttagagaaccagaatctgcaaaaatctttgtctttggaactggaaattaacaatttaacttaaaaaacatcattgggacagtttaaccagggtggtggtggggttctaattattttttttcaaatgaaagtaaaaatggtggccagaagttaagccaagtattagattcaaagagaaggataaaataaaatttatttttattttatggcaaaataaaatttatttttattttatggcaaaataaaattaggagaatagaggacatagtgtgttaaacaatatagcttagtaaacattgcttaagactgaagctgttagaagaaccttacagaaacctgcaacatgtgcttagagataaaaawagtaattcacgtttttgagtgttgtccactaagcactattttatgtattttgcatataatgtcccatttaattttcaaactatttgagatgttgtaggaaatagaggtaccaagagtcaaagtcaattgtttatagttccaagtctacctttagtgcagcactgtttagtacaactatctgtgact

SEQ ID NO: 252813 - DNA, 550 bp, Homo sapiens
accttacagaaacctgcaacatgtgcttagagataaaaaaagtaattcacgtttttgagtgttgtccactaagcactattttatgtattttgcatataatgtcccatttaattttcaaactatttgagatgttgtaggaaatagaggtaccaagagtcaaagtcaattgtttatagttccaagtctacctttagtgcagcactgtttagtacaactatctgtgactatggaaatgtttttaatctgtactgtcccatatggcagttacaaracccatgtaactatgtaactaatgagtacatgaatgtggttactgtaactgagaaaatgccacatttagctggtggcttccagattggacaacctagctctggagctgaagcatgtaaccataatgccataccaccaacttttgccggatagtcttgcagtactaggtagtgcaatctccatatttgtaataacacttgaaagctaaaaaaggagctagccattaaaagatgccagaaaacaacactctgggcctaggaaacacaagataaagatgaac

SEQ ID NO: 252814 - DNA, 550 bp, Homo sapiens
accttacagaaacctgcaacatgtgcttagagataaaaaaagtaattcacgtttttgagtgttgtccactaagcactattttatgtattttgcatataatgtcccatttaattttcaaactatttgagatgttgtaggaaatagaggtaccaagagtcaaagtcaattgtttatagttccaagtctacctttagtgcagcactgtttagtacaactatctgtgactatggaaatgtttttaatctgtactgtcccatatggcagttacaaaacccatgtaactatgtaactaatgagtacatgaatgtggttactgtaactgagaaaatgccacatttagctggtggcttccagattggacaacctagctctggagctgragcatgtaaccataatgccataccaccaacttttgccggatagtcttgcagtactaggtagtgcaatctccatatttgtaataacacttgaaagctaaaaaaggagctagccattaaaagatgccagaaaacaacactctgggcctaggaaacacaagataaagatgaac

SEQ ID NO: 252815 - DNA, 553 bp, Homo sapiens
tacaaatagcaaataagcatgtggaaagaaactcagcaccatcaatccttaggaacatgtaaatttcaacctcaaagagatagtacaatatatgtctaaattggctaaaattaaaatttctgaacattccaagagttgctgaggatttagaagaatcagaactctcagatactgctggtggaaataataaacaatagacctytttggggagcagtttgcacttctagatactgaacaaacagatataaaagcataaatccataaagatatttgcacataaatgctcacagcagccttatttgcaagatccaaaacttagaaagaacttaaatattcatcaataacaatgaaaaggtacaagctattgtaggcatcttggaatcacagcggtgagaaagaaccagacaaggagtgcatattatttcatttacatatgtaattccaggaaatactaaataacatagtgacagatgtagatcagtcagtgcttgggtaccaggaagagtgcatgggaaggagggattataaatgagtatggtgagtttggatgtta

SEQ ID NO: 252816 - DNA, 442 bp, Homo sapiens
aagtgagataatggaagactgttgaaaagcaatgatacatatgttataaaataagaatgtcacacatcatgagggcagatcaagagacatgatccttatgatatggaaaaagatattaactgtggaaatgttgttaattactttctaaatgtcattcattcattatattcatgctatattagcaaaagaaatatctattatctcttaatggttactgggccaaataaataccatattgatgaaataattaaatccttttaataagagcattttgattttgttaaatttatttttagatattaaaattttaaatgggttaaagtttcagagatctgagtaaaaaggtcartgttaatttgtgcttatgagagtgtgtctcacttcagttatataaataatacaaatgatagatacatgcagaaaagaagtcagaatgaatatg

SEQ ID NO: 252817 - DNA, 442 bp, Homo sapiens
aagtgagataatggaagactgttgaaaagcaatgatacatatgttataaaataagaatgtcacacatcatgagggcagatcaagagacatgatccttatgatatggaaaaagatattaactgtggaaatgttgttaattactttctaaatgtcattcattcattatattcatgctatattagcaaaagaaatatctattatctcttaatggttactgggccaaataaataccatattgatgaaataattaaatccttttaataagagcattttgattttgttaaatttatttttagatattaaaattttaaatgggttaaagtttcagagatctgagtaaaaaggtcaatgttaatttgtgcttatgagagtgtgtctcacttcagttatataartaatacaaatgatagatacatgcagaaaagaagtcagaatgaatatg

SEQ ID NO: 252818 - DNA, 395 bp, Homo sapiens
acaacatattgttatacaataatatgataataattacctgatgaattttctatgtataaaaaagaacggaggtaaattccacttaatgaaaagcatatctcttcatgcagggtcgaagagattaaatgacaggcccytgatgaagtacctggcatataacagataagtaattaataatagttatctctgaaatgttctatcgctcaccacatccatggattctgcagcaacactgtcacctttgcagtccttcattttctctaacacaaaagaaaggtaataggtcctgtttcacagtgatactgaagaatttgattgaaaagacatcaagtgcctagtatagagccttgcctatagtagtactcaatatattttttaatttctcaatttgacat

SEQ ID NO: 252819 - DNA, 632 bp, Homo sapiens
tttctctaccaccattaaccctccaccacttctgaggcaacttcacagagcagttaaatagaacttggtagagaggcagaatctggatcaaaactaaactaagctaaacacaaagtattagattaggggacaaaatatatgtaaatataatctgctaagtaacatgctaataacatatttgctccatagttttgatgatattgccatagacacatgagatcagaacatctctctgaaggggagggatatctgacagatattttacatttgaaagggtaatggactaaattttgcaaagggatrttaccttgaccatagctaagtctcaggccttccacattgatggctcaaaaactccatttttaccttttattttgtgaggcaatatggtttgttctcaggaatgctgctttttgtagaagggctcaacaaaacctatgtacaaatgaaaaatttaaagcctatggttctaagtatcaagagaagtgactttccacatttacccccaaagcataataatcagattgggtgaaaaccagcttctcagaatgttccttaaacagtttattacctaggccaaatgtgcagccaagtcagtgcctttaatatggtgcttctgtccctttaatgca

SEQ ID NO: 252820 - DNA, 597 bp, Homo sapiens
aaactgcacttcttagagttattatacaattaacatcttttcatatgtagtttctatatagaaagaaatgtaataggaaaattattttaaagtttcttccaagtgattaaaaatatcaagtacattaggaatcatcttaatttatttttgttttcattccagaatttctcagcaaactttgttcatattaagcctaaggtaaattgtagaacaatcactatcaacattatccaactctcttaatagatggagagcaaagtattaaagttatatgtgttataggccaaattaagagcatcattcttctacaatggctatagggtgaattctctgatattaatttcataattaaaaatacagatgttcttaccgaatcccastgttttagagagtagccaaagtcctatccatttcttattcagttcttcaaatcacaccactcccactccattccatagttatctgctgttcttatcctgtgaccattatcactatctacgttataccctagacatttttatgatatcaaatgtatctctcttgataggctctgagcatatggagggaaggaccaagttttattaatttttatatcac

SEQ ID NO: 252821 - DNA, 597 bp, Homo sapiens
aaactgcacttcttagagttattatacaattaacatcttttcatatgtagtttctatatagaaagaaatgtaataggaaaattattttaaagtttcttccaagtgattaaaaatatcaagtacattaggaatcatcttaatttatttttgttttcattccagaatttctcagcaaactttgttcatattaagcctaaggtaaattgtagaacaatcactatcaacattatccaactctcttaatagatggagagcaaagtattaaagttatatgtgttataggccaaattaagagcatcattcttctacaatggctatagggtgaattctctgatattaatttcataattaaaaatacagatgttcttaccgaatcccagtgttttagagagtagccaaagtcctatccatttcttattcagttcttcaaatcmcaccactcccactccattccatagttatctgctgttcttatcctgtgaccattatcactatctacgttataccctagacatttttatgatatcaaatgtatctctcttgataggctctgagcatatggagggaaggaccaagttttattaatttttatatcac

SEQ ID NO: 252822 - DNA, 563 bp, Homo sapiens
caagtcaaaaaactacagagataatcttccagaagaacagttagctaaactggaggggaggaactgaattgaataactgcccaatgttattaaatgacaaaaaaaatactcatgtggaatcatctcttcaacacagaaaaaaagacattatggatctttagaaatgaagcaaaagaagccacggtaaaaattttaacaattaggagtcattagctaaacaaatcctgacagctgaacagtcacacagacacctaacacaggcttgacttgtgaggctcccttaataggcccctctgcattttctgcaaacattccattttgttacttttctatggatcctaatatgtcattccctattctctctgtcagccacatgtgtttaaaaagcacaactaagacttcccttcatcagtgatcagaagagaaattctcttctgcatctcactgtattaatctccttggaaaaaaagagggacattgttggggaaaatgaatcaattgattcctttaagctttcaaaatgaaragagtctttattaggttttgtcattttctctcaaata

SEQ ID NO: 252823 - DNA, 501 bp, Homo sapiens
gtaatcccagctactcgggaggctgaggcaggagaatcgcttgaacctgggaggtggagcttgcagtgagccragattgtgccattgtactccagcctgagtgacatagctagactctgtctcagaaaaaaaaaagtctcattaaaattaaattgaagatgagccttagtgtttggaatgcttttatttaggggcatttacgtttatattaaaacctaaaagaaactagtcaccaccaccccacaaaatgttgcaagatgtcatctgaatagcatgaattactcctccacaaaactagatgtttcattattatttgagaaaactcatctttcaaccttctacaatatgggctatcattcatatcgaacttaattagaaaacagtttggaagttggaggaattcctaatttaaaacaattaaaggggaagttgtcaggttcacttttggtttgcttatctatctctcatagcagcactgaagagacctgtcttccccaatct

SEQ ID NO: 252824 - DNA, 580 bp, Homo sapiens
ggactggtgggcgattaagtgacctctattattataatagctttttgttagtgtcatttaaaaattattttaagttgttttttgttttttacagttagcacattttcaagtacagcttgaatatatatttttaaactggccagaatattaatacatttaaaggtacttcatctatctatatcctaatagtaacaggaaattataacaagaaatgttcctatcataaaaactctattgagatatagaaagcctgaytgtggcaaaagattcaaggtgtatgttaggcagagttcacttcggttatgatgaaacatctccatttatgcctccctcaagaatttatctacagaaagtgtcctgggaatatttttggaagaagctgttcttttttttcatgtctcacttgaaagaaaatgggatagctcttatctaaagtacagcattatgtatggatgtcttagtaagttgtcaggaagtaaatcaccttgacaaaggtaatggtgcacgcacacacacatacatacatgcgtatatgcatacatgggcatataaccgcatctatgtttctttgcagtggggt

SEQ ID NO: 252825 - DNA, 630 bp, Homo sapiens
acatgcatgtgtgggaggtactggtaaatgacttatggtcaaaacaaaataaataaaatacaaattgttttcttcctttatgtatcatatgcttgaggaggttttttgggggtttttttgtttgtttttgtggaagttacgtgtaataaattttaagctctttaaaatagccagcttcttggttcagaaaatatgcctttatcctttgcaattctaccttaaaatatatccagaaagaaaaaggaacagttaatttatttttctgaagaagtaacagttgctacaaatcctaaggatctcattcagttttcttattamctgaagataattttcaaaagtatgtctaatagttatccttaataaagccccaaacctgtatttattaaaacctctaccaaagtcactttgaattatttttataatactattatttattaaatgttaatcttgatatctagactatatttttagtgatttttatatatttattttgaaaaaatctgtatttagttcaagggataaaacgatattagactttttcttaagtgggacaatgatggctaacataggagacttggatgtacagactttgtattttgaacctagaagagaaactggcacataattgac

SEQ ID NO: 252826 - DNA, 586 bp, Homo sapiens
tatgaattattttaataactttgctgtagtaaatatataagaaaattgtactccttctgattatgctcaatccatatgacggtcaattttgttaagaagtatgtattgaataaaaaatcattttcaatatattgtacgttaatgttttaaaataaagatgctatgaattatataggtaagaactcatttgcattggtatttcaatccttcaaggactggttctgtggccttgagaraattatctaatatctctgaaccagcttccatctctgctaattatgaatacttcataggttttttttctgatggtcaaataaataaacataaataaaggatcagctctggtccataactcataaaaaccctcaatgaatggtggctgtgctgctgctaccacgactactagtaagccattaactattactacatttatcattaaatgtctgttttcaaacaatggacatttttagattcttccaatgcttgccaaaggcagatcttctaaaatcaaaacaaggaaacagaaataaatgaaatattacaggcatgctgatagaaactcaaaaatacaatctatcatgaaaga

SEQ ID NO: 252827 - DNA, 527 bp, Homo sapiens
tattggcattttcttttgaaagtgaatcttaatttatatcagtaaggttgataaaggagccagggagagaagaattttaaggataatgattttgttcagaagtaggaaaaataagaaaatgactgtacgccaaatacaaaaaaatggcaaatagtggaaataaatgtaaaaggaccatcttttttcaattatggttgaaggaaagaatccttaaggcctcgggaaaaggagccacatttgaattactttcttttgtaccccaggagctagcacagtaagaagcattgtcagagcttcttactctcacttgtttaaggactgggccaatactgatgkccaaggcctcagcaaagatggtagaaataggttttaattcttagctttttttctcatgagtttccacatgcaattgttaggaatcataaatgtatctctagtcctaatttatggaggttttggggtaagtttatttgcgcaatgacagagttactctttggctatgtagtccctagttgataaataaagtt

SEQ ID NO: 252828 - DNA, 442 bp, Homo sapiens
gacagaaactcctgaaatgccagagtcagttcctagacttttgccttaagtttttgacccttgatctcttaaataggaaaagatattgggatgacttttttccatctctctgtacagaaaaaatgcagaagaggaaaacctccatatgtgaagctatggcaagggagtctccccaccccgcgctccaacagagtctggagataaagtaagtttgagaagctagaaagtgtttttycccattatctcccaaacactgtcatttggctgcatgcagatttcactctggctttggcaaatgtgtccctttatgtaacaataaacaattatattgaaaagcaagattggagaaaaacatatatagtatcattattaaaactttgtgatgatcttatcaacaaaattgaagttaaacccttgatttattgtatgttttattatgtct

SEQ ID NO: 252829 - DNA, 521 bp, Homo sapiens
ggtactttacttcaaaaattttcagtgcctaatctacttttgtatgctacatgtttattaaatcatctatttgctttaaaaaatacacactaagataatcaatgtctaaatcacaattcctaggatttgtgttttgaggcttatctaggattcagatccaaggtataatcaggcttacactatgcaacagggattttgctagatatattaactagttgtcttttaaccctcatgaaacctttgtgaggttgcattgccatgactattttcaagatgaaaagattgaaaagttaaattgacacataggggctggttattaattacaggtttagccatgctcaaacatttcagaagcttatatatttttataaatataataaggtcttttctgttatattcctgaattttgttatattattttttcagttaatatcttcttgacttkttaatttatttgttttccatgagagatttctgttacaagcaaaatacatatagattcaaatctattgttctgtttt

SEQ ID NO: 252830 - DNA, 408 bp, Homo sapiens
aggtaagttacaaggtaagtttacagactttacatgtaaaaatgcaggttaaaagtgaagggtgaactctcattcattgctagttggaatgcaaaatggtacagccactcctagtttgacagtttcttacaaaactaaacatattcatattatataatctgattcaacaattgtgctccttggcatttactcaaatgagttgaaaacttatgtccacacaraaaccttcttatgaatgtttataacaactttattcataattgccaaacctggaatcaaccaagatggccttccaaagctgactggataagcaaactgtggcatgttcatacagggcaatattattcattacaaggttctgtcatgttttctctggcttggtagtttatttcttggtagaaatattgc

SEQ ID NO: 252831 - DNA, 559 bp, Homo sapiens
taaaccgatcagacaaaaatatcaccacagaggctctgaaaattagtttatcattggaaacaaagcccagaaatgtaagccaagacttgcatggtcaaccaacagaagataattgcccaataaaataaacatttatatgacccaaatatcttaatatatcctacacacacacacacacacacacacaccccaaatatccagggaamacttaaaaatcactcataataccaagaagcagaaaaattacaacttggaaataaaggaaaatcaactgataccaacactgagatgaatcagatattagaatcacttgacaaagattttaaagcaactattataaaaataattaaaaaactaattataaatattcttaaaaacaaaaaatagaaaaatttcagcaaataaataaaagttataaaaaagtaccaaatgaaaattatactgaaaaatatgatagcagaattttgaaacaaatctcactggatggactcaatagtaaatagtaacaaaaaatagaatcagtaaacttgaggactgatcaataggctttactcaatag

SEQ ID NO: 252832 - DNA, 595 bp, Homo sapiens
agttttcaaattgtcaaatggcaccgcacgaaacatcttgttggatttttttaaagactgcatgaagagaattaaaaatgagctaaagaaaattgactgaaatcaactgtagtttaggaaattcactatgttgaaatatgtgcttttaaataacatgtagggggtaaacaatctataatcagtcaagtagaatctggttgtcratatgtaaaagcaaagccaggataatcatggtaaagacatgtctgatggttaatttggaaaggacaatgcctatgacattgacattattgcagagaaaacagaaaaatatttggaagacgaaaggaaaaaatgaacattttgtatttgtagtgcaaagcacgttgactgtggcagaaactggtttttgttttgttttgttttgttttgtggggagcatgtcacgaaaatatatgcaaagattaaactgcaacaggttgggtcagtgcaatgctacataaacagtatgagagtttttgaattaaactggctcatgcaacaaaattatgtaatatcatagaaacaaaatctgagtgtataagctcatagtactgcaaggatccctgaaacccat

SEQ ID NO: 252833 - DNA, 584 bp, Homo sapiens
ctcctgcctcagcctcttgagtacctggtattacaggtgcaggccaacatgcccagctattttttttcgtatttttagtagagatagggtttcactgtgttagccaggatggtcgtcgatctcctgagcttcgtgatccacccacctcagcctcccaaagtgctgggattacaggcatgagccaccacgcccagcattaaattcacaaacatcttaagaccaatgttattcgcatcaattttaaatagaaaatggtatgtcctgagtggggtaagctactgcccaaattgacagacaacagcagatttggaatttaagctcatctagtcatcttccctaaccaaaattaccagtgacaggtacaatcagtggggaaagagacaatttaaaatgtggacagaaaaggtgtaaataactgtgtgcacttagatacactattttacctctctcaattcaatatcctcaatattcaaatgaagagagtcatgataattgccttagggaattataaaactaaatgagtagttcttgtraaattcctaacacaatgggtactaacaagtaataatgataacaataatcaa

SEQ ID NO: 252834 - DNA, 512 bp, Homo sapiens
atctacctttggtctttgctgttgatgagtttttccttcagatggagtttttgcatggtcatcctttttcttgatgttgatgctattgctttctgtttgttagttttccttagaacagtcaggcacttctgcaggtctcctgaagtttgctgggggtccattccagaccctgtttgcctgggtatcaccagcagaggctgcagaacagcaaaaattgctgcctgttcctccctctggaagcttcatcccagacgggcacaaaaggcaaggcagaactctcctgtatgaggtgtctgttgacccctactgggaggtgtctcccagtcaggaggcacaggggtcagggacctacttgaggaggcagtcagtcccttagcagagctygagtgagcgctgttctgggagatctgctgctttcttcagagctggcaggccagaacatttaagtctactgaagctgtgcccacagcaacccctccccaggtgctctgtcccagggagatgggagtttt

SEQ ID NO: 252835 - DNA, 569 bp, Homo sapiens
tactctttcattggttaattttcattaagaatcctttaaggagttgattgaaacaatcaggtgtattaccccatatgacctcatcagttgggtgggattcrgtatttgaataattacatttgacttataggtagaacttcaggttatgattttgagatattagtgttctttttgttctttatagcccctgttcaagagttaaaaagattaagacataacacaggcaaaatcaaaagttttctaaatttccattagaaataagtaaggacattgaattacataaagctagcctaagtactcattggaaaccaaatctaagctaaaacattcttttgagctccaaagagcttagagtacagcaggtttcagcttttgtatatttcccgatttgcattttttgaagccattaaatgtgtttgttcttagaacccctgtacagaaacgatgtcaatactataatattgcctgctattttttgcacatagctaataaaagatttgggtaatgtatttaagtataaatacttgagctgtgtaaatttatctgatgaaacaacaataaagccccta

SEQ ID NO: 252836 - DNA, 569 bp, Homo sapiens
tactctttcattggttaattttcattaagaatcctttaaggagttgattgaaacaatcaggtgtattaccccatatgacctcatcagttgggtgggattcggtatttgaataattacatttgacttataggtagaacttcaggttatgattttgagatattagtgttctttttgttctttatagcccctgttcaagagttaaaaagattaagacataacacaggcaaaatcaaaagttttctaaatttccattagaaataagtaaggacattgaattacataaagctagcctaagtactcattggaaaccaaatctaagctaaaacattcttttgagctccaaagagcttagagtacagcaggtttcagcttttstatatttcccgatttgcattttttgaagccattaaatgtgtttgttcttagaacccctgtacagaaacgatgtcaatactataatattgcctgctattttttgcacatagctaataaaagatttgggtaatgtatttaagtataaatacttgagctgtgtaaatttatctgatgaaacaacaataaagccccta

SEQ ID NO: 252837 - DNA, 611 bp, Homo sapiens
atcatcaaattttatgaattttcctcttccctgaacttcataggttctttacaaaaacaaaacaaaaacaaactaatgagatgtgttgaataactctgattttttttcttttcattttgtcctaattttatctcattatttcacttcctctttttttttgagtcagagtttcgcccttattgcccgggctggagtacaacggggatacctcagctcactgcaacctccgcctcccgggctcaagcaattctcctgcctcaggctcccgagtagccgggattacaggcatgcaccaccacacctggctaattttgtatttttagtagagacggggtttctccatgttggtcaggctgatcttgaactcccgacctctggtgatctgccygccttggcctcccaaagtgctgggattacaggcgtgagccaccatgcccagcctcccttcctcttttaacagttgaacggcatagaagtttaacaattgccattttccactatattatctattctccatgagatgggttatatttgtgtggttcacatttttttactcagcaacaatttataatttgtgacatctatatttgttttgaaatacaaaaattggt

SEQ ID NO: 252838 - DNA, 358 bp, Homo sapiens
ccaatcagaatgctttgtggaaaatatttgttctatcgagtcttaggctatggtttcactccagttccatgcagtacaaggaaatttcgaagactcatccagtcaatctatcacattttccctgcatatagtgctccaggacaacaacacatgggtgaaaatctattatatttttgaagaccactcttcacccttttaascaaaacagttttagaacttcccatggaagcttagttcagtatttgactgttttccctgctactgcagaccttttctctctagtttcagttgtttttgcaactagtggctcctttttgccctttaagggactatgggagaaatgaagtaaaagaggcag

SEQ ID NO: 252839 - DNA, 548 bp, Homo sapiens
tttgttgtttataagccacctagtttatggtactttgtcctggggataataatgtaattggcataattaggttaagatgaataaataattaacataggtaaagccctcagaatggtgcctgccacagagtaggatgtttgatttttataattatagmaaaacaaaaagaaggcattgacaatgcattccaaacattggcaaggtgaataaaataccagcatacatgaaataggttcatgtgtttacattattataataatatttttttttggtaattttattctgttctgcctttgatatgattagtttttagtcgctaggttgaactgcttcttaattttaagggtaagttaggaggaagaacaagtgtatctttccccccttattaaataagtcatagtcaggcttggaaatgaaaaagtaaaagtgcagtaattaattgttgtgttctatgaaataaaaaaatcttctgtttggaagagcctcagagatcagttgttgcagccacctaacaaacacagaaatttactcaaaagtaccacggacaa

SEQ ID NO: 252840 - DNA, 595 bp, Homo sapiens
attgggcattttaaattgtcagaataaagggaaactttccttctcttagtttctgtcctttcacttgcaatctgcaagacaaagtacaagctaattaacctctaagagcctctgattctcttctttctctggaacagcgataagcctgtcaaccttgcaaaagtactgtgaccattcaatgtgaagcactcataagtgcaccaacaaatgatgtctctctaaggagaaacttctgtagaataggattgtgctaaggcaattggaggtaaaagtctttaatactgctctttctttagggctgataattgtgtgaggtgaaattttaatatagaggacaagatatagaaaaagaattgggtcttagcaaaagggggtctaggttaaagaaaaggtctgtagaaaccaatgcatattttacagctaacattttaatgctgttttgtagtatagtgtcttctgacaattcttaccttgacagttctcagtgctgtctatgagatagccttatttttggcaatattrgaaagtactttccaagcttgcctgttatttatctttcctactccttgatatagttcttcccacttgtgtttgc

SEQ ID NO: 252841 - DNA, 580 bp, Homo sapiens
gacgtagccaaatgggtattgcaagtttcaaagaaataatatataggaaacatttagaatattcctagctaattttaagtgccattaaatcatttattattaatatatttgaaatcttgctgatcaaaagatgtttacattagaattctaccttcatatgtaattcatttactaaatcagtatctctcagaatgaggccaaaattcagtatttaaagaaataaaagatgataaaatattttcttgtgtgattcygatgattagccttgcttgggaagtactgcgtaggatgagacactttaatgtctcttatttttacccatttctcgccctctgcaatgtctaagacttggttcagattgtaattgcttcatgcctgaaataattcaagactattctgcatggttcccctttctctaaaattataacattgtagaaaattggggaatagtgtagctatttgaaaacacatttgaccctattaccttccttgaaaatcttgagagtcaatgttagagtgagacaggaactttgaactctttagtgagtgcataaggttcctaatgattgagatcatgttc

SEQ ID NO: 252842 - DNA, 601 bp, Homo sapiens
ctttaatgtctcttatttttacccatttctcgccctctgcaatgtctaagacttggttcagattgtaattgcttcatgcctgaaataattcaagactattctgcatggttcccctttctctaaaattataacattgtagaaaattggggaatagtgtagctatttgaaaacacatttgaccctattaccttccttgaaaatcttgagagtcaatgttagagtgagacaggaactttgaactctttagtgagtgcataaggttcctaatgattgagatcatgttcaaatctccaggtccgtctgtgtacatgccatttgaaagatctggaacaccatttcctactacggcgttrgtctttctgtgcacttgtaagcattgttttcactgcttactcatcccacccatctgtccttgctactgtatttaatatgttctcatccttcaaaacgtagctctaatgcagtcacatctgagacactcttcttaaccagtctacggatatacaagtatatctcttctatggcaacattggtcaatgtaggtgttttggtcaagtctgcaccatatgttccagagagcacagaagaatatacctaccac

SEQ ID NO: 252843 - DNA, 619 bp, Homo sapiens
agcaagttctatatacttttataattttgagagataaaaatatttcacatttctgtctacctattgatttctttagttaaaacaaaaagacattttaatcttayggcagtgttactgaatatataaaaacagagtggtataatagattatccaacagattttggaataaataaagtcaagaaaaaataatacatgctgaacaaagctaaaataataagtttaatttggctttgacagatattttgtaatctttgaacaccactgttagaggtatgagagagactgaaagtcaaccttttctaaagaacagcaccaaccacatccttggccttctcaaaacctaaggcagctcagttcctcatttcttatcaagcaagtttcaatatctctggaatacctttaaattccaagtccaaatacttttcatgattatctttgtccattcttctctacaaaacttttccaagtactcagctgatagagattccagaaacctgatgaacctcatgtctctgctgtgatcattttacttctatgtggccactctctcctttctctcagtccactgggcagccagctcttcctactcattcttagaaaacctactcaagtgttggtc

SEQ ID NO: 252844 - DNA, 544 bp, Homo sapiens
tttatttaaatctcaattttaaaatatgttattatatttctatactgaagatgacaattcatgtgcctctcttcttcacccctaattcagttgaaaaatccattttaattagcttcttaatcacatctggctattaatacatagttgttcttctattgttctcagaaaattgtgagctccttgaatgtagaatgtgtgctttctcttccttttcttttagttctcctagtatttagcccaatgctcaacgcatgtaaaatgaatgaatagataaatgaatttwcatggaacctgatccatgttcaacataaggacttactttctaatagttaggggtctctaaaaataatatagaaatgtttcagaggtttaaccattgttaaaaatacttaaagtggggactcaatgattatctgaaagggatatgtgggatggagaatttctaagatttttctatgcagttgaaatcggaaatttgttctccagtagcgttttaatataaagcacatatttaaaagagttccgaaaaggtttccacaggtat

SEQ ID NO: 252845 - DNA, 544 bp, Homo sapiens
tttatttaaatctcaattttaaaatatgttattatatttctatactgaagatgacaattcatgtgcctctcttcttcacccctaattcagttgaaaaatccattttaattagcttcttaatcacatctggctattaatacatagttgttcttctattgttctcagaaaattgtgagctccttgaatgtagaatgtgtgctttctcttccttttcttttagttctcctagtatttagcccaatgctcaacgcatgtaaaatgaatgaatagataaatgaattttcatggaacctgatccatgttcaacataaggacttactttctaatagttaggggtctctaaaaataatatagaaatgtttcagaggtttaaccattgttaaaaatacttaaagtggggactcaatgattatctgaaagggatatgtgggatggagaatttctaagatttttctakgcagttgaaatcggaaatttgttctccagtagcgttttaatataaagcacatatttaaaagagttccgaaaaggtttccacaggtat

SEQ ID NO: 252846 - DNA, 544 bp, Homo sapiens
tttatttaaatctcaattttaaaatatgttattatatttctatactgaagatgacaattcatgtgcctctcttcttcacccctaattcagttgaaaaatccattttaattagcttcttaatcacatctggctattaatacatagttgttcttctattgttctcagaaaattgtgagctccttgaatgtagaatgtgtgctttctcttccttttcttttagttctcctagtatttagcccaatgctcaacgcatgtaaaatgaatgaatagataaatgaattttcatggaacctgatccatgttcaacataaggacttactttctaatagttaggggtctctaaaaataatatagaaatgtttcagaggtttaaccattgttaaaaatacttaaagtggggactcaatgattatctgaaagggatatgtgggatggagaatttctaagatttttctatgyagttgaaatcggaaatttgttctccagtagcgttttaatataaagcacatatttaaaagagttccgaaaaggtttccacaggtat

SEQ ID NO: 252847 - DNA, 422 bp, Homo sapiens
ataagtaaatgcagaagagaattttaaagtcaatcagacagaggtcaaatataaaatttggatgaatggaaacacaacatactaaagtctgctaaaggtgtatacccttttaaatcacaacatactcatctagaaagcttcagtgaaaaatcctaaagtctttgcagatttttctttacccaatatgttaaattttaaagtggattcaatgaccccaagtctatgttccttgttttactaaaatagcttatygattagccaaggtctaaacaaagctttctacatgattcattgattaaaaataagataggagagcttattaacacagttctcagatacatccttattcataagcccccctcttttttttacttacctttcacaatagtaaaagcaaaagagcttatctacttttacatttc

SEQ ID NO: 252848 - DNA, 591 bp, Homo sapiens
ttgctttcctttgattttgtattaagcaccaccctgattggctgtctgtccacttgtcttctgtcagtgctgtattttatggaacatcttcagaactctgtgtggatcaagacctctcacctgctactcccacactgtcagtttttaagtcattttgaacccctgggttccagaaggcttctattgatttgtggcccccacatcctcattgctatgattaatgagtaaaattttaggatagcgtcttttactcagtgctggcctgcttagaagataaccgctatgacacactgacacagattgtctgattgtcttgaccctgattgtctgtcatgagaatattatgacttcggtgaatagtgtcctcttrgctttctctagaaacataatacttctggccttacgtaatgtaaccactgtaacatccttacttacctgaaccttttacttccttctttaagcatctgtccttgtaatttaaatctctcaacttggttcagagtaggtcatcactttcccctagcttctagaagctatgctacctgcaaattttctccatcccctaggaacttgccagagttttaaattcct

SEQ ID NO: 252849 - DNA, 591 bp, Homo sapiens
ttgctttcctttgattttgtattaagcaccaccctgattggctgtctgtccacttgtcttctgtcagtgctgtattttatggaacatcttcagaactctgtgtggatcaagacctctcacctgctactcccacactgtcagtttttaagtcattttgaacccctgggttccagaaggcttctattgatttgtggcccccacatcctcattgctatgattaatgagtaaaattttaggatagcgtcttttactcagtgctggcctgcttagaagataaccgctatgacacactgacacagattgtctgattgtcttgaccctgattgtctgtcatgagaatattatgacttcggtgaatagtgtcctcttagctttctctagaaacataatacttctggccttacgtaatgtaaccactgtaacatccttacttacctgaaccttttacttccttctttaagcatctgtccttgtaatttaaatctctcaacttggttcagagtaggtcatcactttcccctagcttctagaagctatgctasctgcaaattttctccatcccctaggaacttgccagagttttaaattcct

SEQ ID NO: 252850 - DNA, 546 bp, Homo sapiens
aaaaacaaatgttatatgttctcacttatatgtggaatctaaaacaattgaactcaaagaaacagagagtagaatggyggttaccagaggctgggagttgggggaggaaatggaaaggtgatagtcaaagaataaaaagtctaaattaggtggaatacgtttagaaaatttttttgtaatatattaaacagtgtggttaatacagtaaataataatgtttgtacatttcaaaatcactgagagtaaatttcaaatgttattaccacaaaaaagataagcattgaggtgatggatatgttaattagcttgatttcattaattcacattgtattcatggattatagtgtcaccttgtaccctataaacacaattatggaagaagagaaatcagaaagctattgaaaaagttcagatgagacaggctagtaattgaaaaatgttgaaatgtaagagtgaagatatattttttaaataatgcatatagaacatgcttatgggttatacataaagaatgaaaaagagaatcaataattaatttctggattt

SEQ ID NO: 252851 - DNA, 556 bp, Homo sapiens
gattctatgatgttctgtctcaaagaagcaagttggaagccgggcttacaaaatatctagtcctttgacatctctgatatctctagaaggactgaactttcatctgatattcaagatcttgaaagagcaatttaagggaaaaaaaagcttcttcccagaatgtattataaatctattagatatatagaaagaaaaggtcactgagttaagcgagccaggaagtttatattcaagaacaatatgtgtagttatgaatgtaatgaaaccttttgcttcaagaattaatttccccaatgtatagttggctgaataattggcccygtgaacgcagacaagctttcttatttctcaaaagcaatattggccagtgctcatttgaacgcacatgactttttgtgggatggcacatgccatgctcctgtgaagcaaattgagcttgtggtagttgtctgcaagtggtagagacatgggaaatagtctgtcactcagcatcaatttaaaatttaataccaaatattcttgttgtcaaaaactcttagtacatgagtcctaacat

SEQ ID NO: 252852 - DNA, 556 bp, Homo sapiens
gattctatgatgttctgtctcaaagaagcaagttggaagccgggcttacaaaatatctagtcctttgacatctctgatatctctagaaggactgaactttcatctgatattcaagatcttgaaagagcaatttaagggaaaaaaaagcttcttcccagaatgtattataaatctattagatatatagaaagaaaaggtcactgagttaagcgagccaggaagtttatattcaagaacaatatgtgtagttatgaatgtaatgaaaccttttgcttcaagaattaatttccccaatgtatagttggctgaataattggccccgtgaaygcagacaagctttcttatttctcaaaagcaatattggccagtgctcatttgaacgcacatgactttttgtgggatggcacatgccatgctcctgtgaagcaaattgagcttgtggtagttgtctgcaagtggtagagacatgggaaatagtctgtcactcagcatcaatttaaaatttaataccaaatattcttgttgtcaaaaactcttagtacatgagtcctaacat

SEQ ID NO: 252853 - DNA, 556 bp, Homo sapiens
gatacactatatcatagaccataaaacataaatctcaacaaatttaaaagaattgaaatcatagagygtgttcttcaaccacagtggaatcaaactagaaatcaataacagaaagataacgaaaagtcaccaaaaacatagaaactaaacaacacaattctaaatccatgagtcaaaaacaaagtctcaggataaatttacaaatacattgaaatgactgaaaatgacaatacactgtatcaaacattttgggacacagccaatgcagtgctgagagagaagtttatagcactaagtgtatatattacaaaaaagagaaagtgttaaatcagtcatttaagttcccccctcaagaacctagagaaacaagagcaaaatacatcccaagcaagcagaggcaagggaaaaaataaagagcagaagtcaatgaaattgaaacagaaaaccaacggagaaaaatcactgaaacaaagagttggttctttgaaaagatcaataaaatggaagaacatctaacaggactgacaaagaaaaagagagaaaacacaaagtacca

SEQ ID NO: 252854 - DNA, 556 bp, Homo sapiens
gatacactatatcatagaccataaaacataaatctcaacaaatttaaaagaattgaaatcatagagcgtgttcttcaaccacagtggaatcaaactagaaatcaataacagaaagataacgaaaagtcaccaaaaacatagaaactaaacaacacaattctaaatccaygagtcaaaaacaaagtctcaggataaatttacaaatacattgaaatgactgaaaatgacaatacactgtatcaaacattttgggacacagccaatgcagtgctgagagagaagtttatagcactaagtgtatatattacaaaaaagagaaagtgttaaatcagtcatttaagttcccccctcaagaacctagagaaacaagagcaaaatacatcccaagcaagcagaggcaagggaaaaaataaagagcagaagtcaatgaaattgaaacagaaaaccaacggagaaaaatcactgaaacaaagagttggttctttgaaaagatcaataaaatggaagaacatctaacaggactgacaaagaaaaagagagaaaacacaaagtacca

SEQ ID NO: 252855 - DNA, 556 bp, Homo sapiens
gatacactatatcatagaccataaaacataaatctcaacaaatttaaaagaattgaaatcatagagcgtgttcttcaaccacagtggaatcaaactagaaatcaataacagaaagataacgaaaagtcaccaaaaacatagaaactaaacaacacaattctaaatccatgrgtcaaaaacaaagtctcaggataaatttacaaatacattgaaatgactgaaaatgacaatacactgtatcaaacattttgggacacagccaatgcagtgctgagagagaagtttatagcactaagtgtatatattacaaaaaagagaaagtgttaaatcagtcatttaagttcccccctcaagaacctagagaaacaagagcaaaatacatcccaagcaagcagaggcaagggaaaaaataaagagcagaagtcaatgaaattgaaacagaaaaccaacggagaaaaatcactgaaacaaagagttggttctttgaaaagatcaataaaatggaagaacatctaacaggactgacaaagaaaaagagagaaaacacaaagtacca

SEQ ID NO: 252856 - DNA, 556 bp, Homo sapiens
gatacactatatcatagaccataaaacataaatctcaacaaatttaaaagaattgaaatcatagagcgtgttcttcaaccacagtggaatcaaactagaaatcaataacagaaagataacgaaaagtcaccaaaaacatagaaactaaacaacacaattctaaatccatgagtcaaaaacaaagtctcaggataaatttacaaatacattgaamtgactgaaaatgacaatacactgtatcaaacattttgggacacagccaatgcagtgctgagagagaagtttatagcactaagtgtatatattacaaaaaagagaaagtgttaaatcagtcatttaagttcccccctcaagaacctagagaaacaagagcaaaatacatcccaagcaagcagaggcaagggaaaaaataaagagcagaagtcaatgaaattgaaacagaaaaccaacggagaaaaatcactgaaacaaagagttggttctttgaaaagatcaataaaatggaagaacatctaacaggactgacaaagaaaaagagagaaaacacaaagtacca

SEQ ID NO: 252857 - DNA, 549 bp, Homo sapiens
gttaggagaatgagaggcctctctggatctgtatttataagccttactggaaaaaaaaagtcaattattttttagactcagctcacaccataataaatgtgaatctaaacaatcgctcaagtgctttctaagcaatggttctatctatgatcactcagacttccttcttttatttagtaaaaaggtaacaaataagaatggagtgccatttgcatgtttcttatttttactcaatatggagtccagtggttgagtaggctcatccagtagcaaagagaagcaaacaaaattgatttcctgtagcccacagtgattttccctagatttagagagcatgtgattccaagatgggtgtggggtaaaactctcaaggctttcctggcgagagacccgggcatrctggtggagaaaccagacatcatgcttgggaggttggggcctctctcctccttgaatgagctctgttttaggatgttgttcatgtgaaagtattgcacttacctcagcataaaatgtcaagccatcacatccttgggatagaaacaatta

SEQ ID NO: 252858 - DNA, 576 bp, Homo sapiens
tgtgtacattaatcagacattttgatcatgagtaatggtgatgccttcagaagtttggggtgggggtgtgggttttgtatatcttggaaggaatcctaagtccttgggtgacttcgaagcagtctgtatgggcgctcctcccacatccattgcatctttgtcagacacatggcccctaggctccactttgtccataggcatggaaaggtgaaagtgcctgggaattaatatctctggggacactctgaagcaatgactgctggttatatgggtataaatactccagctccctcaccccttggctaaagtaattccaaggcaygtactttgcagttttccagagttaccctgtgagattcaactgccatcacccactgtggtagctgacttaataatgcatcctatattgtgtggccgccttcccttccctgtctaacttctccctcactacccagactctctgtatctcccaatacaccactcacttgttcggggtcacttctggagtttccaaccccagatgatgtgcacactttcagaggtagaagtgaatctactaagcctagactaggtatc

SEQ ID NO: 252859 - DNA, 641 bp, Homo sapiens
aaatgaatgaatgagtggatcaatcaatcagccaaccagccaaaaataaaatgaaaaattgacagttgggtttctgcttttgtattyggtaactattttaaaattttgtatttaggtagctatttttttaaaccacatgaaagaaagggatgtttgttctgcacagcattctctggagtgattaggtagcattggtatttgtgcttcatgtgtctacaatctattgccatgcatttctaataacataatattccttttcaatatactgacttgtttttctttttcttttcttttttgtttttactggctaaatgctatagcattgtctttgaatattagcaaataatggaacatgggccaagggtgaaccatgacgaatttgtgttccagcagccctgcttctttagaattgacagtctggcttcgtggttaattcacagcatctgaggaatacatccgaagagggtgatactgtggcatgatggtaccaggattccaagttcattccaggtacagtcgatgcatcattcacagcagactcgtgagtgtccatcctgtgccagactccatcgcaggtgctggggataccaggcagaggatgcagtgttgccagctatcaggaagacctgacggtcaacaat

SEQ ID NO: 252860 - DNA, 641 bp, Homo sapiens
aaatgaatgaatgagtggatcaatcaatcagccaaccagccaaaaataaaatgaaaaattgacagttgggtttctgcttttgtatttggtaactattttaaaattttgtatttaggtagctatttttttaaaccacatgaaagaaagggatgtttgttctgcacagcattctctggagtgattaggtagcattggtatttgtgcttcatgtgtctacaatctattgccatgcatttctaataacataatattccttttcaatatactgacttgtttttctttttcttttcttttttgtttttactggctaaatgctatagcattgtctttgaatattagcaaataatggaacatgggccaagggtgaaccatgacgaatttgtgttccagcagccctgcttctttagaattgacagtctggcttcgtggttaattcacagcatctgaggaatacatccraagagggtgatactgtggcatgatggtaccaggattccaagttcattccaggtacagtcgatgcatcattcacagcagactcgtgagtgtccatcctgtgccagactccatcgcaggtgctggggataccaggcagaggatgcagtgttgccagctatcaggaagacctgacggtcaacaat

SEQ ID NO: 252861 - DNA, 453 bp, Homo sapiens
gagagcctgcagggggattttcggtgatctatgcagggatcaagctgccatggccaaggctctcaggacaaaggcctcatggagtcttttgtttgccaccgcatgtgactttactcctgcatctcctgcagagctctcccaggacagttgagtaagagtggagaagcaattggggtgaaccccaagactcagcctgatccsttgaggggctttgcagcataaattacacctcagagcctggggcaaaggagctgtgaggcatttttctctacatgggttagtcattggctacctgggctctcggtaagagtgatgtggctccagagcccaagaaaagcggcccctgcggtcctggggtggggagctcttagcagcacagcactcagaagctgcgagatgggtgcgcagagctgtgctagggatcctggagtctgggcaaacagcactgcatgt

SEQ ID NO: 252862 - DNA, 607 bp, Homo sapiens
agggacagcttcttgtcactcattgttctctagttagaaaggaaaagacttcccagctccagccacagactttactttgcaggagaaagttcggccaggtttgcatctggaggctgggaaaatgattatctggcatttgagcttctgtctgccatgccctgcaaaagaagaggtgctggtttttctccagtcatccctttgggtccattctctgtcccactctatcctcttcctggctccgtgcccttggaggccaatcctggatttcatcactaggctctgcccttggacttatcatttacttcagcctaaggaaggcaccaggaggagayaggaaagccagggagagaggctgggtgtttcctccctaccaaatgccacctttacccaaggccatgaagatactgccctttgtcaccttctgaggcattgttttccctccctatttacacctgctgtccacctggaaatgatttcccctctgatttttattatgaaagttttcaagtctaccgaaacattaaaaatagcttaatgaacactaatatccttccactaaattcaccaatagttaatgttttgccacattttttcaaaatatagatgt

SEQ ID NO: 252863 - DNA, 539 bp, Homo sapiens
ggagggaacaatgccacacaacatgaacagcaaggagggagcattccattctgagcagagggacgcgaggaggtggggcctgaaaggacacaggaggcactgaccccccgaggcaagggagatgtgccttctctgggagacagcggcttgggatggtggtggggcaggttccccggggaagacctggaccaggggctgggggtgggagttggagaggagagtgcagtcttgggagcagatttaaagttaagtggcctccatggaccccacatggcccagtcagtttggaccctcctgggagatcctgagttctgagcctaggcggtcttgtcctgcctctgctgagcacccgggccatggcagccatcaggatgcaggaaggtggggtcccctcccagcagctgggaaagcatgaaggaagttcatttctctgcagcagctatagkgatcgtgaggagaagtaactgaaaaggtcagacacacacttcacttacacagctcataagtcagtaaagaagcaaagcctgagacttcctcag

SEQ ID NO: 252864 - DNA, 459 bp, Homo sapiens
ctgtattagtccattcacacactataaagaaacacctgagactgtgtaatttataaagatttttaattgtttcatggttcttcaggctgtacaggaagcatggctggggaggcctcaggatcctgacaatcagtacagaaagggaagcatcatgtcctacatggctggagcaggaggaagagagacaagggaggtgccacatactttgaaaccagatctcctgaggrctctatcatgggatcagcacaagagagagagagactcatccccatgatctaatcgcctttcaccaggccccaccctcaacactgggaattacaatttgacatttaatttgagtggggacacaaattcaaaccatatcagctgccttttattttgatattgctcggttgctctgactaggatttctagtactatgttcaatagcagtggtgagagggcatcttggtcttcttt

SEQ ID NO: 252865 - DNA, 553 bp, Homo sapiens
agtgtgagaagcacaagatcagctctacatcaatatcccattggagaaaactagtattattcycttcatggctaatgtccactacattttccaaatgcctccatgcacagaagacaacaggagtgtccagacaatggtgagtgagaaagtcccctctagcctacccaggtcctgctagacccaagccctggaattttgactacagaaaacacatcttctgttttcagggaagagaagaagaaagggaactgtgagaatcaagtctacagagatggaaaatggatcagcagaaagagggtcagctgaatcagtctgagtcagatgggcacagttttacaagttgagaggggacagctgtgaaaaccatcaggttttaaggaccctgaccctgggtgagcctctctcttggctcccatcagagctcaaggcctgttctaatcagagattcccatggaggtctctgctctgagtctaattggaaaacactctccaggtttccctgagattcctcaggactctcatcctgaccatgaaaggattatttctgccccca

SEQ ID NO: 252866 - DNA, 553 bp, Homo sapiens
agtgtgagaagcacaagatcagctctacatcaatatcccattggagaaaactagtattattctcttcatggctaatgtccactacattttccaaatgcctccatgcacagaagacaacaggagtgtccagacaatggtgagtgagaaagtcccctctagcctacccaggtcctgctagacccaagccctggaattttgactacagaaaacacatcttctgttttcagggaagagaagaagaaagggaactgtgagaatcaagtctacagagatggaaaatggatcagcagaaagagggtcagctgaatcagtctgagtcagatgggcacagttttacaagttgagaggggayagctgtgaaaaccatcaggttttaaggaccctgaccctgggtgagcctctctcttggctcccatcagagctcaaggcctgttctaatcagagattcccatggaggtctctgctctgagtctaattggaaaacactctccaggtttccctgagattcctcaggactctcatcctgaccatgaaaggattatttctgccccca

SEQ ID NO: 252867 - DNA, 572 bp, Homo sapiens
aaatgttaatatagaattgtaaatctggagaagttccctggggaaatttgacgatgaggctgccccaggccatgacagaaagccagccctcagcagcacctgcacctgccctggagacagccccgtgcacagtgtcctggcgccccctggtggtctctgggacccyttcagggaggtttgtgcctgggctctcactgacttcaccctcgctgtgtgtttcacacagtaatacacagccgtgtcctcagctctcaagctgttcatttgcagatacggtgagttattggcgttgtccctggagatggtgaatcggcccttcacagagtctgcgtagtttgtgtaaccactatcaccactaatgtatgaaatccactccagtcccttccctggagcctggcggacccagctcatgtagtggttactgaaggtgaatccagagtctggacaggacagtctcagggaccccccaggctgtaccaagcctcccccagactccaccagctgcacctcacactgggcacctgcaaacacagagacaacctggtcagaaactgccacatatattcactgct

SEQ ID NO: 252868 - DNA, 572 bp, Homo sapiens
aaatgttaatatagaattgtaaatctggagaagttccctggggaaatttgacgatgaggctgccccaggccatgacagaaagccagccctcagcagcacctgcacctgccctggagacagccccgtgcacagtgtcctggcgccccctggtggtctctgggaccctttcagggaggtttgtgcctgggctctcactgacttcaccctcgctgtgtgtttcacacagtaatacacagccgtgtcctcagctctcargctgttcatttgcagatacggtgagttattggcgttgtccctggagatggtgaatcggcccttcacagagtctgcgtagtttgtgtaaccactatcaccactaatgtatgaaatccactccagtcccttccctggagcctggcggacccagctcatgtagtggttactgaaggtgaatccagagtctggacaggacagtctcagggaccccccaggctgtaccaagcctcccccagactccaccagctgcacctcacactgggcacctgcaaacacagagacaacctggtcagaaactgccacatatattcactgct

SEQ ID NO: 252869 - DNA, 572 bp, Homo sapiens
aaatgttaatatagaattgtaaatctggagaagttccctggggaaatttgacgatgaggctgccccaggccatgacagaaagccagccctcagcagcacctgcacctgccctggagacagccccgtgcacagtgtcctggcgccccctggtggtctctgggaccctttcagggaggtttgtgcctgggctctcactgacttcaccctcgctgtgtgtttcacacagtaatacacagccgtgtcctcagctctcaagctgttcatttgcagatacggtgagttattggcgttgtccctggagatggtgaatcggcccttcacagagtctgcgtagtttgtgtaaccactatcaccactaatgtatgaaayccactccagtcccttccctggagcctggcggacccagctcatgtagtggttactgaaggtgaatccagagtctggacaggacagtctcagggaccccccaggctgtaccaagcctcccccagactccaccagctgcacctcacactgggcacctgcaaacacagagacaacctggtcagaaactgccacatatattcactgct

SEQ ID NO: 252870 - DNA, 606 bp, Homo sapiens
ccaatatcacacatctggccagagttagccctattacctgtgtctgtgcctctaaacactggaggagactgctcccctgagacagctccaggggcgatgtgggacatgcctagtgaggttttcaggatgtcccacctgtcataacaactttatgtgactttgctttttctagtgtttacctgaaatatgcaatcagtgttcacatgtgtgtattttcaggagtccgtgattattcaagtgtcaatattcatctctttcttcctcttcctcagccaatatactcattttttgttactgctttattcaaaaattcaatccatagtgaattcaaatttatagtgtacaatttggaaaatgttggtatatgtgtrcagcctttgaatcagcacttcaatcatgctattagcaattaaattaacctctaattttttctctcacttctctgtaattttatttcaccatcttgttactctcaccacacttttctcagaaaaattcagatcttctccatgttaatttagaatagttgcattttctacaatttatacaaatgaaatcacaggagatttactgtgaattctttagcttcctacactcagcacaatt

SEQ ID NO: 252871 - DNA, 397 bp, Homo sapiens
ctcaccacacttttctcagaaaaattcagatcttctccatgttaatttagaatagttgcattttctacaatttatacaaatgaaatcacaggagatttactgtgaattctttagcttcctacactcagcacaattatttgataatgtcctcacattctaatgtgactgaggcatgccttgatttcaattgttcattgtatttcagtatatgaatatttctcaaattgtttaacaatgcaccaaatagtggatatttgatattttgtcttcgtttctgaattttatttagaaagcaaatactaagcatgggaatgtaaaaaaawtgagaaaatgatcttcttctgacctcattaataagaaacttgaacaactacgaaaaatgaacgcttcaacatat

SEQ ID NO: 252872 - DNA, 599 bp, Homo sapiens
tatttttggctctttaatagtagccattctgactggtttaagaaatatcattgcagttttaatttgcatctccctgataattagtgctgtttagcattgtttacttatttatcatccagcattttcccatgtatatcaatacatcaactggtgtaccttaaatacatacaattttatttgtcaactttagctccataaagctgaaaatgtaactcagtcttataataaaaaaatgcatacttatatttctacgtattttatcaatatgtgagaatataaacagaaaaacttgtacgaaaatagttataacagtttgtttataacatttatgttggaaagaaatttaaatttcatcaacaggaaaacaaatatacatattgtcattatttcacataataaactgatttatttacttaataaactgtcatttactgatgttatggattgattcagatatgaaatattcatatgtgtattagtacrtacatatgtatatatatgatgacaaaaccttgagacatgaaattacataaataaacctaaaaaatagcaaaaataagttcaaaacagaaaaaattaacctatagtgacaaaaatta

SEQ ID NO: 252873 - DNA, 497 bp, Homo sapiens
ctataattccccaattttatttgagayaaaatcatagtaggaccaatttatttgtaaaatcagttttaggcttatgagacttggcctggtttttttgtataagaggcagcaaaataatcatttaacatattagctctctttttttgttttctattttttgtttgtacataggtattttattcataaattgactttgctagaaattttttgtaaggagtcaaagggtagaatctttaaaatcttcaagcccagtcaatattttatctgtgccaccagatagctatgtgaattgggttactttctcttttttcaagtttccaagaaaacttgggagtcctgggtctgtcagaaattaaattgtttacttactacagttcagggccctgtaaaaaaaaaaaaaaggtacatgccagttttcccaaggggctttatcagctctccaggttagattcattttataaagtaaatatgaaaatatataattcaagttaaagact

SEQ ID NO: 252874 - DNA, 301 bp, Homo sapiens
atcaaaggactatgaatattcagaataaaaatgggattagaaaattttgtgatgcttgtacaatgagaggaaagaaatgagattgttaattcattgggtcacatcatatccattccagattccatggtttaacacttcttcctcactacagaggattcattatgaagtaaaagcaattgtagaatacattttcctgaataatggcaagaaaactgccatataattacygagaattaaaaacgaaaataatgcgtgtgtgtgtgttcacatgtgtgagcacacattttgcaatatacgcata

SEQ ID NO: 252875 - DNA, 547 bp, Homo sapiens
atctgcaagtcactttgatacagaaaagaagccacctcaggcttccaccaatcttttatgctatttgagtcacataggtttaaaattgtcctgaccacacagctctacaaaaccaggtgtgtcaccaagtagcaagtgaagcascactatattctgcatttatcttaaccctagagttcctaaggaaatatgactgtgacataagaaatacaaagttcaaggtccctccaagccaaatctgcagaaactgggtctaagaaatctgctaatcacaaccatataataaccgtaaaatttggcaaatgctaacatataggtatgtgaatttctatggaataaaaataaaagtatttaatcctaagtgggatatgcagaaaaggctttacacaggagattacatttgtgtttattgagaaaataaagaaaaattttagtggctggaaataaagcttggaacaatttaggcagaagaaagagtaggtagaaaaacagacttttagatatttgaggtagggtattgagacttcaagatgctggaaatattttg

SEQ ID NO: 252876 - DNA, 557 bp, Homo sapiens
tcactatgttttattatagccctttccattcctctttatcctcaaaaaaagcaatgatcatattttgtttttgtttttgttgcctttgtttaactgtctatatttacgccatttcagctgacccttccttctgggtctttgtttcgagtattattctctggaggaaagattctgagatagagataaccaggcaggatattttcgcagggagaattcttaggataarcatctgagaaagggaggtgttggccagatggaaagctggatgcctgttcagatttgcggactaagtctttggactcccatggtgcccaggaaagagacacgacccctgaatgatgttgttttctacatctgagacaatccacggagggggctgacaactgacagctaagggtcatcttggaagcactccctcagatggaaaaatgagcctctagttcctgaagggcaatctgtgcagtgcatcacaggatgctccacagtaattataaaactcttctttaattcataagtgaaataatataaattatgcatgtgtatgcatacacatacgt

SEQ ID NO: 252877 - DNA, 557 bp, Homo sapiens
tcactatgttttattatagccctttccattcctctttatcctcaaaaaaagcaatgatcatattttgtttttgtttttgttgcctttgtttaactgtctatatttacgccatttcagctgacccttccttctgggtctttgtttcgagtattattctctggaggaaagattctgagatagagataaccaggcaggatattttcgcagggagaattcttaggataagmatctgagaaagggaggtgttggccagatggaaagctggatgcctgttcagatttgcggactaagtctttggactcccatggtgcccaggaaagagacacgacccctgaatgatgttgttttctacatctgagacaatccacggagggggctgacaactgacagctaagggtcatcttggaagcactccctcagatggaaaaatgagcctctagttcctgaagggcaatctgtgcagtgcatcacaggatgctccacagtaattataaaactcttctttaattcataagtgaaataatataaattatgcatgtgtatgcatacacatacgt

SEQ ID NO: 252878 - DNA, 418 bp, Homo sapiens
tgaatcaagctgtgcttaaatccctgaataacccaacaattgaaaggtacataagccagtatctttatgccacatttttctgtttcttttttttttcttttattattatactttaagttttagggtacatgtgcacattgtgcaggttagttacatatrtatacatgtgccacgctggtgcgctgcacccactaactcgtcatctagcattagcatcttaaccaacatggtcaccaggttcacagatttcaaagttaattgagatgtctttaagcaaaatctgtcagtgaacactttcactgtcagtgaaaacaaacagttcaaaaataatatcttgatagcatggtcactttcctctttgagaaaagaaaaatattgtgtgtgcctgtgtgtgtttatacacaaacacaatttaacc

SEQ ID NO: 252879 - DNA, 473 bp, Homo sapiens
agcttggacctgacagtcaaaccagaaaaggaggatgtgtgtttcaaaataatttatcatgttcttgacacaacggctatagctcttgatgtgcaggaaaagcaactgtttcttatttgttctgggttcttacttctaagatgcttaacctctgctgctctcacactgatgacaaaaaggtggagccaaagtctgatgagacctgagacaattttttgtcccagatattgactatatttgtctctctactcctggaatctcactgagtgataccagacagcatgtttttttcctctgtggaaatgtagatcatttcacttgccatcagaggaaaattaaaaaaaacaacaactgatgctttttctctctctgctgtgtctcttagtttatatgaaattttttgaagtcacrtgacctttgctttgatcacttccaattgcactgcacccaacaatctttgtattactcatttt

SEQ ID NO: 252880 - DNA, 601 bp, Homo sapiens
ggcatcaaggttaagtagtggaaatactaaaaataagttagtatattaacaacaacaaaaaaaaactccacttcagttatatagcatttagtcaggtatatgaattattatagaagcaaagattttttttttgagatggagtcttgctctgtcgccaggctggagtgcagtggcacaatctccgctcactgcaacctccacctcccgggttcaagccattctcctgcctcagcctcctcagtagctgggactacaggcgcgcggcaccatgccctgctaattttttgtattattagtagagacggggtgtcaccatattgggcaggctggtctcaaactcctgacctcataatctgccctccttggccctccaaagtgctgtgattacaggcgtgagccactgcgcccagccgaagcaaagatatttttttaaaaagaggaaarcagagctaagcacggcttgcactttattaaactgaagtgttattgtgatcaagttatagtaagaacctgaccagttagagttaaatgttgtcttcaaagcaagtatgttttttatctggttgctgtatttttgtcaacaaggttgctattttatggt

SEQ ID NO: 252881 - DNA, 655 bp, Homo sapiens
tattaaattatgcttttatttaccatttctgtttctcttcatctattcttttttattttattattcttatttattatatttaccacctgatgccacaygcttacaattacacatctttgcttccacccatcttctttatgctattattgtaaaatatatctctatgtaatatatacaccatataatattttataattatttttcccgacaagagatttttaaatcagttaagaaaataaaggcaggtaaatattatgtacagtacctttactggtacgccagtgttgtttggttcatttcctaatgaatttaaattactgtcttttttatttgctttcatcctgaaaagttttctttaatatgttttacaagtctgctggcaacacattgcctcagtttttatttacaatgaattgctcttatttcatcttaatttcaaaatatagttttgctgggttttggctgatgtttttcttctcttgtagcattttgagtatgtcatataactgttttttaccctttattttgcctaatgagaagttggttcttgattttattggagtccttttgtacatatgaattgttttctttttctaatttcaagatatttttcatagtttttgttttttattatttttactgtgatgtttttaga

SEQ ID NO: 252882 - DNA, 655 bp, Homo sapiens
tattaaattatgcttttatttaccatttctgtttctcttcatctattcttttttattttattattcttatttattatatttaccacctgatgccacatgcttacaattacacatctttgcttccacccatcttctttatgctattattgtaaaatatatctctatgtaatatatacaccatataatattttataaytatttttcccgacaagagatttttaaatcagttaagaaaataaaggcaggtaaatattatgtacagtacctttactggtacgccagtgttgtttggttcatttcctaatgaatttaaattactgtcttttttatttgctttcatcctgaaaagttttctttaatatgttttacaagtctgctggcaacacattgcctcagtttttatttacaatgaattgctcttatttcatcttaatttcaaaatatagttttgctgggttttggctgatgtttttcttctcttgtagcattttgagtatgtcatataactgttttttaccctttattttgcctaatgagaagttggttcttgattttattggagtccttttgtacatatgaattgttttctttttctaatttcaagatatttttcatagtttttgttttttattatttttactgtgatgtttttaga

SEQ ID NO: 252883 - DNA, 655 bp, Homo sapiens
tattaaattatgcttttatttaccatttctgtttctcttcatctattcttttttattttattattcttatttattatatttaccacctgatgccacatgcttacaattacacatctttgcttccacccatcttctttatgctattattgtaaaatatatctctatgtaatatatacaccatataatattttataattatttttcccgacaagagatttttaaatcagttaagaaaataaaggcrggtaaatattatgtacagtacctttactggtacgccagtgttgtttggttcatttcctaatgaatttaaattactgtcttttttatttgctttcatcctgaaaagttttctttaatatgttttacaagtctgctggcaacacattgcctcagtttttatttacaatgaattgctcttatttcatcttaatttcaaaatatagttttgctgggttttggctgatgtttttcttctcttgtagcattttgagtatgtcatataactgttttttaccctttattttgcctaatgagaagttggttcttgattttattggagtccttttgtacatatgaattgttttctttttctaatttcaagatatttttcatagtttttgttttttattatttttactgtgatgtttttaga

SEQ ID NO: 252884 - DNA, 549 bp, Homo sapiens
actttagtcaaacaccacaacaaaactgtggccccactctcattaacactagcagagttggagtgataaatctagacttccacctcatttaccacgctggaatgacgtttcccaacacctgcaccagagtagcatcagaaaagtgagccagaactttcatcgctatcacatggtagctttcatctccacttctcacatggtatcagaagagacatatggtcagcctagacttccagccccgcacccccatgccagmagtaacaaggcacccctcacctcctgttgggaatagaccccccaaaatctggccttaaactggccccaaaactggccataaacaaaatctctgcagcactgtgacatgttcatgatagccataacatccacgctggaaggttgtgggtttacggaatgcgggcaaggaacacctggcccacccagggagaaaaactgcttaaaggcgttcttaaaccacaaacaacagcatgagcaatctgtgccttaaggacatgctcctactgcagataactagcccaacccattcgttta

SEQ ID NO: 252885 - DNA, 595 bp, Homo sapiens
ttgtttgttttgtttttttgttttttgaggagtctctctgtgattcccaggctggagtgcaatggcgtgatctcggctcactgcaacctccacctcctgggttcaagtgattctcctgccccagcctcccgaatagctgggattacaggtgcctcctgccactcctggctaatttgtgtatttttagtagagacagggtttcatcatattggccagactggtctcgaactcctgacctcaagtgatctgccygcttcagcctcccaaagtgttgggattacagccatgagccaccgcgccaggcccataaggatgtattggttaacaagaaaccacatacatgatggcggtcccataagattataccaccataattttgctgtatcttttctatttttagatatgtttagacacataaatacttaccattgtgttacaattgtctaccatattcaatacagtaacatgtatgttatagatttatagcctaggaacaataggctataccacatagcctaagtgacctaggttgtgtaagtacaccttgtgacagtcacacaataatgaaattgtctaacgatgcatttctcagaac

SEQ ID NO: 252886 - DNA, 595 bp, Homo sapiens
ttgtttgttttgtttttttgttttttgaggagtctctctgtgattcccaggctggagtgcaatggcgtgatctcggctcactgcaacctccacctcctgggttcaagtgattctcctgccccagcctcccgaatagctgggattacaggtgcctcctgccactcctggctaatttgtgtatttttagtagagacagggtttcatcatattggccagactggtctcgaactcctgacctcaagtgatctgcccgcttcagcctcccaaagtgttgggattacagccatgagccaccgcgccaggcccataaggatgtattggttaacaagaaaccacatacatgatggcggtcccataagattataccaccataattttgctgtatcttttctatttttagatatgtttagacacataaatacttaccattgtgttacaattgtctaccatattcaatacagtaacatgtatgttatagatttatagcctaggaacaataggctatacsacatagcctaagtgacctaggttgtgtaagtacaccttgtgacagtcacacaataatgaaattgtctaacgatgcatttctcagaac

SEQ ID NO: 252887 - DNA, 440 bp, Homo sapiens
ttataggcactaactatctatagagcgtaagttaaatgtggtattttctttaagggattttaaaagtggaaaacttagtgtttgctttgacactcgtctgcaacaaatataaacttagcatctacttttttttttattatactttaagttttagggtacatgtgcacaatgtgcaggttagttacatatgtatacatgtgccatgttggtgkgctgcacccatcaactcgtcctttaacattaggtatatctcctatgctatccctcacccctccccccaccccataacaggcctcggtgtgtgatgttccccttcctgtgtccatgtgttctcattgttcaattcccacctactttgtgtattctgtttgtcctggaattattacgataaataagttataacctcagttttcaaaatgcttatagtacaaagggaaggc

SEQ ID NO: 252888 - DNA, 440 bp, Homo sapiens
ttataggcactaactatctatagagcgtaagttaaatgtggtattttctttaagggattttaaaagtggaaaacttagtgtttgctttgacactcgtctgcaacaaatataaacttagcatctacttttttttttattatactttaagttttagggtacatgtgcacaatgtgcaggttagttacatatgtatacatgtgccatgttggtgtgctgcacccatcaactcgtcctttaacattaggtatatctcctatgctatccctcacccctccccccaccccataacaggcctcggtgtgtgatgttccccttcctgtgtccatgtgttctcattgttcaattcccacctactttgtgtattctgtttgtcctggaattattacgayaaataagttataacctcagttttcaaaatgcttatagtacaaagggaaggc

SEQ ID NO: 252889 - DNA, 601 bp, Homo sapiens
acaataaagcatatattgtagtaaagcaagtcacacagatttttttcttttttggtgtttataaatatcataagtctattaaatctacatatagtctactaagtgtgcaatagcagtttgtgtaaaaaagtgtacacaccttagttaaaaaatactttatttctacaaaagttctaacaatcacctgagcctttagcatgttgcattcrttttgctggtagagggtcttgcctcactgtggatggccactgtctgatcaggatggtcattgctaaagctggagatggttgtggcaatttcttaaaataagacaacaataaagtttgccacatcagttgattctttcttgtcacaaaaattttccctgtagcatgtgatgctgtttgatagcattttactcacagtagaacatcttccaaaattggtgtcattcctctcagactatgccactctttgtcaactaacactatataaccttctaaatcctttgctttcatttcagcaatattcacagcaacttcaccaggagtagtttccatcttagacaatttctttgctcattcatgagaagcaacacctcatctattaaagttttaccatg

SEQ ID NO: 252890 - DNA, 601 bp, Homo sapiens
acaataaagcatatattgtagtaaagcaagtcacacagatttttttcttttttggtgtttataaatatcataagtctattaaatctacatatagtctactaagtgtgcaatagcagtttgtgtaaaaaagtgtacacaccttagttaaaaaatactttatttctacaaaagttctaacaatcacctgagcctttagcatgttgcattcattttgctggtagaggktcttgcctcactgtggatggccactgtctgatcaggatggtcattgctaaagctggagatggttgtggcaatttcttaaaataagacaacaataaagtttgccacatcagttgattctttcttgtcacaaaaattttccctgtagcatgtgatgctgtttgatagcattttactcacagtagaacatcttccaaaattggtgtcattcctctcagactatgccactctttgtcaactaacactatataaccttctaaatcctttgctttcatttcagcaatattcacagcaacttcaccaggagtagtttccatcttagacaatttctttgctcattcatgagaagcaacacctcatctattaaagttttaccatg

SEQ ID NO: 252891 - DNA, 523 bp, Homo sapiens
aaaaacaatgctgcaattaaaccctctggtatatgtttttctaaatgtmttcctagaagtcacagattttctggatgtcactctttaaaattacttggaaaaacagtgagaattttgggcaatttacttaatttgacctggctcaatttccttgcctaaaaaatgagggtagtaagtcctataagatttaattaaaaactaaatggtcatcttttgtgaaacattagcaaattatgataacaaatggtctctctcattttttctttctcatcctaaattgtatctatagacagagaactgaacacacagggctgccactgaggcattcagcatttcatgtgtttatctaagtcagagaagtcacccatataaatgagaaacatctgcattctgtctgagtttgtctgactaacttttacattgatattcaaaatcatcatctttgaatttctgattttgtgacccacacgtatgggtggtgtgtctgtgtttctctgattttcaaaaagaaaaagaaaacaat

SEQ ID NO: 252892 - DNA, 479 bp, Homo sapiens
tatttctatctatctctattgacagataaaaatagacagagatgggaaagacagaaattaagaactccattatttacacaattaggtattccatttccatgcactagcaacaagctatcagaatatgaaatggaaaaagaaagggtaactgttgcartagtatcaacgtaacatcaaacactcaaggaaaatgtaatttttaagatatgcaatacctttacaaagcgaaagagaaagacagaacaaagaagactaaaataaagtaataaatatataataggctagaataatctatttttaaaagacgtaattctcaacaaggatttttatgttttgttttgtcttttttgtttgttgtgcatccactagttgttttacattttatatgcaaatgaaatgagtaacaaccaagatccttataaagcacgttgctggataacttaaactatcaaatatcaagacaatataaagacatacta

SEQ ID NO: 252893 - DNA, 494 bp, Homo sapiens
cttaagtaccacaaaggcatatacaaaaatatttatagcaacgatattcataatagtcccaaatttaaaagtgtttatcaagaatataaaatagataaataaatggtgacatatacatataatatatacagctatgagaatgcagaatctaatattatatgcaattataaatataaatctcatgaatataaggttgtgtgaaagagactaaacacaaaagagcaaaccctgtatcatgtgattcargcaggctccttgagttctgttatgttcatggttttggtaacatgtgtttctgttgtgtttcctttttgtaataaattagcaagctgtatactaaggcttctgtgttttattttatgtaatatttcaaatagtttacctaaaaagtgaaaccacatgtagtacaaaatatgtggatcaaatttaagaagatgtataaacaaatgtttaaaatgttttgaagagtcacataccatttgaaaggtcaagtg

SEQ ID NO: 252894 - DNA, 510 bp, Homo sapiens
attttgggtgctttacttattttttggtctgagttttttcaaaggatgagtctcgatgtcaaaaacctccaccactctgtaaagttattaggaatattcaccagtgacaattaggaaggaagtaatttctttcactsattgaatatccaaatggaatctggtaacatactgaatcatatgggagaagagtcagaaatcttagaatacatcatctggaaagagagctggcaaactgttcctctttgatggaaatgcatttaatgcatcattaacaggtattatagaaggcagatacaaatgaatgtctttatcaaataagctttgaaaaatgttaactaatatgcaacatatgcctttaccttcaggatttttaaaccctttaatttattaatgattcttgtaatttttcaaatgggcattacccagagtttccccaaactcattttactgaataaatactactttttcttaataagttagtgttttgagtagaaaacaactttatttaac

SEQ ID NO: 252895 - DNA, 582 bp, Homo sapiens
atctcagcctggacttcattgcccatatcattatcagcattttggttaaaaccattcaacaagtctctaggaagttccaaactttcccayatattcctgtctccttctgggccctccaaactcttccagcctctgccagttatccagttccaaagtcactttcacattttcaagttacctttatagcagtacctcactctgctggttccagttctctgtattagcctgttttcacactgctataaagatactacttgagactgggtaatttataaacaaagatgtttaattgactcacagtcccgcatggctgaggaggcctcaggaaacttacaattaaggtgcaaggtgaaggggaagcaaggcacgtcttacatggcagcaagaagagagaaagattgagcacaggggaaactgccacttttaaaaccatcagatctggtgagaactccctcaatataatgagaacagtgtcggggaaccacccccacaatccaatcacttcccttcaggtcactcccccaatacctggggattataattcaagatgagatttgagtggggacacacagccaatctata

SEQ ID NO: 252896 - DNA, 582 bp, Homo sapiens
atctcagcctggacttcattgcccatatcattatcagcattttggttaaaaccattcaacaagtctctaggaagttccaaactttcccatatattcctgtctccttctgggccctccaaactcttccagcctctgccagttatccagttccaaagtcactttcacattttcaagttacctttatagcagtacctcactctgctggttccagttctctgtattagcctgttttcacactgctataaagatactacttgagactgggtaatttataaacaaagatgtttaattgactcacagtcccgcatggctgaggaggcctcrggaaacttacaattaaggtgcaaggtgaaggggaagcaaggcacgtcttacatggcagcaagaagagagaaagattgagcacaggggaaactgccacttttaaaaccatcagatctggtgagaactccctcaatataatgagaacagtgtcggggaaccacccccacaatccaatcacttcccttcaggtcactcccccaatacctggggattataattcaagatgagatttgagtggggacacacagccaatctata

SEQ ID NO: 252897 - DNA, 545 bp, Homo sapiens
tacttcaaaactcccatcaacctacttattaaatcagttactattctattcactgattaatttaacatatatttattgaatgcctactctatgtcaggcacaatgctaagcaagttgctctactaagactcaaactccttacattttggtatttttatttttacttaatttaactaattaataacagggtctcattctgctgctcaggctggagtgcagtggtgcaatctcagctcactgccatctccacctcccaggttcaagtgattctcatgcctcaatctccggagtatctggagcracaggcatgtgcaaccacacccagctaatttttgtatttttggtagagacagagttttgcaatgctgcccaggctggtctcaaactcctgagctcaagtgatctgcccaccttggcctcccaaagtgctgggattacagatgtgggtcaccgtgccagcccaaagtttttggatataagggaaccttcagtccatgagttccctaaggccagagactattaatttttcatgtataagccaagac

SEQ ID NO: 252898 - DNA, 545 bp, Homo sapiens
tacttcaaaactcccatcaacctacttattaaatcagttactattctattcactgattaatttaacatatatttattgaatgcctactctatgtcaggcacaatgctaagcaagttgctctactaagactcaaactccttacattttggtatttttatttttacttaatttaactaattaataacagggtctcattctgctgctcaggctggagtgcagtggtgcaatctcagctcactgccatctccacctcccaggttcaagtgattctcatgcctcaatctccggagtatctggagcgacaggcatgtgcaaccacacccagctaatttttgtatttttggtagagacagagttttgcaatgctgcccaggctggtctcaaactcctgagctcaagtgatctgcccaccttggcctcccraagtgctgggattacagatgtgggtcaccgtgccagcccaaagtttttggatataagggaaccttcagtccatgagttccctaaggccagagactattaatttttcatgtataagccaagac

SEQ ID NO: 252899 - DNA, 345 bp, Homo sapiens
tattttgcattaatttcccattttaatcccactaaaatgtgcatagagacaaattaatccattcacgtgggaaattggatcatttgccttgacttcctcttttcaatagcactgytgccctcatgtcagatatctgtacctcccgaggataggaatcctcgtttttttacaaggactttaaggagatgaaagttgctacagagctgtaaaacgtgctgcagagtaagtcagatctcatccaaacagccacagatagacgttgatggatttggcaattatatcatctgagcatctaatatgtaaaaggaacatatttctgtctctctcttaaagacttcatgggat

SEQ ID NO: 252900 - DNA, 251 bp, Homo sapiens
attatgaattacacatttaaaacacatcattctgatctctgtcttgattgatactagaagattatcttccaaactaaggtggaaaaaatgacagactttagctattggcaatgataggtcatttttttagggaagaggagtaaagagggcaacctccataggtcagatatccctttgttctaagaagccaccaccyctgtttcttcatatgaaaaaaaccagaggcatccagtggttcccaaaaccttctc

SEQ ID NO: 252901 - DNA, 382 bp, Homo sapiens
cgttccgtcagttacctggagtctgtcatctttckgaataggggacagaatcacctcaaatttaactaataaaaatttatgacttggcaaacaccccaggtatttttattgactaacaaatcagctatgacaatcttagcaacaaatcaagttatgctatggggtatgtccacactttcctgttccctctacaacaggagaaaatcaaatctttccaacatcctaacaaactgttactccctgtaaccaaatgtatcacagtatcgtctaccaaggcgttacatcctgaaactttcctacaaaaagcacagcttcaaagaaaccttgcaagctttcttgtaagctcctcccttcccacatcgcccctccccagagccaagaa

SEQ ID NO: 252902 - DNA, 382 bp, Homo sapiens
cgttccgtcagttacctggagtctgtcatctttctgaataggggacrgaatcacctcaaatttaactaataaaaatttatgacttggcaaacaccccaggtatttttattgactaacaaatcagctatgacaatcttagcaacaaatcaagttatgctatggggtatgtccacactttcctgttccctctacaacaggagaaaatcaaatctttccaacatcctaacaaactgttactccctgtaaccaaatgtatcacagtatcgtctaccaaggcgttacatcctgaaactttcctacaaaaagcacagcttcaaagaaaccttgcaagctttcttgtaagctcctcccttcccacatcgcccctccccagagccaagaa

SEQ ID NO: 252903 - DNA, 399 bp, Homo sapiens
cctgaggccaaggatggggtttggggtaccccccgaagggaacctaggctcctgtcccggatgggcctaggggatggaaccgcccccacaaccagctcctggggcacgggggagggatgagaggatgacctgaggggaagctcctgcagcctccttccagcctgggggctgcatcaatgtggctggtgagccgcgaactgrgacgagggaagaaccgaaccgaggccacccagtaattcccattgtatcccaaaagaatcttgccaaagatggcgatccggtgcccgtagctttgagaagcagtaataacacaggctttgggaagccagcaatctgcctgagctcaatttaatcaacagaaccgggggttcaccgggagccataagacccccaccccca

SEQ ID NO: 252904 - DNA, 399 bp, Homo sapiens
cctgaggccaaggatggggtttggggtaccccccgaagggaacctaggctcctgtcccggatgggcctaggggatggaaccgcccccacaaccagctcctggggcacgggggagggatgagaggatgacctgaggggaagctcctgcagcctccttccagcctgggggctgcatcaatgtggctggtgagccgcgaactgagacgagggaagaaccgaaccgaggccacccagtaattcccattgtatcccaaaagaatcttgccaaagayggcgatccggtgcccgtagctttgagaagcagtaataacacaggctttgggaagccagcaatctgcctgagctcaatttaatcaacagaaccgggggttcaccgggagccataagacccccaccccca

SEQ ID NO: 252905 - DNA, 573 bp, Homo sapiens
gggaaaaactctcgggccgtccccaagtccgttggtcgaaccctgaccaccgccgccaaaccgttaagctagagggcggccccgatcccgagcctccgcccccagccgcgtggcaacccaggcgggaacggagcgrtcccgcccattcgcgaaggaccactgagggacaaggctcacaccggacgcgcgccgccgagtcttccgcgaagggtctcgcgacagaaagctgaaccaacacgaggcggggaaggggtacccgcgccgcgaagggggaggggcccgcagagcgcgtgcgcgccgcgagtgcccggatgcagcactgcgacaaagcgggctcgagcgcggggccgggagttgggggaggcgaggccacggagaatgggcgttttccaccctcacctgacgcttcaaacccctaagaagcgtccctcccaacgcccaccccaagcaaacggactgcaaagaaaagacttcccgccccgcgcgcgagggccagaggagcgaaacaaaatggcgacaccagcctcctccagttactcttctccgcggcttcccgccacaggggcgccaaaa

SEQ ID NO: 252906 - DNA, 573 bp, Homo sapiens
gggaaaaactctcgggccgtccccaagtccgttggtcgaaccctgaccaccgccgccaaaccgttaagctagagggcggccccgatcccgagcctccgcccccagccgcgtggcaacccaggcgggaacggagcgatcccgcccattcgcgaaggaccactgagggacaaggctcacaccggacgcgcgccgccgagtcttccgcgaagggtctcgcgacagaaagctgaaccaacacgaggcggggaagrggtacccgcgccgcgaagggggaggggcccgcagagcgcgtgcgcgccgcgagtgcccggatgcagcactgcgacaaagcgggctcgagcgcggggccgggagttgggggaggcgaggccacggagaatgggcgttttccaccctcacctgacgcttcaaacccctaagaagcgtccctcccaacgcccaccccaagcaaacggactgcaaagaaaagacttcccgccccgcgcgcgagggccagaggagcgaaacaaaatggcgacaccagcctcctccagttactcttctccgcggcttcccgccacaggggcgccaaaa

SEQ ID NO: 252907 - DNA, 608 bp, Homo sapiens
gtcagcattcctttttaaatttttttctattttttgagacaatttcactctgtctctgaggttggcatgcagtggcatgatcatagctcactgcagcttttaactcctgggcccatgtgatcctcctgcttcagcctcatgagtagctgggaccacaggtgcgcaccaccatacctggctaactattattattattattattatttttgctttttgagayggattttcacttttgtctcccaggctggagtgcagtggcgtgatctcagctcactgcaacctctgcctcccagattcaagcaattctcctgcctcagcctcccaagtagctgggattacaggcacacgccaccatgcctggctaatttttgtatttttagtggagacagggtttcaccatgttggccaggctggtctcgaactcctgacctcaggtgatctgcctacctcagcctcccaaagtgctgggattacagacgtgagccactgcgcccggccttaatttttctgtagagatggggacttgctctgttgcccaggctggtcttgaactcctggcctccagcgattattacaccttgggctcccaaagtgctgacattacaggc

SEQ ID NO: 252908 - DNA, 458 bp, Homo sapiens
atgcttactttgtccttactgtgttccactttagaaagagtaaacaaatgctgtcagctttcctttactcacgttttccaaagtgactcaagtttaattatcaaactaaacattacattattttttaaaggatttattcaatttcttcaaatagggaattcatggaaaactaaaaccatttcaaaattcactttgtccaccaaacttakagtccaaattggcacaaataaagaacgtggttttcaaatctgcctgaccgtcaagaaaacaaagttcttatatttcaagccaaagtaactggtaacactgaactactgggtttacattggagaccgtcccatttaatttccagggtggtgggacaaaatgggctcagttcttacatagcacactacacatgttttaaaatacaaaacttacattgttgctccccaaataattgctattcctaacttgaa

SEQ ID NO: 252909 - DNA, 458 bp, Homo sapiens
atgcttactttgtccttactgtgttccactttagaaagagtaaacaaatgctgtcagctttcctttactcacgttttccaaagtgactcaagtttaattatcaaactaaacattacattattttttaaaggatttattcaatttcttcaaatagggaattcatggaaaactaaaaccatttcaaaattcactttgtccaccaaacttagagtccaaattggcacaaataaagaacgtggttttcaaatctgcctgaccgtcaagaaaacaaagttcttatatttcaagccaaagtaactggtaacactgaactactgggtttacattggagaccgtcccatttaatttccagggtgrtgggacaaaatgggctcagttcttacatagcacactacacatgttttaaaatacaaaacttacattgttgctccccaaataattgctattcctaacttgaa

SEQ ID NO: 252910 - DNA, 360 bp, Homo sapiens
agaaaatatatctaaaaatatacttacgtactatattgaatccactacccagagcttaactgaactatttgtgtgactcattctgtttttttattttttgctttttacttattacaatgaactacaagtatggatatattaatattaattaatataaaatatactggaatattttgtatttttttttcttttttcttcamcaaaagcagaaacttaaatacactgaaatcttaaatgacccttgaatgtttctaggactgaccctggaacaaaattttttatgttgttattacattgttcttttcatgttaaaatcatttgttttttttcatatagtgcgtcaaagaagaattgttaata

SEQ ID NO: 252911 - DNA, 447 bp, Homo sapiens
atattgtgtgacattgataacaaagtgagaaggaggtgtaaagaagtagagttttggtatgttattaaagttaagttgttgtcaatttaaaatagattattataactataagatgttttcatgtaattctacagtaaccacaaagaaaagacctacagaagatacacaaataaaaatgagaaaggaacyaaagcacgtccctaccaaaaaaagaaatcagtgaaacataaagggaggcagaaagagaggaaaagtggaaaaaaatacctgcaagacatgtataaaacagtgaacaaaatgacaatagtaagcccctccctatcagtaactactttaaatgcaaataggctaattttccaatcaaaagacaaagaattggccgaatggattaaaaaaatctaaatatatactatatgcaagagacttatgttagatctaaacacacac

SEQ ID NO: 252912 - DNA, 447 bp, Homo sapiens
atattgtgtgacattgataacaaagtgagaaggaggtgtaaagaagtagagttttggtatgttattaaagttaagttgttgtcaatttaaaatagattattataactataagatgttttcatgtaattctacagtaaccacaaagaaaagacctacagaagatacacaaataaaaatgagaaaggaactaaagcacgtccctaccaaaaaaagaaatcrgtgaaacataaagggaggcagaaagagaggaaaagtggaaaaaaatacctgcaagacatgtataaaacagtgaacaaaatgacaatagtaagcccctccctatcagtaactactttaaatgcaaataggctaattttccaatcaaaagacaaagaattggccgaatggattaaaaaaatctaaatatatactatatgcaagagacttatgttagatctaaacacacac

SEQ ID NO: 252913 - DNA, 589 bp, Homo sapiens
actttctctctcttccagagcagtatgcctttttctcctctcgcccttgcacatcaaactctaggttctttggcctttggaccctgggacttgcatcagcagccttttgggagctctcaggccttgggcctcagactagtggctgcactgtcagcttccctggttttgagactttcagayttggactgagccatgtcactggcttccttgggagccatgttgtaagcttctctcattttccagcttatagatggcctattgtgggactttgcctttgtaattatgtgagccaattctccttaataaatcatatttcatatacatgtaaatatattctcttttagatgcatgtatatgtatctctattatctattatctatatctatatctatatctatatctatatctatatctatatatatttcttattggatcagaccctctggagaactctgattaatacatagtcaaagaataagtcacaaggaaaattagaaaatgtcttgagacaaataaaaatggaaacacaacattccaaagcttgtgagatgcagcaaaatgaatatgaagaggacagtttatatatcta

SEQ ID NO: 252914 - DNA, 349 bp, Homo sapiens
atgacttggtctccagttcctaataccttgttcctcatttctatctgagatctcattagaatggcctttgctgtccatatttttatcagcattgtggtaatgactacttaaccaatctctgagaaattctaaactttctctcatctttttgttktcttttgagccctcactgaaattatccttaatgctctgtttatggcaatacagtcttcttctagtctgctccttcaaacttttccaacttctgcgcattacccagttccaatgatgcttctgcatttttgaaaatctaaatagcaacatcccactttcagtaccaattttctgtcttagtccgttttgtgttgct

SEQ ID NO: 252915 - DNA, 349 bp, Homo sapiens
atgacttggtctccagttcctaataccttgttcctcatttctatctgagatctcattagaatggcctttgctgtccatatttttatcagcattgtggtaatgactacttaaccaatctctgagaaattctaaactttctctcatctttttgttgtcttttgagccctcactgaaattatccttaatgctctgtttatggcaatacagtcttcttctagtctgctccttcaaacttttccaacttctgcscattacccagttccaatgatgcttctgcatttttgaaaatctaaatagcaacatcccactttcagtaccaattttctgtcttagtccgttttgtgttgct

SEQ ID NO: 252916 - DNA, 349 bp, Homo sapiens
atgacttggtctccagttcctaataccttgttcctcatttctatctgagatctcattagaatggcctttgctgtccatatttttatcagcattgtggtaatgactacttaaccaatctctgagaaattctaaactttctctcatctttttgttgtcttttgagccctcactgaaattatccttaatgctctgtttatggcaatacagtcttcttctagtctgctccttcaaacttttccaacttctgcgcattacccagttccaatgatgcttctgcatttttgaraatctaaatagcaacatcccactttcagtaccaattttctgtcttagtccgttttgtgttgct

SEQ ID NO: 252917 - DNA, 608 bp, Homo sapiens
aagcttagggcacaaagccttagaaacaacacaggcaaatttttgctatggtctaacaaggatgacttggtctccagttcctaataccttgttcctcatttctatctgagatctcattagaatggcctttgctgtccatatttttatcagcattgtggtaatgactacttaaccaatctctgagaaattctaaactttctctcatctttttgttgtcttttgagccctcactgaaattatccttaatgctctgtttatggcaatacagtcttcttctagtctgctccttcaaacttttccaacttctgcgcattacccagttccaatgatgcttctgcatttttgaaaatctaaatagcaacatcccactttcagtaccaattttctgtcttagtccgttttgtgttgctrtaacagaataccggagactgagtaatttataaagaggtatatttggcttgcagttctgcaggctggaaagaatgacactggcatctgcttgggttctggtgaaagctttagtgttgtgtcacaacatgttagaataaggtcaaaggggagtaggcaagtaccaggaggccaagcatgaagcgtgacctcaccgtata

SEQ ID NO: 252918 - DNA, 509 bp, Homo sapiens
ttaactgaaattcctgccaaaagtctagaaagattggaaaaattgacacgctgattttaaaattatatagaaatacaaaaatacctagaatagccaaaacaatcttgctaagtaagaatgaagttagagtacttaatactgccttattttaaaawtcagtgtaaagcaacagtagttaagacagtgtagaatccacattaagagagatagatagatcaatggaactaagtggagttcagaatccaacccacatagtcaattaattttcatcaaagatgctaagacaattcaataggagaaagatgttctttcaacaaatgattctataagaactggttattcatttacaaaaactaaacctagatccttaggtcatatacgaaaattaactaaaatggatcatagacctaattgtatgagctaaaactgtaaaacttctaggaaaaaaaaataggagaaaatatttatgacctcagactaagaaaaggtttcttagatataatatcaaa

SEQ ID NO: 252919 - DNA, 564 bp, Homo sapiens
tgacatagaagacaggtgatttctgtatttccaactgaggtayctggttcatctcactgagacgggtcggacagtgggtgcagcccacagagggtgagccaaagcagggcagggcgttgcctcatctgggaagcagcacaagtggtcggggatttcccttcctagccaagggaagccgtgacagacggtacctggaaaatctggacactcccaccctaatactgtgcttttccagtggtcttagcaaacggcacacaggagattatatcccatgtatggcttggtgggtcccatgcccacacagccttgcttactgctagtgcagcagtccgagatcgaactgcaaagtggcagcctgggctgggggagggacgtccaccattgctgaggcttgagtaggtaaacaaagcagctgggaagcctgaactaggtggagctcactgcagctcaatgaggcctggcagcctctgtagactccacctctgggggcagggtatagctgagtaaaaggcagcagaaacttctgcagacttaaacatccctgtctgacagctctgaagagaa

SEQ ID NO: 252920 - DNA, 564 bp, Homo sapiens
tgacatagaagacaggtgatttctgtatttccaactgaggtatctggttcatctcactgagacgggtcggacagtgggtgcagcccacagagggtgagccaaagcagggcagggcgttgcctcatctgggaagcagcacaagtggtcggggatttcccttcctagccaagggaagccgtgacagacggtacctggaaaatctggacactcccaccctaatactgtgcttttccagtggtcttagcaaacggcacacaggagattatatcccatgtatggcttggtrggtcccatgcccacacagccttgcttactgctagtgcagcagtccgagatcgaactgcaaagtggcagcctgggctgggggagggacgtccaccattgctgaggcttgagtaggtaaacaaagcagctgggaagcctgaactaggtggagctcactgcagctcaatgaggcctggcagcctctgtagactccacctctgggggcagggtatagctgagtaaaaggcagcagaaacttctgcagacttaaacatccctgtctgacagctctgaagagaa

SEQ ID NO: 252921 - DNA, 564 bp, Homo sapiens
tgacatagaagacaggtgatttctgtatttccaactgaggtatctggttcatctcactgagacgggtcggacagtgggtgcagcccacagagggtgagccaaagcagggcagggcgttgcctcatctgggaagcagcacaagtggtcggggatttcccttcctagccaagggaagccgtgacagacggtacctggaaaatctggacactcccaccctaatactgtgcttttccagtggtcttagcaaacggcacacaggagattatatcccatgtatggcttggtgggtcccatgcccacacagccttgcttactgctagtgcagcagtccgagatcgaactgcaargtggcagcctgggctgggggagggacgtccaccattgctgaggcttgagtaggtaaacaaagcagctgggaagcctgaactaggtggagctcactgcagctcaatgaggcctggcagcctctgtagactccacctctgggggcagggtatagctgagtaaaaggcagcagaaacttctgcagacttaaacatccctgtctgacagctctgaagagaa

SEQ ID NO: 252922 - DNA, 564 bp, Homo sapiens
tgacatagaagacaggtgatttctgtatttccaactgaggtatctggttcatctcactgagacgggtcggacagtgggtgcagcccacagagggtgagccaaagcagggcagggcgttgcctcatctgggaagcagcacaagtggtcggggatttcccttcctagccaagggaagccgtgacagacggtacctggaaaatctggacactcccaccctaatactgtgcttttccagtggtcttagcaaacggcacacaggagattatatcccatgtatggcttggtgggtcccatgcccacacagccttgcttactgctagtgcagcagtccgagatcgaactgcaaagtggcagcctgggctgggggagggacgtccaccattgctgaggcttgagtaggtaaacaaagcagctgggaagcctgaactaggtggagctcactgcagctcaatgaggcctggcagcctctgtagactccacctctsggggcagggtatagctgagtaaaaggcagcagaaacttctgcagacttaaacatccctgtctgacagctctgaagagaa

SEQ ID NO: 252923 - DNA, 581 bp, Homo sapiens
ataaacttaaatcatctaaattagttaaagacagacacttgaagactggataaaaatgtgaaaatccaggtatacccgtaatagttaaaaacatgaagacacaaaattctgaaggtatgagatgagtaaatgataaataaaacaaatattaaccaatatatggctgatatagctattttcatatcaaaaactataatttaagacaaaaaaacattctgaggaataaaagtcattatgtaaagacatgtatgcatgtaacaattcaaccgtaaaatatatgaagcacaaattggcagaattacaaagaaaaatggctaaatcctcaactttgaagaaacttaaacctctgagtcaatgataatcaaaatgtagtaagattatctcagatttttaccactgtatttaaaaagcttaatktaaaggaaatatatagactgctgtatgctcaaattagagaatatatatatactttgaagcctgataaagtcttaggagaactgaacctatgctagcctatgaatcaaatcacaacaaataaacaaacattataacatgtggcctatactctgtaaccaaaatgc

SEQ ID NO: 252924 - DNA, 475 bp, Homo sapiens
cagataaatagaaataatatggtttatcaaattaattgtcacatgattattaaagtgagatcatgtgtgttaagtagtggtatcttaagccactgaaatatcttccttggtctggaatgagctttctatggagattaaaaagatgttaaattgaacagtcttggttawtaaatgaagaagcaaagccagaaacctgtttaaagaactaacaaaaaaggtcatgaatgatctggtggttgttatattttcttgtttacccgaggagaagactatgctcaagcatgtattgaatccagtgatagccagaatgtcatccatactgctagcagccattagtaaggttggaatgtcttcctcaacaccatatccattttcttgcaacaccatcgtgtaaaggacaacaacagcaagagagacagcacctagaacaaaactgaaagaaagaatgaaaattaatttaaaagcatctttttaa

SEQ ID NO: 252925 - DNA, 475 bp, Homo sapiens
cagataaatagaaataatatggtttatcaaattaattgtcacatgattattaaagtgagatcatgtgtgttaagtagtggtatcttaagccactgaaatatcttccttggtctggaatgagctttctatggagattaaaaagatgttaaattgaacagtcttggttaataaatgaagaagcaaagccagaaacctgtttaaagaactaacaaaaaaggtcatgaatgatctggtggttgttatattttcttgtttacccgaggagaagactatgctcaagcatgtattgaatccagtgatagccagaatgtcatccatactgctagcagccattagtaaggttggaatgtcttcctcaacaccatatccattttcttgcracaccatcgtgtaaaggacaacaacagcaagagagacagcacctagaacaaaactgaaagaaagaatgaaaattaatttaaaagcatctttttaa

SEQ ID NO: 252926 - DNA, 475 bp, Homo sapiens
cagataaatagaaataatatggtttatcaaattaattgtcacatgattattaaagtgagatcatgtgtgttaagtagtggtatcttaagccactgaaatatcttccttggtctggaatgagctttctatggagattaaaaagatgttaaattgaacagtcttggttaataaatgaagaagcaaagccagaaacctgtttaaagaactaacaaaaaaggtcatgaatgatctggtggttgttatattttcttgtttacccgaggagaagactatgctcaagcatgtattgaatccagtgatagccagaatgtcatccatactgctagcagccattagtaaggttggaatgtcttcctcaacaccatatccattttcttgcaacaccatygtgtaaaggacaacaacagcaagagagacagcacctagaacaaaactgaaagaaagaatgaaaattaatttaaaagcatctttttaa

SEQ ID NO: 252927 - DNA, 348 bp, Homo sapiens
cacacatttcctacctcttgagtaaataagtaagkaaggaaggaaggaacagagttgtctgcccaaaaaaacaagtgtggccacctaagttacaaaggcaaatgagaacatttctggagtggttgatgacacccatgaggaatggggaggctcctgctcagaataccttctattggcatatcttatccagaatttcacctcatctcttctacatttactttataaagtgtgaagtatatcctgtgtaaaaatgcttttggtgctcctgccagaatccatttaccaggtcaatgaacacatctcccagtgcttcttgttggctgctaatatctgcaggtttctagaacc

SEQ ID NO: 252928 - DNA, 348 bp, Homo sapiens
cacacatttcctacctcttgagtaaataagtaaggaaggaaggaaggaacagagttgtctgcccaaaaaaacaagtgtggccacctaagttacaaaggcaaatgagaacatttctggagtggttgatgacacccatgaggaatggggaggctcctgctcagaataccttctattggcatatcttatccagaatttcacctcatctcttctacatttactttataaagygtgaagtatatcctgtgtaaaaatgcttttggtgctcctgccagaatccatttaccaggtcaatgaacacatctcccagtgcttcttgttggctgctaatatctgcaggtttctagaacc

SEQ ID NO: 252929 - DNA, 567 bp, Homo sapiens
ggttgatgacacccatgaggaatggggaggctcctgctcagaataccttctattggcatatcttatccagaatttcacctcatctcttctacatttactttataaagtgtgaagtatatcctgtgtaaaaatgcttttggtgctcctgccagaatccatttaccaggtcaatgaacacatctcccagtgcttcttgttggctgctawtatctgcaggtttctagaacccttgtcctgctgacaagcacctacctgggaatactagagaggttgcgcacccctctactttccctccagacagcatctgccaatgacggactgatgtgagatttgcttccggctgtacaactctatggcacagtttatgctacagatttccctgtgggctcaagaagagactagacttctctaagaccacatactggtctagttcagtggttcctgaactctgctgcacattgtaatcacctgttgtattatttttctcattttgcttaacaagtcatccccaaacatagcagcttaaaacaacaaatatttattgtcttatgcttctgtgggtcagga

SEQ ID NO: 252930 - DNA, 567 bp, Homo sapiens
ggttgatgacacccatgaggaatggggaggctcctgctcagaataccttctattggcatatcttatccagaatttcacctcatctcttctacatttactttataaagtgtgaagtatatcctgtgtaaaaatgcttttggtgctcctgccagaatccatttaccaggtcaatgaacacatctcccagtgcttcttgttggctgctaatatctgcaggtttctagaacccttgtcctgctgacaagcacctacctgggaatactagagaggttgygcacccctctactttccctccagacagcatctgccaatgacggactgatgtgagatttgcttccggctgtacaactctatggcacagtttatgctacagatttccctgtgggctcaagaagagactagacttctctaagaccacatactggtctagttcagtggttcctgaactctgctgcacattgtaatcacctgttgtattatttttctcattttgcttaacaagtcatccccaaacatagcagcttaaaacaacaaatatttattgtcttatgcttctgtgggtcagga

SEQ ID NO: 252931 - DNA, 567 bp, Homo sapiens
ggttgatgacacccatgaggaatggggaggctcctgctcagaataccttctattggcatatcttatccagaatttcacctcatctcttctacatttactttataaagtgtgaagtatatcctgtgtaaaaatgcttttggtgctcctgccagaatccatttaccaggtcaatgaacacatctcccagtgcttcttgttggctgctaatatctgcaggtttctagaacccttgtcctgctgacaagcacctacctgggaatactagagaggttgcgcacccctctactttccctccagrcagcatctgccaatgacggactgatgtgagatttgcttccggctgtacaactctatggcacagtttatgctacagatttccctgtgggctcaagaagagactagacttctctaagaccacatactggtctagttcagtggttcctgaactctgctgcacattgtaatcacctgttgtattatttttctcattttgcttaacaagtcatccccaaacatagcagcttaaaacaacaaatatttattgtcttatgcttctgtgggtcagga

SEQ ID NO: 252932 - DNA, 539 bp, Homo sapiens
acacatgcatacctgctgtgtgctgctgctgctggcacrtatgtgtgagtggggaccttgctacaatcactacagtgaagcactttggctggcacatcccatcagagtgttgttgccagtggactgggaacaccttagtgcttaacattgaagggccagacaacaaatctgtgggtatggtaccagccttgcaaagttagagcatgcagttcaggagtgctgagctgagcctttgccccctgaaatcttccagaaatgaagccatttgactgaaactaccttgtgccacagttaaaccctcaagggcattaaagaatataaaaaaggaaaaaactccatccaaaggacagtgagtcaaaacattaaaggaaccttagcccacacagatgtgaaagaaccagtgcaagaactctggcaatgtaaaaagccagaatgtcttcctgtcttcaagcaatcatactaactctccaacaatggttgttaaccaggactaaatgacagacatagatttcagaatctggatagaaacaaagatcatt

SEQ ID NO: 252933 - DNA, 539 bp, Homo sapiens
acacatgcatacctgctgtgtgctgctgctgctggcacgtatgtgtgagtggggaccttgctacaatcactacagtgaagcactttggctggcacaycccatcagagtgttgttgccagtggactgggaacaccttagtgcttaacattgaagggccagacaacaaatctgtgggtatggtaccagccttgcaaagttagagcatgcagttcaggagtgctgagctgagcctttgccccctgaaatcttccagaaatgaagccatttgactgaaactaccttgtgccacagttaaaccctcaagggcattaaagaatataaaaaaggaaaaaactccatccaaaggacagtgagtcaaaacattaaaggaaccttagcccacacagatgtgaaagaaccagtgcaagaactctggcaatgtaaaaagccagaatgtcttcctgtcttcaagcaatcatactaactctccaacaatggttgttaaccaggactaaatgacagacatagatttcagaatctggatagaaacaaagatcatt

SEQ ID NO: 252934 - DNA, 539 bp, Homo sapiens
acacatgcatacctgctgtgtgctgctgctgctggcacgtatgtgtgagtggggaccttgctacaatcactacagtgaagcactttggctggcacatcccatcagagtgttgttgccagtggactgggaacaccttagtgcttaacattgaagggccagacaacaaatctgtgggtatggtaccagccttgcaaagttagagcatgcagttcaggagtgctgagctgagcctttgccccctgaaatcttccagaaatgaagccatttgactgaaactaccttgtgccacagtyaaaccctcaagggcattaaagaatataaaaaaggaaaaaactccatccaaaggacagtgagtcaaaacattaaaggaaccttagcccacacagatgtgaaagaaccagtgcaagaactctggcaatgtaaaaagccagaatgtcttcctgtcttcaagcaatcatactaactctccaacaatggttgttaaccaggactaaatgacagacatagatttcagaatctggatagaaacaaagatcatt

SEQ ID NO: 252935 - DNA, 627 bp, Homo sapiens
tgctgctggcacgtatgtgtgagtggggaccttgctacaatcactacagtgaagcactttggctggcacatcccatcagagtgttgttgccagtggactgggaacaccttagtgcttaacattgaagggccagacaacaaatctgtgggtatggtaccagccttgcaaagttagagcatgcagttcaggagtgctgagctgagcctttgccccctgaaatcttccagaaatgaagccatttgactgaaactaccttgtgccacagttaaaccctcaagggcattaaagaatataaaaaaggaaaaaaytccatccaaaggacagtgagtcaaaacattaaaggaaccttagcccacacagatgtgaaagaaccagtgcaagaactctggcaatgtaaaaagccagaatgtcttcctgtcttcaagcaatcatactaactctccaacaatggttgttaaccaggactaaatgacagacatagatttcagaatctggatagaaacaaagatcattgagattcagaagaaagtcaaaatccaatccaaataatctaaggaatccaataagatgacataagagctgaaagatgaaataggcattttaagaaagaaccaaactaaactgata

SEQ ID NO: 252936 - DNA, 419 bp, Homo sapiens
ggatttatgatccctagaatgtaatattttaagaaatgctttaaaagattagattttacaataatgcaaagataatcaggaamataatcctgtagagaaaacgtcataaaaaattactgaaatccttaatctccctaaaaaaagaaaaagaattgtataaggtttttcttataaaacgtttgtttgttttgttttgttttttgagacggagtctcactctgtcccccaggctggattgcagtggcactatctcagctcactgcaacctctgtcactcaggttcaagcgattctcttgcctcagcctcccgagtagctgggattaccaggtaaatgccaccatgcacggctaatttttgtagattacaggcatgagccatcatgcccggcctttttttctttatcttaggtttgtttaca

SEQ ID NO: 252937 - DNA, 419 bp, Homo sapiens
ggatttatgatccctagaatgtaatattttaagaaatgctttaaaagattagattttacaataatgcaaagataatcaggaacataatcctgtagagaaaacgtcataaaaaattactgaaatccttmatctccctaaaaaaagaaaaagaattgtataaggtttttcttataaaacgtttgtttgttttgttttgttttttgagacggagtctcactctgtcccccaggctggattgcagtggcactatctcagctcactgcaacctctgtcactcaggttcaagcgattctcttgcctcagcctcccgagtagctgggattaccaggtaaatgccaccatgcacggctaatttttgtagattacaggcatgagccatcatgcccggcctttttttctttatcttaggtttgtttaca

SEQ ID NO: 252938 - DNA, 419 bp, Homo sapiens
ggatttatgatccctagaatgtaatattttaagaaatgctttaaaagattagattttacaataatgcaaagataatcaggaacataatcctgtagagaaaacgtcataaaaaattactgaaatccttaatctccctaaraaaagaaaaagaattgtataaggtttttcttataaaacgtttgtttgttttgttttgttttttgagacggagtctcactctgtcccccaggctggattgcagtggcactatctcagctcactgcaacctctgtcactcaggttcaagcgattctcttgcctcagcctcccgagtagctgggattaccaggtaaatgccaccatgcacggctaatttttgtagattacaggcatgagccatcatgcccggcctttttttctttatcttaggtttgtttaca

SEQ ID NO: 252939 - DNA, 419 bp, Homo sapiens
ggatttatgatccctagaatgtaatattttaagaaatgctttaaaagattagattttacaataatgcaaagataatcaggaacataatcctgtagagaaaacgtcataaaaaattactgaaatccttaatctccctaaaaaaagaaaaagaattgtataaggtttttcttataaaacstttgtttgttttgttttgttttttgagacggagtctcactctgtcccccaggctggattgcagtggcactatctcagctcactgcaacctctgtcactcaggttcaagcgattctcttgcctcagcctcccgagtagctgggattaccaggtaaatgccaccatgcacggctaatttttgtagattacaggcatgagccatcatgcccggcctttttttctttatcttaggtttgtttaca

SEQ ID NO: 252940 - DNA, 590 bp, Homo sapiens
agaaaatttttaaaaattggagacatgagaagaagaaattacttgaaagtattgtaaaataattaaatagaacatctagaaaaaactttaaaatttactcaactgaaaaaaacccactaagtacccaaatagcaatctagrcaaagctgaagagagaacacagcaaagtagtagatatgaggaaattatttaagagcatagcacacacaaaaaaaaaacgaggtggaaaatgagagatttagattatggaaaagatctaaaacacaactaatggtagtttcagaaacatccattgaaagaatgaagaagatataatatttgagaagaaaactggcttcaaattttacagaattgattagggtttttattgatttggacacaggaagtcaaatgagttctaatcatgattaagtaaaaatagatacttagataaaatgttgagaaactatagactaccaaaggcaaaaataaaatcttaaataatctagacagagaaagagagattaatcataattgaataaacaatagagcagattctcaattcttatcagcaacaatagaagatggaagataattaaataaagtcttca

SEQ ID NO: 252941 - DNA, 590 bp, Homo sapiens
agaaaatttttaaaaattggagacatgagaagaagaaattacttgaaagtattgtaaaataattaaatagaacatctagaaaaaactttaaaatttactcaactgaaaaaaacccactaagtacccaaatagcaatctaggcaaagctgaagagagaacacagcaaagtagtagatatgaggaaattatttaagagcatagcacacacaaaaaaaaaacgaggtggaaaatgagagatttagattatggaaaagayctaaaacacaactaatggtagtttcagaaacatccattgaaagaatgaagaagatataatatttgagaagaaaactggcttcaaattttacagaattgattagggtttttattgatttggacacaggaagtcaaatgagttctaatcatgattaagtaaaaatagatacttagataaaatgttgagaaactatagactaccaaaggcaaaaataaaatcttaaataatctagacagagaaagagagattaatcataattgaataaacaatagagcagattctcaattcttatcagcaacaatagaagatggaagataattaaataaagtcttca

SEQ ID NO: 252942 - DNA, 452 bp, Homo sapiens
ccaaatagcaatctaggcaaagctgaagagagaacacagcaaagtagtagatatgaggaaattatttaagagcatagcacacacaaaaaaaaaacgaggtggaaaatgagagatttagattatggaaaagatctaaaacacaaytaatggtagtttcagaaacatccattgaaagaatgaagaagatataatatttgagaagaaaactggcttcaaattttacagaattgattagggtttttattgatttggacacaggaagtcaaatgagttctaatcatgattaagtaaaaatagatacttagataaaatgttgagaaactatagactaccaaaggcaaaaataaaatcttaaataatctagacagagaaagagagattaatcataattgaataaacaatagagcagattctcaattcttatcagcaacaatagaagatggaagataatt

SEQ ID NO: 252943 - DNA, 590 bp, Homo sapiens
agaaaatttttaaaaattggagacatgagaagaagaaattacttgaaagtattgtaaaataattaaatagaacatctagaaaaaactttaaaatttactcaactgaaaaaaacccactaagtacccaaatagcaatctaggcaaagctgaagagagaacacagcaaagtagtagatatgaggaaattatttaagagcatagcacacacaaaaaaaaaacgaggtggaaaatgagagatttagattatggaaaagatctaaaacacaactaatggtagtttcagaaacatccattgaaagaatgaagaagayataatatttgagaagaaaactggcttcaaattttacagaattgattagggtttttattgatttggacacaggaagtcaaatgagttctaatcatgattaagtaaaaatagatacttagataaaatgttgagaaactatagactaccaaaggcaaaaataaaatcttaaataatctagacagagaaagagagattaatcataattgaataaacaatagagcagattctcaattcttatcagcaacaatagaagatggaagataattaaataaagtcttca

SEQ ID NO: 252944 - DNA, 452 bp, Homo sapiens
ccaaatagcaatctaggcaaagctgaagagagaacacagcaaagtagtagatatgaggaaattatttaagagcatagcacacacaaaaaaaaaacgaggtggaaaatgagagatttagattatggaaaagatctaaaacacaactaatggtagtttcagaaacatccattgaaagaatgaagaagatataatatttgagaagaaaactggcttcaaattttacagaattgattagggtttttattgatttggacacaggaagtcaaatgagttctaatcakgattaagtaaaaatagatacttagataaaatgttgagaaactatagactaccaaaggcaaaaataaaatcttaaataatctagacagagaaagagagattaatcataattgaataaacaatagagcagattctcaattcttatcagcaacaatagaagatggaagataatt

SEQ ID NO: 252945 - DNA, 590 bp, Homo sapiens
agaaaatttttaaaaattggagacatgagaagaagaaattacttgaaagtattgtaaaataattaaatagaacatctagaaaaaactttaaaatttactcaactgaaaaaaacccactaagtacccaaatagcaatctaggcaaagctgaagagagaacacagcaaagtagtagatatgaggaaattatttaagagcatagcacacacaaaaaaaaaacgaggtggaaaatgagagatttagattatggaaaagatctaaaacacaactaatggtagtttcagaaacatccattgaaagaatgaagaagatataatatttgagaagaaaactggcttcaaattttacagaattgattagggtttttattgatttggacacaggaagtcaaatgagttctaatcatgattaagtaaaaatagatacttagataaaatgttgagaaactatagactaccaaaggcaaaaataaaatcttaaataatctagacagagaaagagagattaatcataattgaataaamaatagagcagattctcaattcttatcagcaacaatagaagatggaagataattaaataaagtcttca

SEQ ID NO: 252946 - DNA, 502 bp, Homo sapiens
ctccacaggagatgattccaagaagctcatacctggtatcctccagactttaccacatacaactttttccctttgctaattytgctttgtatccattcactataataaattaaaaacctgagtattactaaaaaaaaaaaaaaagagagagagagaaatcctggaaaggagagaatcataaaaagtctgagaaaagttctccacacatactgccgattggaaaagtatggaagtgcaggaaagactcaagatagtatgacaaaaagtaaaaatgaagtaagacttgagtattaattgcaactttgaatgcattcacccacccacccacagattatttggcagagagtggaagccttactactagctttaatataatgtctctcaaaaatcaagctatgcaacagacacaaaggaaatccctagaaagacaggctaaaacaacaataacaacaacaacacaatataaaagacatcaatgctgaaaaccactgggcagaaggat

SEQ ID NO: 252947 - DNA, 502 bp, Homo sapiens
ctccacaggagatgattccaagaagctcatacctggtatcctccagactttaccacatacaactttttccctttgctaattctgctttgtatccattcactataataaattaaaaacctgagtattactaaaaaaaaaaaaaaagagagagagagaaatcctggaaaggagagaatcataaaaagtytgagaaaagttctccacacatactgccgattggaaaagtatggaagtgcaggaaagactcaagatagtatgacaaaaagtaaaaatgaagtaagacttgagtattaattgcaactttgaatgcattcacccacccacccacagattatttggcagagagtggaagccttactactagctttaatataatgtctctcaaaaatcaagctatgcaacagacacaaaggaaatccctagaaagacaggctaaaacaacaataacaacaacaacacaatataaaagacatcaatgctgaaaaccactgggcagaaggat

SEQ ID NO: 252948 - DNA, 502 bp, Homo sapiens
ctccacaggagatgattccaagaagctcatacctggtatcctccagactttaccacatacaactttttccctttgctaattctgctttgtatccattcactataataaattaaaaacctgagtattactaaaaaaaaaaaaaaagagagagagagaaatcctggaaaggagagaatcataaaaagtctgagaaaagttctccacacrtactgccgattggaaaagtatggaagtgcaggaaagactcaagatagtatgacaaaaagtaaaaatgaagtaagacttgagtattaattgcaactttgaatgcattcacccacccacccacagattatttggcagagagtggaagccttactactagctttaatataatgtctctcaaaaatcaagctatgcaacagacacaaaggaaatccctagaaagacaggctaaaacaacaataacaacaacaacacaatataaaagacatcaatgctgaaaaccactgggcagaaggat

SEQ ID NO: 252949 - DNA, 502 bp, Homo sapiens
ctccacaggagatgattccaagaagctcatacctggtatcctccagactttaccacatacaactttttccctttgctaattctgctttgtatccattcactataataaattaaaaacctgagtattactaaaaaaaaaaaaaaagagagagagagaaatcctggaaaggagagaatcataaaaagtctgagaaaagttctccacacataytgccgattggaaaagtatggaagtgcaggaaagactcaagatagtatgacaaaaagtaaaaatgaagtaagacttgagtattaattgcaactttgaatgcattcacccacccacccacagattatttggcagagagtggaagccttactactagctttaatataatgtctctcaaaaatcaagctatgcaacagacacaaaggaaatccctagaaagacaggctaaaacaacaataacaacaacaacacaatataaaagacatcaatgctgaaaaccactgggcagaaggat

SEQ ID NO: 252950 - DNA, 393 bp, Homo sapiens
ttcacccacccacccacagattatttggcagagagtggaagccttactactagctttaatataatgtctctcmaaaatcaagctatgcaacagacacaaaggaaatccctagaaagacaggctaaaacaacaataacaacaacaacacaatataaaagacatcaatgctgaaaaccactgggcagaaggattacacagcacaagtataggccaattaccaaaacataacaacaacaaagacaataacaaataaaaaccaaatccagatttgctataatgtgtaattaaagtgtttagttttcaattaaaaattatcagacatgtaaggaaacaggaaaatatggcttatactctggaaaaaaagcagtgaatagaaactgtctcaattcagat

SEQ ID NO: 252951 - DNA, 393 bp, Homo sapiens
ttcacccacccacccacagattatttggcagagagtggaagccttactactagctttaatataatgtctctcaaaaatcaagctatgcaacagacacaaaggaaatccctagaaagacaggctaaaacaacaataacaacaacaacacaatataaaagacatcaatgctgaaaaccactgggcagaaggattacacagcacaagtataggccaattaccaaaacakaacaacaacaaagacaataacaaataaaaaccaaatccagatttgctataatgtgtaattaaagtgtttagttttcaattaaaaattatcagacatgtaaggaaacaggaaaatatggcttatactctggaaaaaaagcagtgaatagaaactgtctcaattcagat

SEQ ID NO: 252952 - DNA, 191 bp, Homo sapiens
tggaatcaaatataccatgcttctgtgatgacagttatttcatgctggttgtcacaattttacatgaaaaactaatgaaaaartgtttttaactgtttctaaaaataagtttccaaaagagttttacattcgaaatatgaaaaagatgtctttgcgttccttaatctgatgagattttcacactctgcaca

SEQ ID NO: 252953 - DNA, 539 bp, Homo sapiens
cattttacctacaataaatgagataacacttgcaaattatatggtactctgcctaacacacgttaataactcaatacatgttagcaataaacttttagtatagtagtcaaagtattaatttctcacattgcaaagttgcttcaaagacatgaatacaacctttctaatgactcctcgttcatcaagatacctcttcaaattattstatttctttcattcagtgtattatctgtgtataccgatatgatattacactctttttttttttttttttgagatggaatctcattctgttactgatgctggagtgaggtggcatgatctgcaacctccacctcccaggttcaagcgattctcctgtctcagccccccaagtagctaggactacaggtgcacaccaccatgcctggctaatttttgtatttttagtacagtcagagtttcaccctgttgtccaggctggtctcgaactcctgacctcaggtgatccacccaccatggtctcccaaagtgctgggattacaggcataagccaccgc

SEQ ID NO: 252954 - DNA, 400 bp, Homo sapiens
ttatctctagttgtaggagtggatacatctttaatggtatattttgggttattgtcttatttttgatgcagtgttctataaataatttattaaacctggcatccttgggtgagcmtggatttttcaactttggtgttatattgtgtttgcttttaaaaactgcttttgaggccgggtatggtggctcttgcccatacccagcactttgggaggccaaggtgggcggattacctcaggtcaggagttcaagaccagcctggtcaacatggcaaaaccatgtctctactgaaaacacaaaattagccaggcatggtggtacatgcttgtagtcctaaccactcaggaggctgaggcaagacaatcacctgaacctgggaggcaaaggttgctaggttgctgt

SEQ ID NO: 252955 - DNA, 573 bp, Homo sapiens
gcttttgaatggagttgtacatacaatctttatgaaaaaaaatatcaagtgcataagttcataatagaaaagccaataatactccaggcacaagttagtactaaaaaagttatgttgaatattctctaatacaacatgctttttcccttcatgaacgayttgtgttttactgagaagagtcattgtttatggtagacattagactacagatgaatatgtactttaaacactcttagttgctttcgtaattttatatctgctgctttatgcttctgtttattttcattctttccaatgtccacattctagtaaatttgaatattttaatccaagtttatatactatttaatattgcttgtatagtttagtatttttaagactcaaaaaggtttacagaaagaagaaaaagatcaacatgttattaatcatttaaagatcattttaaaatctttgacctttatattttaatgaataaaatgttggtagttattagtataaaataatttatgtcttttggacttagcatccagtatttcttttttaataaagaaaataattattctcttgcaatat

SEQ ID NO: 252956 - DNA, 535 bp, Homo sapiens
gttgaatattctctaatacaacatgctttttcccttcatgaacgacttgtgttttactgagaagagtcattgtttatggtagacattagactacagatgaatatgtactttaaacactcttagttgctttcgtaattttatatctgctgctttatgcttctgtttattttcattctttccaatgtccacattctagtaaatttgaatattttaatccaagtttatatactatttaatattgcttgtatagtttagtatttttaagactcaaaaaggtttacagaaagaagaaaaagatcaacatgttattaatcatttaaagatcattttaaaatctttgacctttatattttaatgaataaaatgttggtagttattagtataaaataatttatgtcttttggacttagcatccagtatttcttttttaataaagaaaataattattctcttgcaatatactaygtttatctgggttttgaaaaatgatgtttcctaatatgagaaagccatttacatttttaaatctacaaag

SEQ ID NO: 252957 - DNA, 575 bp, Homo sapiens
aaacaacttactcctgaataaatcctttgtaaacatcaaagtaaggcagaaatataaaaattacttgaaattgatagaaataggaacacaacttaccaaaatttctaagatgcagccaaagcagtgttaagagraaactttatagccctaaatgcctttatcaagaagttagaaatgtctcaaattaacgatgtaactttgcacctaaaggaacttgaaaaaaagaaccaaccaaccccaaagctagcatgagagaagacataacagcaattagagaagaatttaatgaagttgagatgcaaaaatgtatacaacagtccaagaaaacaaaaaatggttcttcaaaaaaaattgataagctcctagccaaattaacaaatataaaaaagaaagagaagatccaaataagcgcaataaaaatgacaggttatattaaaatggatcagatagagatacaaaagatcctcagcgagtactatgaacagctctgcacgcaaattagaaaatctggagaaaatgaataaattccaggaagcacacagtctcccaagatggaatcagaaagagatcaaaac

SEQ ID NO: 252958 - DNA, 575 bp, Homo sapiens
aaacaacttactcctgaataaatcctttgtaaacatcaaagtaaggcagaaatataaaaattacttgaaattgatagaaataggaacacaacttaccaaaatttctaagatgcagccaaagcagtgttaagaggaaactttatagccctaaatgcctttatcaagaagttagaaatgtctcaaattaacgatgtaactttgcacctaaaggaacttgaaaaaaagaaccaaccaaccccaaagctagcatgagagaagacataacagcaattagagaagaatttaatgaagttgagatgcaaaaatgtatacaacagtccaagaaaacaaaaaatggttcttcaaaaaaaattgataagctcctagccaaattaacaaatataaaaaagaaagagaagatccaaataagcrcaataaaaatgacaggttatattaaaatggatcagatagagatacaaaagatcctcagcgagtactatgaacagctctgcacgcaaattagaaaatctggagaaaatgaataaattccaggaagcacacagtctcccaagatggaatcagaaagagatcaaaac

SEQ ID NO: 252959 - DNA, 575 bp, Homo sapiens
aaacaacttactcctgaataaatcctttgtaaacatcaaagtaaggcagaaatataaaaattacttgaaattgatagaaataggaacacaacttaccaaaatttctaagatgcagccaaagcagtgttaagaggaaactttatagccctaaatgcctttatcaagaagttagaaatgtctcaaattaacgatgtaactttgcacctaaaggaacttgaaaaaaagaaccaaccaaccccaaagctagcatgagagaagacataacagcaattagagaagaatttaatgaagttgagatgcaaaaatgtatacaacagtccaagaaaacaaaaaatggttcttcaaaaaaaattgataagctcctagccaaattaacaaatataaaaaagaaagagaagatccaaataagcgcaataaaaatgacaggttatattaraatggatcagatagagatacaaaagatcctcagcgagtactatgaacagctctgcacgcaaattagaaaatctggagaaaatgaataaattccaggaagcacacagtctcccaagatggaatcagaaagagatcaaaac

SEQ ID NO: 252960 - DNA, 586 bp, Homo sapiens
tcttcaaggagaactacaaaacactgctgaaagtcacacacctacaaccatatgatatttgacaaggctggcaagaacaagcaatggggaaaggactccctagtcaatacattctgggataactggyttgccataggcagaagattgaacctagacctttaccttgcaacatgccccaaaattaaatttaaatggattaaaaatttaagtgtaagacctcaaactataaaaattctggaagataacctaggaaatatttttttgacatcagccttggcaagtcgtttttggctaagtccccaaaagcaattgcaaccaaaacaaaaatagacaagtaggacttaatttgactaaatagcttctgcacagcaaaataaactatcaacaggggaaagaggcatcctccagaatgggaggagatattcacaaactatgagtctaacaaaagcctaatatccagactccatagggaactcaaatcaacaagccaaaaaaaaaaaaccattaaaaaataaaaaatgggcaaatgagatgaacagatatgcctgaacagaagatatacaagtggccaacaaacatgaaaaat

SEQ ID NO: 252961 - DNA, 461 bp, Homo sapiens
tttatttattatttatttatttttagagacaggatattatgatgttgtttagactgctcttgaactcctggactgaagtgaacctatcaccttagcatcctgggtaactgggattacaggcacaagccactgtgcctggctacatttattgatatttatatgttaaagcatctttgcacttcagtaataactctcaattagtcttggtagataaccctcttattattctgctaaatatattttgctaatatttattttatagwttttatattatttataaagaacatttttcttcaactttcttttcttgtagtgcttttgttcattttttatgtcactgtaattttggcctacctcatagaataaatttggaagtgtttctgcatcttcaggtttttgcaagagtttgaggataattggtaattaattcttaaaatgtttgatagattcagcagcataac

SEQ ID NO: 252962 - DNA, 594 bp, Homo sapiens
gtaaaagccatgtcatgtttctgaaagtaaagttcataaatttgtataccctgaaaatgttaattctcaaacttttagccattcatcaayaatggtttgttttcttacaactgtatttgttcccataggggtttcttgtggtttactaaccaagtaagttataattctctggatgtgtgtgtccttctgtccaatttgggatggtgatttgccctgtgaacttatttttctgatagatgttaggagaattgctggcctatgtttccctttttactttcgctgatgcgaatgtcaccttctacgtccttacttgccaggctgaccaaaaggaactatcttcattttttgatggttgtctctatttttaatcctaaaccgtgtgtgtgtgtgtgtgtgtgtgtgtgtgtgtgtgtgtgtgtgtgtgtgtgtataaaataatacagtaagaggaaacctgggtggtcccttttctggtaccagcagcagattgaaaccattcaaacccctgtccatgggaataaattctcaccctagcatgccacctaccctcaataaaaatccaggcctggctccttttcttgcacattcaagcca

SEQ ID NO: 252963 - DNA, 539 bp, Homo sapiens
gtaagggtcaggactctctcacttttctgtctctctctctgtctctcctctagggctgaccccacattggacaccactgcttccatgtccatcacacaccacagctgccttttcttctgcctgcttatgggaaagtcccctcctctcctccgttttcttctcttcctgccctrtcacaccgtgcacttctccctttccttaaagaaccaccatcaactttaggaggagggaaaggggtggctctggcaggaaaagccagaatcccctctagccaacagagagagagaggaatggctgcatgttttctccctcaatccaaggcactgggtcttggctgagttgcaggttccaagctgctctcctgctgtgtcggtgagttctggtcaacctgcaacctcctgacgtggccactgcagttcatcgagtcttcagggactccccatggcctagagtactttgccttgcttacacgggagaggagaatggatttatagagaacatcatctaaatccaacttgaccattgtgtggccacacttg

SEQ ID NO: 252964 - DNA, 539 bp, Homo sapiens
gtaagggtcaggactctctcacttttctgtctctctctctgtctctcctctagggctgaccccacattggacaccactgcttccatgtccatcacacaccacagctgccttttcttctgcctgcttatgggaaagtcccctcctctcctccgttttcttctcttcctgccctatcacaccgtgcacttctccctttccttaaagaaccaccatcaactttaggaggagggaaaggggtggctctggcaggaaaagccagaatcccctctagccaacagagagagagaggaatggctgcatgttttctcccycaatccaaggcactgggtcttggctgagttgcaggttccaagctgctctcctgctgtgtcggtgagttctggtcaacctgcaacctcctgacgtggccactgcagttcatcgagtcttcagggactccccatggcctagagtactttgccttgcttacacgggagaggagaatggatttatagagaacatcatctaaatccaacttgaccattgtgtggccacacttg

SEQ ID NO: 252965 - DNA, 496 bp, Homo sapiens
ctttctgctaacgtccttatatttgggtgacaatctgaatggcagtgaccaatcagagcagaggcaaaccttggagtgggcagggcatcctgagggccctgattcctgccatgagtcataacyctttaggtgccagaccatggggaggtccaggggttgcaggggagggctgtgcatctgcaatgactctcagggggctcctggtggtggcaattggtgaatctgcacagtggtgtttcaatattgtcacaaccctgctgtctctcatgctctcaaaaagcattcctcttacctgtgacagacttcctacacctaacagcttgcaaaagtgttccaggttaatgagaataatctctcggagccatacctccctgcttggggtctcagtttccccaactgtctccagacaagttaggctagaaggcccctgagcctcagcccctctatacccctcctgtcacccagacctgatctgggtcttgcaccctgggtgcag

SEQ ID NO: 252966 - DNA, 496 bp, Homo sapiens
ctttctgctaacgtccttatatttgggtgacaatctgaatggcagtgaccaatcagagcagaggcaaaccttggagtgggcagggcatcctgagggccctgattcctgccatgagtcataactctttaggtgccagaccatggggaggtccaggggttgcaggggagggctgtgcatctgcaatgactctcagggggctcctggtggtggcaattggtgaatctgcacagtggtgtttcaatattgtcacaaccctgctgtctctcatgctctcaaaaagcattyctcttacctgtgacagacttcctacacctaacagcttgcaaaagtgttccaggttaatgagaataatctctcggagccatacctccctgcttggggtctcagtttccccaactgtctccagacaagttaggctagaaggcccctgagcctcagcccctctatacccctcctgtcacccagacctgatctgggtcttgcaccctgggtgcag

SEQ ID NO: 252967 - DNA, 496 bp, Homo sapiens
ctttctgctaacgtccttatatttgggtgacaatctgaatggcagtgaccaatcagagcagaggcaaaccttggagtgggcagggcatcctgagggccctgattcctgccatgagtcataactctttaggtgccagaccatggggaggtccaggggttgcaggggagggctgtgcatctgcaatgactctcagggggctcctggtggtggcaattggtgaatctgcacagtggtgtttcaatattgtcacaaccctgctgtctctcatgctctcaaaaagcattcctcttacctgtgacagacttcctayacctaacagcttgcaaaagtgttccaggttaatgagaataatctctcggagccatacctccctgcttggggtctcagtttccccaactgtctccagacaagttaggctagaaggcccctgagcctcagcccctctatacccctcctgtcacccagacctgatctgggtcttgcaccctgggtgcag

SEQ ID NO: 252968 - DNA, 496 bp, Homo sapiens
ctttctgctaacgtccttatatttgggtgacaatctgaatggcagtgaccaatcagagcagaggcaaaccttggagtgggcagggcatcctgagggccctgattcctgccatgagtcataactctttaggtgccagaccatggggaggtccaggggttgcaggggagggctgtgcatctgcaatgactctcagggggctcctggtggtggcaattggtgaatctgcacagtggtgtttcaatattgtcacaaccctgctgtctctcatgctctcaaaaagcattcctcttacctgtgacagacttcctacacctaacagcttgcaaaartgttccaggttaatgagaataatctctcggagccatacctccctgcttggggtctcagtttccccaactgtctccagacaagttaggctagaaggcccctgagcctcagcccctctatacccctcctgtcacccagacctgatctgggtcttgcaccctgggtgcag

SEQ ID NO: 252969 - DNA, 625 bp, Homo sapiens
tgctcttttgttctttcttttcctgtcttaattaaaatgagatgcagactctcacggtccacagtcaattaagaaatcttgcacggccatcaggttatgtcttggagagcagagtttcagtaccatcagcctggcaaggagctgggcctgctcctcagagctcccgggactgcgagatttggcrtgttcacagggcaccgtcacagcctctgaaacatgctgtctttaaagacttttgccgtggctcactcactcacagtgggacacggtggctcactcctgtaatcccagcactttgggaggcagaagcgggtggctcacttgaggtcaggagttaagagaccaacatggccaacatggcaaaaccccatctctactaaaaatacaaaaaattagccaggtgtggtgtcaggtgcctgtaattccagctactcaggaggctgaggtaggagaattgcttgaacccaggaggcggaggttgcaatgagcagaggtcacaccactgcactccagtctgggcaacaagagcaaaacttcatctcaaaataaaaaaacaaaacaaaacacaaagacatttgcaaggaccatgtcctcacccagaatggtgcctgcctttctacagttt

SEQ ID NO: 252970 - DNA, 625 bp, Homo sapiens
tgctcttttgttctttcttttcctgtcttaattaaaatgagatgcagactctcacggtccacagtcaattaagaaatcttgcacggccatcaggttatgtcttggagagcagagtttcagtaccatcagcctggcaaggagctgggcctgctcctcagagctcccgggactgcgagatttggcgtgttcacagggcaccgtcacagcctctgaaacatgctgtctttaaagacttttgcygtggctcactcactcacagtgggacacggtggctcactcctgtaatcccagcactttgggaggcagaagcgggtggctcacttgaggtcaggagttaagagaccaacatggccaacatggcaaaaccccatctctactaaaaatacaaaaaattagccaggtgtggtgtcaggtgcctgtaattccagctactcaggaggctgaggtaggagaattgcttgaacccaggaggcggaggttgcaatgagcagaggtcacaccactgcactccagtctgggcaacaagagcaaaacttcatctcaaaataaaaaaacaaaacaaaacacaaagacatttgcaaggaccatgtcctcacccagaatggtgcctgcctttctacagttt

SEQ ID NO: 252971 - DNA, 542 bp, Homo sapiens
aaaaaacaaaacaaaacacaaagacatttgcaaggaccatgtcctcacccagaatggtgcctgcctttctacagtttttcaggaagaggaaacattttctgcttctctcgctgcaggtttcttttaaccacccattaggaacctatagatttcaggatcgaacactggggattccctcagcactaaaggaggaaaattgcaaacagagctggaagygcaatgtggaaaggtcaggctgacgaaggttcttagccagtagaccaagggcaggaaggacactgcctcctcagtctcccactagggaacttgtgattcttgtcccctgatgtcagaattccttgtcatgtttgttttgtctccaagggaagggtttgaatttcagaatttaaggctagagtgggcctcgtgcagttaacattaaccctctctctccttcgctggccgaggtgaggtccaggaccatgtagttctgacgtccactctctcgggggatcaccagttcacccatctcacccggcaagctgggccctagtttggcgaca

SEQ ID NO: 252972 - DNA, 474 bp, Homo sapiens
ttctgcttctctcgctgcaggtttcttttaaccacccattaggaacctatagatttcaggatcgaacactggggattccctcagcactaaaggaggaaaattgcaaacagagctggaagtgcaatgtggaaaggtcaggctgacgaaggttcttagccagtagaccaagggcaggaaggacactgcctcctcagtctcccactagggaacttgtgattcttgtcccctgatgtcagaattccttgtyatgtttgttttgtctccaagggaagggtttgaatttcagaatttaaggctagagtgggcctcgtgcagttaacattaaccctctctctccttcgctggccgaggtgaggtccaggaccatgtagttctgacgtccactctctcgggggatcaccagttcacccatctcacccggcaagctgggccctagtttggcgacaggcatcttccacccacctgggaggcagg

SEQ ID NO: 252973 - DNA, 474 bp, Homo sapiens
ttctgcttctctcgctgcaggtttcttttaaccacccattaggaacctatagatttcaggatcgaacactggggattccctcagcactaaaggaggaaaattgcaaacagagctggaagtgcaatgtggaaaggtcaggctgacgaaggttcttagccagtagaccaagggcaggaaggacactgcctcctcagtctcccactagggaacttgtgattcttgtcccctgatgtcagaattccttgtcatgtttgttttgtctccaagggaagggtttgaattwcagaatttaaggctagagtgggcctcgtgcagttaacattaaccctctctctccttcgctggccgaggtgaggtccaggaccatgtagttctgacgtccactctctcgggggatcaccagttcacccatctcacccggcaagctgggccctagtttggcgacaggcatcttccacccacctgggaggcagg

SEQ ID NO: 252974 - DNA, 474 bp, Homo sapiens
ttctgcttctctcgctgcaggtttcttttaaccacccattaggaacctatagatttcaggatcgaacactggggattccctcagcactaaaggaggaaaattgcaaacagagctggaagtgcaatgtggaaaggtcaggctgacgaaggttcttagccagtagaccaagggcaggaaggacactgcctcctcagtctcccactagggaacttgtgattcttgtcccctgatgtcagaattccttgtcatgtttgttttgtctccaagggaagggtttgaatttcagaatttaaggctagagtgggcctcgtgcagttaacattaaccctctctctccttcgctggccgagstgaggtccaggaccatgtagttctgacgtccactctctcgggggatcaccagttcacccatctcacccggcaagctgggccctagtttggcgacaggcatcttccacccacctgggaggcagg

SEQ ID NO: 252975 - DNA, 545 bp, Homo sapiens
ttcacaagcttaattaggtcaagtggaaggaactcagatgagtagttgcccaatcagagcccattatttgtaagtcatcagccccctccatgaccttaaaactccactctgacctaattattgcaaacctatacacaacaaagtgaaaggattaattttcattcatcaacctctcaatcccagattttcaaagaaaaaaacctgtgtaaggaatacttaccaaaaccagacagraaaattagagcctgcatacttaagagtcaaatttgttccactacagccaggtcacatacagttacatcatttggttcttcatacactctagaactgaccaggacagagtttagcatagaaaaactgtaagaaataggttctgaaacatagaaattgcaaagttcaaaaggctatgaaaaaaacgaatgtaaatgagacttccctccctttgttttaaataaatagacccatcagagaaatgcaaatcaaaaccacaatgagataccatctcacaccagttagaatggcgatcattaaaaagtcaggaaaca

SEQ ID NO: 252976 - DNA, 545 bp, Homo sapiens
ttcacaagcttaattaggtcaagtggaaggaactcagatgagtagttgcccaatcagagcccattatttgtaagtcatcagccccctccatgaccttaaaactccactctgacctaattattgcaaacctatacacaacaaagtgaaaggattaattttcattcatcaacctctcaatcccagattttcaaagaaaaaaacctgtgtaaggaatacttaccaaaaccagacaggaaaattagagcctgcatacttaagagtcaaatttgttccactacagccaggtcrcatacagttacatcatttggttcttcatacactctagaactgaccaggacagagtttagcatagaaaaactgtaagaaataggttctgaaacatagaaattgcaaagttcaaaaggctatgaaaaaaacgaatgtaaatgagacttccctccctttgttttaaataaatagacccatcagagaaatgcaaatcaaaaccacaatgagataccatctcacaccagttagaatggcgatcattaaaaagtcaggaaaca

SEQ ID NO: 252977 - DNA, 545 bp, Homo sapiens
ttcacaagcttaattaggtcaagtggaaggaactcagatgagtagttgcccaatcagagcccattatttgtaagtcatcagccccctccatgaccttaaaactccactctgacctaattattgcaaacctatacacaacaaagtgaaaggattaattttcattcatcaacctctcaatcccagattttcaaagaaaaaaacctgtgtaaggaatacttaccaaaaccagacaggaaaattagagcctgcatacttaagagtcaaatttgttccactacagccaggtcacatacagttacatcatttggttctycatacactctagaactgaccaggacagagtttagcatagaaaaactgtaagaaataggttctgaaacatagaaattgcaaagttcaaaaggctatgaaaaaaacgaatgtaaatgagacttccctccctttgttttaaataaatagacccatcagagaaatgcaaatcaaaaccacaatgagataccatctcacaccagttagaatggcgatcattaaaaagtcaggaaaca

SEQ ID NO: 252978 - DNA, 545 bp, Homo sapiens
ttcacaagcttaattaggtcaagtggaaggaactcagatgagtagttgcccaatcagagcccattatttgtaagtcatcagccccctccatgaccttaaaactccactctgacctaattattgcaaacctatacacaacaaagtgaaaggattaattttcattcatcaacctctcaatcccagattttcaaagaaaaaaacctgtgtaaggaatacttaccaaaaccagacaggaaaattagagcctgcatacttaagagtcaaatttgttccactacagccaggtcacatacagttacatcatttggttcttcatacactctagaactgaccaggacagagtttagcrtagaaaaactgtaagaaataggttctgaaacatagaaattgcaaagttcaaaaggctatgaaaaaaacgaatgtaaatgagacttccctccctttgttttaaataaatagacccatcagagaaatgcaaatcaaaaccacaatgagataccatctcacaccagttagaatggcgatcattaaaaagtcaggaaaca

SEQ ID NO: 252979 - DNA, 478 bp, Homo sapiens
tagttcatctctgttgcaggatctccctggaatactcttctagccaccttttgtttttgcagtaaaaggaggaatgagcattgaatgaagacgaggatgaagactgaccatctaaaacatctgttagtgatagtttgggttttattttgggaaaattcagtgttttcacaaaaaccaaatggttttgtgggtctggcgctggactgagtgttgggaatgtggattctggtctctgttttgtcattaacagagtgcccagttttgggagcatcccttacatctactgtctgcctcrtatttactgcctgaaatagaggattacttctgtttgctttcaagggatattataatttaatttttattttatttattgttggagacaaggtcttcttctgttgcccaaactggagtgcactggtgcaattatagctcacggcagcctcgacctcctggccttaagggatcctcccgcctcagc

SEQ ID NO: 252980 - DNA, 439 bp, Homo sapiens
gagtcaggcccagcccctggccccctgattgtcacctttctcaggatctgggatgttaattcagaaactcttgactgcyggaggctgtgattgacccactgagagcttttaggcatgtggatgtgagtcagccaggattgatggagcattgactgctaattggactcctctgggaaggtagaggggggcaatacataatgccttcgctgtgggagcttcatcaaggggatgattcttggaaggacatcttttcctccctctttccacaggggcatgctagccctgtcattctaggagtttattatccttcagacacagctacttatgtttttaattccctcacaggatgaagacatgaagagaaagtttcaagatcttctgtctgaggaaaatgaatccacagctctatctcaggttctagcccaggtattcgtattcc

SEQ ID NO: 252981 - DNA, 439 bp, Homo sapiens
gagtcaggcccagcccctggccccctgattgtcacctttctcaggatctgggatgttaattcagaaactcttgactgctggaggctgtgattgacccactgagagcttttaggcatgtggatgtgagtcagccaggattgatggagcattgactgctaattkgactcctctgggaaggtagaggggggcaatacataatgccttcgctgtgggagcttcatcaaggggatgattcttggaaggacatcttttcctccctctttccacaggggcatgctagccctgtcattctaggagtttattatccttcagacacagctacttatgtttttaattccctcacaggatgaagacatgaagagaaagtttcaagatcttctgtctgaggaaaatgaatccacagctctatctcaggttctagcccaggtattcgtattcc

SEQ ID NO: 252982 - DNA, 439 bp, Homo sapiens
gagtcaggcccagcccctggccccctgattgtcacctttctcaggatctgggatgttaattcagaaactcttgactgctggaggctgtgattgacccactgagagcttttaggcatgtggatgtgagtcagccaggattgatggagcattgactgctaattggactcctctgggaaggtagaggggggcaayacataatgccttcgctgtgggagcttcatcaaggggatgattcttggaaggacatcttttcctccctctttccacaggggcatgctagccctgtcattctaggagtttattatccttcagacacagctacttatgtttttaattccctcacaggatgaagacatgaagagaaagtttcaagatcttctgtctgaggaaaatgaatccacagctctatctcaggttctagcccaggtattcgtattcc

SEQ ID NO: 252983 - DNA, 439 bp, Homo sapiens
gagtcaggcccagcccctggccccctgattgtcacctttctcaggatctgggatgttaattcagaaactcttgactgctggaggctgtgattgacccactgagagcttttaggcatgtggatgtgagtcagccaggattgatggagcattgactgctaattggactcctctgggaaggtagaggggggcaatacataatgccttcgctgtgggagcttcatcaaggggatgattcttggamggacatcttttcctccctctttccacaggggcatgctagccctgtcattctaggagtttattatccttcagacacagctacttatgtttttaattccctcacaggatgaagacatgaagagaaagtttcaagatcttctgtctgaggaaaatgaatccacagctctatctcaggttctagcccaggtattcgtattcc

SEQ ID NO: 252984 - DNA, 480 bp, Homo sapiens
acagtctctgaaacctttgggctagataagttgtgaaatttaattacccaattttcggaaggtggtaaggcatatctactatgtgtatgtgtagcaccccagtggagtcctacacatgtggagtcctaccccagtggagaccaaacatgttaatatttccacagcaaatattcacagtaagagggatagagaaagattataggtagttgcatattgaytcatatcagtcttttcttccaaatgagctacaatgactcatttctgagagctgtttgggtttttgaagtggagataaggcacggttatgtcttgatgacccaataatgaccggggaggccctgtgcaaagacttacccttggctgctcttgtcctcacagtgattctatgaggtcctctagccactgtcatgtcacaggtgaggaaaccaaagttggaggatgaaggtaacttttctgatgtcgcgcagctggtaaatggca

SEQ ID NO: 252985 - DNA, 498 bp, Homo sapiens
ccaaacatgttaatatttccacagcaaatattcacagtaagagggatagagaaagattataggtagttgcatattgactcatatcagtcttttcttccaaatgagctacaatgactcatttytgagagctgtttgggtttttgaagtggagataaggcacggttatgtcttgatgacccaataatgaccggggaggccctgtgcaaagacttacccttggctgctcttgtcctcacagtgattctatgaggtcctctagccactgtcatgtcacaggtgaggaaaccaaagttggaggatgaaggtaacttttctgatgtcgcgcagctggtaaatggcagagctgggacccaacccaggtctttttgactctaaagctaatgttccttattgtccactgaatctgcttttataactttgcttggtcgatgctaggacactttgtagctcactggccatgccatgaattgagtgccgtggttcaaaggccactggtga

SEQ ID NO: 252986 - DNA, 498 bp, Homo sapiens
ccaaacatgttaatatttccacagcaaatattcacagtaagagggatagagaaagattataggtagttgcatattgactcatatcagtcttttcttccaaatgagctacaatgactcatttctgagagctgtttgggtttttgaagtggagataaggcacggttatgtcttgatgacccaataatgaccggggaggccctgtgcaaagacttacccttggctgctcttgtcctcacagtgattctatgaggtcctctagccactgtcatgtcacaggtgaggaaaccaaagttggaggatgaaggtaacttttctgatgtcgcgcagctggtaaatggcagagctgggacccaacccaggtctttttgactctaaagctaatgttccttattgtccactgaatctgyttttataactttgcttggtcgatgctaggacactttgtagctcactggccatgccatgaattgagtgccgtggttcaaaggccactggtga

SEQ ID NO: 252987 - DNA, 565 bp, Homo sapiens
tgttttacagtatatttttctcagctcccaacttttgtgattgtttttaatgccatgttttcagtatgttctaggcaaaagcagggtatatgttgcttagtatacactatcgastaggccggttgtggtggctcactcctgtaatctcagcactttgggaggcagattgcttgagcccaggggcttgaggctgtagtgagccaaggagttagagaccagtgtgggaaacatagtgaggctcgtctccgcaaaaattagctgggtgtggtaacgtgcacttgcagtcccagctactctggagactgaggtgggaggatcgcttgagctcaggaagtacaagttgcagtgagccaaggttgtgccactgcattccatcctggataacacagcgaaacccagtctcttaaataagtaaataaatacatagatgattatgtatactccagctaggttaaaattaattctgaatcaaaattctaaattaaaatatgcatgtttctttgtcttcatcatttgagaacactaggcttttaggatttcattccgttgaggcaggtaaatatct

SEQ ID NO: 252988 - DNA, 565 bp, Homo sapiens
tgttttacagtatatttttctcagctcccaacttttgtgattgtttttaatgccatgttttcagtatgttctaggcaaaagcagggtatatgttgcttagtatacactatcgactaggccggttgtggtggctcactcctgtaatctcagcactttgggaggcagattgcttgagcccaggggcttgaggctgtagtgagccaaggagttagagaccagtgtgggaaacatagygaggctcgtctccgcaaaaattagctgggtgtggtaacgtgcacttgcagtcccagctactctggagactgaggtgggaggatcgcttgagctcaggaagtacaagttgcagtgagccaaggttgtgccactgcattccatcctggataacacagcgaaacccagtctcttaaataagtaaataaatacatagatgattatgtatactccagctaggttaaaattaattctgaatcaaaattctaaattaaaatatgcatgtttctttgtcttcatcatttgagaacactaggcttttaggatttcattccgttgaggcaggtaaatatct

SEQ ID NO: 252989 - DNA, 565 bp, Homo sapiens
tgttttacagtatatttttctcagctcccaacttttgtgattgtttttaatgccatgttttcagtatgttctaggcaaaagcagggtatatgttgcttagtatacactatcgactaggccggttgtggtggctcactcctgtaatctcagcactttgggaggcagattgcttgagcccaggggcttgaggctgtagtgagccaaggagttagagaccagtgtgggaaacatagtgaggctcgtctccgcaaaaattagctgggtgtggtaacgtgcacttgcagtcccagctactctggagactgaggtgggaggatcgcttgagctcaggaagyacaagttgcagtgagccaaggttgtgccactgcattccatcctggataacacagcgaaacccagtctcttaaataagtaaataaatacatagatgattatgtatactccagctaggttaaaattaattctgaatcaaaattctaaattaaaatatgcatgtttctttgtcttcatcatttgagaacactaggcttttaggatttcattccgttgaggcaggtaaatatct

SEQ ID NO: 252990 - DNA, 565 bp, Homo sapiens
tgttttacagtatatttttctcagctcccaacttttgtgattgtttttaatgccatgttttcagtatgttctaggcaaaagcagggtatatgttgcttagtatacactatcgactaggccggttgtggtggctcactcctgtaatctcagcactttgggaggcagattgcttgagcccaggggcttgaggctgtagtgagccaaggagttagagaccagtgtgggaaacatagtgaggctcgtctccgcaaaaattagctgggtgtggtaacgtgcacttgcagtcccagctactctggagactgaggtgggaggatcgcttgagctcaggaagtacaagttgcagtgagccaaggttgtgccactgcattccatcctggataacacagcgaaacccagtctcttaaataagtaaataaatacataratgattatgtatactccagctaggttaaaattaattctgaatcaaaattctaaattaaaatatgcatgtttctttgtcttcatcatttgagaacactaggcttttaggatttcattccgttgaggcaggtaaatatct

SEQ ID NO: 252991 - DNA, 576 bp, Homo sapiens
gggcagggccagggacaaggtcaggtcaggaaggggccagggccaaggcagggccagagctggacttggaggtgtcctggtctgatttgccctgtccyaacgttggcccagccctgctctggcacttcctgtcatgccctgtccctggtctgagcattggccctggccctgtcctgcttctggccctgccccagagttgaccaggcactgccatggcccagtcctgcattgccctgcccttttctgccctggtgctgccatggccctgcttgggccctagctctgcctcgactctggacctgccctgactctgctcagccctggatctaccctgactctgccttggtgttgccctcccatctctatggcctggctctggccctgccttgcacaggccatgctctgccctgcatgtcccagcctgggcccagcccttgccctaccatatttctgaccccacccgtacccttgttctggccttgaccctgccgtggcattctcctggcccttccttggtcctgccctgcccttccatgccctggcctttccctcaccctgcactggtcctgccctgcc

SEQ ID NO: 252992 - DNA, 596 bp, Homo sapiens
ggccctggccctgacaatccccaggccgcacactggccatgcttggccctggcccctcctttggccctgccctggccctgtgctatcttagtacagggccttggccttggccctgtgctatcttagtcctgccctggccctgaacttgccctggccctaccctcaccctacactggccctgccctggccctgcctttggactgccctggctctggttctgccatggccttgcccttgccctggaccctccctggccatgtttttactgtggtccttctctggccttgcccttgccctktcccctttctggtcctgccatgtttctggccctgccctgtccatgtcctggacctgactctggccctggacctccctgtccctgccctgccataccctggcccgtttcttgctctacactgaccctgccctgccttggccctgtgctaccctagccctgccctggccttctgctggccctgatcctgccatggccctggccctgcccctgccatgtccctgccctggccctggttctgccctacttctggccctggccttggtcctcttatgtccctggctgtgaccctgcccctggt

SEQ ID NO: 252993 - DNA, 596 bp, Homo sapiens
ggccctggccctgacaatccccaggccgcacactggccatgcttggccctggcccctcctttggccctgccctggccctgtgctatcttagtacagggccttggccttggccctgtgctatcttagtcctgccctggccctgaacttgccctggccctaccctcaccctacactggccctgccctggccctgcctttggactgccctggctctggttctgccatggccttgcccttgccctggaccctccctggccatgtttttactgtggtccttctctggccttgcccttgccctttcccctttctggtcctgccatrtttctggccctgccctgtccatgtcctggacctgactctggccctggacctccctgtccctgccctgccataccctggcccgtttcttgctctacactgaccctgccctgccttggccctgtgctaccctagccctgccctggccttctgctggccctgatcctgccatggccctggccctgcccctgccatgtccctgccctggccctggttctgccctacttctggccctggccttggtcctcttatgtccctggctgtgaccctgcccctggt

SEQ ID NO: 252994 - DNA, 596 bp, Homo sapiens
ggccctggccctgacaatccccaggccgcacactggccatgcttggccctggcccctcctttggccctgccctggccctgtgctatcttagtacagggccttggccttggccctgtgctatcttagtcctgccctggccctgaacttgccctggccctaccctcaccctacactggccctgccctggccctgcctttggactgccctggctctggttctgccatggccttgcccttgccctggaccctccctggccatgtttttactgtggtccttctctggccttgcccttgccctttcccctttctggtcctgccatgtttctggccctgccctgtccatgtcctggacctgactctggccctggacctccctgtccctgccctgccataccctggcccgttycttgctctacactgaccctgccctgccttggccctgtgctaccctagccctgccctggccttctgctggccctgatcctgccatggccctggccctgcccctgccatgtccctgccctggccctggttctgccctacttctggccctggccttggtcctcttatgtccctggctgtgaccctgcccctggt

SEQ ID NO: 252995 - DNA, 636 bp, Homo sapiens
gacatctccatgcgtgtaattgcccaggcgggagtgcagtggcacgatctcggctcactgcaacctccacctcctgggttcaagtgattctcctgtgtcagtctcctgagtagctgggattacaggtgcacaccaccatgcctggctaagttttgtatttttagtagacatgagtgtttcacyacgttggccaggatggtcttgaattcccgacctcaaatgatcttcctgccttggcctcccaaagtgctgggattgcaggtgtgagacaccatgaccggcaaaattttttaagatacatttcagtaagctaaggtgaatttattgaagaaaagctttaaaaatttttggtgtagcctaagcatatggtgtttataaagtctacagtagtgtacagtaaggtcctatgccttcacactcactgactcatccacagcatcttccagtcctgcaagctcatttcatggtaagtgccctatacaggagtaccattttaaaatctcttatactctattcttactgtattttctctatgttcaggtacacaagtacttacattgtgttacaactgcttatggtatattcagtaaagtatcaggctgtaagggtgtgtagcctaggagcaataggctacgc

SEQ ID NO: 252996 - DNA, 636 bp, Homo sapiens
gacatctccatgcgtgtaattgcccaggcgggagtgcagtggcacgatctcggctcactgcaacctccacctcctgggttcaagtgattctcctgtgtcagtctcctgagtagctgggattacaggtgcacaccaccatgcctggctaagttttgtatttttagtagacatgagtgtttcactacgttggccaggatggtcttgaattcccgacctcaaatgatcttcctgccttggcmtcccaaagtgctgggattgcaggtgtgagacaccatgaccggcaaaattttttaagatacatttcagtaagctaaggtgaatttattgaagaaaagctttaaaaatttttggtgtagcctaagcatatggtgtttataaagtctacagtagtgtacagtaaggtcctatgccttcacactcactgactcatccacagcatcttccagtcctgcaagctcatttcatggtaagtgccctatacaggagtaccattttaaaatctcttatactctattcttactgtattttctctatgttcaggtacacaagtacttacattgtgttacaactgcttatggtatattcagtaaagtatcaggctgtaagggtgtgtagcctaggagcaataggctacgc

SEQ ID NO: 252997 - DNA, 579 bp, Homo sapiens
ctgtcatggccctgccctggacctgtcctggccctggccctggcccttccctgcttgagaccttgtcctggttctcccctggccctgaccctgaaatgcctggccctaccctggccttgcactgctctggcccttgctctgactctggtcctgtcactggcctagccccagccctgttgctggtcttaccatggcccagaccctgccttggccctgccctgacactatcctggaccctggctgtgccaagatcctgcactgtccttgcccttgttttgctcctgccccaaacctggacctgcccaggccatggccatggccctggccctggccctgccctggctgttccctggccctgcccaggtcttggcactggcctggccctgccctgccttggccctatgctttcctggccctgccttccggccctgcccctgccttggccctagcctggctttgaccctgccctggccctaccttgaccttcaccctagccttacytgggcactgtgttggacctggccatagcacagacctgcttgtggccctggccctgccatgggccctgtcccagatgct

SEQ ID NO: 252998 - DNA, 614 bp, Homo sapiens
aatcatatacatctatataatagctatagatatagtttaagatttagatctagatatattcagcaactttgtaatttatcaaaaggttttggttaaaatgtaagacattcctcaatatagaattagttctaaaaatttgttgcaatgaagaatgttaacaacttaccttcctgttttctctgaatatgaaacaattcaagatagacatagaaataaagcataatgaactttgggaggccgaggcaggtggatcatgagctcaggagatcgagaccattctggctaacacggtgaaaccccgtctctaataaaaatatacaaaattagctgggcgtggtggtgggcgcctgtagtcccagctacttcggaggctgaggcaggagaatggcgtgaaccaggtaggcggagctcgcagtgagccgagattgcaccatggcactccagcctgggctacagagccagactccatctcaaaacaacaacaacaamaaaaaaaaaaaacagaagtaaagcataatgaaataaacatgtgagctctgtagctcatggtgttgttggcgtggtgcttagcaacagggattttcctacactacactccagtacagggcacagag

SEQ ID NO: 252999 - DNA, 562 bp, Homo sapiens
ccttttttaaaaaaattatttttttgagaccacgttatgagactmatttttttttgcatttttggtagaaacagagttttgccatgttgcccagactggtctcgaactcctgggctcaagaaattcgcccacccagcctcccaaagtgttgagattaaaagtgtgagtcactgcacctggcctcttctgattccttttcttgttctcagttaactaggaaataaggtcaccagctgagtgaggactgggcgaagtgctgcagaggttaaagagagaagtcataaaatagcaacttaaaagagtgggacaatgactggataggaaaacaaatgctggaggatagcatacaagaaaagtgggactaatcagctgggcgcactggctcacgcctgtaatcccagcactttgggaggccgacacaggcagatcatgaggtcaggagttcaagactagcctgaccaacatggtgaaaccccatctctactaaaaatacaaaaaatagctggcatggtggtacgtgcctgtagtcccagctactcaggaggctgaggcaggagaattg

SEQ ID NO: 253000 - DNA, 562 bp, Homo sapiens
ccttttttaaaaaaattatttttttgagaccacgttatgagactcatttttttttgcatttttggtagaaacagagttttgccatgttgcccagactggtctcgaactcctgggctcaagaaattcgcccacccagcctcccaaagtgttgagattaaaagtgtgagtcactgcacctggcctcttctgattccttttcttgttctcagttaactaggaaataaggtcaccagctgagtgaggactgggcgaagtgctgcagaggttaaagagagaagtcataaaatagcaacttaaaagagtgggacaatgactggataggaaaacaaatgctggaggatagcatacaagaaaagtgggactaatcagytgggcgcactggctcacgcctgtaatcccagcactttgggaggccgacacaggcagatcatgaggtcaggagttcaagactagcctgaccaacatggtgaaaccccatctctactaaaaatacaaaaaatagctggcatggtggtacgtgcctgtagtcccagctactcaggaggctgaggcaggagaattg

SEQ ID NO: 253001 - DNA, 562 bp, Homo sapiens
ccttttttaaaaaaattatttttttgagaccacgttatgagactcatttttttttgcatttttggtagaaacagagttttgccatgttgcccagactggtctcgaactcctgggctcaagaaattcgcccacccagcctcccaaagtgttgagattaaaagtgtgagtcactgcacctggcctcttctgattccttttcttgttctcagttaactaggaaataaggtcaccagctgagtgaggactgggcgaagtgctgcagaggttaaagagagaagtcataaaatagcaacttaaaagagtgggacaatgactggataggaaaacaaatgctggaggatagcatacaagaaaagtgggactaatcagctgggcgcactggctcacgcctgtaatcccagcactttgggaggccgacacaggcagatcatgaggtcaggagttcaagactagcctgaccaacrtggtgaaaccccatctctactaaaaatacaaaaaatagctggcatggtggtacgtgcctgtagtcccagctactcaggaggctgaggcaggagaattg

SEQ ID NO: 253002 - DNA, 366 bp, Homo sapiens
caaggtcataaagaacagagatgcaatctcatcttccctgtctccttccaaccccttctcccatcttctggaccagacggccttgtgcaggcaggctagagggagaataatgaaaccttgagtggggagttatactcccaataacagtggtcgaggtaattaggcctgaatttcccacagaaaataagctggcaaacatgttgaaaaaaaaaaaattattcccaaaagcaccaaagagctaaggagagtaaagaattggggatcaaactttaggagaagcaagaaacaattcctgatcctagcactcaaatctgcttttgyctggaggcattttgctgatgaaagacacgcgtggaccgggtgtgg

SEQ ID NO: 253003 - DNA, 391 bp, Homo sapiens
ttagggtttcatttctcaagggtctcctttaaacaaacaaacagttatgatttcaaagtagacatgtgccttyaacaccatttttaaaaattaccagccttagcaaaggtgtagaaaaaacttgttctcaagcactgtccgtggaagaattagtaaaacatttctagaaaacctgttaccgtcttaacaaacttttaaacacatgtagcaattctacttccaggaacttatctatttgccaagacatatatgcaaggatcttccctatagggttgtgtataaaggaaaaatcagacagactatgccaggagccctctgaaagagaagagtcaactgtggagggggcacctgtgaatgaatcctgcggagctgctaacagagcagacttaca

SEQ ID NO: 253004 - DNA, 391 bp, Homo sapiens
ttagggtttcatttctcaagggtctcctttaaacaaacaaacagttatgatttcaaagtagacatgtgccttcaacaccatttttaaaaattaccagccttagcaaaggtgtagaaaaaacttgttctcaagcactgtccgtggaagaattagtaaaacatttctagaaaacctgttaccgtcttaacaaacttttaaacacatgtagcaattctacttccaggaacttatctatttgccaagacatatatgcaaggatcttccctatagggttgtgtataaaggaaaaatcagacagactatgccaggarccctctgaaagagaagagtcaactgtggagggggcacctgtgaatgaatcctgcggagctgctaacagagcagacttaca

SEQ ID NO: 253005 - DNA, 557 bp, Homo sapiens
ctccaatttgctttctccataaagcagaataacttagtgaaagcttacaaaggagccagactacatwtaaatctgtgctgccagtctagctctatgactttaggcaagtgatttcacctctctgtacctccacctccctgttgataaacagggtttcatcctagagggttgtttgaggatcaaattagttctatgtaaagtgcttagaactgcctggcacagaggaaaggctatggattagccatagctaccagatctgagagaacagaactctctaaaccaatctcttacaggtcaacatttgcctcatgtccagtttatttctattactattacaggagtcactctaataagcatctatggctttgcccctctcagcttactggttgccatacttatttcaaagtgctgccctttggataagaagtagtagtaatttccaatgccatcaaagtataaaaacaatagctgtatcacagtatttcctgcaaggactgggttgtttttgtttgtttaagagacagggtctcattctggagcccagactggaaggcagt

SEQ ID NO: 253006 - DNA, 557 bp, Homo sapiens
ctccaatttgctttctccataaagcagaataacttagtgaaagcttacaaaggagccagactacatataaatctgtgctgccagtctagctctatgactttaggcaagtgatttcacctctctgtacctccacctccctgttgataaacagggtttcatcctagagggttgtttgaggatcaaatkagttctatgtaaagtgcttagaactgcctggcacagaggaaaggctatggattagccatagctaccagatctgagagaacagaactctctaaaccaatctcttacaggtcaacatttgcctcatgtccagtttatttctattactattacaggagtcactctaataagcatctatggctttgcccctctcagcttactggttgccatacttatttcaaagtgctgccctttggataagaagtagtagtaatttccaatgccatcaaagtataaaaacaatagctgtatcacagtatttcctgcaaggactgggttgtttttgtttgtttaagagacagggtctcattctggagcccagactggaaggcagt

SEQ ID NO: 253007 - DNA, 557 bp, Homo sapiens
ctccaatttgctttctccataaagcagaataacttagtgaaagcttacaaaggagccagactacatataaatctgtgctgccagtctagctctatgactttaggcaagtgatttcacctctctgtacctccacctccctgttgataaacagggtttcatcctagagggttgtttgaggatcaaattagttctatgtaaagtgcttagaactgcctggcacagaggaaaggctatggattagccatagctaccagayctgagagaacagaactctctaaaccaatctcttacaggtcaacatttgcctcatgtccagtttatttctattactattacaggagtcactctaataagcatctatggctttgcccctctcagcttactggttgccatacttatttcaaagtgctgccctttggataagaagtagtagtaatttccaatgccatcaaagtataaaaacaatagctgtatcacagtatttcctgcaaggactgggttgtttttgtttgtttaagagacagggtctcattctggagcccagactggaaggcagt

SEQ ID NO: 253008 - DNA, 557 bp, Homo sapiens
ctccaatttgctttctccataaagcagaataacttagtgaaagcttacaaaggagccagactacatataaatctgtgctgccagtctagctctatgactttaggcaagtgatttcacctctctgtacctccacctccctgttgataaacagggtttcatcctagagggttgtttgaggatcaaattagttctatgtaaagtgcttagaactgcctggcacagaggaaaggctatggattagccatagctaccagatctgagagaacagaactctctaaaccaatctcttacaggtcaacatttgcctcatgtccagtttatttctattactattacaggagtcactctaataagcatctatggctttgcccctctcagcttactggttgccatacttatttcaaagtgctgccctttggataagaagtagtagtaatttccaaygccatcaaagtataaaaacaatagctgtatcacagtatttcctgcaaggactgggttgtttttgtttgtttaagagacagggtctcattctggagcccagactggaaggcagt

SEQ ID NO: 253009 - DNA, 507 bp, Homo sapiens
ttcatgcacattgtagcatgtgtcaggatccgttccttttcatggctgagtaatattccatcacatggatagaccatgttttgtttaaccatttatcatttgatgggcatttgggttgcttccaacctttggctattgtgaacatggcttctgtgaacattcacgtgcaagcttttatatggacagatgttttccatttccttgggtagatatccagtgtggcggggagcacaaaatgtgataactctaggttaaactgtttgaggaactgccagactgctttccgtggcagttgcrctattttacatcctcaccagagctgtctctgtgcccacgaaaacatgccgctcctccacacagtgctgagcacaggcaaatctctcagggcttggcgtcttcttgctggggggcgggaggggacaaggtagtgtctgcttcgatggtggggtcggcacctgggcagtgtccagtgtctgctttgatgacggggtcagcatctgggcagtg

SEQ ID NO: 253010 - DNA, 601 bp, Homo sapiens
ttcctgttttgactttctgtctggaagatctgtctaatgcttaaagtggggtgttgaagtctctagttattattgtactggggtctgtattagtcagggttctcttagagggacagaactaataagacatatatatatatatatgtaaaggggagtttattaagtgttaacttacaccatcacaaagtcccatactagggtgtctgcaagctgaggagcaaggagagccagtccaagtcccaagactgaagcactcagagtctgaggttagagggcaggaagcatccagcatgggagaaagatgtaggatgagaggctaggtcagtctcatctcttcaagtttttccacctgctttatatttgctggaggctgattagatagtgtccacctgattaagtatgcgtcygccttccccagcccactgactcaaatgttaatttcttttggcaacaccctcatagacacacccaggatcaatattgcatccttcaatccaatcaagttggtattcagtattaaccatcatagtgtctgtctcgctccttagccctaataatatttgctttacatatcttggtgctccattgttgggtgcatata

SEQ ID NO: 253011 - DNA, 388 bp, Homo sapiens
gttttttgtaggcaacagatcctaggtcttgttttttggttttgtttggttgtttgtttaatccattcaatcactctgttttttgattggagastttagtccatttatattcaatattattattgataagtaaggtcttactcctgccattttattctttgttttctcactgctttgttgtcttctctcccttctttccttccttcctgtcttcctgttagtgaaggtgattttctctgatggtctgttttaatttcttgttgtatgttttttaatttgaggttacatgaggcttgcaaatgatgtcttataacccattttaaactgatcacaacttaacactgattgcataaacaaactaacaagtaaagagaaaactaataaaatt

SEQ ID NO: 253012 - DNA, 573 bp, Homo sapiens
atgtccattgcatttttctactccagaatttctttatttttttaaagtatttcaatctctttgttaaatttatatgataggattgtgaattccttctctgtgttatcttgaattttgttgagttttctcaaaactgctatttcaaattctttgtctgaaaggtcacatagctctgtctctccatgattcatcactggtgctccatttagttcagttggtgaggtcatgttttcctggatggtcttgatgtttgtggattttcatcagtgtttggacagtgaaaaggtaggtatttattatagtctttgcaagttggacttgtttgtacctatccgttttaagaagactttccaggtatttgaagggacttgagtattataaactaggtttttggtcactgctgctatatctmtctgaggggtaccccaagcccagtaaagatgtggctcctgcagacttgtagatatactgccttaatggtcatagataagatcttgaagaattctctggctgagtttgttcaaggttgtaggattttacaatcagcaggttgtgaagccagccttaccttca

SEQ ID NO: 253013 - DNA, 578 bp, Homo sapiens
ataaaggttatctgcatgtaatgtctctaaacaaagaggtagctaattggcagccccttaatccacactgataagtcatctgttctcttaccaatccctacctctccaattttcctatatgcttcttctcttcctgagataaaagtaattatctaaaagggactgacaaaagcagggtagtgtcagaagattcttttcataagaggaagggttgatattgttgaggcatttttccagtggagagaacaccatggttttgaaatctcagaactgagatggaagataatagatgaaatatactttctccaaacaaaagaaggggaattctgatacraagagtaagctcattaccatctagaggaaaggatcagagaaacaagcgaaaatatgaaagtgttttaggaagaagattcaaaacaatccatagtcatgacatgcattataaatgattatattcctttagcaatttggggatatataatacattattattatctatggtcagcatgcatgataagttagtgaggtgaagaatatgttaattagattaaaattttacacagtattttccaaatagg

SEQ ID NO: 253014 - DNA, 608 bp, Homo sapiens
attttcactgattatggtgttttatcctacaatctgtcactcataaactatctctttcatagttctggggttgttttttggagaaaatgcgttctttattttctgccaaaaatttattgttgtggaaacaaaattaatacaggaacactggacaccatcttatttttgatgagcaactgaataccagtcattaatgttaatatgatgataaacccaccaaatgctttagtgtctttaatcccagaagacaaaagtactttataaaccttaagtaaatattgcaaatgtcagtagtgcttcgtcagaagactttaatagctgcttcagaaaaacattttcatttcttgtctacaaattgcctaataaycacttgtaggaaaaaataaataaatcccttattcaaagtctcccatattacttcctctcaaaagggtagaatatcttttcatgttgaacttcttatttctccagttcattcattcagatggtaaaattcatgaattgaactatttttctcatcaggttttgttctggtcaaccttgaagggaagacttatcaacaaacaagctctggcagaaattattctaagagctagatttctccccta

SEQ ID NO: 253015 - DNA, 535 bp, Homo sapiens
tctccagttcattcattcagatggtaaaattcatgaattgaactatttttctcatcaggttttgttctggtcaaccttgaagggaagacttatcaacaaacaagctctggcagaaattattctaagagctagatttctcccctattaattatatgagtgtcaaaagcttactcgaggaaagaataatttccacagcaagaggtagagatattctataacagttgcttatagtaattgcctcaattcatttgcaacttagctcctgctcttttgtctagctgcatgtaaaaaggcacagcaaagagcgctgtgtctgagatgtgacataatatgtrtttgaatccttgctctttgtactagctctgttacctggatcttgcaaaaccgtagaagagttccattattatcaagcactggtcatctttcagtatccctcttcctaacatgcattagttctagtggctaattcatgtttgggaaagtcacctaagtatcctctttgtttttgcctcagtttgtttttggcaaaagttac

SEQ ID NO: 253016 - DNA, 590 bp, Homo sapiens
aactttcaatttttaaaaactttttgactctttkgcagtaactctcaacttacagtacagatatgttgtacagctgcacaaaaatattttattttttatgtctttattctataagccttttgttatgttgggtttttaaaaaatattgttttgttttactttctaaacttttttgttaaaagctaagacacaaacacacatattaggcctacaaagtgttgggatcatcaatatcatctccacatcttgtcccactggtaggtcttcagaggcaataacatgaatggtgctgtcatctcctatgagagcaatgccttcttctggagtacctcgtgaaggacctgcctaaggctgttttacagttaaccattttttcatatgcagagggaatatactctaaaagaataataaaaagtatagtatagtaaatacataaaccaataacatggtttttatagttactaccgggtattatgtactatatgtaatttcatgtgctatacttttatacaagtagcagcacagtaggttttttttacaccagcatccaacaaacacgtgagtaatgtgttgctatgatgttatgatgg

SEQ ID NO: 253017 - DNA, 462 bp, Homo sapiens
aacaacaggaaggaacctgctgctggcttccccaaatcaggttagtttgagcttttcttttcctttgagcctcctccaggtgacattattggggtggttcagcrgttgtgcctgcacagtctcacgtcatggctttacatacatggtatgtctcatttgcatcttaaatctccacccagaagtctcatttgcatcttaaatctccacccagtaaacttttactattaaaatgaagcaaagttcaagttaggacaaattaagatattactcagcattggggaagtttctcttggaaagtctctacagttggcaaccaggatgtttgcggttaaagtgctttgtttctttcaggcctaattggttgattttgtgagaggaagtgtctgtggtggtgcagcttccaggctgagtgtagctagtccattaggagcttgcaaggaaaaacctggagggatcgctgtt

SEQ ID NO: 253018 - DNA, 557 bp, Homo sapiens
ttaatcagctctagtgtgtggtttttgcaaaagtctgggatccttttttgttttttgggttttttaagagacaggatatttcactgtcgcccaggctggagtgcagtggtgctatcacagctcactgcagcctcaaactcctgggctcaagtgatcttcctgcctcagcctcctgagtagctgggactataggtgcatgacatcactctgagttaattttaaaaaattatttgtagtggtcttgctttgtttcccaggctagtctcgatctcctggcttcaagcaatcctccctgtttggcttcccaaagtgctaacaggtgtgaaacaccatacacgggcctagtccctgatttttatctccaacatatggagtatgaggctgagaycgtcttttttgttgttcacttaaactacagcacaatctacgtcccaccaagagggaagaataagcatccttgaagatgatgaacagatgagaagatccattctgtccaaatttgtattttctaattgttatgaatatttaaataagagaattttgtaaacagattagaa

SEQ ID NO: 253019 - DNA, 557 bp, Homo sapiens
ttaatcagctctagtgtgtggtttttgcaaaagtctgggatccttttttgttttttgggttttttaagagacaggatatttcactgtcgcccaggctggagtgcagtggtgctatcacagctcactgcagcctcaaactcctgggctcaagtgatcttcctgcctcagcctcctgagtagctgggactataggtgcatgacatcactctgagttaattttaaaaaattatttgtagtggtcttgctttgtttcccaggctagtctcgatctcctggcttcaagcaatcctccctgtttggcttcccaaagtgctaacaggtgtgaaacaccatacacgggcctagtccctgatttttatctccaacatatggagtatgaggctgagatcgtcttttttgttgttcacttaaactacagcacaatctacgtcccaccaagagggaagaataagcatcyttgaagatgatgaacagatgagaagatccattctgtccaaatttgtattttctaattgttatgaatatttaaataagagaattttgtaaacagattagaa

SEQ ID NO: 253020 - DNA, 590 bp, Homo sapiens
aactttcaatttttaaaaactttttgactctttggcagtaactctcaacttacagtacagatatgttgtacagctgcacaaaaatattttattttttatgtctttattctataagccttttgttatgttgggtttttaaaaaatattgttttgttttactttctaaacttttttgttaaaagctaagacacaaacacacatattaggcctacaaagtgttgggatcatcaatatcatctccacatcttgtcccactggtaggtcttcagaggcaataacatgaatggtgctgtcatctcctatgagagcaatgccttcttctggagtacctcgtgaaggacctgcctaaggctgttttacagttaaccattttttcatatgcagagggaatatactctaaaagaataataaraagtatagtatagtaaatacataaaccaataacatggtttttatagttactaccgggtattatgtactatatgtaatttcatgtgctatacttttatacaagtagcagcacagtaggttttttttacaccagcatccaacaaacacgtgagtaatgtgttgctatgatgttatgatgg

SEQ ID NO: 253021 - DNA, 584 bp, Homo sapiens
acatcctctgttctagatgttttgtgtatgtgtgttatttatctttccttggcctcccttgactatttgtctcaacattacatgccagcggctttttctcttgcttgagggcaaacagcatattgttcatgttgatcatggtgaatgcttgttttctcattgtaaaataatttactagtcatcagcatccccacagacgctgtagaactgtccttcttttacacagcaatggcaaaggactgcacttccttgaaaacttgggtaaggctaactagaacaaaatcacttgcaaagaaattaaatggtagaaatttaaaccaaatatcagtcactttcctaactcatatgaatgggtaagaagggtgcagataaaataaacgtgacaaggtcaagcttrtttctaaatccaaagagttctcccaatcaaatttggggttacagagcaagaattgaaatgaaacagcagaggagcagaataccaacaaattacaaatcctatgttgaagccaactggtaggagaaggcctgatatcagagaagaagcttgagctttgaagtcagatataccgcacttacgtttgaat

SEQ ID NO: 253022 - DNA, 628 bp, Homo sapiens
gttccttctagctcatggaagatgcccaataaatggtaatacgtatacatgtataccaatagaactaaggtcattatcttcttcaattctgacaraaggctacagattattctcttgtgtgcaaaagataaataacacacatacatacatgagaaaattggttatatgtatataatatgttgtgatcaagtcagggtctttagggtgtccatcacctgagtacagtacatttttgttacgtatcgtcatcctactctgcaacaatcattgaatttatttgtcttactgtatgtttgtacccttttacccacttctcttcattcccatcccccctactcacccctcccagtcatgttgtctatttttccactctatacctctctgttccatgtttttagctcccacatcatgagtgagagcatgcaatatttgtctttctgttcctggcgtatttcattgagacattaacctccagatccacccatggtgctgtgaatgaaatgattttttgtttttttaactgctgaatagttagattaaatagtaatagtggatccaggatttgaaatcaggacagctaccttcttttataccatgaaactgtgagtaaattgcagatcaagcaaga

SEQ ID NO: 253023 - DNA, 602 bp, Homo sapiens
ataagatctcaaaactataagtaatttatattcataatataaattatgaatttatattttgtgagaattagaaattctcacaaataactatctcatgaagttatatctccactttttatataaaaatgatcaatttctgagacattaaaaaatgtatctaactrcatgtagctaatggtaggagagaacctagattaaaaaaatttggtctatgtgattttgacctgacacacttcatattacacatttttaattagatatctaagaagacaagaaagataacggcatcctaaaactagctctttttcattctgcattgttttccaatgttatattcaccttcacaatcaggctcaaaatttttaaatgatcattgtcttttctccctaacttattttcttaatcacttctgtattcaatttctctattttttgtctctcacaaaataatcaatgaaatcatctaattgtgataccgttttccttgaactcaatattttgagaactcaacattttatccttgattttctctgtattccctctccttaaaatatagtatagtcctccttactctttgttagtaatacttaataatttaattct

SEQ ID NO: 253024 - DNA, 602 bp, Homo sapiens
ataagatctcaaaactataagtaatttatattcataatataaattatgaatttatattttgtgagaattagaaattctcacaaataactatctcatgaagttatatctccactttttatataaaaatgatcaatttctgagacattaaaaaatgtatctaactacatgtagctaatggtaggagagaacctagattaaaaaaatttggtctatgtgattttgacctgacacacttcatattacacatttttaattagatatctaagaagacaagaaagataacggcatcctaaaactagctctttttcattctgcattgttttccaatgttatattcaccttcacaatcaggctcaaaatttttaaatgatcattgtcttttctccctaacttattttcttaatcacttctgtattcaattyctctattttttgtctctcacaaaataatcaatgaaatcatctaattgtgataccgttttccttgaactcaatattttgagaactcaacattttatccttgattttctctgtattccctctccttaaaatatagtatagtcctccttactctttgttagtaatacttaataatttaattct

SEQ ID NO: 253025 - DNA, 589 bp, Homo sapiens
ttgttcttttggcttagtattgccttggctatttaggctcttttttggttttatatgaattttagaatagtttttttttctaattctgtgaaaaatgacattggtagtttgacaggaatagcattgaatctgtagattgctttgggcagttagaaattttaacgatattgattcttccaacccttgagcatagaatgccattccatttgtttgtgtaatgtctgatttstttcagcagtgtttcttaattctcaaagagatctttcgcctctttggttaggtgtatgtggctattataaacgggattgcattcttgatttggttctcaacttgaacttaattggtgcataaaaatgtcactaattttatatgttgattttgtatccttgagaccttactgaagtggtttagtaggtataggagccttttggcaaaatctttaagattttctaggtgtacaattatatcatcaacaaagacagataatttgacttttttttcctatttttatttctttcatttctttctcttgcctgatttctctggctaggatttctagtactatgctgaataagagtggtgagataag

SEQ ID NO: 253026 - DNA, 608 bp, Homo sapiens
tctaactgtattttgaaatacctgtagtaagttttttaactccttatgttctgattggctcttttaaaatatagatacgtcatcttttaaaatgtggatcgttttgctgtttacttygtgctgatttcaactttctcttggatctcattgagtttctttgcatccatattctgaattctatgtctgtcatatcagatatttcattctggttaggattcattgcttggaagctgacaggatcctttggaggtgacaaaacaccctgggtgtttgtagtttcagagttcttctcatctgagagagctggtgtttttgttgttgttgttgtttgtttttttttctattggttggatggggctccttgattttttaattttttttccaaggtggaaatgactgtgatttatattgtctatgattgactaactttgcttctgagtgcttttagggtggcaaggctctgtatgggtttccttggtgtggctttctcaaacactgttgttgtagtgatgcaatttcgtttggtggtatagttcaagctgcagtccaataattggcacaaaagagtaaaagttagcaggtggggcaggagtggaggtaacagaaaa

SEQ ID NO: 253027 - DNA, 454 bp, Homo sapiens
taatgaaaactgaaggacatctatgtgactgaattggaatcaaatctaataaagaatgcttgaaagtatggctatttgggattttaytatcacaagatatttactctgcctacttcaaaaaagctttggcacatttgttttcttcatttgcctacaatttggaaataaagggacatgaaataattaaaattttttggagagggttcttctatccaatgtggagcaacatagttattgaaataagtattgaaagtagtaaataaacattgaaaaacaataatagtaaatattgaaaaatatctctatgatatttttcatttactatgtatttgaagacctttttactcagtttatatataggtagtacattatgtgtaaaattgcatactctggatatagactagaatttatttaatcatgaccctactaacaggcatttgtggactgtttttcc

SEQ ID NO: 253028 - DNA, 594 bp, Homo sapiens
attgaaaaacaataatagtaaatattgaaaaatatctctatgatatttttcatttactatgtatttgaagacctttttactcagtttatatataggtagtacattatgtgtaaaattgcatactctggatatagactagaatttatttaatcatgaccctactaacaggcatttgtggactgtttttcctatttcataataggaaaatgttagaaaaattttgcagtgcccattcatatacataagtctgagcacacacagaactattcttctttagatttcagaaataaatttttagattcaaacatgcactttttaaaaacattattattgccaagcagctctccacaaaggttccttatctgtgccagatggggacacttttctctcaggttcacatttactcttttgtagactccyttctgtatcgatgggactagaagtctgcaaagtatgttagatgactagaaaacagaacgcagtgggtagaacagaaggaagaaaggctagaacttgtagactgctgtctgggggcagtagcaaatctgtgatatttgaattaacagtgtctgtcttcttttttttctttttttt

SEQ ID NO: 253029 - DNA, 594 bp, Homo sapiens
tacattttgaaaaactgacattgtaaaattacatttaaaacatttataattcaaaagcaagagtgtagctatcaaatattagccactcagtgattattggctatcagtaagctttttacacatgatcttttaacaaatagctagtgagcatctactatgattgttggtaactcattaatattaccaaaaaccaaaactgcatgagttaggcactattactataattaatgcctaacctgtgaagaaacccaaagtttagaaaatttctacctatgtgacattgggccagaagtggtgaagctaagatttagcaccaagttttctgatgctgaagactaacttcttgttactatgttatttcactatgattcaataatatttcaaatgtgaacttgacttgaaaataaatcacaggtctgttgactgaataaagactaccactctcaggtaaacaaactccaagcaaacttttatacatgtgatgcacaatattgcttgtgcattgtggtagatayagcataggatgaagagacagattaagtgattgatgaactttgattttgccacaaagtatctgggcacaatttcatggag

SEQ ID NO: 253030 - DNA, 594 bp, Homo sapiens
tacattttgaaaaactgacattgtaaaattacatttaaaacatttataattcaaaagcaagagtgtagctatcaaatattagccactcagtgattattggctatcagtaagctttttacacatgatcttttaacaaatagctagtgagcatctactatgattgttggtaactcattaatattaccaaaaaccaaaactgcatgagttaggcactattactataattaatgcctaacctgtgaagaaacccaaagtttagaaaatttctacctatgtgacattgggccagaagtggtgaagctaagatttagcaccaagttttctgatgctgaagactaacttcttgttactatgttatttcactatgattcaataatatttcaaatgtgaacttgacttgaaaataaatcacaggtctgttgactgaataaagactaccactctcaggtaaacaaactccaagcaaacttttatacatgtgatgcacaatattgcttgtgcattgtggtagatatagyataggatgaagagacagattaagtgattgatgaactttgattttgccacaaagtatctgggcacaatttcatggag

SEQ ID NO: 253031 - DNA, 550 bp, Homo sapiens
aaaacttgaaggtaaataaatatgtattggagctaaagaacagaattttaaaattaagtatgcattttcaagcagagaaacaataaatttcaaaatgcccattttaatcctcattaataggctcataatagacgttttaggaggaggtaatgtggaagaaaatctcaccataggtatattcatcataacaattagatctgaagattcagttcacgtctctaattataaatgaatgccacacattaaacaaagacactgtggagttcacacttccttaattataggttcatggggatgctaggtttgaccacgygaatttcattttcatcgctatgtgctgacattctcctgtaacctcacggtaggtaagttttcttcctagtcatgtactttgtgacaggttagcaacaattccaacttcatgctccattttctctgcctactgaggcaatttgctatccatgcactttgttatttcctccactttgtgactccgacctgtaaggtgtttcatgatgggaactgcactttgaataccaacacttcaatt

SEQ ID NO: 253032 - DNA, 550 bp, Homo sapiens
aaaacttgaaggtaaataaatatgtattggagctaaagaacagaattttaaaattaagtatgcattttcaagcagagaaacaataaatttcaaaatgcccattttaatcctcattaataggctcataatagacgttttaggaggaggtaatgtggaagaaaatctcaccataggtatattcatcataacaattagatctgaagattcagttcacgtctctaattataaatgaatgccacacattaaacaaagacactgtggagttcacacttccttaattataggttcatggggatgctaggtttgaccacgcgaatttcattttcatygctatgtgctgacattctcctgtaacctcacggtaggtaagttttcttcctagtcatgtactttgtgacaggttagcaacaattccaacttcatgctccattttctctgcctactgaggcaatttgctatccatgcactttgttatttcctccactttgtgactccgacctgtaaggtgtttcatgatgggaactgcactttgaataccaacacttcaatt

SEQ ID NO: 253033 - DNA, 393 bp, Homo sapiens
ccaacttctgcctgttaccgagttccaaagttgcttccatatttttaggtatctttatagaagtgccccactttgctggtaccaatttactgtgttagtccattttcacactactgtgaagaactgcctgacactgggtaatttataaaggagagtttaattgactcacagttcagcatggctgaggaggcctcrggaaacttacaatcatggggaaaggcaaaggaaccttcttcacaaggcagcagaagagaaagaacacacaggggaaactgccacttgcaaaccatcagatctcatgagaactccctcactatcacaacaacagcataaaggaactgcccccatgatccagtcacctcccaccagatccctccttcaacacatggggat

SEQ ID NO: 253034 - DNA, 552 bp, Homo sapiens
gctattaaatggcttcagagatcaagaaaagaagttggtgtggagataaagaaaacgagcatttgaggccgggcccagtggctctcacctgtaatcccagcactttgggaggctgaggcgggtagatcactaaatcaggagttcgagagcagcctggaygacctggtgaaaccccgtctctactaaaagtacaaaaattaggcgggcatggtggcgcatgcctgtaatcccagctactagggaggctgaggcaggggaatcgcttgcacctaggaggcggaggttgcagtgagctgagatcacttcactgcacaccagcctgggtgacagagcaagactccatcttgcaaaacaaacaaacaaacaacaacaacaacaaaaaaacaagcaattggtatgttgattctgagatgccacaagtgcacctagaaggcaatatgacagctggttatactcttcttgagatcctcaatatgggtggtctgagaagattagccagtagaagagaggagacaagaatcaaggctaatgcactctttcagaggccgagga

SEQ ID NO: 253035 - DNA, 552 bp, Homo sapiens
gctattaaatggcttcagagatcaagaaaagaagttggtgtggagataaagaaaacgagcatttgaggccgggcccagtggctctcacctgtaatcccagcactttgggaggctgaggcgggtagatcactaaatcaggagttcgagagcagcctggatgacctggtgaaaccccgtctctactaaaagtacaaaaattaggcgggcatggtggcgcatgcctgtaatcccagctactagggaggctgaggcaggggaatcgcttgcacctaggaggcggaggttgcagtgagctgagatcacttcactgcacaccagcctgggtgacagagcaagactccatcttgcaaaacaaacaaacaaacaacaacaacaamaaaaaaacaagcaattggtatgttgattctgagatgccacaagtgcacctagaaggcaatatgacagctggttatactcttcttgagatcctcaatatgggtggtctgagaagattagccagtagaagagaggagacaagaatcaaggctaatgcactctttcagaggccgagga

SEQ ID NO: 253036 - DNA, 552 bp, Homo sapiens
gctattaaatggcttcagagatcaagaaaagaagttggtgtggagataaagaaaacgagcatttgaggccgggcccagtggctctcacctgtaatcccagcactttgggaggctgaggcgggtagatcactaaatcaggagttcgagagcagcctggatgacctggtgaaaccccgtctctactaaaagtacaaaaattaggcgggcatggtggcgcatgcctgtaatcccagctactagggaggctgaggcaggggaatcgcttgcacctaggaggcggaggttgcagtgagctgagatcacttcactgcacaccagcctgggtgacagagcaagactccatcttgcaaaacaaacaaacaaacaacaacaacaacaaaaaaacaagcarttggtatgttgattctgagatgccacaagtgcacctagaaggcaatatgacagctggttatactcttcttgagatcctcaatatgggtggtctgagaagattagccagtagaagagaggagacaagaatcaaggctaatgcactctttcagaggccgagga

SEQ ID NO: 253037 - DNA, 557 bp, Homo sapiens
ggaatacagtagtgtagaggaatggtttatttctattttccaataatgtatacccttgaaacagaacacttaacattcccgttcttatactgccttttactgtcttatactctctttttcactgattaactttattctatgccattcccagtctctttgtcttctcattggcttaccttctcactacactaccttctctgtcttttcccttctcattgaaattgtggatagattctctctccccgctctctctgtaactctctccctctgctttaccctttcctttcttcctctctttcttctcctatctcttcaacctcttcaccatctctctcttacctcactgttagttctagtttataaattcagaaaatgagtctcagagaagttaagtgactygtgcaagttcacctggttagcaagattaagattcatactctgctctgtcagccatctatttttgtttagtttgaccttcttaaaattaatgttgttaaatctgacctatgatgacgccttgttagacagtaaaagcttattgaattacatattttatg

SEQ ID NO: 253038 - DNA, 633 bp, Homo sapiens
ataatgatgttaaaattgaaatggaatcatgcacatgaagcacttcatacactgagggttagagaaagtaagtgattacatcatacatatatatgattgttacattctggtaattagtctttgacaagaaagtgaaaggtaatttgaattgtaatagcaagtgtcaagggaggtgcctatcatggtagcagtacaactgacttgtagttttgactaaagtacacataaatgcagaaaggtaagtttcacccatatgttatatgaagttttatagamgacctcagtaatgacatcagataaatatttctccctattaaaaatgaatataataaataaaatgtcagaaaaaaatttacagaatctcttttatgtgtcttatcttgtgtaggtggtggaaatactggggcaaagagtacagtcatagtcactgccttcatagacagactcatgccacagtgctcctaccttctaaatgtaatgattaaatacatggataattacattaaggagccaactctggtgcctcacactcctcctcctgcctggatcacagctggagaatataagtataaattaatacatttatcgccaaatacttaacgagcatcttttgtattcagggcacagtacaag

SEQ ID NO: 253039 - DNA, 630 bp, Homo sapiens
cttattattttaattaatgacaggaagaagtttgcttgaagacaattcttagccacgcaaaaaagaatgttaatattttatgaggtgaggaaattatctttaacactgaaatgttcagaaattataacagaaggaatattactggaaaaaatgagctggttgtagttacatttactgttagcaattctgacaaaaagagatcataaggaatattgatattcaggcagcatgctgtaagattagcaagaacatatgtgaaattaatatgttccacgcataaaaggtcaataaataatagttcaattagaatttgagaatagatgtaaaaatagtgttggatgcaagtgacatcaatcctcatctcyggtctgttagcaactttgtgtactaatgttcctgctatcatttattgaatgctctctatgtgtcaggcattctgttaagcactttacacaaatgttagaacttggaacaactacttgttatgctcaggagagtgagtttcctggaatttaaatcatttgctcaaatgcactgagcaaataagtggttgagccattccacagtctaagttttaaactgtgttatcattacctttctaaatcattcaggaaaaaaagaagctgagtt

SEQ ID NO: 253040 - DNA, 553 bp, Homo sapiens
agtgaaataataccatatgctttggatcacacagaaccaaactctaacatcatggatggactatacgagattgtgagtaccaaaaagcaaggataattgtgggtctttgcagtggtcaccttgcagacaggtgaccacaatctcccctttkacccccaatgattcctttccctcaaacatgcaatatatatgcatcctttctccaggcacctcaagttatcattctatcaagcatcagctcaaattctagaatctcatcttctatgtcagacccgtatgttggagaaggttgctaaggctcagaactctcagtaatccttcctgtatcatgaaaggcaccacatgtttgcagccgagtcattttcttattctgcttcttgtcagtagaaattggagtgtctaaaagtttttcattttgcactctatcaactcagttcaaactgactgtttctgcatttatagtgattgtaaaagttttatggatcttctgtgaatctttttggcatctatttcatcagcaaaaacaaaaacagaaacaaaaaacccacactca

SEQ ID NO: 253041 - DNA, 553 bp, Homo sapiens
agtgaaataataccatatgctttggatcacacagaaccaaactctaacatcatggatggactatacgagattgtgagtaccaaaaagcaaggataattgtgggtctttgcagtggtcaccttgcagacaggtgaccacaatctcccctttgacccccaatgattcctttccctcaaacatgcaatatatatgcatcctttctccaggcacctcaagttatcattctatcaagcatcagctcaaattctagaatctcatcttctatgtcagacccgtatgttggagaaggttgctaaggctcagaactctcagtaatccttcctgtatcatgaaaggcaccayatgtttgcagccgagtcattttcttattctgcttcttgtcagtagaaattggagtgtctaaaagtttttcattttgcactctatcaactcagttcaaactgactgtttctgcatttatagtgattgtaaaagttttatggatcttctgtgaatctttttggcatctatttcatcagcaaaaacaaaaacagaaacaaaaaacccacactca

SEQ ID NO: 253042 - DNA, 462 bp, Homo sapiens
gttgcttattctaaacttaccaagatgttaagagaagctaaacaagttttcttctgcctaaaaagataacagagtagtgtgatctttgtagagttatagcctacaagtaacttagcatcatgatatgtagaccaggcttctttgagkgcagtcatcataagcccagtggatgaagatggataaaatctgaaggactgatgcataaactatctaagtttcctgcacctagatgtttaaggaagttttcaaacaaagtcttctctgtctctgtatattaaacagttaatcaatgaatgctaagagatagcccaaagtttagaagggcagctgttttccctcatccaatggaactaggtagcaagacacctgctttttactttctgtcatctttatactcaccagaaaaatcatgggctaatatcagaatccctgccagttttgcaagttttagaggtcccaggt

SEQ ID NO: 253043 - DNA, 582 bp, Homo sapiens
gctgggattagagcgtgagccactgcacccggcctatgatattatttttaaaagaaaaaataagtatccatgagagcacatagaargaatctaacctggtctgagagaaggaatgatttttgtggtgatgggatatttaagatgagcctcatagcactctctagagagggagcttggagaaacttttctctcccttttccctttttcataaattacagagatctagggtgggaaggagtttggcctatatgaaatgatcagacagtcgatgccaacaggacgaataaaaagagtatcacaggagaaatagtcatgggctaaaccaaacagtgcacctaagccttaattttctcatctgttatatgagaataattttctcatctggagctaatgatgattctgtacatatgtgacaaaattgccagaaaccagggacactctccattaaaaggtatgcataaaattaaatttcatatataaaatgctaaacagctacattatgtaatatcatatacatatacatgagttatataatgtgagaacaatgcataatacaactatgcaaatagaaaatgcctctct

SEQ ID NO: 253044 - DNA, 582 bp, Homo sapiens
gctgggattagagcgtgagccactgcacccggcctatgatattatttttaaaagaaaaaataagtatccatgagagcacatagaaagwatctaacctggtctgagagaaggaatgatttttgtggtgatgggatatttaagatgagcctcatagcactctctagagagggagcttggagaaacttttctctcccttttccctttttcataaattacagagatctagggtgggaaggagtttggcctatatgaaatgatcagacagtcgatgccaacaggacgaataaaaagagtatcacaggagaaatagtcatgggctaaaccaaacagtgcacctaagccttaattttctcatctgttatatgagaataattttctcatctggagctaatgatgattctgtacatatgtgacaaaattgccagaaaccagggacactctccattaaaaggtatgcataaaattaaatttcatatataaaatgctaaacagctacattatgtaatatcatatacatatacatgagttatataatgtgagaacaatgcataatacaactatgcaaatagaaaatgcctctct

SEQ ID NO: 253045 - DNA, 561 bp, Homo sapiens
  misc_feature (1)...(561): n = A,T,C or G
aaacacattcattgaatagtatctcgaaacatactggatagaattacaagtttaaaagctatttacacccttgtacatcaacagagcaattcttttatagcaagaatcacaaattcttagtaagtttgaatttgaggatgagaaagcaagcagagagtaaaaactaacatctctataggcataaccacagtatagactctgccaatgycagcagttcagagatatatctaagtagtgatttcacttgccaagggctggtttgaattagatgtgtgaggtttgcctcgagcaacaatcagataggctatggacagtcaggagaggagaacgaaacagagagaaaatcataaaagaagggtgaaaatgagtactttatcctgngtagttctctctgtcaatgttttgtgttcacttacttggaatcccatagatggaaagagaaataagaaataagtcaatgttaattagcttgacttagctagtccatgatgtatatgttttataanncatcaggtctgggacaatataacgtatatataaattttgtcatttaaatattta

SEQ ID NO: 253046 - DNA, 561 bp, Homo sapiens
  misc_feature (1)...(561): n = A,T,C or G
aaacacattcattgaatagtatctcgaaacatactggatagaattacaagtttaaaagctatttacacccttgtacatcaacagagcaattcttttatagcaagaatcacaaattcttagtaagtttgaatttgaggatgagaaagcaagcagagagtaaaaactaacatctctataggcataaccacagtatagactctgccaatgccagcagttcagagatatatctaagtagtgatttcacttgccaagggctggtttgaattagatgtgtgaggtttgcctcgagcaacaatcagataggctatggacagtcaggagaggagaacgaaacagagagaaaatcataaaagaagggtgaaaatgagtactttatcctgngtagttctctctgtcaatgttttgtgttcacttacttggaatcccatagatggaaagagaaataagaaataagtcaatgttaattagcttgacttagctagtccatgatgtatatrttttataanncatcaggtctgggacaatataacgtatatataaattttgtcatttaaatattta

SEQ ID NO: 253047 - DNA, 570 bp, Homo sapiens
tcattggtagcttgacggggatggcatgaaatctayaaattaccttggctttcaacagtgtcttgagattttgttttctttcaaagctaaccttgaaaatatttttctacaataacaacctctaatgtctcattttaaaaatttatcctgaacctactccatctgtacgatgctctgaaactgctcttgtaatgtcttctgttaactcaaatccagaagtcacttttctgtcctcatttaaaaaaaaatggttcaactgcctttgcatacactgatcatttcctattctgcccatactatttaaattgcaaaccattccccccgattcccagcactctagatccatgctaacttgtttcatctttaaaaatattttccataaataaatcactctctattatatgcttttcttttttattatgtttattgttttattgtctgtgttcctcagttaaacatgacttctaaaagaatagattttatcagaagctaaagaactccattttgaacacttgttattttgttattttggttttcattatattctattggttttgcttctgccttact

SEQ ID NO: 253048 - DNA, 400 bp, Homo sapiens
acaaatggatgttcaacaaataataataatatttgccggtggctgtaatgaaaccagtctctttcatgctgcagaagcggcaataaaatwtaaaaaaaattaacaggtgtttgatacagacgactcccctaaatgttcatggtttcctttcttctgcctggaggataaaagaacccagtaaaagcactcacttaagattcttagaacatttctgcaaggtagaatgtaaaaaacaatagatatctatcttggtaaaatgagcattgtagagggtgtgtgaactgtttggatgtggatgaacaaaaaaaaagactttatcacaagtctatttcagaaatgaattagaaatgttcctttaccctttaaaattaaacagatctctagctcaccctgtagcaca

SEQ ID NO: 253049 - DNA, 598 bp, Homo sapiens
tgttctaaacaacatgaggctggagcctgtgtccactggcttccaaacttcaatgcttaaaggttatttcctctgcacttcacagttgcacttgcacaggagctgagtagactcccaaagtttgaagaaagccctgggggcaaaaaaacaggaaggtacgcagtacttgaaatggaatgtgatctatgagagtctaagttgcccacccgaggtgtgattggaattaaagattgccaaggagatgttgcaaaggcaactagaaaatcagtgatatggcttattttatttaattttcacaacatgctattataccagtctcatccccatttactgaagagaatattaaggcttagagaacaaatatcctacgttatatttcatccagttagtaaatggtgaagcaggacttcaaatccaagcagtatggaacctgaaatcttaaccactgcattatctgccaccaggaacataatctccacaacctcttgtctaatrtactcatttctactttgctaagaaatgcaaagaaacctttttcaagtataaaacccatggctaactagacttccctaacttatctttaagaatcaggtatttt

SEQ ID NO: 253050 - DNA, 500 bp, Homo sapiens
tgatttttaaagtgggaaagcatacttcactagatggatgagtgagggaggctgtgagattttaaaaaaataaataaaatccccagagacgtagctaacagaagagctctatctgtagggtgcattaagcatccccacataggctcgtaagtgagatggctgtttaggtatccatcagggacactcaagggtgaaagagggcactactgataatttcggtggaccaacaggtataaatcaggactgcaccaagcaaactaaaatgttgcctattaatgaggcaaaagtctttgyttgtctgactgtcttagcctgtttgtgttgttataaaggaatacctgaggctggacaatttataaagaaaagaggtttatttggcttgcagttctgcagactgtacaagaagcatggcaccaacatctatttctgatgagggcctcaggaagcttccattcacagtggaaggcaaagggaagctgacatgtgcagatcatatggtg

SEQ ID NO: 253051 - DNA, 585 bp, Homo sapiens
agatccctaaacttatattttaacaataccaccaagtaattcttaaacacactaaagtttaagcaccagtgattgacacagtcaagctcaatgtttgtgtgtgtgtgtgtgtgtgtgtgtgtgtgtgtgtgtgtgtaaaattcacatagaaattttaaaaccaaaatatctcagcgataygactaaaaacatcaaaactgggaataaaaggactccactgatctcatgtattaatgtatatggtatatgtttgttgaatccctagcaaatataaataacttgatgataaatatttttaaaagaaaattgatgcattctcttctgtctatgaatttgtagtctagtgtgggaggctatagagaaataaccatactaaaataaacagtaataacaatttatacaccaaaaatgatgagggaattaagcattaaaggtagattattaacttcctgagggcaaggtctctgtcctgtgcagaatacaatgtgggatgatgaaccatcctggtttgctgaggactgagaagtttcccaaaaaggacacaggactttctgagttaaaactggaaaagtctcaggcaaacca

SEQ ID NO: 253052 - DNA, 456 bp, Homo sapiens
cgtggcaaggaatgatgaggctctaggtacacactggagagtaagaaaatccaaagacgaattgtgcttgaacctctttctaaatgctacctccaccaattctcaccatcacagctgtaaatcagagaaaactactgaggtgactgccaatcattctagaggtttattttgccaagattgaggatgcaccygggggggaaacaaaaacaaaaacaaaaaatcacaggaacacctgtgatctatactttttccaaagagggtttggggacttcaatatttaaaggggaaagagtgagcaatagggaaaagaggaaagaaaaaaaaaaaggagggtagatagaaggggcaaacagttgcattcttttgaggctttgatcagtgttcactgaatccatattttacatgtgataggaggtggtggataaagaatcagttatgcatgcatctcagtcctgg

SEQ ID NO: 253053 - DNA, 610 bp, Homo sapiens
atcctataaataaggggggactatgcttttatatttggagactagaaaacaatttcttaataaatattaccaacaagtggcaggaatgtttattcagatggggcaacaacattaaaacgcaatttttattgttgttgctgattatttttctgaatatcacatgcatttataatggaataaattcaggaaaattcctgtagccagaacctttctgtaagcttcttgagaggcttaatagacagtaacaagaaaattcctatttttcccaaacactgctcaagacaagcacattttactatttttcaaagcctaacatctccatccagggaaaacaagttcaattattctgtagcacatgtggaatattaggttcatccacacaccagggattctgagtacactgcaggaaatggcatggataggatcctgctggctggccgtagaacactacaggaaggtttgcacggctcattgttattgagattcatagaaatcctcttttccatccaagcaatttgctcttctagaatgcattttttttttttgtcttgcaygtccttccaatgaatggaatgtattttggaagtatattttgatttgcataaagcaa

SEQ ID NO: 253054 - DNA, 561 bp, Homo sapiens
agcacaagaagaataaaaaatgaaaggaccacatgcccatgtccctaccactatcattttaatgagacgtttcctgcaaaatatcctgttcctcctcttgagtgacttagaaggaaagctctaaacaatcttagccagtcaagttttcctgactccacagaagacaggaagtaaaacaagctgtgactggccaggctcggtggctaatgcctgtaatcccagcactttgggaggctgaggcgagcggaccacaaggtcaggagattgagaccatcctgactaacagagtgaaaccccgtctytactaaaaatacaaaaaatgagctgggcgtggtggtgggcgcctgtagtcccagctactctggaggctaaggcaggagaatggcatgaacccgggaggcggagcttgtagtgagccgagaccgtgccactgcactccagcctgggtgacagagcaagactccatcaaaaaaaaaagaaagaaggaaaaaaaaacccatgagaccaactaaactggactgaagcaattttaggaagatgtgttttacagagatgtttcag

SEQ ID NO: 253055 - DNA, 600 bp, Homo sapiens
tcagctacattctttactagtgctttggctggttatattttcatacaaattaatactgtgagtctcaattttttttttttttgagacagagtctctctctgtcgcccaggctggagtgcagtggcatgatctcagctcactacaagctccacctcccgggttcacaccattctcctgcctcagcctcccgagtagctaggactacaggggcccaccaccacgctcggctaatttttttttttatttttaggagagatgcggtttcaccgtgttagcyaggatggtctcaatctcctgacttcgtgatccgcccgccttggcgagtctctattttttaaaacaacactcaaatgactcattatcaggtcatttgtatatacttcacagattatctatttgggggtattttaagtgtgtgtttgcctaactggcccccgtgcagtctccccataagtctttggattaaatgaaaaatcattcatttctgtatctccagtgccctatacaatgtctgacaggtagtaaaggttcaatcacgattttgttttgttttaagcaaatatttgttgagtaaatagacgatggatgggcagaggaaag

SEQ ID NO: 253056 - DNA, 535 bp, Homo sapiens
catgtaggttctttttgaagattaattgagaaaagcacactgaaattttagtggagtctaattattcaacaatggttactgttgtttcattattgttgtttaagtgaagtctttagtcagtttcccatcttgttttatgtcacagactttacgtaagttataatttttgtatgactcttggcttaaactgtagatgtgttggagcatgtgagaaaaatgcrttttcttaaaatgaggtaattatgatgatgaaataaaacaaaaattagtaaagttttaaaatactgaacataaagattaaatgagaagttggacttgcttttgtgaatgtaactatttatttatttgtaatactttttgtttggagacaactgtagattcacatgcaatgtaagaaataatacagagagatcgtgagtacccttttacccagtttcctccaatagtcacttcttgcaaaactataggactgtatctcaacctggatactgatttgatgcagtctggatgcagaacaatttatcattttgagctt

SEQ ID NO: 253057 - DNA, 545 bp, Homo sapiens
gacaaaatactggcgaatctacttgataatatcttaatgatgtcaattcactatttctccattcacaaagatgtgtttatatattacaagagtcagaaaatgttggtgagtctcactgaattctttttttcttccatgtgtatgctgttctttgtgaaaaagccactgcattgtttcaaatatctctgagaagttttcatggagctgctccaaacagcttaagacttgttcagartcagtcactctccaaaatttcctaaccagggccactgatgttgctctttatgctgaaagataactatcatcaaggacaggaaacccatcagcctgctataaactttgttacagagttctctgagaccaaaccaaaattactacctaggaccttgaacctgagcctaagtcagtttgacagcaaaatactttaagaggttgaaagttaatcattttctgtgatccctttcatcacagtaattcttagtcatcaaacagggtaaccttcccagtaaattattttcttctataactctgcttttcttccctaa

SEQ ID NO: 253058 - DNA, 530 bp, Homo sapiens
cttagagttatgagggctgatgagtccaaggataaggggctacatctgctgagggccttcttgctggtggggactctctgcagagtcccaagactatacaagatgaggaggtgagcatgttagctcaggtcttttttcctcttctttacagtcagcagtcccatgctcatcataatctattaatttattaatcaattaatctaygaatatatgaatatattctattcttttttttttttttttttgagacagggtcttgctctgctatccagactggaatgaagtggcacaattctaggtcactgcagccttggaagactgggcacaagcaatcctcccacctcagcctcctgagtagctgggactacaggcattagccactgcaccctgctaattttttaaaaaaaaattatttgtagagatggggtcttgtcatgttttccagggtggtctcaaactcctggctccaagtgatattcctgcctcagcctcccaaagtgctaagattacaggcatgagccactgcactt

SEQ ID NO: 253059 - DNA, 530 bp, Homo sapiens
cttagagttatgagggctgatgagtccaaggataaggggctacatctgctgagggccttcttgctggtggggactctctgcagagtcccaagactatacaagatgaggaggtgagcatgttagctcaggtcttttttcctcttctttacagtcagcagtcccatgctcatcataatctattaatttattaatcaattaatctatgaatatatgaatatattctattcttttttttttttttttttgagacagggtcttgctctgctatccagactggaatgaagtggcacaattctaggtcactgcagccttggaagmctgggcacaagcaatcctcccacctcagcctcctgagtagctgggactacaggcattagccactgcaccctgctaattttttaaaaaaaaattatttgtagagatggggtcttgtcatgttttccagggtggtctcaaactcctggctccaagtgatattcctgcctcagcctcccaaagtgctaagattacaggcatgagccactgcactt

SEQ ID NO: 253060 - DNA, 613 bp, Homo sapiens
caaaaggagctactctaacagagtccattaagaaaacctaactgcacatgatgacttttttttttcctttcctgtccttagtttccagggtatagttcatggggctgtgaaaattgaggggaagagtgacattttcctcatcactatacctttagcatctctacagttttaaaagcatttgtggttttgctttgacaattgatgaatggatgaacacttaactctgctgccgctttgaagttattcgttttacattctctaccctgtcacacaatatttcacaagggaacctggacaaagggaatyggtggcagaaggatgctacccttgcctcttatgagctcccattcacttcaagagctacacatatgctcatagagactctcgttctgcctccacattctgagtatatctaaatatgtagaagaacagtaccctcaccttacctccagtattggagggctgggtaagcatgatggtatcattgttctagtagttcatgttcactggaggacaatgtggcccaggctgttgacgtgatgcttgcttgttacatgaaacttcaatgctggaatttggattgtattttatgccagaagtcggtgggtagaaa

SEQ ID NO: 253061 - DNA, 598 bp, Homo sapiens
gttatttttttttgtagtgattgtgaataggattgcattcctgatttggctcttggcctaactgttgataatgtacagggatgctagtgatttttgtacrttgattttgtatcctgagactttactgaagttgttcatcagtttaaggagcttctgggctgagaatgtggggttttctagatagaaaaacatatctgcaaacaggaatagtttgacttcctctgttcctatttggatgccctttctttcttctcttgcctgatgttctggccaggacttccaatactatattgaataaaagtggtgagagagggcatccttgttttgtgctggttttcaaggggaatgcttccagcttttgcccattgagtatgatgtttggatagtttctaaatcacagaaatgtatttctcaaagttctggaggctggaaagtccaagatcaagaagttgccagttttggtggctagtgaggacccattcctcattagatagctccttcttgctgcatcctcatgtggcaaatggggcaaggcagttttctagggcctcctttataggggtactaatatcatccatgagtgctccatcctcatgac

SEQ ID NO: 253062 - DNA, 595 bp, Homo sapiens
aaaaatctgttcaaccatcagtggacatttaagttgttttcccctcttagttatgaataatgctgcaataaatacaatagtgcaagtatctcttggagakgctgatttcaattttttgggacaaatactcagaagggagaccactgaatcatatggttgtcctatttttaattatttatggaaacgataccattttcaataatatctacatcattttatatttctaccaacagtgcccaagggttccaagttctccacattgttgccaaaacttgttattttctattttctttcatgatgccattttaacattttgatttacttttttatgattagtgatgtagagcagtgtgtcctctttgcagaaatatctgttcaggtcctttctccactaataattcaaattatttatttattttttgctattgagttgtagaacttccttatatattttgactattaaccccttatcaggtatatagcctgcagaaattttctcgcacttgatagcttatctctttactctgttgtttggttaatttgatgtaatcctacttgtttatttttggctttgttgtctgtgcttttaatgtca

SEQ ID NO: 253063 - DNA, 527 bp, Homo sapiens
ttaattaattgcctctagaaagcttgtccttacttatttggaatgttttaataaaatcaaacagaaacaaagtacctttactgattagtagrgaaggacatctgcctagacatattgatttttatttgattgtttaaaatgtttaaagtttaatatgcctgagaggtgcttggtatgcaccaatcacaaaccagggaaactgtgtcatttatccctcagttttactctcatcctcctcatgttatccatgcacataataaaacattgggagaatttttaaaaaggagagagagagagatgaaacatcccaaaaggtcaaaaatcaatgatccttttgcagatgggactcctgggaaagccacatactttgattttagccagagtctgagtcttcttcttgaatacttggtttttgatgacacaaatcaataattgctttaagggaggtcctctagggacaaaaggaatgctacctttgaaatattgaatagcctctgccagtgcaggaagagcttctaagcatattc

SEQ ID NO: 253064 - DNA, 513 bp, Homo sapiens
acacatgtaaaatgtactggcacaataaattataytcaacaattgacttagtattcaataaattataattgcctttctccataatattaggctattggtacaatgtctctatttttgttttatgacttggcaagtaggagtttactcatatagacagtggaaccaaatactgcaatttggcctgtccaggatgtgtggttcacaaagctagaagacattagttgactaaactaaaagtaagcataatggcctcaatgataactgctgaagcactgaatatcagatttagcaataatgatcaacaagactcgggccttttccaatgggtgcacctgatatacaagccaccagtcctctgatacatttcattcaactatgaatgaagtaggagagttgacaaactcaaaatgaaaccaactgaccagccgtattccagatctgaaagaaaatgtgacacgtctatccatctgaggcttaggtatttttcctttggaaaaagatttctaaaattaa

SEQ ID NO: 253065 - DNA, 513 bp, Homo sapiens
acacatgtaaaatgtactggcacaataaattatattcaacaattgacttagtattcaataaattataattgcctttctccataatattaggctattggtacaatgtctctatttttgttttatgacttggcaagtaggagtttactcatatagacagtggaaccaaatactgcaatttggcctgtccaggatgtgtggttcacaaagctagaagacattagttgactaaactaaaagtaagcrtaatggcctcaatgataactgctgaagcactgaatatcagatttagcaataatgatcaacaagactcgggccttttccaatgggtgcacctgatatacaagccaccagtcctctgatacatttcattcaactatgaatgaagtaggagagttgacaaactcaaaatgaaaccaactgaccagccgtattccagatctgaaagaaaatgtgacacgtctatccatctgaggcttaggtatttttcctttggaaaaagatttctaaaattaa

SEQ ID NO: 253066 - DNA, 507 bp, Homo sapiens
gcgtcctaattactgccaagaagaggtcagtatccactctgctaagattaataatgtggtttttggcagacattcttcacaattcaggcaagcattctcagttgcctcatccagtcaggcagycggttcagccataggaggaatccaggctactgtgtggctaagaggaaaggaaggtattcatgccctagtgaggcaaaccaggctcatgcagtagctgtgcttacaaaggatctggagtgaatatagtttatttgggaggtaattctgggaaaaacctggagaaggtagaagccattccatggagggaaggaagcccatttacagggagcattagcgagcagcttacttctgaggcccaagtcttctgggcctcagaggcccagcagaagaaggtgttcatgccctagtgaggcaaaccaggctcacgcagtagctgtgcttacaaaaggttaacagctggctctccagcagcaggcgggagactagggggcaggaaacagtttg

SEQ ID NO: 253067 - DNA, 598 bp, Homo sapiens
aatgtgttctcattatttttctgcctgcattttctttaacaatttctaatttaatgcttagtgatattgagccaggattcagagatgcggaggttttgggacttggtctcaaatagaagtttataaagtgaaaagaagacatctcagacacaagtgggaagggcaggcaaaatcataaakatgtgaaataccaccacgtttcataacacattcccttactccaagcacaatcaattcatttaaaaaatttagggttgcaacattggtatgtcttatgtgtctttttgttttggtcatgggtttatcatatctaaatgataaagaattccaaacatagcaacaaccatcttttcatcttcattttcaatctacaaccactaacagacccaccgtacattatgtaacgatgctgctatccaacatttaataagttcttataatgtccacacatgatgtgtgatttgcattgtgtcaataaacttgctcagtgactctatgcagctagtagatactatgttttatttaagaggggaaattaaagctcagaaagatgatataaaaaatccaagaccaaacagctaagggcagacctaggatt

SEQ ID NO: 253068 - DNA, 564 bp, Homo sapiens
aactttgaacagaaaatatagcaaacctatagcattttccccgtttgaactttaatcatcttctttttcctttatcttattatacctttattctcctacccctctagcctcaccactcccctccatacaattagagacccatcttttgggattagagacagatgttccaaatcacagtgggataattttttttttcttatgggatcactgacctatattttcctttgccataggactctatttctggaattctgatgcttatacaaagggggaaattctccctttgtgtttatgaatacttgctcctctctttttctctgtttagcttttttcattggtctgatagacagaaaccctcttcctcattgcattttggtagcagttaaatagaaatataaaataataagctagataggtacaaaaatattatctttccattactaatacaagctgatattagaaaatatmgctaatatttctaggaagaatatctttcaaatagttaaaactaaacaaacattgctcagtcccacataacactggtctgggacaaactgcaacccc

SEQ ID NO: 253069 - DNA, 529 bp, Homo sapiens
gccttcaattgttaaagctttgctgagaagctggaagaagaaggtcaggaagctcatctaaacagggctttaaaggggtgcacaggctttattgtcagacacaacttgcatggaagtgaatttgaagcaagttattatatcatgtgtattagtacaaaacctcttgatcttttttttctgaaattaaaggcagtaggctattgctggawcttggatggagattgatgtggttgagagggttgggttgttgggagacaggtggacagagagtgcataggggtcacagtatggagggttctggataccacatgcaaagttagcagttttccctatacgtgatactcgacctcatttatagtttttaataaattttagaagtgttgcccattttggtggctaagaagtatttctactgtgacaataatgcttttgaaggttggctctgaaacagcataaagaaaggcagaagctacagattattagaactgtgcaagctggccatggtaatgtcctagtccaaatttaattt

SEQ ID NO: 253070 - DNA, 555 bp, Homo sapiens
atggttgaaactcaggttcaagaggaattatrataatacataataattgtaatggaatatacataatatatatttaataactaaaaccatctacgctttttgagtgcttaagtaagagccatgtcctgggctcagcctattccataatttatctcatctaaccttcacataccatgtaggtggattattattctcattttacagatgggaatactgaagctcagagggattgagtaattttgcatggtatcctaatgtgagctactggcagagccagaaattaaaatggttcttttgtttcaaaaattatttgtttatttcaatagtttttgggttataggtggtttttggttacatggatgagttttttagtggtgaattctgagattttattattattattatattattattaatttattttttacccttgctccaccttttccaattctgagattttagtgcacccatcacccgagcagtgtacactgtacccaatatgttgtctttcatttctcatccaccttccagcctcccctcccaagtccccaaatt

SEQ ID NO: 253071 - DNA, 591 bp, Homo sapiens
aggtgtgtttgaacaatatgaaatcagtgcaccctgaaaaagaacagaataacagtgattttcagggaacaagggaagataaccatagggtctcactgcctgcggggtcaggcagaatacagccatatttttcttctcacagaaagcctatagacggatgtgtgagtaggagaaatactgctgaattcttttcccagcaaggagtaaccctggggaaggaattcattcctgggggtaggtctatagacggccgctctgggagtgtctgtcttacgcmgttaagataaggactgaaatacgcctggtctcctgcagtaccctcaggctttgggaaattccagcctggtaaattctagtcagaccagttctctgctcttgaaccgtgtttcctgttaagatgtttatcaagacaatgtgtgcacagtgggacatagaccctcatcagtaattctaattttgccttgccttgtgatctttattgccctttgaagcatgtgatccttgtgacctactccctgtttgtacaccccctccccttttaaaatccctaataaaaacttgctggttttgcggctcggggtcatcatcacg

SEQ ID NO: 253072 - DNA, 517 bp, Homo sapiens
gatacacatataaaaatgaatttagaccagaattgtccaatcaaacttttgcaatggtggacattatatctatgctgtccaatacagtagccactagcctcacgcagctattgggtccttgaaatgtggctagtgtgactgaggagctaaaaatttattaaattttwattaacttaaatctaaacaactactggtggctagtggctactctatcagagagcacagatattttcttcaagggtgtggctcttagattctggacctcattggatatctcagacttggaatgcaggaaatttaaagctgttctaaagtggatcttgaataagactctgagacttctgtgtggctagtctcttttcttgtatcaggatggggtgatttttttggagaaggacaagcaggcatcacacagggatggctcataaagaggttgctaactttaaaacaatccagacagacactggactttcagaagggaaatcagaggtggttgagtctaccactgtctgttccc

SEQ ID NO: 253073 - DNA, 434 bp, Homo sapiens
gctttcttggctcaggcacttgtcagtgagtatacaatctaggagaatatgtttctataagttaactaatttcagttaaataggctaggacagcctcagaaagaatgatttaagtaagtttttaatgtgtttgtttgtatgytccccccttagaattctgagtagcttgagtcttagaaaactgatgctgggacacaatcatgtgcaaaaccttccaacactggtagagcacatccccctcgaggtgctggatcttcagcataatgcactcacgaggctgccagacaccctcttctccaaggccttaaagtaagtatcataggatttttttcggaagagcagaatcattggctaaacagactgcagtgacttatcattggagtgacctttggaactgtatttacagagcgtttacctaatagtccaactatgag

SEQ ID NO: 253074 - DNA, 449 bp, Homo sapiens
cataggaagttgttttggaattgttcatgcatagcactgtgaaaaacatacctgctaactagacttcaatattttgtttagtatttagactgagggtacctggtcagaactctctgttggaaggtcacttgggccagttccccagcccccacacagtgtcactgtgttgctcatttgaaatactttttggttcatttgtttctattaggggtgttctccccatmcctgtggattttttgcatatataaaacattagcatgatcataaaagtcaaaattaagtaaaaaggcaaattcagagaagtgccactttccttcctagccctcccacctgtacctacccacctcttgcaggaaaccaatctcttccatttctgattttcttcccaatgtttccttttgttaaaataggtagatacttgtatagtttatttcctcttctttcttata

SEQ ID NO: 253075 - DNA, 623 bp, Homo sapiens
ccctctctgttgagacaccaagttacgtcaaagtctcaggagcagctccggtctccatagaggctgggtcagcagtgggcaaaacaacttcctttgctgggagctctgcttcctcctacagcccctcggaagccgccctcaagaacttcaccccttcagagacacygaccatggacatcgcaaccaaggggcccttccccaccagcagggaccctcttccttctgtccctccgactacaaccaacagcagccgagggacgaacagcaccttagccaagatcacaacctcagcgaagaccacgatgaagcccccaacagccacgcccacgactgcccggatcgaggccgaccacagacgtgagtgcaggtaagtggctcctgctggtgatcttcggggatttgggatgcggagtttccaggacgtctccgcacttgaggagtggagaggagggaaggatctggagcctactcagagcctgctcctgctgttgcctcttcgtgatcttctagtggttcttggcgaaatcaggaaaaggcagatggagggttgtgtatggaaaggggtggggatggaagtccggagaaatggtttgcggtctcggctctgcctgtaacaacccgag

SEQ ID NO: 253076 - DNA, 623 bp, Homo sapiens
ccctctctgttgagacaccaagttacgtcaaagtctcaggagcagctccggtctccatagaggctgggtcagcagtgggcaaaacaacttcctttgctgggagctctgcttcctcctacagcccctcggaagccgccctcaagaacttcaccccttcagagacaccgaccayggacatcgcaaccaaggggcccttccccaccagcagggaccctcttccttctgtccctccgactacaaccaacagcagccgagggacgaacagcaccttagccaagatcacaacctcagcgaagaccacgatgaagcccccaacagccacgcccacgactgcccggatcgaggccgaccacagacgtgagtgcaggtaagtggctcctgctggtgatcttcggggatttgggatgcggagtttccaggacgtctccgcacttgaggagtggagaggagggaaggatctggagcctactcagagcctgctcctgctgttgcctcttcgtgatcttctagtggttcttggcgaaatcaggaaaaggcagatggagggttgtgtatggaaaggggtggggatggaagtccggagaaatggtttgcggtctcggctctgcctgtaacaacccgag

SEQ ID NO: 253077 - DNA, 553 bp, Homo sapiens
gacaatgaaccaacttctgccttagggaatccaagctgagaaattcaggaatcaagtagttttccatgagcactgaggttgaaagaccaggctatggactgagaggcctggagtgtgaacagcacttctgggggaagagatgcttgaaagtgaggaaaccattgtgaggagaaaggagaggctgggctaaaggaagagtcccaaagggaaatgcaatgtcttctacccacctagtcckatgagcagattttggtccagaaataattgtactagaggggtttttcttcgctgtctaggacctggtttttcagctcttgttgggtttccccacttgcataaacttaattttacaccttcacccattatgtgaggtaacttgactgattttcagtttcttaccagcaaaataacataaatttttaatttgtgcttattgcagcactatctgtaacattgttaaaacaaaacaacttaaatgattattagcaagttagccatataaactctggcattcactttctcttaaatatgatatagtaataaaggataataa

SEQ ID NO: 253078 - DNA, 543 bp, Homo sapiens
cctcaattatttgaaatagtttcagtaggaatggtaccagctcttctttgtatatctggtagaatttggctgtgaatcagtctggtcctagacttttatttattggtaggctattttttactgattcagttctggagctcattgttggtctgttcagggattcaatttcctcccagctcagacttgggaatgcgtatgtatccaggcatttatccttttattttagattttctagtttatgtgcaaagagatgttcataacattttctgaaaattatttgtattctttgggtcagtggtaatatcctttttatgctttctaattgtgtttatttggatcttcttcttttcatctttattaatttagctagtgatcattttattttttcaaaaatccarctcatgaattcattcatcttttgggttgtttttgtgtctcaatctccttcaagtcagctctgtgtttatttctcatcttatgctagctttggggttagtttgctcttacttcttttgttcttttagctgtgatgttaggttatta

SEQ ID NO: 253079 - DNA, 621 bp, Homo sapiens
tctgtcatcttagatagtatgcaatcattttgaatggtctctgctttctgtctctatcacygaatggtaagtcatatgggggcagagacatatctctcttgttcaaaatttgcccttatcttgcctatgacaacacctggcacaagtggcaaataaaataaggtgaaaataagcatgacagtgatcgttagggaatgaaaggaaggagaaagagagacagaaatgtgggagaaggagagatgctggggtttcatgctaatcttttaaatccagatttagaacttttccttttattgcaccagattccgtccttctcttctattttcctcaatttgtaaacttttgtttgtttgtttgtttgtttgagacagagtcttgctctgtggagagcactggtgagatcacatctcactgcagtcttgatctcccaggctgaagaggtcctctcaagtagctgggagtacagctgtgcaccaccacacccagctaatttttgtatttttggtagagatggggtttcaccatgttacccagggtagtatcaaactcctgagctcaagcaatctgcctgcctctaccacccaaattgctgggattctagatatgagctgctgtgcctga

SEQ ID NO: 253080 - DNA, 621 bp, Homo sapiens
tctgtcatcttagatagtatgcaatcattttgaatggtctctgctttctgtctctatcactgaatggtaagtcatatgggggcagagacatatctctcttgttcaaaatttgcccttatcttgcctatgacaacacctggcacaagtggcaaataaaataaggtgaaaataagcatgacagtgatcgttagggaatgaaaggaaggagaaagagagacagaaatgtgggagaaggagagatgctggggtttcatgctaatcttttaaatccagatttagaacttttccytttattgcaccagattccgtccttctcttctattttcctcaatttgtaaacttttgtttgtttgtttgtttgtttgagacagagtcttgctctgtggagagcactggtgagatcacatctcactgcagtcttgatctcccaggctgaagaggtcctctcaagtagctgggagtacagctgtgcaccaccacacccagctaatttttgtatttttggtagagatggggtttcaccatgttacccagggtagtatcaaactcctgagctcaagcaatctgcctgcctctaccacccaaattgctgggattctagatatgagctgctgtgcctga

SEQ ID NO: 253081 - DNA, 578 bp, Homo sapiens
aaggggaaagtctttttctgatagacaggttattacaatcaagtcaagaaatgattgcatatttaaacgtgtgattatatcataattcatatgctgaatatatgaattactaaktaggacaactccaatgcttaggacataacacatacacccgagtaatatctttttgtttcacatctttctaatgaattccttcccactaaattattaaatcgtaagtccaaagaataccgaattagaaagaagcagtgagaacatctacaccagcaattttcagtgtgttccatggaaccctagggctccacaaaaataactcaaggatccacaaaaaggaaaaggaagaccaaggaagaaaagttacaagtcccctgacctacttcaacttgagcaaaaccttttacagaatttgaaatctagtggagctactaaagaagttcaatttttttctaatttagttattttttgagacagggtcttactttggcactcagtctgcagtgcagtggcattattacagcttgctgcagcctccaactcctgggcttaagagatcctcccgtctctccagtagctgggac

SEQ ID NO: 253082 - DNA, 604 bp, Homo sapiens
atacaaaactaaccccacaaggagctctacagctaaaatcaagcaacttacttgactgagcaaactcagagtccaactctacacatcctgtaccaattttgctattattctttgcttgtagttcctctagggaatggtattttgaccctcttatcaggttcagcacatctcaagctgttatasgtctagtgtccaggatgagagtgaagtgacatccagaggaaactcttgttatctttcagagaagaaatgtctgaattgctttccagcaagaggaacttcctagcttttcaattgtgcaatgtgggccactgctgtaggctcagtagattcaggaaaatatgcaaaatcaagattttcaggttcatcaacttagctgttcccattccatatttttccagtcatatagtatctgctcttataaatttaacatctaatctgtcctctatccaacctagattctgaccttggcatagcaaatctgctttggctttaagttaatctgactagtaaatcctggtcctgtggctcagctttctctgctgtcttgcacaggagaggaggacttctttgtctgctgccaaagatgccctctagctttcct

SEQ ID NO: 253083 - DNA, 607 bp, Homo sapiens
atatatcaactggagtaataactttataatcaaaaccctgcattggcttcttatttcacttataacacaaattaaaagctttctcaatgatctgtcttctcacatgcttgctctgcttctagcacatagattagtatatcccatgtatggwgcagtcatgagaaatgaaactactgctggagggagcaaagcaggaagggcattttatgatacagcatatcatgtaaggagggaaacacaagaactacaaaagagagttagtggtgttgcaataacatggatgaaagaagatgagagcttgaaatagggcatcaacaacagagatagaagagacaatcagagtgtagagcagtcagagcttaagtgatacttagagagtatataattgtttatatactttatatgtaattgtttatataattcatctatatatcatgagtatataagtatatacttagagaatatgtaattcaattcctttgaggaattgaatgatttgaagagaagataagtaaaagagatttccaagatcctgggtagcacaagtgtgataatatgggtgccattattaagataagcagcaaaagaaaagacacaaattagagaa

SEQ ID NO: 253084 - DNA, 550 bp, Homo sapiens
agattggtagagacagaaaccaatttggttaattcccttaaatatcattaatcactttccttcttaaattaatttatggcacatattactgtagtcaaagagcttgataagttatacataatctgttatctcactgatttaattttttaatttttaatttaatttaatttaatttatttttgtgtgtgtgtgatggactttcactcttgttgcccaggctggagtgcagtggtgtgaccttggctcactgcaacctctgcctcctgggttcaagcaactctcctgcctcagcctcccaagtagctgggattacaggctcctgccaccacgcccagctaatttttgtatttttagtagagacagggtttcatcatgttgagaccaccagactggtctcaaactcctgacctcaggcaatccacctgccttggcctccaaaagtgctgggattacaggcgtgagccaccaaggctgcctatctcactgatttaatataattccagycaaaggaggaatcctcccattattgcctggtagatgaagtcacttc

SEQ ID NO: 253085 - DNA, 566 bp, Homo sapiens
cctcacaaacttatggttatatttaaggttctacttcctgaccgccattctgatctaaacaaccactaacttccatattctttacatttagggtaaaacaaggttgtcaaaagacgctcagccccctaatacatgggtcatatatgtagtaccattttctaatataactttatattatggtccaaaaatactctggttccactctagtttttgtcattagtgtattatctacagagaataaataaatttacctttgttttctcatttgtaaaatgaagacataggatgagactagccccacattgcctctcatttaaaaaaataagaaaaactatgattttattgtttattttattttgaaaataaactctctgtaattattgcaatgcatgacacgttcattttcttcttcttcattcattgcaaaataagaatgactggatrttataaaaactgaagagcattctgtgaaagcaactcaaagtatttaaattcttgcaatctataaaaagtatcttatctccttattgcagtatgccaaaggactttcattttaaaatccaact

SEQ ID NO: 253086 - DNA, 531 bp, Homo sapiens
gtctgaaagactgattcaaagtgaggtttaacatgctgrgcacttggacagcaaagagcaagatttcttcttttttctagcaggaaattcctgggaggtctctggccactttctttttatcactgacaagttggttttgatatttgagaatgtagagatcaataccaacttagctgtcaaaatgacttgatagaagaaacactctaatattgtgccaggaataatacctcatatcttcaagacccatgaaataaactttttgacaattttaaagtgcccccatggggagatcccttggtataacctcaaggtatttaaagaaagcatttttatctggttctagaacagatgcactaaaagccctaaaacccgatctagatattattgaggtagtattaggaatccatgagatgcttccagtattttaaattgcctatagaaaaaaaaatgatatcttatgggcaaacaggctgcccatggcaaataaaattactcatccctttactattggaaatttttaacaaatcattt

SEQ ID NO: 253087 - DNA, 531 bp, Homo sapiens
gtctgaaagactgattcaaagtgaggtttaacatgctgagcacttggacagcaaagagcaagatttcttcttttttctagcaggaaattcctgggaggtctctggccactttctttttatcactgacaagttggttttgatatttgagaatgtagagatcaataccaacttagctgtcaaaatgacttgatagaagaaacactctaatawtgtgccaggaataatacctcatatcttcaagacccatgaaataaactttttgacaattttaaagtgcccccatggggagatcccttggtataacctcaaggtatttaaagaaagcatttttatctggttctagaacagatgcactaaaagccctaaaacccgatctagatattattgaggtagtattaggaatccatgagatgcttccagtattttaaattgcctatagaaaaaaaaatgatatcttatgggcaaacaggctgcccatggcaaataaaattactcatccctttactattggaaatttttaacaaatcattt

SEQ ID NO: 253088 - DNA, 423 bp, Homo sapiens
aaagaagatgctgtatttgataacacaagtgttaatggcgcattcttagtgaaaaccagggttcacacactccatgtgtcaatcactgtgacatcttggattagactctgggtctcaatgagccttggttacttgattataaacaaaaataattcatgtaagtgcatctcattagtttcagtgagctaaaggacataaaaggataaatcayaaaatgatgacgaaataacaattaaagcaatgttcttttagggggttgtctatttgttacgtttttctcatgtgaacagtaatcacggtagattgacccaagaccaatcaaacaatctatgccccatctacctggccatgaactgctaagtaatttgtctactaatttactctacagtctcctacataaatgacctaagaaattcagagtac

SEQ ID NO: 253089 - DNA, 598 bp, Homo sapiens
gttagactgtgaactccaagtttcttccaaagttagttcagcctacaccagggaatgagaaaggacagygtggagatgagaagcaagatggaggcaattaggtcagatctctttcactgttacaattttctcagttataatttttgcaaaggtgatttcaatctgagtaaggggttgatgatattttctttagttctttgcaatgtatatatctaacaaagaacacttattcataatatataaagaactctttcaaatcaataagaaaaaggcaaggaatattttttagatggggaaaatacataaataaatgctcaaattcactagtaatcagagaaattaacacaaaggtatatatatcacaacctacccaaaacaataggaaagggaaaaggaagaagaaagggcctaaggaaagaaggaagaaagagatgaaaggagaatatgaaggaatagacaatagcaagtgttgatgaggatttacagtaactggaaatcttccacacttctggtagaaatattatatagtataaccactttgaaaaactgcttatcaatagcctcttcagctgaacttctatatcccgttacccagtaa

SEQ ID NO: 253090 - DNA, 448 bp, Homo sapiens
gcctcttcagctgaacttctatatcccgttacccagtaattctactccaagctcaaatgtacatacgcataagaatgttcatatgttcactaaaagacatgtacaaaatgtacattttytaaaatgttcagagcaacacgtttttatttatatgttacttattttattatattatacttatttatttattattagaaatgttcttgctctgttacttaggctggagtacggtgacaagatcacagctcactgaaccctcaaatacctgtactccagcgatactcttacttcagcctcttgagtagctagaactacaggcgcacttcaccaggcctggctatttttttttttttttaatttttttgtagagatgatgtctcagtatgttgcccagactctcctggaacttctggcctcaaaccatcctcccacctcagactcccaaagt

SEQ ID NO: 253091 - DNA, 539 bp, Homo sapiens
cataagctcattacagtttcagaagcagtagtttggagtggttgttatctactcttactaaatcacaaagttgcctgagtacctctcaaataaaaataaaaattaaccacatgttgccataaccttggagattatgcttcactcatctgggatggtgatcctrgcagcaatagtttctaaaagctttttaagttatcttaatatgacaccagggtctagacccattggtctgaagtagctcagagtggggtgaatgtgtttagaatgaacagatgtcttgaggagactctggcttatgccttttgtactggtatattatagcaccactttttaccctcaaatgtgttctgatcttggagtaagcaacaagttctttaaaaaatgctaattacaaaagattaagataagttgaaatttattaaaactaagaacttctgtttctcaaaagataccattaaaattttgacaaggcactccatagaatggaaataaggtattttaatgcatatatataacaaataatttgtgtacactaaata

SEQ ID NO: 253092 - DNA, 403 bp, Homo sapiens
taggaaactcagcaatttcagaaacagaagatgcaactccaataataataataagtgttgttgtaaagacagttggattttgcttttcttctttctctcatcattttatcattagtgctctaaacagtgcctatagatggtcagtaaatatttttgaataaattaataattgaacaagtgaaagaaaatattctttcaataaagaaaggatgaattaacgtttattgaataggaaatatactccatccacatcctaggtacctcatgtatttatgctacttaatagtcatggcmcaatataaatggtaggcatcattatcctcatctcaaagcttacataaaatacaaggcacagagaatgcaagaaatgtgcaaggtcacaaggctatttgaaagaacccag

SEQ ID NO: 253093 - DNA, 451 bp, Homo sapiens
tataatatacagtgaccggatcagagtaattagcatatcgatcatctcaaacatttctcatctctgtgttggaaccagaaataattttcaacgaaatatctgtgcattcgatggccccgtcaagttgacatataaaattaactatcacaatttgcattttagcagtttaagcattgttttctataataatctaatcttttttctgatgagtttgttcagtgacttcagccatatttttctgttttttttttcctgtagatctcagagmccagagtcccctcttcatgcaagtgcgcacacacacacacacccccacaattttggactatcattgagatagatctgcacaccacttttactccttttagctctgacttatttcaggcctgaaagtaaatatagttcccttcccttggtatctgttagaacagcagtttccaaagtgtgttca

SEQ ID NO: 253094 - DNA, 451 bp, Homo sapiens
tataatatacagtgaccggatcagagtaattagcatatcgatcatctcaaacatttctcatctctgtgttggaaccagaaataattttcaacgaaatatctgtgcattcgatggccccgtcaagttgacatataaaattaactatcacaatttgcattttagcagtttaagcattgttttctataataatctaatcttttttctgatgagtttgttcagtgacttcagccatatttttctgttttttttttcctgtagatctcagagcccagagtcccctcttcatgcaagtgcgcacacacacacacacmcccacaattttggactatcattgagatagatctgcacaccacttttactccttttagctctgacttatttcaggcctgaaagtaaatatagttcccttcccttggtatctgttagaacagcagtttccaaagtgtgttca

SEQ ID NO: 253095 - DNA, 568 bp, Homo sapiens
ataagccagtccccagagattgaaataaatccctactttttcaaatgtttagacaccaatgcacagccacaatgatcagaacaatcagagaaacataacgccaacaaaggaataacagagcactaaagccacccctaaagaaatggggatttacgagctgtctgacaaataattcaaactaactgtttctaagaaagctcagcaaaactcaataaaatacagagaaacaacaaagtcaagaaaacaataatcaaaktaataaatttaacagattgagattactttaaaaaatcaaacacattttgcagatgaaaaatacaataaaggaaatgaaaaatgtgacagagattgtcaacagcagaattgatcaagcagaaggaagaatctgtgaactcaaagataagttatttgaaaatacatagagaagaaggaaaaaatagaatgaaaaagagtgaagaaagcttatgggatttatggaaaaatggaaagagccaatgtttgcattataagagcttgaaagaagaaaaaagagacaaaaaacaataaaacttaaagaaataataacaga

SEQ ID NO: 253096 - DNA, 584 bp, Homo sapiens
ccatactggaagctgcaacagttcttatcagagtatcagttgctactaggtcmatttatggacaaatcactcaggtcatctcagactcaaggtaagagaaactagactctacctcatagagaagagaaaaacacggtatccatatccttctttaatctaccactccagaacattttgattctatacaagacccattatcaaatcattctgctgccatcacctcaaggttttatatgttttagaatgttcagcaagacagatcatggtcagggtaaaagagcagtaattggttaagtagctattattctgacaagctacaaaagggacttgcattttcttaactctcagaaattttttgtatttttagtagagacggggtttcaccgagaaacatcttcttactgaaagttatgtgaacacccattagaaaccagggagagagatttcatttcttccagagtaggttcaatgcctagttttaccctatcagaattttgtccggggcacttatccagtgacaatttttttttcataagagctatttttcgtaagactgcccaaaatcttaggaatgatccaatttt

SEQ ID NO: 253097 - DNA, 584 bp, Homo sapiens
ccatactggaagctgcaacagttcttatcagagtatcagttgctactaggtcaatttatggacaaatcactcaggtcatctcagactcaaggtaagagaaactagactctacctcatagagaagagaaaaacacggtatccatatccttctttaatctaccactccagaacattttgattctatacaagacccattatcaaatcattctgctgccatcacctcaaggttttatatgttttagaatgttcagcaagacagatcatggtcagggtaaaagagcagtaattggttaagtagctattattctgacaagctacaaaagggacttgcattttcttaactctcagaaattttttgtatttttagtagagacggggtttcaccgagaaacatcttcttactgaaagttatgtgaacacccattagaaaccagggagagagatttcatttcttccagagtaggttcaatgcctagttttaccctatcagaattttgtcyggggcacttatccagtgacaatttttttttcataagagctatttttcgtaagactgcccaaaatcttaggaatgatccaatttt

SEQ ID NO: 253098 - DNA, 549 bp, Homo sapiens
gactttctatggaagaattgtgaaaggtcattttaccactgtttttttctttcttcttgtctttctttttgtttttttgccttggcttcatatgctaatggaatcaacatccccatttgctattttaatgtttcttagaaagctttatctcagaatttcctatggtttgtatgtgcattagtcttctaggtgaatcagaggtttcctgctataacaccatgaggtttctcaatagaccctcttggctccttgttgagtcttttsaatgactttattataataaagttgacttggagccagaggaggcagagctccagtgttgggctttctgtagaattttatgggtttttctcagaagtttaatgccagtttaatggagttttataactattaatactctaccactccagctgcgctaagaaatatgtaactaaacaataacttgaaataggtaaattcatgattaagttgcactaaaaactaatgcctcttggccatagttcataatttccaaaggcacatcatttagaatgattggtaactttagcc

SEQ ID NO: 253099 - DNA, 627 bp, Homo sapiens
tcctgattactttggagctttttctcactcagctctgtctgcctttctattgcctttatttgtttacatgcctaactttatctttccagacttgaactcttcaattgtgtagctattacccatatgaggccattgagcatccaaactacagctagtccaaattgagctgtgaataccaaatttcaaagacttagcacaaaactagaatgcaaagtagctcagtgactcatattaattatgtgttgagaggctaatatggtgggttattttttcattcattgtgtgatattgggttacttaaacatttggggtataataaataggttaatttaaatatattgttagaattgatttcatctgtttctttttatatggctacattatttatacataactttttacattatgtttataaattacatatatgactttcatctaaagcttgaattatatttctattggagagggctattctagactgtaagcccwtagagcagaaacaagttcttatttcttttcatataatgggtgagaagtttaggaggcagtgaatgattggctaaatcagtagatatactgattaattgatttactatttattctaatttaaactccatttccaaatag

SEQ ID NO: 253100 - DNA, 561 bp, Homo sapiens
ttatttcttttcatataatgggtgagaagtttaggaggcagtgaatgattggctaaatcagtagatatactgattaattgatttactatttattctaatttaaactccatttccaaatagagtaacatgcttcatattccatacatgcatgatactgttttctgtgtcctagttcagagagtaccaacttccaaccactggtatttctggataggttacaggtaggccaaaagattggttctgtcatccctagagattgacagatgggaaatgaggctgactgggcccccaagtccacttctttccgctacaagcagcctcatccatttaatccaggrtattgtacaaatactatcatgtcctctgtttatcatgatataaaaatgagaaataatgtcaaaatcttgtatgatggagtggaattggaattttctctatgttttgcagaaacagcttaggaaattaatttagtcatgaaatccgtactggaaactttcttttctttttttcttttctctttaaactattagaattggtgggtataaatctgaggggtaatct

SEQ ID NO: 253101 - DNA, 561 bp, Homo sapiens
ttatttcttttcatataatgggtgagaagtttaggaggcagtgaatgattggctaaatcagtagatatactgattaattgatttactatttattctaatttaaactccatttccaaatagagtaacatgcttcatattccatacatgcatgatactgttttctgtgtcctagttcagagagtaccaacttccaaccactggtatttctggataggttacaggtaggccaaaagattggttctgtcatccctagagattgacagatgggaaatgaggctgactgggcccccaagtccacttctttccgctacaagcagcctcatccatttaatccagggtattgtacaaatactatcatgtcctctgtttatcatgatatraaaatgagaaataatgtcaaaatcttgtatgatggagtggaattggaattttctctatgttttgcagaaacagcttaggaaattaatttagtcatgaaatccgtactggaaactttcttttctttttttcttttctctttaaactattagaattggtgggtataaatctgaggggtaatct

SEQ ID NO: 253102 - DNA, 568 bp, Homo sapiens
ataagccagtccccagagattgaaataaatccctactttttcaaatgtttagacaccaatgcacagccacaatgatcagaacaatcagagaaacataacgccaacaaaggaataacagagcactaaagccacccctaaagaaatggggatttacgagctgtctgacaaataattcaaactaactgtttctaagaaagctcagcaaaactcaataaaatacagagaaacaacaaagtcaagaaaacaataatcaaattaataaatttaacagattgagattactttaaaaaatcaaacacattttgcagatgaaaaatacaataaaggaaatgaaaaatgtgacagagattgtcaacagcagaattgatcaagcagaaggaagaatctgtgaactcaargataagttatttgaaaatacatagagaagaaggaaaaaatagaatgaaaaagagtgaagaaagcttatgggatttatggaaaaatggaaagagccaatgtttgcattataagagcttgaaagaagaaaaaagagacaaaaaacaataaaacttaaagaaataataacaga

SEQ ID NO: 253103 - DNA, 608 bp, Homo sapiens
atgtataaatatagctaaattttatttatttagggcttagtgtgcctaaacactttacatgcactgtcctatttaatcctcaaaacattagaataaggaaagtgaaacccagggagttaagaaacrtgacaatggtcatatctataatacatacttagcaggattcatggccagacattctgatgccagacaccattctattagtaaccatcaccttatggcatgctgagtttgagattctcatgccaagatagacagaagtgccccaaaatatgttggatatggcattgtaaaactcataaagaatgggttttggcacttggtagagttacccaagggggcaagtgcatgttaaaatagtggtcctacagacagagtgctaggcaatgccaacattcatgggaagagctgaggagagactgaagtgatgagaccaaaaagtagcattaatagaagggggagaagactcaaagaatgcagaataaccaatgtcaagatggccgataattttgagaaagagaatagtccaaattaacaccgatgtcaacatcaagcagagaagcgaatcataggacaagaacatcatggttattgggcagaaaccctta

SEQ ID NO: 253104 - DNA, 612 bp, Homo sapiens
tctgatgccagacaccattctattagtaaccatcaccttatggcatgctgagtttgagattctcatgccaagatagacagaagtgccccaaaatatgttggatatggcattgtaaaactcataaagaatgggttttggcacttggtagagttacccaagggggcaagtgcatgttaaaatagtggtcctacagacagagtgctaggcaatgccaacattcatgggaagagctgaggagagactgaagtgatgagaccaaaaagtagcattaatagaagggggagaagactcaaagaatgcagaataaccaatgtcaagatggccgataattttgagaaagagaatagtccaaattaacaccgatgtcaacatcaagcagagaagcgaatcataggacaagaacatcatggttattgggcagaaacycttaagagaccatttccaacctttgccaagggtaactgcagcttaggagcagggaaggaccaggctgcagtaagtgagaataggttagcagggaaggggtctaagtgagctaagattataagaatgctcagaagatgcccttgcccatggtgtggtcatcataggcattattatgtttacctgtat

SEQ ID NO: 253105 - DNA, 482 bp, Homo sapiens
ttccttccagtttaaaactagttatatttytcatggcaaataaccaagcacatttggcaaaaaaaaaaaaaaaaaaaaaaaaagcatgtacttaaaagtgaagctaccacagtgattattttcccttctattttaaagtacatttacatttggggaaaaaatagcaggtaaagttctaactgtaatttaatgcatggtctaatacttccatttatcaaaatgtcagctgccaaacaatcagcacaaaccaacattgtttctggggaactggcccactcaaaagacaatatctctgaagggagttttaaacaaccaagagtgaacaaatttctccttttttgtaaattgatgtctgccagggtaaaggtatggggaaaaaaaggatgcacctgcattgtcttgtaattgtaactatggcatttgcaaaaactgaactagattttcccattttcatgtatggtgctttcaatagttgtgtgtgt

SEQ ID NO: 253106 - DNA, 544 bp, Homo sapiens
aatttgtaaagcatatattaaatacctgaaagcctgcatgtattattttctccctcttctacgtttttattttctacatattttattgtagagggttctaagggcctggatttatggtctactttgtctgactgacacaaagtcctccagccacctcagcagaaatcaaacacacgggatgacggcacatccatgagggacagctggtattcgtgacggtgtataaataataaatttagcgtttaaaaatctcacataggtcttctgattttattaacctagacaacttataataattatgataaacagacattgtcattaaatatagcagccatttgataagattaaacataatgcaatacatcttcctttcctcacattcagyataataaattacccttaggcttctaaatgaagcattttataattgagcaaaacagatcgatttttagcggtccttatttatatgcaaaacagacttcttgagaatggtaaacttgattaaaatctctctaattgcaaatcacaagtaactttttctccc

SEQ ID NO: 253107 - DNA, 544 bp, Homo sapiens
aatttgtaaagcatatattaaatacctgaaagcctgcatgtattattttctccctcttctacgtttttattttctacatattttattgtagagggttctaagggcctggatttatggtctactttgtctgactgacacaaagtcctccagccacctcagcagaaatcaaacacacgggatgacggcacatccatgagggacagctggtattcgtgacggtgtataaataataaatttagcgtttaaaaatctcacataggtcttctgattttattaacctagacaacttataataattatgataaacagacattgtcattaaatatagcagccatttgataagattaaacataatgcaatacatcttcctttcctcacattcagtataataaattacccttaggcttctaaatgaagcattttataattgagcaaaacagatcgatttttagcggtccktatttatatgcaaaacagacttcttgagaatggtaaacttgattaaaatctctctaattgcaaatcacaagtaactttttctccc

SEQ ID NO: 253108 - DNA, 577 bp, Homo sapiens
tccctggggggtgaaactggaattaatgaggctgatgtgcctttctttcttctggactcagcataataagttacctgtaagctgtagaatgaagcattttataatggaataaaacaagtcaatttagagtctgtatttataaggaaagtaagatttttgcaactggtaacactggttagcagttgtggagaatgccccaggatggttcctctccccacaagattccccaggcaaattgtgatggggaaagtgctccgtgttcaatctgttcttgttcattcttctcttacacagaatgagatgcaggaacaggtgctatcaacctaatgaccgttggttcttttcacatgaaagtgtctcagaaacatttcacctattgacaagcccagaacatgatattttgataagttctatcagattaaatttaaatattatcccagagcattaatttctctggctaacagtrttgttagattcagtgctactcttttgattgaaagcaactgagcaaggaatcatgatactgcatgcctttgaagagtttcaggtttgggtagctgtctgcaaagggcaattt

SEQ ID NO: 253109 - DNA, 550 bp, Homo sapiens
agcaggcatgcaagttgctcctgctatatgtgttacaggaacttaattagaattatttttggtgtaccttctatattagaaagaactatcacatgctcagttcatgttcctttgttcttagagtaggaggaggactcccttttttcaaactaatcattcatatcaatataaactaatatatrtttaactttactgcaaaacactgtataatcactagcaatattttaatatgcatagatgcatttattaataatatgagattatattacataaaatatttggagacctgttttgtatatctaatcaatatcacctatatttttttccaagccagttaatatgtgcccacatcccactttaattaattatacaatattccatggtgtgaatataacatgtaatcaatcccctattggtggacatttaggttatttccagttttaaacttttatgatatggacttcttaatttttctggaaaatgaggtttcgctatatgattgcctttgtgttacttccagaatgccagtaaaacagttttttcctgttca

SEQ ID NO: 253110 - DNA, 533 bp, Homo sapiens
ccattattatcttttaaatgaaaaaatgacaaaacagtattataataaacatggtagtctcatataaaagcttgatcttgtctgagtgtcccgggagctgcatgcgtagcccttttggctgtgaatgagtgcgtgaggccaagacccctaagacccacttcctcagtcgcccccactccctatggcctggaatggaggtgatgtcttttccacagtgacctggaggggccctgaccgagactggactctgaagatgggtggcctggccagtcccgaacagtgtccaggcatttggtccatagtcccctgtttgttgccatcctcagctacctggacagcctggatcggattggggccgccgactaccagcccacygagcaggacatcctccgaaccagggtcaaaaccactggcatcgtagaaacccacttcacattcaagaacctccacttcaggtgaggcccagagaggcccccaggccctggcgagggctaagatgggacatgcccagcctctcagcgcattgcgtttac

SEQ ID NO: 253111 - DNA, 614 bp, Homo sapiens
tatattatcaacaggctaaaaaagaaaagtaacatgaccgtatcagtagatgcagaaaaatcactcaacaaaatccaacacccattcatgataaaaactctcagtaaactaggaatagagggaaactttgtcactgtgataaagaatatctacaaaaaccctaccactaacatcatgcttcatggtgagaaactcaaagctttcacattaagatcaggaacaagacaaagatgtcccatctaaccactgctttccaatgtcatcctagaagtccaagctaatacaataagacaagaaaagaaaagcaaacagattgggaaggaagaaataaaactctgcagatgacatgctcacctatgtagaaaatctggaagaactgataaaaacactcttggaactaataagcaattacagcaaagttgtgagatacaaggttaacatactacagtcaattgctttcctatatacagaaacgagcaagtggaatttgaaattaaaagcgcagtatgctttatattagcgcccacaaaacaaaataggacaaaatacatataagttctatatgagraaaattacaaaatcttgataaatgatatcaacgaagaatgaaataa

SEQ ID NO: 253112 - DNA, 479 bp, Homo sapiens
cctccctaagcctcagtctccttatttgtaaaatgaggataactgggttattcattcctatcatgaggacttcatgagaaaatatataaaaatgtccagcacaaagttggtgttttgtcaagaggaactgttgttactgttcagtaacacrtgaaatgtttggaaaacctgaaagggagtgttgggcatttgacagttatgggtagtggcacaccacccagagcagaaaaccccttgcccatggttctgtcatagtgaggggcaacagggcctgatgatggtggatatattcctagagtcctggaacttgccattcaggaagagccctgttccccagcagcttccctgtggggtggtgtcagaagcaggcctagctgttctcccacaaatcggtctggacagacttgcagcctctgggcagcccctgcctgttacagagcgcttcccaagattgaaaggtgctgagaaggcaggggaga

SEQ ID NO: 253113 - DNA, 551 bp, Homo sapiens
ccacattcattttgtcatattttatacttctatattaaataattaagtgctcaagttttttagattcatgttcttcattgttttttatttacctttattaggcgaattttatttttaagaagagtttatattattgttgttgttgttattttttgagatggggtcttgctatgttgcccaggctgatctctaacttctggcctcaagcaatcctcccgcctcagccttctgagtagctgggactccagccacaaaccactatgcccagcttgtttttaagaagacttttagaagatcgttagatgctctattctaatttcttgcgcatgcctaagaatgtctattacctttatactcaaggtgcactgtgaaggcatagaaaataaaataaaaataaacacacaagaataaatgaataaatgaaaggacacattagctggrtataaaatttgaggaatcacactttctttccctcaaaatgtgttagacctttgtccattgtctcacagtactggatactgtcctttaactgcacagttgttatattttgt

SEQ ID NO: 253114 - DNA, 460 bp, Homo sapiens
ccagcttgtttttaagaagacttttagaagatcgttagatgctctattctaatttcttgcgcatgcctaagaatgtctattacctttatactcaaggtgcactgtgaaggcatagaaaataaaataaaaataaacacacaagaataaatgaataaatgaaaggacacattagctgggtataaaatttgaggaatcacactttctttccctcaaaatgtgttagacctttgtccattgtctcacagtactggatactgtcctttaactgcacagttgttatattttgtttgattaatacatggactcataggtgtcatactccgagtttgagaatatttcagtgttgcaattatattcaaacatgaacctgactagacaktatattctatgaaacatacttccttgttctttagaaccttgtaaatatggctttcttgtcttttggatgttatggaaaaga

SEQ ID NO: 253115 - DNA, 569 bp, Homo sapiens
actcatggaagagtgtagaactcacacctcacagttattccacctcaggggaaagggagctggtgtattttatttacacactaaccctgctgtgcatttggacacctgctcccaggtgttaattccctcttacttcctgcctaccgcaggcacaggcagtgcagcagcctcagaaggtcaaagctctcaatgaatgagactccagaagttggaagttgggtttctgtgacctgaartgatcaaatccagaggaacattttaccattttttcccctatgctggggcacactatgtgattgtgaatttcaggcatcttgcgtctgggtagagcaggcctgggaggcaggaagatcttctcagggctgctcagatagttccatttggaactatcctgcttgataacaagtagagaccttgaccattgatcccttctaattgatatggttataaaatccctttaaatccaatgaaaaagtcaggggaaatatcttgggaggcctgaaaaatggtgaaggggtgctattttggtcaataaaactgggaaaaccatggatgctctctctctctcc

SEQ ID NO: 253116 - DNA, 599 bp, Homo sapiens
gacatactgaataattcctccaaacagaccagagaaaacacaaaaagttaattttaaatggaaaagctcatggagtccctggatgtggtgagttccttcttataaaaactaacctttttattttgagataattgttgattcacacgcagttgaagacacaatacagaggtaaatgtatatgtatcatttgccatttcctctgtattagtccattttcatactgcgataaagaactgcctgagactaggtaatttataaaggaaagaggttgtctttttgttgttgtttttttttctgagatggatggagtctcattatgtcgcccaggctgaagtgcagtagcactatcttggctgactgcaacctccacctcctgggttcaagcaattctcctgcctcagcctcccaagtagctgggattacaggcacatgccaacacaccagctcatttttgtaawttttttttaagtagagatggggtttcaccatgttggccaggctggtctcgaactcctggcctcaagtgatctgcccgccttggccctgcaaagtgctgggattacaggtgtgagccaccacgcccagccaggaaagaggtt

SEQ ID NO: 253117 - DNA, 574 bp, Homo sapiens
tgcagttgtagggtggtgtaattgcttgttgttgttgttgtttttatgaaactcccaaattgttttctaaagtagctgtgtcattgtacattctcactagcaatgtataagtcacttgatttttctgcatctgatatagtttggatatgtgtccttgaccaaatctcatgttgaaatgtaattcccaatgttggaggtggggcctgggtgcagctaattggatcatgagggcagtttctcatgaatgctttagcaccatccactttgtgctgtcctcacaacagtgagttctcgtgagatctggccatttaaaagtgagtggcacctccctgccactttcttgctcctcctctggctacgtgatacacctactctcccttcgccttccaacgtgattgtaagtttcctgaggcctctccagaagcccagcagatgccagcatcatgcttcctgtacaggmtgcagaactgtgagccaattgcctctcttctctttataaattacctagtctcaggtatttctttacagcaatgcaagaacaaactaatacagcaaccttgccagaatttggcat

SEQ ID NO: 253118 - DNA, 393 bp, Homo sapiens
gacatatacaactaggatttacttctgttattttcccattagttccttttttattgcctggttcaattascctttgccaaatggcagattctgggaagtcaccttatccacaggtccctaacctttcatgaggagaaatcatcattaatttcccattcaggggactgagaggagatgtgtcagtccaaacctcagcagagagggacagttagctcctggtctgacagggggaagactctgccccgagcaagacatatttaaccactatgcagacacaggaattttaaagacctccaaagagggagatacagcaaactcctctaataacaattttgagcaaatgctttcaggttttgccgaaagaaaaaaaagaaacccatctatctaacataa

SEQ ID NO: 253119 - DNA, 559 bp, Homo sapiens
aaaccactgcagaacgtgtaggttgatttacaaagaaactcttcaaaggtgcaaactcttgaaaaactccattgatggcaagcagcaaaaagataaaaagtccayactgccacactaaagtattttttaatattcaacatcaacttcatcacaagaatattgtggcttgattgctctaatggagtatacacaaatatttgtaaatttaaaccactacaatttttaattgatttaacattgcagcaagtgggaggaagctgtgaattatatgaacaccaaaacaaattccaaacctatttctgtctcataagtttcttaattttatattgacattgctttttaccatgaatttgtgcttcaccaaagtttgggtgggtgttatcaccacaaaatttagtaacttcattttcaatgttaaactaacaagttcattaaaaaatggagtattactagtattaacaataagtcagatgtttcaccttctttagaatgaactttcagaaattttaataatttgatttcctgaagtggaagtgaaaatttgaaccaattattaaaa

SEQ ID NO: 253120 - DNA, 559 bp, Homo sapiens
aaaccactgcagaacgtgtaggttgatttacaaagaaactcttcaaaggtgcaaactcttgaaaaactccattgatggcaagcagcaaaaagataaaaagtccacactgccacactaaagtattttttaatattcaacatcaacttcatcacaagaatattgtggcttgattgctctaatggagtatacacaaatatttgtaaatttaaaccactacaatttttaattgatttaacattgcagcaagtgggaggaagctgtgaattayatgaacaccaaaacaaattccaaacctatttctgtctcataagtttcttaattttatattgacattgctttttaccatgaatttgtgcttcaccaaagtttgggtgggtgttatcaccacaaaatttagtaacttcattttcaatgttaaactaacaagttcattaaaaaatggagtattactagtattaacaataagtcagatgtttcaccttctttagaatgaactttcagaaattttaataatttgatttcctgaagtggaagtgaaaatttgaaccaattattaaaa

SEQ ID NO: 253121 - DNA, 561 bp, Homo sapiens
tatgacgtttaattaacagaggatgcaggaacccttacagtagagagttctgatagacaycatcttcaccaaatgatcaaacttggtagtaaagagaggatgcagatacccttacagtagagttttcatagacaccatcttcaccaaatgatcaaacttagtattatcaatgaagatacaaattgacattcaatgtctctttttttgttgagacaaagcctcgctctgtcacccaggctaaagtgcagtggcgcaatcttggctcactgcaacctctgcctcctgggttcaagagattctcgtgcctcagcctccccagtagctgggattacaggcacacaccactacgcctgactttttagtagagacaaggttttgccatgttggccaggctggtcttgaactcctgacttcaggtgatacgcctgcctcagcctcccaaagtgctgggattacaggtgtgagccactgagccaggctgacattcagtgtctcttgatgtgatgtactggtgagtggacgtcacctaggtaggtagcgttctgaccaaaaatgtttaat

SEQ ID NO: 253122 - DNA, 561 bp, Homo sapiens
tatgacgtttaattaacagaggatgcaggaacccttacagtagagagttctgatagacatcatcttcaccaaatgatcaaacttggtagtaaagagaggatgcagatacccttacagtagagttttcatagacaccatcttcaccaaatgatcaaacttagtattatcaatgaagatacaaattgacattcaatgtctctttttttgttgagacaaagcctcgctctgtcacccagkctaaagtgcagtggcgcaatcttggctcactgcaacctctgcctcctgggttcaagagattctcgtgcctcagcctccccagtagctgggattacaggcacacaccactacgcctgactttttagtagagacaaggttttgccatgttggccaggctggtcttgaactcctgacttcaggtgatacgcctgcctcagcctcccaaagtgctgggattacaggtgtgagccactgagccaggctgacattcagtgtctcttgatgtgatgtactggtgagtggacgtcacctaggtaggtagcgttctgaccaaaaatgtttaat

SEQ ID NO: 253123 - DNA, 565 bp, Homo sapiens
tcataataaagaaaggaaaagaaaaataaatagaacaagaagaaaaagatagaaataagaaattctaccaagcacagtggctcacrcctgaaatcccaacactttgggaggccaaggtgggtggatcaccaggtcaggagttggaggccaacctggccaacatggtgaagactgtctctactaaaaatacaaaaattagccgagcgtggtggcgggtgcctgtaatcccagctactcaagaggctgaggcgggggaatcacttgaacctgggaggaagaggttgcagtgagccgagatcttgccattgcacttcagcctgggcaacaagggcaaaactccatctcaaaaaaaaagaaagaaataaaaaagaaattcctaaaacagagggaatctataggtcacctacaaagaaatgagaatcaaatggttcagtagccaaatgaagaagaaggctggatgacaatgtaccaacaccttcagtatttgcagagaaaatgattttttttaaagcttttttgtttttaaatttttttaagagacagggtctcactatgttgcccaggc

SEQ ID NO: 253124 - DNA, 558 bp, Homo sapiens
tgctggggtgcccatcttggtgtcatactttccaaactgctgcytcttcttactttatcccatttgatggtatattagcctgatgatatccttgtaacatgcatagggtaaacgcttaaaatgtcatccccactttacagaggtggacactaaggcacaaaaacattaagttattaccaaagtaattaccagtagccaagccagggctggaaccctgggccgtttaaacacgatctgctcctgactcccctacctccaaggcatcccctttcccacttctttgagacacctgttactacccacctccccttacaaagcctggctccaagaaaagaagcagataccctacagcttagagtgactttatattcaatagtcatcttttcgagggatatttgcacagtgaacctctgtctagtgggcagacaggtagtttttggagctgacgtgaaatcctcaggtaggtggagtccaggtgtatttattagtcggggtcctgtaggaaacagaaccctactccgttcagctgaagagaccttactgatgggactgtttaca

SEQ ID NO: 253125 - DNA, 506 bp, Homo sapiens
tattataccacaggagctggagatgagaactttacccaaaacaagcccaaacttttccaaacctatagaaacttattcacaaaataaatgagtgtaactgagtctgtgagtttcaggggatgattgtatagcaaggagttctctgaatcgaaatatgccaatttgaagccaaaatgtgtatcataaaagctcaacattaactgtagcagttatttaggacttagacccacacatgatttttaggggcaggagaattttgttgctgtcattgtttagaattgccagcacccagtaacaatttttaaaagaccaacttttggttgattttattattgttttaaaggtctttayggactttgcaattctaaattatttcctacaccgtaggtagaacctcccactgccctgctcttggtacaccattgagaagtgacaattcctttggcgacagctgtcctagtactgtggactttctctgtaaggaaaggcataggaggggttactac

SEQ ID NO: 253126 - DNA, 501 bp, Homo sapiens
ccttacaagagggaggcagaaggagattctactacagaagagagaaagcartgtgacaacctcagcagagagagacttgaagatgctatgctgtggactttgaagatggaggagagggcctaggagccaaggaatgcaaggaatgaagctctaaaaactggagaattctccccttaagcctctagagaaaatacagccctgctgagtgagacccattttggacttctggcctctggaactataagagaataaatttgtgttgttttaagccacaaagtttgtggcaatatatcacaatagcctatgaaactaatacagctaagtcaacaaaggagataaagtggaattataaaatattcgaatggatccaaaagaaggcagaaaaagggaaatataaacaaaaagaacaaatagaagcaaggcaataaagaaaaaatagataagttggacttattaaaaacttttgtgcttcatagaacaccatcaagaaagtgaaaagac

SEQ ID NO: 253127 - DNA, 501 bp, Homo sapiens
ccttacaagagggaggcagaaggagattctactacagaagagagaaagcaatgtgacaacctcagcagagagagacttgaagatgctatgctgtggactttgaagatggaggagagggcctaggagccaaggaatgcaaggaatgaagctctaaaaactggagaattctccccttaagcctctagagaaaatacagccctgctgagtgagacccattttggacttctggcctctggaactataagagaataaatttgtgttgttttaagccacaaagtttgtggcaatatatcacaatagcctatgaaactaatacagctaagtcaacaaaggagataaagtggaattataaaatattcgaatggatccaaaagaaggcagaaaaaggraaatataaacaaaaagaacaaatagaagcaaggcaataaagaaaaaatagataagttggacttattaaaaacttttgtgcttcatagaacaccatcaagaaagtgaaaagac

SEQ ID NO: 253128 - DNA, 669 bp, Homo sapiens
ttttcaacaaattagtgaaattttcagccattatatctgaataattttttctactcctttctctttcttttctctctctgttactcccattacctgtatgttggtacacttagtggtrttccacatttctccgagactgttaatttttcttggttctcttttctctctgcccctcaatctacataatctctatcaatctacaagtttactgatgctttattctactggcttaaatctgctgtcaatctcctgtggtgactttttcattttagtcatcatattgaaaagattccagattttctatgttttaaaaaatgaatttctacctctttgttgattttctttacttgatgagacattattattattactttaattctttaaacatggtttcctttggttctttgaatagctcctttgaagacttcgtctgctaagtccaccatctgctgtccctcaaaggcagtttattttgccttccctgggtggatcatggtttcttatttctttgcctatctcataatttttgttggaagctgtatattttaggtgatataggaattcttgatattggtccctcccatccctttcttgggcttgtcattgtttttgcttgttacttgtttagtgacttggctggactagatcagtaaactagatctgttcccc

SEQ ID NO: 253129 - DNA, 669 bp, Homo sapiens
ttttcaacaaattagtgaaattttcagccattatatctgaataattttttctactcctttctctttcttttctctctctgttactcccattacctgtatgttggtacacttagtggtattccacatttctccgagactgttaatttttcttggttctcttttctctctgcycctcaatctacataatctctatcaatctacaagtttactgatgctttattctactggcttaaatctgctgtcaatctcctgtggtgactttttcattttagtcatcatattgaaaagattccagattttctatgttttaaaaaatgaatttctacctctttgttgattttctttacttgatgagacattattattattactttaattctttaaacatggtttcctttggttctttgaatagctcctttgaagacttcgtctgctaagtccaccatctgctgtccctcaaaggcagtttattttgccttccctgggtggatcatggtttcttatttctttgcctatctcataatttttgttggaagctgtatattttaggtgatataggaattcttgatattggtccctcccatccctttcttgggcttgtcattgtttttgcttgttacttgtttagtgacttggctggactagatcagtaaactagatctgttcccc

SEQ ID NO: 253130 - DNA, 635 bp, Homo sapiens
aatttgattctcggcttggtcattgttggtgtaaagcagtgctactaatttgtgtacattaattttgtacctgaaactttactgaattcatttattagttccaggagctttttaaatgagtctttagggttttctaggtatataatcatatgatcagcaaacagtgacagtttgacttccactttactgatttaaagtggagagaaataaagaaataaatatctcctttaaagaaataaagagcatctcttgtctgattgctctgcctagaacttccagtactgtgttgaatagaagtggtgaaagtgtgcatccttgtcttgttccagttctcagaggtaatgctctcaatttttcccattaagtataatgttggctatgggtttagaaaattcattttcaactgcatgaacgaatctgtaggatattatgctaaatgaaataagccagacacagagtgacaaatgctgagtgatcttgttgatatgtggaatctaaaaaaatcgaactcaggagcagagaacacaatggtggytgccaggggctgggggtggggacctggggagatgttgctcaaagagtacaaaaatttgagttaggtaggatgaatacctggagatctattgtacaatatg

SEQ ID NO: 253131 - DNA, 411 bp, Homo sapiens
aacaaatcctaaagctgcattaagagcttgaggatatttatgtcttctagagtgaaagagatttagaaaggtttgcaggttcaggaattaaattccaaagtccactttttccattaatttttttttctagtttttattttgaaaattttcaaattctaccaaaaarttgcaagctcatgtactgttcaactacattcactaattatcaaaattttcccccaattcctccccactctatgcatgcttatgctctcagaaacccacattttcctggagaacaatttgagactaagttgcaaatattgattcttcatctctacacacttggcatgtaactcctaaaattatgggattctcctgcataactaaatacaatgatcatactcacaaactttaacattgatacaatat

SEQ ID NO: 253132 - DNA, 595 bp, Homo sapiens
agctctgcccgtgtcttccgaagataccaagtgaaatacatgtagatgggatttacatctgaaaaaccaaggcaagaggccatgggaagggacggaggtggaacaggactggacagaagctgataaatggttgttgctgagtactgggcagataggggttggttatcctattgtctttactttcatatattttattttttctgtaataaaacaaattaaaatcacctgtcgtgacctcacaggggccagtgtgggttgtggcgtgaggcaggaagctctgcagagttccttggtcaaaaggattaattacaaaagaactccaygaacaccgagaagaagagaagggaatcctggcatttaaagccacaaagaaacttgatatggtcttgtctccttctctcaattgacagtgagaaactgaagaccagagagggtgagtggtttactcagtttggcacaactgaccccaacctagccctccatgaggactgagcgcatgagagatcctgagccacagccgcccagccctggctcctctcgaatttctgacctacaggaactgcaagaagtaatgaaagactgctgtttaaagcca

SEQ ID NO: 253133 - DNA, 595 bp, Homo sapiens
agctctgcccgtgtcttccgaagataccaagtgaaatacatgtagatgggatttacatctgaaaaaccaaggcaagaggccatgggaagggacggaggtggaacaggactggacagaagctgataaatggttgttgctgagtactgggcagataggggttggttatcctattgtctttactttcatatattttattttttctgtaataaaacaaattaaaatcacctgtcgtgacctcacaggggccagtgtgggttgtggcgtgaggcaggaagctctgcagagttccttggtcaaaaggattaattacaaaagaactccatgaacaccgagaagaagagaagggaatcctggcatttaaagccacaaagaaacttgatatggtcttgtctccttctctcaattgacagtgagaaactgaagaccagagagggtgagtggtttacycagtttggcacaactgaccccaacctagccctccatgaggactgagcgcatgagagatcctgagccacagccgcccagccctggctcctctcgaatttctgacctacaggaactgcaagaagtaatgaaagactgctgtttaaagcca

SEQ ID NO: 253134 - DNA, 552 bp, Homo sapiens
cggttcagccccggtgcgcgctggaccccgccttccccgcccgggcggggcggggggaaacgckccctgggccggggccttccccgacgcgcacagccctgtagcaaatcgcaagtgcggcggcctcccggtcgtgaccatcgcaggcacagccggctcgactccggtcctcgcggccgggccggctaagttcccgcgagggaccgcctacccactctccccgccccgggaagaactgcgccgctcccgggatttttcggactcgcccagcagcttgcgagcgggcgggcagccgccggggcagagcgcaggcggaaaacgaaagcgcagcacgagtcgcggccgctttgtctcgggcgccgcgggcctgacgggggcgagtgagaacccgctggcccagaggcgacccagaccgcacaggcccctgaataagcggcgtgctcagtcactcacccgtgcgcgcacaccctcgcgctcttgtccacacattagcacacacatacatgtcttgatgcacatgcaaacccggtaaattacgcaaacagacgtgta

SEQ ID NO: 253135 - DNA, 605 bp, Homo sapiens
ggacgtgaaatcttgtgaaggtgccctcttcctctccacgtttccttcctgcttctgaaggctccttccgtgcaggggcgcccccacccctttactcactcagctctggagaggagtgggtgggagggctgatctgattcataaacaacagtagaattaatgggatattgcgacccagcctggctcttcttccccctggcagtggtgaaattttatgttgttcctttgtgcactggctttyagaaggggctgcccacatccaccctaatgaagtgtgggggcttcagtggccccaggctgctgtagctgcacgggtgagtctgttgctcactgtcaatctaagccaccggctcccagctgagctttcatagcaaaagttttggcttctctttgcccaagtctgtcattcctcaagcggtttagaattcaggcaacctcctggttttactggagagaacctcactgaagggcagcggggggaaatgaacttccccaagatacaaaatcttacagtcagggccgacggggggttcccagtgcccagtctggggtgcagcgggtttcagcttacctcatatgaaaatgctaattggatgggaattctc

SEQ ID NO: 253136 - DNA, 605 bp, Homo sapiens
ggacgtgaaatcttgtgaaggtgccctcttcctctccacgtttccttcctgcttctgaaggctccttccgtgcaggggcgcccccacccctttactcactcagctctggagaggagtgggtgggagggctgatctgattcataaacaacagtagaattaatgggatattgcgacccagcctggctcttcttccccctggcagtggtgaaattttatgttgttcctttgtgcactggctttcagaaggggctgcccacatccaccctaatgaagtgtgggggcttcagtggccccaggctgctgtagctgcacgggtgagtctgttgctcactgtcaatctaagccaccggctcccagctgagctttcatagcaaaagttttggcttctctttgcccaagtctgtcattcctcaagcggttyagaattcaggcaacctcctggttttactggagagaacctcactgaagggcagcggggggaaatgaacttccccaagatacaaaatcttacagtcagggccgacggggggttcccagtgcccagtctggggtgcagcgggtttcagcttacctcatatgaaaatgctaattggatgggaattctc

SEQ ID NO: 253137 - DNA, 552 bp, Homo sapiens
cggttcagccccggtgcgcgctggaccccgccttccccgcccgggcggggcggggggaaacgctccctgggccggggccttccccgacgcgcacagccctgtagcaaatcgcaagtgcggcggcctcccggtcgtgaccatcgcaggcacagccggctcgactccggtcctcgcggccgggccggctaagttcccgcgagggaccgcctacccactctccccgccccgggaagaactgcgccgctcccgggatttttcggactcgcccagcagcttgcgagcgggcgggcagccgccggggcagagcgcaggcggaaaacgaaagcgcagcacgagtcgcggccgctttgtctcgggcgccgcgggcctgacgggggcgagtgagaacccgctggcccagaggcgacccagaccgcacaggcccctgaayaagcggcgtgctcagtcactcacccgtgcgcgcacaccctcgcgctcttgtccacacattagcacacacatacatgtcttgatgcacatgcaaacccggtaaattacgcaaacagacgtgta

SEQ ID NO: 253138 - DNA, 582 bp, Homo sapiens
aagggagatgcagcagcctcgcctcctgattctgccccaggccccccgcagcctgcaggcccagctctggaaaaagctggagtgagcttgccagggccagtccagagtcagctgtcagcagccccaggaggcaggagccaggcctggaggccttaggcagcctctctgcgggggactccccggctccggggcctgttctctggagaagcttcttctcacccctgctgctggcccggcgctggccctgcactggcctctccttcaaccccgccggcagtcgtagcctctgaggttgggggtggtggtrgctgccctggcggtgacggccatgggcgttaggggccctccacttggtctccctcaccacttcccctatggctctggaagccctgggcccctgcacggtgtccgaggctggacaggcacgcagcaggcaggcaggcaggcaggcaggcaggccgtggcaagtgttctggagtcttttccttgggtgcgcagctggaaggccgggactcggggaggagagcggggaggcggccgtgctctggagccaggctgacaggccctgtgcgccccacggga

SEQ ID NO: 253139 - DNA, 583 bp, Homo sapiens
tgggattttgcttgggacgtgctgggtgttggtgattgtgaaaagtgcagctgtggtggggtgggagtaggggacaaagaggaaggtgctgtcagcaggtgagggtgtgaggacaggggttgcgggaggtgtccagggccctgcactgggcctggccaagcctagccagtggagaagggacaatgttcaccccttcccccatgtcttgcacggtcccctcttggccttgggctgagttgaacacacaggcagcacagggaagtacayggggtggactggcctctggcactgtctgaaccctaacaccagtggtgaatttgtttccatggaaacatggcactgtgtccagacaactgaattctgcctcaccttgttcataaactagggattgtctgatattggtttgtgtggttaggcttctagagcttattagaatagacattgcagattattattttgtaaagggtgacattgactaaaatagaataatgtcttcatcggtgaacaagggtgtttactgaatgtggagaagtcagtgaaatctccacagtgacagatgcactctggagatggggctgaggct

SEQ ID NO: 253140 - DNA, 436 bp, Homo sapiens
gttttgtgacaccatctagacaataaaacttccatgcratcctccagcctttttgtctttcatgttggctgtattctgactcactgggccatatgtgcacagcttttattacatgagacctttagatttggagctattctttgtatttttacagaaatcagattgtattgaataatagattgtcccttctaagccttgtaggtgtttaacaagcagaaaagaaggagttaaaaggttttggggaaaggagaccaattcttatgttaaagtataaggcacagagaatatctgggggtgtgtattgtcttgggggtataccctgagtgttgttggagtgtgcttagcacagacagctaaatctgcagggtgaagatggcaaccagagtgtagagagccttgaatggcaaaagaagaaagactttgggggacctaacca

SEQ ID NO: 253141 - DNA, 449 bp, Homo sapiens
gttgtctccatagttagatcctattccacttggtattgccaacaacataacttcttttcctacaaatatgctcatgatctcactggagagtgagatgtaatcttaagagtttgatgtaaaagagttgagtagtgttttaacatcctaccataaagagcccaaaactggatattgggcatcccaacctttagtagattttgttcattttggccaaggggattatcttgatttatccctctcttttttttaatagatttcaggcccccatcatcttgttagccttccaatttctccacagtccagtggcttctccttatttttttcctcggtccccatctgctrtggactaaattgtgccccccttccaattcacatgttgaaattctgacacctaatgtaactatatttgaagacgagggctctgaggtataattaagtttagatgaggt

SEQ ID NO: 253142 - DNA, 523 bp, Homo sapiens
tgttttaacatcctaccataaagagcccaaaactggatattgggcatcccaacctttagtagattttgttcattttggccaaggggattatcttgatttatccctctcttttttttaatagatttcaggcccccatcatcttgttagccttccaatttctccacagtccagtggcttctccttatttttttcctcggtccccatctgctgtggactaaattgtgccccccttccaattcacatgttgaaattctgacacctaatgtaactatatttgaagacgagggctctgaggtataattaagtttagatgaggtaataagggtgggggtctcatgcaggggttagtgcccttataagaaaagacaccagagagcactgttgctcactcactctctctttctttctctctctctctccccatatamacacactgaggcaagtctgtgtgcacatgcagtgagatggtggccatctacaagtcaggaagagggctctctccagaacccaccatgatggtacc

SEQ ID NO: 253143 - DNA, 557 bp, Homo sapiens
cttccttattgtcaacagggaattcttccatgttaaagcaagaatagtttcaatgagatattctgagaatcaaataagccccttcttgttttcagaattcattctaaaatgtctttaagaaaagcttggtatagatttttttttcaagatactgcattgaactttaaccaaaacgtttccaacttaaaaaaataaattatgagtaaggtcataaatctcattaaaatctaatattcagtaaagctgcctagtgtgtatactatggaaaattggattttactgtaactggagccttaygtataatattgcaagttaattacagaagttagtttttttcacatgtaataatagtttatacagactcagtctctgtgctaccatcaggacgtaagtgctcttaagagactaaatttaataatggttcacctattcaggttcacaagactaaacatttcctgagtaaatagtaatttacatctttttggtacagataaaattaacagattaataaagtcttaacacacacacacacacacacacacacacacacacagtta

SEQ ID NO: 253144 - DNA, 557 bp, Homo sapiens
cttccttattgtcaacagggaattcttccatgttaaagcaagaatagtttcaatgagatattctgagaatcaaataagccccttcttgttttcagaattcattctaaaatgtctttaagaaaagcttggtatagatttttttttcaagatactgcattgaactttaaccaaaacgtttccaacttaaaaaaataaattatgagtaaggtcataaatctcattaaaatctaatattcagtaaagctgcctagtgtgtatactatggaaaattggattttactgtaactggagccttacgtataatattgcaagttaattacagaagttagtttttttcacatgtaataatagtttatacagactcagtctctgtgctaccatcaggacgtaagtgctcttaagagactaaatttaataayggttcacctattcaggttcacaagactaaacatttcctgagtaaatagtaatttacatctttttggtacagataaaattaacagattaataaagtcttaacacacacacacacacacacacacacacacacacagtta

SEQ ID NO: 253145 - DNA, 579 bp, Homo sapiens
aaaagaaaaggatcatattttatctttttctctttggaaaacagataacacacattacctacaaagaaaataacatacatatgtaatttgattacactatgactttttaatataaagtttttataatggattctgtaagaaaatacagagatgagaaattaatgtgaactgacatttccatatattcaaatggggacttaaagcaagtagaattgcttcagtaaagatgccatgagatggcacttgcctaccttttcatcctcatctcctgccctgacttgcactctgtgctgttgtcattagaaaacttttagagttctctgaagttgccatatttttaataccatgaagsctttgtaaatgtctcttcctctaatggaatacatgctcttagtcatatattagacatactcctacacaaactccaaaaccagtttagatatctttttagttgatacagaggtatgcctcccactaaacttaagagtcatattttattcatttctatgattctaatgcccaatatattgccagggataaggtatgtatacacgtaatttaaaaatgaatgaatgaatg

SEQ ID NO: 253146 - DNA, 652 bp, Homo sapiens
ggaatatttttggagggcaaagtggccagaaagcagattagcaaccactagaggtgagccakgtgtgtgatgacatcagaagaaatccttaaaatgcattcgtcacaccgagagagccttagaaatcttgattagtaaatagacttcccacagtaaatggcatggagttatgagccattttagctgacaattaaagcaaatgatgattcccaaaagctgaagtacttagggtaacccccgcaccagccaccttggctaaaaagctctccacacaaataccagaattgtacagtcaatacagctgagaccctacttcacgtgaagaatggagcacacattttttccagatcacagacttcaatagtgggaaagaaaaaaagaagtaggagcaataaagctggacttcaaaattttgcccagagttcaccctgtttgttttcttaataatgtctgaccatttgctatttcttttccttcctgtcccaagttgggtcaatagttcttgatgattagtttttctgagaaatggcaaaaggacaaaatgacccagatgaccagagtgaggctgggcagtgagttagtggctttttgataagataaagataattacagaagcttaatgatttgttcaggttgtaaatgtgacggatga

SEQ ID NO: 253147 - DNA, 652 bp, Homo sapiens
ggaatatttttggagggcaaagtggccagaaagcagattagcaaccactagaggtgagccaggtgtgtgatgacatcagaagaaatccttaaaatgcattcgtcacacygagagagccttagaaatcttgattagtaaatagacttcccacagtaaatggcatggagttatgagccattttagctgacaattaaagcaaatgatgattcccaaaagctgaagtacttagggtaacccccgcaccagccaccttggctaaaaagctctccacacaaataccagaattgtacagtcaatacagctgagaccctacttcacgtgaagaatggagcacacattttttccagatcacagacttcaatagtgggaaagaaaaaaagaagtaggagcaataaagctggacttcaaaattttgcccagagttcaccctgtttgttttcttaataatgtctgaccatttgctatttcttttccttcctgtcccaagttgggtcaatagttcttgatgattagtttttctgagaaatggcaaaaggacaaaatgacccagatgaccagagtgaggctgggcagtgagttagtggctttttgataagataaagataattacagaagcttaatgatttgttcaggttgtaaatgtgacggatga

SEQ ID NO: 253148 - DNA, 652 bp, Homo sapiens
ggaatatttttggagggcaaagtggccagaaagcagattagcaaccactagaggtgagccaggtgtgtgatgacatcagaagaaatccttaaaatgcattcgtcacaccgagagagccttagaaatcttgattagtaaatagacttcccacagtaaatggcatggagttatgagccattttagctgacaattaaagcaaatgatgattcccaaaagctgaagtacttagggtaacccccgcaccagccaccttggctaaaaagctctccacacaaataccagaattgtacagtcaatacagctgagaccctacttcacgtgaagaatggagcacacattttttccagatcacagacttcaatagtggraaagaaaaaaagaagtaggagcaataaagctggacttcaaaattttgcccagagttcaccctgtttgttttcttaataatgtctgaccatttgctatttcttttccttcctgtcccaagttgggtcaatagttcttgatgattagtttttctgagaaatggcaaaaggacaaaatgacccagatgaccagagtgaggctgggcagtgagttagtggctttttgataagataaagataattacagaagcttaatgatttgttcaggttgtaaatgtgacggatga

SEQ ID NO: 253149 - DNA, 403 bp, Homo sapiens
tttgctttgctgtgaaaattaagtgagaaaaaaagggtttactgctaaataagtgttaattctctaacmcctgctaaccatccaccctcagccttttctttcttgaatttctttcctgagtcttaaatttaaactttttctcactttttctaaactcactatcagattcctccctatactctaaattataggtgcgtaaggaggactttaagtgttacctcaggaggcaagactacatttcaaacactcttaatcttatttatgaataaataatagtgtattttctcctaaatgtttatttctgtatttctcaaaaaatgtctccacacaaatcataagagtattatgtgggaacttgtttcttttggggctcagaaactgataacccaaagcttggcatttt

SEQ ID NO: 253150 - DNA, 254 bp, Homo sapiens
ttaaattacagtccattaagaactgaagatctgaccatacctatgaagttatttctgaatagctggctgaagggaggagacagaagctgagtgcttctttgggtaccacagtggagccctttcagtggtaattagagagagatggcaatatcacttaaaggggctttgtgcacaaarggctgaactataaaagtatagtttttgcactcagcattgagttctcatgtcaaactactacttcgggtgccagtcaa

SEQ ID NO: 253151 - DNA, 432 bp, Homo sapiens
accattatattgtcccaatcacatttcttcatgggtgtccaccgttcattgaatctaagcataaacatgaatagtttctctgggmctttgagttttcatttcagaaggctcctgagtcatttaaaattctatggattttttgttggttatttacttatttatttattcatatagagatggggtctcgctttgttgcccagtctggtgcagaactcctgagctcaagtcatcctcccacctcagcttcccaaagtgttgagattacacacatgaaccaccattccctgctgtaaaacttttattaaatagatttgatacgcttatctcttggtaacctgtcttttgttataagagtatcagccatgatgcttctgataaatgaagaaaagtatcacatctttctggccctacacttaaaaaaaaaagaaaaaa

SEQ ID NO: 253152 - DNA, 628 bp, Homo sapiens
gtgtgaaacagaacatatgctataaaatttcacagttcacaaacagtaatggcaactttgtagaatgagcaggaaaaaaaagtgctttctaatacagaggtcagatagaattgagtcttcagaaactggaaagmtgttttctgacactactcaatgggaattatatatcacttgacataatatttaacctgaaagtaaccacagggaaagaaatcagacaaatctggattgtgaggcattctacaagaaaactggcctaaactatttcaaattgtcaatgccacaaggaaaaagaaaaaagatggaagagaggtattttgacttaaaatacaaccaaatagaatgtgtgatttttaattgaattctggattggagagaaaaacatttttggacaattaaacaaatctgaatataaataggatattaaataataaaactgaatcagtgttagatttgttcgttatagtattagatttgattcttctaaaatgagagctggagacaacagcttgtatgtgcgtaatttattttgaaggtgattccagaaagaagaattgcagtgcggagagtgagacagggaagcagattccttctataaatggtacagctttagcagaactgtttaagc

SEQ ID NO: 253153 - DNA, 628 bp, Homo sapiens
gtgtgaaacagaacatatgctataaaatttcacagttcacaaacagtaatggcaactttgtagaatgagcaggaaaaaaaagtgctttctaatacagaggtcagatagaattgagtcttcagaaactggaaagatgttttctgacactactcaatgggaattatatatcacttgacataatatttaacctgaaagtaaccacagggaaagaaatcagacaaatctggattgtgaggcattctacaagaaaactggcctaaactatttcaaattgtcaatgccacaaggaaaaagaaaaaagatggaagagaggtrttttgacttaaaatacaaccaaatagaatgtgtgatttttaattgaattctggattggagagaaaaacatttttggacaattaaacaaatctgaatataaataggatattaaataataaaactgaatcagtgttagatttgttcgttatagtattagatttgattcttctaaaatgagagctggagacaacagcttgtatgtgcgtaatttattttgaaggtgattccagaaagaagaattgcagtgcggagagtgagacagggaagcagattccttctataaatggtacagctttagcagaactgtttaagc

SEQ ID NO: 253154 - DNA, 420 bp, Homo sapiens
gtaaagcaattcacacttttttggtggtggtgtttcccacacatataaaagatatgtctataccatactrtagtctattgaggttcttgcctcaatgtcgatggctgctgactgatcagaataatgggtgtggaaggttggggtggctgtagcaaagacaacaatgaagtatgccacatcgattgatccttcctttcacaaaagatttctctgtagcatgtgatgctgtttgatagcagtttacaagccacaatagaaattctctcaaaattggcgtcagtactctcaaaccctgccactactttattaattaagtcaatgtaatattctctgtattattcctctgttggcatttcaacaatgttcacagcatcgtcaccaggagtagattcaacctcaataaaccactttcattgttca

SEQ ID NO: 253155 - DNA, 643 bp, Homo sapiens
ctggtcagtggcatttgaggataacaattgataataactttgttttcctaatagtgaaacataattcatgtatgcttaatttattcaaatcctcttggataagaaaggtaaggtttacaatatactaggcttagtgtgaaatcggacttttgtagattgttttacgatattttaaaatggacttacgcttctttctttcacctactgagcstacttccaaatgatgaaagatgaggtaaaggctagtatatcaccatggaagacaagcttccaagggtccatgatagacaggctgattttggagatcaaaggaatggccttcaatctcatagctacagttgaagggatccggtgaggtcctttaaccccaacaaatgtcaccagagattaacctgcttgaactgaaatgcggatgtatatattcaatgtttgttcaagtaatacgtgttgagcaccacacttatcccttataatgaagcacaagatactctcttattatgtggtatatctgatagtcatctaagtctttctccacaggaaaaatatatgagaaggaaaattattagcattgtttggtctttactaaatgtgtatgtgaaaagcaattatataattgtgacatttaaagagaacaggtcatgat

SEQ ID NO: 253156 - DNA, 472 bp, Homo sapiens
tcatgtggtatatatgtactgatgtttttgagatggaagaagccagactcaacacaggcacaaaacaggaataaaatttagtcacataggaagaagaaaagtaaataatgaagaaagtacctgccaaaatayaaattcagaaatatataatgagtatttatttttattaaatgagaaaccgatgtatcctagacatctgaaaacctgaatttaaatgccaggtaataaattaaaaagaaatttaatcccaattgatataagtacttagagtaaattttcacttttcattacatataaatgtttaggcattaatttttgaattactattttcctgtgaaaagggacaaatacattctatcaaagataaagtagcaaaaaccctgagttgaatgaactcaattgtcattctactttaatcaactagaaaagtgtttctcaaactttagcatgcataggatgacacaggaatctt

SEQ ID NO: 253157 - DNA, 472 bp, Homo sapiens
tcatgtggtatatatgtactgatgtttttgagatggaagaagccagactcaacacaggcacaaaacaggaataaaatttagtcacataggaagaagaaaagtaaataatgaagaaagtacctgccaaaatacaaattcagaaatatataatgagtatttatttttattaaatgagaaaccgatgtatcctagacatctgaaaacctgaatttaaatgccaggtaataaattaaaaagaaatttaatcccaattgatataagtacttagagtaaattttcacttttcattacatataaatgtttaggcattaatttttgaattactattttcctgtgaaaagggacaaatacattctmtcaaagataaagtagcaaaaaccctgagttgaatgaactcaattgtcattctactttaatcaactagaaaagtgtttctcaaactttagcatgcataggatgacacaggaatctt

SEQ ID NO: 253158 - DNA, 613 bp, Homo sapiens
tgaaggatttttgtgatggctgttctaatatgttttccagataattctaatattttgttcatcttggtgttagcctctagagattgtttttcattcagtttgagatctttctggtttttggaatgatgagtgattttctattgaatcactcattgctgagttattgtgttattagactctggattgtatttaaaytttccattttagctggctttctccaatatcactctgatggtaccatcagagaaagaagtgagtgcttccttgttacttccaggtataaatagaagtccaggtttcctataaagcatctgttgacaccaatgagagggtttctcagtaatgctgatcataggtgatataggacttcacagacacacacttggcttgtaaggcatagggtatcctcattcgtgcttcaattagtctctatcgatgccacagggcgaggtgtggcctcattatctctgggcagtgattgaaaatcctgattttccataaggtttcttctaccaccgtcccagtagggagagcaagggcaccaaatgactgtcaagtttactggaagtacaaactctctacttggtctccactgacaccacgtagggttggt

SEQ ID NO: 253159 - DNA, 613 bp, Homo sapiens
tgaaggatttttgtgatggctgttctaatatgttttccagataattctaatattttgttcatcttggtgttagcctctagagattgtttttcattcagtttgagatctttctggtttttggaatgatgagtgattttctattgaatcactcattgctgagttattgtgttattagactctggattgtatttaaattttccattttagctggctttctccaatatcactctgatggtaccatcagagaaagaagtgagtgcttccttgttayttccaggtataaatagaagtccaggtttcctataaagcatctgttgacaccaatgagagggtttctcagtaatgctgatcataggtgatataggacttcacagacacacacttggcttgtaaggcatagggtatcctcattcgtgcttcaattagtctctatcgatgccacagggcgaggtgtggcctcattatctctgggcagtgattgaaaatcctgattttccataaggtttcttctaccaccgtcccagtagggagagcaagggcaccaaatgactgtcaagtttactggaagtacaaactctctacttggtctccactgacaccacgtagggttggt

SEQ ID NO: 253160 - DNA, 643 bp, Homo sapiens
ccaataatctgtcagcagtgatcgttactgctgacagagtagaaagaagtacagtgtaaggtccctcccaattcaggcctagagagggagaaagggaaggacgtgcctttaccagtactaagtcctccagattgaatagaggtggccctagttcatggggcttgggctctgacagttgtttcagttcctgttggaaatgagtgaaaaagttatatgcttaatcaaatcagatgtttcttggtctagcaataaataattgatgagaaaaggctgtccatacatcacttcaaaggtacttaaacccagcttctaagggatgtttttaacacatagtaggccttgggaraaagagtatccggggagatgtaatccagtggtgcgatcttggctcactgcaacctctgtctcccaagttcaagtgattctcctgtctcagcctcccgagtagccgggattacagccgtgtccaccacacttggctaatatcttgagagagtttcctgaggtgtcttttgataatatcatttatcttctctacctttcctgaggattgtcgtctccaagcacaatgaagatggcattgtatgagtgcctttgagacccctgggtgacagtcatcttaaatggggggccattatcactc

SEQ ID NO: 253161 - DNA, 561 bp, Homo sapiens
gattctcctgtctcagcctcccgagtagccgggattacagccgtgtccaccacacttggctaatatcttgagagagtttcctgaggtgtcttttgataatatcatttatcttctctacctttcctgaggattgtcgtctccaagcacaatgaagatggcattgtatgagtgcctttgagacccctgggtgacagtcatcttaaatggggggccattatcactctggaggtacttagggagtccaacttataaattagtacttttatcaccttagaggctttctctgcttcagatgraagtgcttctacccagttaatgaaggtatttgcccataccaggaggtactggatgccccttatctttgacatgtgggtaaaatccatctgccattcttcccctgggtagcctcccattctttgggttttgtaggggagaagccatcaattgaggggattatttttaagggaagtctcacgaacattaatgacctgtttgaccatttttggagactttagcagatttttacctgagaacaaccttatggccaattgacatatttta

SEQ ID NO: 253162 - DNA, 561 bp, Homo sapiens
gattctcctgtctcagcctcccgagtagccgggattacagccgtgtccaccacacttggctaatatcttgagagagtttcctgaggtgtcttttgataatatcatttatcttctctacctttcctgaggattgtcgtctccaagcacaatgaagatggcattgtatgagtgcctttgagacccctgggtgacagtcatcttaaatggggggccattatcactctggaggtacttagggagtccaacttataaattagtacttttatcaccttagaggctttctctgcttcagatgaaartgcttctacccagttaatgaaggtatttgcccataccaggaggtactggatgccccttatctttgacatgtgggtaaaatccatctgccattcttcccctgggtagcctcccattctttgggttttgtaggggagaagccatcaattgaggggattatttttaagggaagtctcacgaacattaatgacctgtttgaccatttttggagactttagcagatttttacctgagaacaaccttatggccaattgacatatttta

SEQ ID NO: 253163 - DNA, 561 bp, Homo sapiens
gattctcctgtctcagcctcccgagtagccgggattacagccgtgtccaccacacttggctaatatcttgagagagtttcctgaggtgtcttttgataatatcatttatcttctctacctttcctgaggattgtcgtctccaagcacaatgaagatggcattgtatgagtgcctttgagacccctgggtgacagtcatcttaaatggggggccattatcactctggaggtacttagggagtccaacttataaattagtacttttatcaccttagaggctttctctgcttcagatgaaagtgcttctacccagttaatgaaggtatttgcccataccaggaggtactggatgccccttatctttgacatgtgggtaaaatccatctgccattcttcccctgggtagcctcccattctttgggttttgtaggggagaagccatcaattgaggggattatttttaagggaagtctcacraacattaatgacctgtttgaccatttttggagactttagcagatttttacctgagaacaaccttatggccaattgacatatttta

SEQ ID NO: 253164 - DNA, 499 bp, Homo sapiens
ctggccccaagtggctgtgcattgaacttagtttcaccagtttcctctttcttgctggtctcaaaggaaaacctgtgtgttactttcctgctactctcccccttctttgttataatgggaaaactgagaacgacaaaaacacgcttgggaaaattcattataaaatctaaaatgtgacatgttacaaagttcatcaagtactggttcctggcatataattgccaaatctattcttagaacattctagtatgatactattgtctgctgttaattctgaagctggcacctacccagcctcygtcatcactttacccttacccagatgagtgcctaatggatccaaccttcatgtgtcatccttctgttcaggccaaagagaaagatgaaaataatccagatcacaaatcaaaagtacgagcttttgagacactcaggattttctgagtctattatggggacaggggtcatttttggcatgtcataaaagaggaagtccctg

SEQ ID NO: 253165 - DNA, 563 bp, Homo sapiens
ttttttttttgttttgaacattcaaattactaaagatcttttttattaacccgttttagctttgtctagcaaatgaaytgcattttaaatcaatgtctattattgtctagtcatttttttaaaagcatgtacctatatcattcagaacatttaattactatgatatagctaaccggggttttcatattaaattgataacatttcttttctaaaacatgaaagatgctattttatttaacccatgtaagtttattgagattttcccccaggcttttaaaaacactgacaatttgtccatagaattgcatttactttattggattttgatgaagatgaatgaatagcaagaaactttgcaaacagtttaacacagtcactgaaagcaataggaattttatacgttgagaattttgctggcaacatcatcattggtggtaccaccaccatcgtcctcctccttatcatcatcatttgttattttcctttagttgtgttccatgcacacccagacacagagcaaatttcatataactacatacgttgctttgtttctcctgaaacag

SEQ ID NO: 253166 - DNA, 563 bp, Homo sapiens
ttttttttttgttttgaacattcaaattactaaagatcttttttattaacccgttttagctttgtctagcaaatgaattgcattttmaatcaatgtctattattgtctagtcatttttttaaaagcatgtacctatatcattcagaacatttaattactatgatatagctaaccggggttttcatattaaattgataacatttcttttctaaaacatgaaagatgctattttatttaacccatgtaagtttattgagattttcccccaggcttttaaaaacactgacaatttgtccatagaattgcatttactttattggattttgatgaagatgaatgaatagcaagaaactttgcaaacagtttaacacagtcactgaaagcaataggaattttatacgttgagaattttgctggcaacatcatcattggtggtaccaccaccatcgtcctcctccttatcatcatcatttgttattttcctttagttgtgttccatgcacacccagacacagagcaaatttcatataactacatacgttgctttgtttctcctgaaacag

SEQ ID NO: 253167 - DNA, 521 bp, Homo sapiens
aatggctacatagtattccacattttctctacccaattaaccactgatagamacttaggttgattctgtgacatttctattgtgaatagagctgtgataagcatatgatcgcaagtgtctttctgatataatgatttattttccttttggtagatgtccagtagtgggattgctgggttgaatgttacttctatttttagtaaacctccatactgttttccttggtggttgtactaatttacattcccaccaacagtatgtaattgtccccttttctccatatccatgtcaacatctgcagtattgtgactttttaatagtagccattctgactggtgtgagatgatatctcaatgtggttttaatttccatttctatgatgattagtgatgttgagcacttttttttttatccttactgccagtatatatgtcttttttagataagtgtctgttcatgtcctgggcccactttttaatgggattgtttgttttttacttgcagagttgtttgagttcatt

SEQ ID NO: 253168 - DNA, 534 bp, Homo sapiens
tcagacttttttccatttgtttgtgttatctatgatttcttycttcagtgtttcatagtccttatagagatctttctcctccttggttaaatgtactcctaggtaatttttgttgttgttgctattgtaaatggggtctccccaaattgccaagccattccagtcattctggaccctgagactccctgcctcagaaactgtctatcatgccacacccttcctgctcttgcaaagggaggggcacccagcttccaggacaccaggggaactcctgccacactcttccatgtgttctgacagtagaggtttatctcccacttgagatcagagcacagatctcatctttataccactggtcagtgtgcttaattcctggggaactgggaccaggctggtggattttttcctctggctctttggggtcaagcactggtttccatggtgcattgaatttcactcccgccaccaacaaaccactcttgcagggtgatggacgctatcctgtgggctgtcttcctgtgggaacagacgggc

SEQ ID NO: 253169 - DNA, 534 bp, Homo sapiens
tcagacttttttccatttgtttgtgttatctatgatttcttccttcagtgtttcatagtccttatagagatctttctcctccttggttaaatgtactcctaggtaatttttgttgttgttgctattgtaaatggggtctccccaaattgccaagccattccagtcattctggaccctgagactccctgcctcagaaactgtctatcatgccacacccttcctgctcttgcaaagggaggggcacccagcttccaggacaccaggggaactcctgccacactcttccatgtgttctgacagtagaggtttatctcccacttgagatcagagcacagatctcatctttataccactggtcagtgtgcttaattcctggggaactgggacmaggctggtggattttttcctctggctctttggggtcaagcactggtttccatggtgcattgaatttcactcccgccaccaacaaaccactcttgcagggtgatggacgctatcctgtgggctgtcttcctgtgggaacagacgggc

SEQ ID NO: 253170 - DNA, 593 bp, Homo sapiens
ggaggcaatatacaatctgttatctaatggaagagaagggattaatcaacatgagaacaaagaaaggcctcttaggtagtaaraataatgcagaagtacagttcttcctgtacagcaagctgtttaatgtgtgtagaaggcacaatgcaagaatgaattattttgcttgtggccagaaagggaaaaggataagtaagcagagtttgtattctgaaggaccttggagaatatggttaaaaaaaaaaattgctcttatcctgaggatactcttacaggtagtcaccttcagataaatgaagagttgtagttttcgactcatccccactccagtctgcattgttgagtgagctcatgttgatctgacatttatataatgacaattgagaacacagacaaggctgaaaggaatgtgtgtgtgaaaatatagtccataaggagtcactgagtcagcaatattgtgaatggcgcaaagaaggctgaaaaatactacattaatccagcaggagacataatcaatcaaggctttggttaaaaagggatgtttttagtttgtgagcttgagaacttcttgggcagagtagctgtatgttgtg

SEQ ID NO: 253171 - DNA, 593 bp, Homo sapiens
ggaggcaatatacaatctgttatctaatggaagagaagggattaatcaacatgagaacaaagaaaggcctcttaggtagtaagaataatgcagaagtacagttcttcctgtacagcaagctgtttaatgtgtgtagaaggcacaatgcaagaatgaattattttgcttgtggccagaaagggaaaaggataagtaagcagagtttgtattctgaaggaccttggagaatatggttaaaaaaaaaaattgctcttatcctgaggatactcttacaggtagtcaccttcagataaatgaagagttgtagttttcgactcatccccactccagtctgcattgttgagtgagctcatgttgatctgacatttatataatgacaattgagaacacagacaaggctgaaaggaatgtgtgtgtgaaaatatagtccataaggagtcactgagtcagcaatattgtgaatggygcaaagaaggctgaaaaatactacattaatccagcaggagacataatcaatcaaggctttggttaaaaagggatgtttttagtttgtgagcttgagaacttcttgggcagagtagctgtatgttgtg

SEQ ID NO: 253172 - DNA, 585 bp, Homo sapiens
aactgtggaagtttgaattctcagtgaatcactttgcttcctgatacatcctaaaatgaatcatggaacaaaggaggaaaaatatattctgaaccaatgggctttgaacataggttgttactaaagcaattatggagcrttacctgggaagacctatgtgaacaattacttcaaacacacatagcacttaagtaaggtaaataaaacaaaaatggagagcttggcctggcagggggatgattaaaggtcaagtgtttttaagatttttagaataggcaaaaataaatttttttcttttacaacttttttttttatgtaacagtcttccaattaaattattgttcatactatattcagatagtttgcttggcatattgtgattggcacttttggcaggggattgaagattacatctgaagcaatactagatgatatataatggagatggaatcctaagataatgcagtttaattaatggatttttcatatattgtatacacactttttaaagacagaaaataaaactgtagctattaatgccagccagattgaagttacttcaagatagaaatcaaatttgtgtgc

SEQ ID NO: 253173 - DNA, 518 bp, Homo sapiens
ccttcatttatcctgtccttgactttgttagaccatttattaaatctctgagttctttgcagctggtcatcattctgtgatctgtgttctgtttgttctgcttctgactgtctgtaaggattgctagagttccctttactaagcatttatacaccagttagagttccttggatgactatagcattgtgctctaccatacrtcaagcagataaacactggtatgatttgcgtggaagttgtgtgacattgttgaaagagccttattgcttgaagcagctatggaagagaccaatgaatcaagtgcaattaaatttaagaaacaaaggcaggtgattaccaatttatgcagagggtgaaagatattattttattatctctatatcaggctttcccccaaagtttccaatcctgtgaatcctgttctacatgaatgtatacacattgctttatattgacttttgaaggtagtattagttacatttacatattaatcaatccagatgcaatgggccactgta

SEQ ID NO: 253174 - DNA, 338 bp, Homo sapiens
tttacacattgtcttaatttgaagcatcacatgttaagaatgtttgtgtaggttcatacaagttttcctgtatgttaagcctctccctatacaggtgtttgtgataccttgagtcagatgagggasaggagaagccacaattctatgtatgcccaactctgagcagccactttgcttgtgtttaagattctgtatccttgtaacaaggtaaacaaacaagcaaacaggcaacaacaacaaaaccttggtgtatatcagttgtctcttccttgaattctataacccaccaaaaatgcttcaggaagacaaataagtaaacaggtcatctcgaaaaacta

SEQ ID NO: 253175 - DNA, 338 bp, Homo sapiens
tttacacattgtcttaatttgaagcatcacatgttaagaatgtttgtgtaggttcatacaagttttcctgtatgttaagcctctccctatacaggtgtttgtgataccttgagtcagatgagggagaggagaagccacaatkctatgtatgcccaactctgagcagccactttgcttgtgtttaagattctgtatccttgtaacaaggtaaacaaacaagcaaacaggcaacaacaacaaaaccttggtgtatatcagttgtctcttccttgaattctataacccaccaaaaatgcttcaggaagacaaataagtaaacaggtcatctcgaaaaacta

SEQ ID NO: 253176 - DNA, 551 bp, Homo sapiens
attttgggctatacaaataataaagacaatccaatttaaagagaaaacaataatgatgccccctatttagtctcatctataacagttactcagagaaacttccaaatttcagtggcttaacacaagccaagatgatttctaactcaaagtcaaagtgggtgttgctgattagtgaagtcacatctactatattggtgataactggtctcatgtccctgcctagattcaagatgaaagaggagcacagatctttgttggacagctgtacatctgcacagtttcttaagactgrgatcttactgcatattttattagtgttgtatcatcagcagagacttactcttctgaagatatgtctacatgaaccatagcacccatgtactttttagtacagagcagcaaacatttttttaaagtacctatggtgtgcttagtactatactcagcactgtgaggcatatgtaatacacaggatatggactcttaatgaatactattacaatgtcatcaatgagtgaaatagtaaatagttagactaagatgaatgcaat

SEQ ID NO: 253177 - DNA, 551 bp, Homo sapiens
attttgggctatacaaataataaagacaatccaatttaaagagaaaacaataatgatgccccctatttagtctcatctataacagttactcagagaaacttccaaatttcagtggcttaacacaagccaagatgatttctaactcaaagtcaaagtgggtgttgctgattagtgaagtcacatctactatattggtgataactggtctcatgtccctgcctagattcaagatgaaagaggagcacagatctttgttggacagctgtacatctgcacagtttcttaagactgagatcttactgcatattttattagtgttgtatcatcagcagagacttactcttctgaagatatgtctacatgaamcatagcacccatgtactttttagtacagagcagcaaacatttttttaaagtacctatggtgtgcttagtactatactcagcactgtgaggcatatgtaatacacaggatatggactcttaatgaatactattacaatgtcatcaatgagtgaaatagtaaatagttagactaagatgaatgcaat

SEQ ID NO: 253178 - DNA, 599 bp, Homo sapiens
tattaattgattttcacttaaaagttaaaataagagaactagtgtctgtatttaggcagtgttatctattgagatgggataagattyagggccttgagaactcactttggtttcctgtccctgcattagtttgctaaggcaatgttggagaagaaactattcataagcagattaaatttttattctgggatcagaccttcacacacagagaatgaacgtatacacccacacacacaagcaaaaaaaaacggagtatgtagtctttataactgagcactgggaaaatgctgcaactgttaaattttatatttaagtttcaacctccaggatgtgtattttcctttctgtttgtttctttgtttaggatgtctgaaggactgaatttttgcatccttcaatcactattcttttactataagctattttcaataggtttctttaagttgcaataaaaaaaaacaccctgatattggggaaagggatagaaaaggagcattttttttttaattagtaagaaacgaaactacagcattctaagattgctttttgttgttaaatttttaaatgattaatttcaaagaacaaccaaccaaaagcac

SEQ ID NO: 253179 - DNA, 559 bp, Homo sapiens
tgccgagccacagactgaaataaaaacttcagagattatagtttatggacactcttctttatgcagatagattctatataattttttattttaaattatataatttagtgtgtgtgtatatataattttagatattttaacataaattgtaaatttttatttgtttcatgcaatctaaaggaagaaagggtagctttgaggaaacattatctctgaaaggcatgaaaaaatgctgaacacgttgaaatgcaggcaatgctctgttaaatgcacttttttcttcctttttcacctgtaaaaaagtaatttataataaaagctgtataaacctaaatatgtccccaaagttaagttcttggtaggtcttaaatgtgctaaaaatggcctctatgtgacgtttttgccccacttgtcagtttcttcttaatatggtttcagcggtttgagagttgggatactgctgstaggcacttttcagcaagtttgaagatttaaacttctctgccctgctgttttatttcatcgtcaggatttctaaaagcatgaggcaggtgagatg

SEQ ID NO: 253180 - DNA, 543 bp, Homo sapiens
tgtgtgtgtgtgtgtgtgtgtgtgtgtgtgtactcagctttgctctttgtgtgtgtatgtgtgtgtggagggggggagtgtgtgtattcagctttgccctttatgttatgcagtgtaatgcttacatgacctaggtaaatttctacgctgmtgtcaaagtttccccctcatcaccatagtagctaagactggtgggattcaagatggcagctcccttgacctctgaagaacctctaacttaattataatctaatttccatggcaaatgacactcccaacagtgccaggacagttgacaatcaccatattaccatgacaacatccagaagaaaccattaaaggacaaaaaggaaggtggcaactctggatctgaaaagtcctctgcccatgtccagaaaagatgaataatcttccctttgttttaatgcctcatcctttcattaaaaactccctttatctatgatttttaagctttcatgagctgagaaggatatcagtgaatcaagcttccacttctcaatcccatggccatcgaataaagcc

SEQ ID NO: 253181 - DNA, 538 bp, Homo sapiens
acactacaaaagagtgtttctgcagggcttattagaacacactgattgttttwcctcgcaacatggatgactaagaatgatatttcactaaaacacctggattgctagggttttgttgctaagttcttaaattggtagagaaaacaagctaagcatcaggatcatggtgattaatgcttccctcttgggcaatcaagctccatgcattccgcaacaccttggttttgctggaatgcattgaatgattttaaaaaggaggcagacactagatttaagtaaaaaaaaaaaaaaaaaaaaaaaaaaaaaaatcagtgggctaattgggtccaggaccaccttgtgctggggttcatatttggagcattttacatggggatttttgactctgtcctgttgtgtgatctggccagcgtaataatctgcagaacagtgattagattgctcagaataataattaatggcctaaaacaaacatctgtgtcccctaaaatgcctatgcatatatagtgtagtggctgactggacggcatacatggta

SEQ ID NO: 253182 - DNA, 422 bp, Homo sapiens
ctttccctgaggagactctccatatgacatgcaaaatgtcagggagagaataatacaaactagaagtttggaagtgctacgaaataaaacatgtatggggaaaatgcgccttgtgagccctttattatttttaaatgaaaagttgtcagattattcagttcaaagtgtgatgttaactgtgtcatgcctgtgagctacaaaatagttattgtgaaggctgtgcctgtagattatctattatggcgtgtttgatacaatgtgacacctgagaagtttgaaggtgcatgratttttgacattgtgctgtagaactattgatggaagctgaaaatacataaagaatgaggtgttttctctagtacaccagtcacaatgagatacgtacctagtttccttgcacagtttaagaatgggagaaaagc

SEQ ID NO: 253183 - DNA, 525 bp, Homo sapiens
tgggacttaacaaagagtgagtacagctgaaggagctggggagccgaaagtatatgcgtcaggtatgaggaagaaaatagattttggaagttatgagaaatgtagagagtgagttgagcatagtttgtgatttttagggcctctaaaagtattaaagcagcagcagccgctgcacacagacatgagggctaggctaaaacagtaaggtcaagttgtttggacagaaaggctacagggtgcggtcctggctcttgtgtaaggattctgaccacactaaccatgcttaggaaggaaaggagttgttgttttgtaagggattgagrtttggaagattaatcagacacgatcagcagggagagcacgtgtgtttttatgagaattatgccgagataggtaacagatgaggatgaaatttgggcttgattgaagtaatgggggctgtctgtgaagccttgcggcagtacagcccaggtaatttgctgagcctaatgggtgtcagggtcagtctaagtgaaggcaaagaga

SEQ ID NO: 253184 - DNA, 525 bp, Homo sapiens
tgggacttaacaaagagtgagtacagctgaaggagctggggagccgaaagtatatgcgtcaggtatgaggaagaaaatagattttggaagttatgagaaatgtagagagtgagttgagcatagtttgtgatttttagggcctctaaaagtattaaagcagcagcagccgctgcacacagacatgagggctaggctaaaacagtaaggtcaagttgtttggacagaaaggctacagggtgcggtcctggctcttgtgtaaggattctgaccacactaaccatgcttaggaaggaaaggagttgttgttttgtaagggattgaggtttggaagattaatcagacacgatcagcagggagagcacgtgtgtttttatgagaattatgccgagataggtaacagatgaggatgaaatttgggcttgattgaagtaatgggggctgtctgtgaagccttgcggcagtacagcccaggtaatttgctgagcctaatgggtgtcagggtcagtckaagtgaaggcaaagaga

SEQ ID NO: 253185 - DNA, 501 bp, Homo sapiens
tacaggaacagaacattttcagttaaaaagctacttataatttctatagccatacaatgttgwatgtgctgtttgatcttttaacaactttattttaaaatattcacaaaagagtggtaattaaattacatcggtgccatggtaaccactgcattaaatatgcttagatcctgtgttctagcagtttgctaggaaaaaggggtattctattctgtgacaatcagaaatggtgagtgtttaggtcaacctccatgagcctgtcagaaaaggatgagactatatgactgaagttggatagggatggcaggcagatgagtcctacggcagagtagaagctaccttggactgagcatcaaaagtctcagttttagtttgggctttccaactgactagttgtgcatttttagataaattgcttaatttctcttagttgcaaactcctcatgtgtaaaatgaaaaggctgaacacaggaccagatgttctgaaattcgacctagccc

SEQ ID NO: 253186 - DNA, 439 bp, Homo sapiens
caaactgaagttagcagtaagatgctattgatggtggagatcttctaaaacatggaaggacaaattatctctatctagctatctacctggaatattcctgcagaggagaatgcttctctagagatatttgtggttcctattgactgaactgaactatcgttgcagctccattttacatactggactttccagttccaagtctacttgtccccttaaataagaattctgtttttcctgcttggtaattacttacaagatactgggatagacaaaggaaaagaaagaaagctttttagtttccttctgtatcacagaatctgtggtgactcttctawactaaattaacaaggaattcttagttcctcatgtctaagaccttgaatttggccatgaatgctgtctttcaaatctggctcttgaatgtaagtcttttaaattg

SEQ ID NO: 253187 - DNA, 568 bp, Homo sapiens
taatagatttgcctagtatagtacaggattaaaggtaaagaagtcaaattctgaaaaaaaaaattacagacttccctttgatgagactctttatttacaggaacgacttcgtaccagcactattcttcacacaggagcatcaaagatagttaagtaacagggcctgaaatataggagctaatgacctaattgggggaaagctctcattagaaattagcagcacatttttgtgaccacaatttaaatttactaatattcctcagtagttagtataggggatgggtttttgataactgartggagaagaaagtaatattagtgagaaccaataaagatttgaattaaggcatgccagattgggagtgtaggcatgtttcccatttgagaagcattatgagattcatttttttagaggaaggaaaaaagaaggactgacaaccatgttttggcatctggaaatggctgaaagtattatctgaaaaggagactaacaaagagggagattttcctttgtgtcggaattggttggggtagcagttctgggcagctgaagtttatagtgactcaa

SEQ ID NO: 253188 - DNA, 590 bp, Homo sapiens
tcagtaggggagtcacatcgcagaagaagtgagtgatggcattgtctgcacagaatgagagtggagccatcagcagggtgtgcagaaggacattcaggttggcaaccacccataatccagcaaccagcagggcacagagctgatgggtcatctttgctgtgtaatgtaaggggtggcacacggcgacaaagtggtcataggccatcacagctaggaggaaattgtccatgtccacgaacatgaaaacgaaatacatctgtgtgagacagccacagaaggagatggtctgagtctcgagtatgtgattggccagcatcttggggacggtggtgraggagaagcagatgtccacaaaagacaggttgctgaggaagaagtacatgggggtgtgcaggcaggagtctatgcttacggacaggatgatgagcaggttccccaggacagtggccaggtacatgctgaggaagaacacaaagaggagatgctgctgctggggctgcctggagagtcccaggaggaggaactcggagacactcgactggtttgtcccgctcatgggcctgggatcctggacacagaggcagacaaag

SEQ ID NO: 253189 - DNA, 642 bp, Homo sapiens
cacccctgcaggtgcaggcacacttactctcttattggagacactgccttgccttgtcacccaggctggagtgcagtggcactatcagggctcattgcagcctccatctcccaggctcaagtgatcctcccactacagcctcccgagtagctgggattacaggcgtgcaccaccacacccagctgatttttgtctttttggtagagatggggtttcaccatgttggccaggctggtctcgaactcctgacctcaagtgatccrcccgccttggcctacccaaagtgctgggattccaggtgtgagccaccacacctggccaattcctgtacccattaaaaactcaagaaatctttgcctaacccaagctcacaaatgttcttctgtgttttctactagaagttttatagtgttagcctttacatttaggtatctgatttgactgagttaacttttgtgtgggaggaggtagagatcgaaggtaattttttgcatatgaatgatatccggttcttccacgtgttgaaaatactctcctgtccccattgaatttgcctctgcgccttgcgaaaaaattgaccatgtgggtctatttctagactctgtattctttttgttttgttttgtttttgagacagtcttg

SEQ ID NO: 253190 - DNA, 606 bp, Homo sapiens
aggcaacatgaaaacctaggtagaaaatcttgtggaatctacaaaaaagctccctgaactaagaagtgagtgtaggctgggcatggtggctcacatctgtaatcccggcactttgggaggccaaggtgggaggattgcttgaggccaggaattcgagactacactggccaacacagcaagaccccgtctctattttttttaatttaaaaatgttttaaaaagtgagtgtactaagcttgccagataaaagatcaatacacaataatcaattgtgtttgcatatrccaaaaaagaacaattgtaaaataggattttaacaataccatttacaatagtataaaaatatgaaatccttgggctcaaatctgacgaatcagcgtaagacctgtacattgaaaactacaaacatacctgaatgaaaggaaagacccaagtaaacggataaatacactgtattcaacaagccaggatttgagggtctccccagagtgatctatagagtcaatgcaatcccaatcaaaatcccagcagctttttttttttttctggtagaaattaagtggattctaaaatacctatggaaatatgaaaaaataaaacacagtc

SEQ ID NO: 253191 - DNA, 593 bp, Homo sapiens
agtccccccagcaaggagtggccctgccctgaatatcagcagagccgaagttgagaagccctgctctatcgttagcctccctgctgcccatgcttccagaagttgccttatttttccactttctctttcccagagccccagttcccagagtgtcctctccaggcaccttcccataaactcgccagcgcacactgggcaggagcagggggccattctggagatgcctgagaagggtgtgtcttgccagtgttttgaccacacctctctgaggagaaccactaaagcctgggtcccttgaaggaacakattctgatgaaggggcatcacaaggactgtaaggacaagctgttctcctgaaagtcatcctacagactccagttctctcccagtggggcgtcactgccgtctatcaacccctggatattggtttaagaatctcccccaccggaggagattgtctaatttgggacttgggtaatggagggaggctttggttagccatcttggcttattccacagagcttcttgtctctatttctggaaaggaaaaattactttttagagaatcacagaattttagaaacaaaggtttt

SEQ ID NO: 253192 - DNA, 593 bp, Homo sapiens
agtccccccagcaaggagtggccctgccctgaatatcagcagagccgaagttgagaagccctgctctatcgttagcctccctgctgcccatgcttccagaagttgccttatttttccactttctctttcccagagccccagttcccagagtgtcctctccaggcaccttcccataaactcgccagcgcacactgggcaggagcagggggccattctggagatgcctgagaagggtgtgtcttgccagtgttttgaccacacctctctgaggagaaccactaaagcctgggtcccttgaaggaacatattctgatgaaggggcatcacaaggactgtaaggacaagctgttctcctgaaagtcatcctacagactccagttctctcccagtggggcgtcactgccgtctatcaacccctggatattggtttaagaatctcccccaccrgaggagattgtctaatttgggacttgggtaatggagggaggctttggttagccatcttggcttattccacagagcttcttgtctctatttctggaaaggaaaaattactttttagagaatcacagaattttagaaacaaaggtttt

SEQ ID NO: 253193 - DNA, 539 bp, Homo sapiens
acaccaggggctgggcagcgcaaacaggtcagacatccctttaatctgcaattgagttgttcacaccccaggaaatagattttatgctgctttcctgctctgtacaatggggtgtggttgaggaaagaacgacttcgcaaggatgcctgttgagttgaccgtgtcaaaagtcatgggtgggcggcatttagtacctttaggggagggtctgggcacagtggacactgtttcatggtacagctggggtgttccattaggacatgaaatctttaggaaactctgggctattgcctctctgtgacctscctccggctttcttaactccccctgcctctggaagcctctaactctacaacaagggggcttcctgttggcagcaagtgaaaatgtgtccccgaggaagtgctggggttctttcaaaagggaaacacccttcaggctgacttcagttcaaaaacgaaatatatcgcataaatgtaaagttcattcatattcacgtacagctggatccagaaagcgaactgatggcttcttcatgc

SEQ ID NO: 253194 - DNA, 487 bp, Homo sapiens
gatcctgtccttgactgacagtgacccatgagccaacatcgccagtggtctacctcaagacttcttctttgtgccttttcaaggataataccagaaatttggaggagaggataggaaatataaatgcaaccaaaaagaaagatatcatcaaagaggtctgaatctctctttggattttaaagaattaaagaaagaaagggggactcaaaacaaaaacaaacctctacccatctcccacagtggagtggagccaacttgaaagcagtgaatgkatctatctggtggttggtgtcttctgtacttggcgttttgcctgggatggtagtgtttgctgaacaaacaaaggaatcttttttttttttttcctcacctcttttaactttggccaagtctgtctggcccaccagagcagctgtgatgacagttgtttggtgaatttccaaacactgtactatttaagtatggcacacagtcttagggggccagg

SEQ ID NO: 253195 - DNA, 487 bp, Homo sapiens
gatcctgtccttgactgacagtgacccatgagccaacatcgccagtggtctacctcaagacttcttctttgtgccttttcaaggataataccagaaatttggaggagaggataggaaatataaatgcaaccaaaaagaaagatatcatcaaagaggtctgaatctctctttggattttaaagaattaaagaaagaaagggggactcaaaacaaaaacaaacctctacccatctcccacagtggagtggagccaacttgaaagcagtgaatgtatctatctggtggttggtgtcttctgtacttggcgttttgcctgggatggtagtgtttgctgaacaaacaaaggaatcttttttttttttttcctcacctyttttaactttggccaagtctgtctggcccaccagagcagctgtgatgacagttgtttggtgaatttccaaacactgtactatttaagtatggcacacagtcttagggggccagg

SEQ ID NO: 253196 - DNA, 613 bp, Homo sapiens
atgcctggattctacctgctagattcaaatagcacctgccccacctcagtcatgattatcaaaaatatctacagatattggcaaatgtctcctgatgggaaagggcaaaattgccttcctggttaagaaccattgctttagagtcagaaacctaaattctattcctgccttacctctgactggttgtttatttgactaatggttatttaactttttcttattcccagcacccaacacagtttctggcagaaagtaggtatgtgtcagtgcttacagattaagtgaacaaatgagtaaattaatgaataagagtctatatttctmagaccagccttttcctaagcagttggcaggctgttaggaagaccttgagccttgaccatgcacagtgtcaagaaagcaacatattcactcaaaatgtgcctcaagtaggaaaaaaaatccactttgggggtatttagctgtgtaagcccgacagataattgagcggctggatttttcagtttcgacagattggtttgccattctgtagccacaataacagagcaaagtaacaatcgtgtctatgtttaattttctgaagagagctgcatcgccgaggctaacaatctgg

SEQ ID NO: 253197 - DNA, 608 bp, Homo sapiens
ttgggatgcagttattggcacctctgcctcttttaaatgtggggaggacaagggagggtccatctatccatgcatccatccgtccatcaatccatccatcagtccacccatttgtccatgtatccattccctttctgttctatctgcttgtttctagttcttcacarttatcaggcgagttatttccatgtggccaagaacagtggctcttgccagctccaggttattcgtaccaacataaaggaaatttctctctcccatcatctgtatatcaattctagtgaggaaactagactggtccttcttgaatcacatacccacttcagctaagtcactgtgttcagaaaaacagggtactctaataggtaagctcaggtcagatgtccactcctgtgactgaagaagggtaaaagagtggactactaagggcaggaaaaacaaactaaccacagtagctatcacattccatcccaccccactgcccactgacatgggtacaactccaagttaaagcctctaaggctgctgaaaatgtggtatggacagggatcagtcccactttccgtattcagaattctattattctgcctattcagttttttccagtg

SEQ ID NO: 253198 - DNA, 608 bp, Homo sapiens
ttgggatgcagttattggcacctctgcctcttttaaatgtggggaggacaagggagggtccatctatccatgcatccatccgtccatcaatccatccatcagtccacccatttgtccatgtatccattccctttctgttctatctgcttgtttctagttcttcacaattatcaggcgagttatttccatgtggccaagaacagtggctcttgccagctccaggttattcgtaccaacataaaggaaatttctctctcccatcatctgtatatcaattctagtgaggaaactagactggtccttcttgaatcacatacccacttcagctaagtcactgtgttcagaaaaacagggtactctaataggtaagctcaggtcagatgtccactcctgtgactgaagaagggtaaaagagtggactactaagggcaggaaaaacaaactaaccacagtagctatcacattccatcccaccccactgcccactgacatgggtacaactccaagttaaagcctctaagrctgctgaaaatgtggtatggacagggatcagtcccactttccgtattcagaattctattattctgcctattcagttttttccagtg

SEQ ID NO: 253199 - DNA, 555 bp, Homo sapiens
cgtggtcaaaaagtctgggcatgagttagaaacaactgaatattgaaaatgcaaatggcatagctgaactcaagggaaatgcttcacaggcagacaaaagtaccatcaaaaatgctgtcataatgttatgaaattttaattcatgatcaaaacatctcccaagtcccaatactacttttcagtatgtctttcaaattatagtgggacttggtggatagctttttaaatattccttaaattgcaagtagctgaatatttggccctaaatactttgcaattcttactgtggctaarctcagagattcagtaagaacagttacatcagcacagagcactctgcctcttctatcttacatcttctagcaaacagaatgtgtttcaggcacgcattccggagttatgtttaacaatcccgagacatcatctctattcagcctcacagcctccggtggagatgaaatgaatattaaataatcaaaagggatggccgtgaaatcctgctgcacccgagtaaagctcagcattagggtgaccgcttttttcttgatattatat

SEQ ID NO: 253200 - DNA, 555 bp, Homo sapiens
cgtggtcaaaaagtctgggcatgagttagaaacaactgaatattgaaaatgcaaatggcatagctgaactcaagggaaatgcttcacaggcagacaaaagtaccatcaaaaatgctgtcataatgttatgaaattttaattcatgatcaaaacatctcccaagtcccaatactacttttcagtatgtctttcaaattatagtgggacttggtggatagctttttaaatattccttaaattgcaagtagctgaatatttggccctaaatactttgcaattcttactgtggctaaactcagagattcagtaagaacagttacatcagcacagagcactctgcctcttctatcttacatcttctagcaaacagaatgtgtttcaggcacgcattccggagttatgtttaacaatcccgagacatcatctctattcagcctcacagcctccggtggagatgaaatgaatattaaataatcaaaagggatggccrtgaaatcctgctgcacccgagtaaagctcagcattagggtgaccgcttttttcttgatattatat

SEQ ID NO: 253201 - DNA, 414 bp, Homo sapiens
ctgtgtggcctgatggatgacccagtttcttactatttacagtgtatgtgagcttacataaaccactcacctttctgcacctttatatccggattcttaatccaggggaatgggtttaaataacacacgagggagaggaatggtgctgttgttaaaagcattattctcaaagttggtgtttgaatcccaactttgctccttattcattgtgtaaccataggcacgttacttagactctgtkaatcttatttcctgatttgtgaaatggaggcaatatcacaccttacaacacttgaggaaataatgtgcttcaagtgattagcccagtgcttagtaaaagccttatagtttcatcattgtcaaatgttctgcatggttccaattccctgatacaacttctcactctaaagaagc

SEQ ID NO: 253202 - DNA, 565 bp, Homo sapiens
attacatttttctgttcatttcctaatacaaataacttcagatatctcataattcttaaaatttgcaattaattcgttgaaaaactaatgtcaggttgaaaaagggcctctttggtcacagatttgcactgtggaatgattccttaaggtacrttcccaattgcctgtcaaggttcctattaaatgaattaatgtagaaacataaatcaactagcatttaaaaatacaaattgtctaaactttaattgtacatgtgcttagctttttcaccttttgtctgtttaaatactccaacctcttaatttaggtatgcattcctacaaatttacctaagataccagaatttagtaaaattcttcccagtgaacttttgttcaactcaagcccattttgttctagctatccgatctagtatgtgtttttctatgaaaaatgagaaaggtttcagtgttcatatcttaataaaatttataaggcttcttccacacttcccctctttctgtaatcctttcttctttattgcatgtactctttaacctgagaagaaataaaaacaaagatgaac

SEQ ID NO: 253203 - DNA, 541 bp, Homo sapiens
actccaattcagcatagtaatagaagtccccagccagagcaataagacaaaagaaagaactaaaaggcattcaaactggaaaagaagtcaaattatcactgtttaatgatgacacgattgtatacctggaataccgtgactccttcagaagactcctagacttgataaatgacttcagtaaagtcttaggatacaaaactaatgtataaaaatcagtagcgtttctgtacaccagtaacattcaagstgaggatcgaatcaagaactcaaccccatttacaatagccacaaaaaaataaaatacccaggaagatatttaaccaaggaggtgaaagatctctacaagaagaactataaaacactgataaaagaaattatagatgacacaaacaagtgaaaaaatgccccatgttcatggattggaagaatcagtattgttaaggtgaccatactttccaaaacaacttatagatttaatgcagttcgcatcaaactatcaatgtcatttttcacagtattagaataaaacaatagcaaagtc

SEQ ID NO: 253204 - DNA, 629 bp, Homo sapiens
tggcgtcttttctgagcttggcaagggaaacgtaacttgaagtaaggggaaaaaagcacacatttatatctgaatactgcagtttctaccacttgttaactgtgtgacactggacatctaaaaactgaggctcatgaaaacatctgccatctgacttcttagggttgttttgaagattaaataagttaatagtgtgaaaactgcttagaacaatgctatgcaagtgttagctatgkttactgtcagctaataatgctgcttgtgacattttgtctgtgctccttgtttcaaacatcttacttggagcttccaaagttagcacttagagtggatattaggttggtgcaaaagcagttggattttttgccattaaaagtacaggcaaaacagcaattacttttgcaccagcctaacagcttatgtatgcagaattacctgcaaattcctttggagactagccataatatttcttgctgtgtctaacccaggcagttttcctcccagctttaaattcacttgtgttctcttgggttggtctcccagtgaaggtgttgcttgcagatttatacctctcctctcacagccaatctggagcaggccttcatttagtgaaaaactgcagaatcatc

SEQ ID NO: 253205 - DNA, 629 bp, Homo sapiens
tggcgtcttttctgagcttggcaagggaaacgtaacttgaagtaaggggaaaaaagcacacatttatatctgaatactgcagtttctaccacttgttaactgtgtgacactggacatctaaaaactgaggctcatgaaaacatctgccatctgacttcttagggttgttttgaagattaaataagttaatagtgtgaaaactgcttagaacaatgctatgcaagtgttagctatgtttactgtcagctaataatgctgcttgtgacattttgtctgtgctccttrtttcaaacatcttacttggagcttccaaagttagcacttagagtggatattaggttggtgcaaaagcagttggattttttgccattaaaagtacaggcaaaacagcaattacttttgcaccagcctaacagcttatgtatgcagaattacctgcaaattcctttggagactagccataatatttcttgctgtgtctaacccaggcagttttcctcccagctttaaattcacttgtgttctcttgggttggtctcccagtgaaggtgttgcttgcagatttatacctctcctctcacagccaatctggagcaggccttcatttagtgaaaaactgcagaatcatc

SEQ ID NO: 253206 - DNA, 629 bp, Homo sapiens
tggcgtcttttctgagcttggcaagggaaacgtaacttgaagtaaggggaaaaaagcacacatttatatctgaatactgcagtttctaccacttgttaactgtgtgacactggacatctaaaaactgaggctcatgaaaacatctgccatctgacttcttagggttgttttgaagattaaataagttaatagtgtgaaaactgcttagaacaatgctatgcaagtgttagctatgtttactgtcagctaataatgctgcttgtgacattttgtctgtgctccttgtttcaaacatcttacttggagcttccaaagttagcacttagagtggatattaggttggtgcaaaagcagttggattttttgccattaaaagtacaggcaaaacagcaattacttttgcaccagcctaayagcttatgtatgcagaattacctgcaaattcctttggagactagccataatatttcttgctgtgtctaacccaggcagttttcctcccagctttaaattcacttgtgttctcttgggttggtctcccagtgaaggtgttgcttgcagatttatacctctcctctcacagccaatctggagcaggccttcatttagtgaaaaactgcagaatcatc

SEQ ID NO: 253207 - DNA, 629 bp, Homo sapiens
tggcgtcttttctgagcttggcaagggaaacgtaacttgaagtaaggggaaaaaagcacacatttatatctgaatactgcagtttctaccacttgttaactgtgtgacactggacatctaaaaactgaggctcatgaaaacatctgccatctgacttcttagggttgttttgaagattaaataagttaatagtgtgaaaactgcttagaacaatgctatgcaagtgttagctatgtttactgtcagctaataatgctgcttgtgacattttgtctgtgctccttgtttcaaacatcttacttggagcttccaaagttagcacttagagtggatattaggttggtgcaaaagcagttggattttttgccattaaaagtacaggcaaaacagcaattacttttgcaccagcctaacagcttatgtatgcagaattacctgcaaattcctttggagactagccataatatttcttgctgtgtctaacccaggcagttttcctccmagctttaaattcacttgtgttctcttgggttggtctcccagtgaaggtgttgcttgcagatttatacctctcctctcacagccaatctggagcaggccttcatttagtgaaaaactgcagaatcatc

SEQ ID NO: 253208 - DNA, 592 bp, Homo sapiens
atagcctagcttcccgtttttggggtgacttttctctttctcagtagcctccactcttggtattgtcaagcttgttaatttcagtcattctggtcagtgtgaattgacatcttattgtagctgtaatttgcatttccttgatgacattgagattgagcaccttttaggattctgggggctgtttggatatgcttttttacaaagtgtttgttcaagtctattgccatttctttattaggctgcctgcccttttcttattgaatttctagagcttttaatatattccgaatacaagttgttaggtatatcgtattggtaatatcttctgctaaaccatgccttgtctttctatctgtttacgtgaaccagagggatgagaacattccatcaatggtatgtttttactttctttcatccatgtatcaggtattgtatagacacaggcataggccatgagttcagcttaccatgaactccctgacctcaactcctgcttctctccccatgtccaccctgctccagccrtgcttactgctgcctttgcctggaatgttctttccttagataatctcatagcttgcacacctcccta

SEQ ID NO: 253209 - DNA, 467 bp, Homo sapiens
tgccctccacatcatccttgtcattttcctcatatcactaactataatctgaatacatcctgcttcctgtctttctcttttatttaaagctaagttctatatggacagcagctatttctgtcttcctcactgttgtgtcctcaatacacatagtaggtgttcaaaaaatattcatgaataaacagacagcaaatagaggggatacttgagatacagtakctaaactgttggaatttgtagaactagaagacgccacttttggctgttttttttttttttcttttcttttcttcttttttttttttgcacctgaggaaggaagcagcttaattgaagccaccccagcagaagaatccacaccacagtcccacctcaggtggacacaccatctactactcttgctggggagagctccaagctcctgggtcgcggtggaggtgggtggcatgccttgagagccacttgga

SEQ ID NO: 253210 - DNA, 467 bp, Homo sapiens
tgccctccacatcatccttgtcattttcctcatatcactaactataatctgaatacatcctgcttcctgtctttctcttttatttaaagctaagttctatatggacagcagctatttctgtcttcctcactgttgtgtcctcaatacacatagtaggtgttcaaaaaatattcatgaataaacagacagcaaatagaggggatacttgagatacagtatctaaactgttggaatttgtagaactagaagacgccacttttggctgttttttttttttttcttttcttttcttcttttttttttttgcacctgaggaaggaagcagcttaattgaagccaccccagcagaagaatccacaccacagtcccacctcaggtggacacaccatctackactcttgctggggagagctccaagctcctgggtcgcggtggaggtgggtggcatgccttgagagccacttgga

SEQ ID NO: 253211 - DNA, 586 bp, Homo sapiens
gcggatactgacctggcagggctgaactgagattctgcgtttctaataaactcccaggggatgctactgctgctcgttgaggtgccacaccagtaacaaggccccgstcctacagctgataagtggtagagctgagattctcttacaggcgctaggggtcccgggctttctctctccatcaccctgctctattgtttcctgtagcagctgtgacaacctcatttagatcacgttcacaggtcaggccctggtaagcgttcttgtgaccttgcattaaggctccacagtgctccccctccctctctttgctccagacccaccagtcaccttgccattccacttgccacctgcccttgcccttgctgttccctcctgctgcaatgttcttccccatgcatgacaaggcttgtcccccaatgcctttctggtctctcctccagtgtctcctccttggagaggatgctatctgcagtagcttccactgcctctgcagactggcccttttcccctcttacccttttcctgttctaagttttttacagcatttatcacaataagattatacatttaatatacatatagttta

SEQ ID NO: 253212 - DNA, 563 bp, Homo sapiens
cctgtttgcatttgatttgtgtgggtcatggaggctgactccagtctaacattcagttgttgagaggggtagaagttctgaacaatgaatgatgtttatgatactattaataataaaactaccacaacaataacaacatagaaaacacattgagcctcccaccctcgaatcacctccctacctccacaggggtacccaccaggtagagagcccaggagcctcctgtttttagagtctttaactccattccctggccaaatgggttgttcctcattgcagcaggaaatgaatgggcacgtttaaatcaatggaggatgtttaataaaggggcaatttacaagtgtgtgggcagggtgtagggaaaccataagggatagttaggtgactgagggtcagcaacatcagggctatttcacatcccttggtcctcagggataagcagtttattgaaacctgagagtcttgcagacagggtctccttgaatsaaacttggccttggggaagagcatcatgagcagactctgctggtgagagagtcctgacctcatcctcttcctctcct

SEQ ID NO: 253213 - DNA, 609 bp, Homo sapiens
tattagtattttgcctactcttagtttagagagaaataattttcttatttaaaattatgcacccaataggggaaaaaaaatctcataacgtgacaattgtcctctgaattcctctctgtatgagtctgtttttatacggctataaagaattgcccaaggctgggtaatttaaaaaggaaagaggtttaattgactcacagttcagcatggctagagaggcctcaggaaacttacaatcatggcagaaggcaatggggaagcaagcacctttttcacaaggtggcaggagggwgaagcgccgagcaaagggggaagagccccttataaaatcatcagatctcatgagaactcactcactatcttaagtcaattaaactactgtgagaacagcatgggggtaaccaccctcatgacccaatcacctcccacccagtctttcctttgcatgtggggattatgggaattacaattctaggtgagattcaggtgcagacacaaaacctagccatatcactctttaagcatctttcttcaaatttctcctcttatacgtgccagttgtcatgtacaaacttagttcgtacttccttttcccagaaaggcaaggtt

SEQ ID NO: 253214 - DNA, 555 bp, Homo sapiens
aatgtaaataaatccattgctctgcacagctggtaggagtaaacacacatctcacactgtttgacagctcacgtgttataatttacatggtttatactctcagggtcattctatcataattcccaactactaacttttagccatttcatatgtgatctgtaagagcaacaactccacagtatggacacttactgcacatttagtacttaaagtaatacaaatactgtagtactacccactttgcatgccagacgatatgataaaaataaaatgacaaatgcaagcagaatctggaatggagcatctaactaatgggcatttgttaagcatatttgctgggaatatcttttgcataaaggaacttttgagacttactaggcttcctctgattttcaaaacaatacattgggaatttcattaccaaaagatttaatgagacattaaataaaacacacaacagctgatccaggtgaactcattcattaaactttggaaaaagtctgttttgtgcagctggcaaagagaatgacrcaaagctggaagaagaaacagcta

SEQ ID NO: 253215 - DNA, 240 bp, Homo sapiens
catgagttagagcactgtaggctgtgagttcaatgttaatgagtccaaaacatatactaaataaggtatctctgaacaacarcagacacaaaacaaggctataaattggtgggttgacaaaagtgctgcgagcagaggtttgcaggaaaccctctattttttccaagagcaatggctcagtattccctaattcaattcagcgttgttgtgatgccatagatcatagctacagcaggtagc

SEQ ID NO: 253216 - DNA, 240 bp, Homo sapiens
catgagttagagcactgtaggctgtgagttcaatgttaatgagtccaaaacatatactaaataaggtatctctgaacaacagcagacacaaaacaaggctataaattggtgggttgacaaaagtgctgygagcagaggtttgcaggaaaccctctattttttccaagagcaatggctcagtattccctaattcaattcagcgttgttgtgatgccatagatcatagctacagcaggtagc

SEQ ID NO: 253217 - DNA, 635 bp, Homo sapiens
tttggcttgaagtccaactccataggtagcagcctcccttgccttcacctaaagccaattaaagatgcaaaatgttgcagctgtcaccagcaccactcttgaggaacaaggtgagctgttagaagccagagactcagcaagatccaagcttgagaatgaattttatgatatttttgagttttaaatactatagctacacatggggcactacatagaaagagtcaccaaataaaaggcttctctaagtgatctgtgtccatttcaggatcttatkaatcaacagaactgactggtctccttgggactgtgttaaacctgaataggatcaggtcatccatccctccttaggtcccctgcagggctgaaggtcacaccagggcttctttccatgatctgctcaggagccacacagaagggatacatgcctaaacagcatggagacaggacccccaggggtgttggggaacacagcagaactcaaggacttatagcaggagggaaaccctctctctctgccctttgaatggagtccaagcagtgttttccagtgtggtgcacagatgattcttagaattttgttttaaattacttaaaataatttcatccttttaaaatgttttgcatgtttttaatat

SEQ ID NO: 253218 - DNA, 635 bp, Homo sapiens
tttggcttgaagtccaactccataggtagcagcctcccttgccttcacctaaagccaattaaagatgcaaaatgttgcagctgtcaccagcaccactcttgaggaacaaggtgagctgttagaagccagagactcagcaagatccaagcttgagaatgaattttatgatatttttgagttttaaatactatagctacacatggggcactacatagaaagagtcaccaaataaaaggcttctctaagtgatctgtgtccatttcaggatcttatgaatcaacagaactgactggtctccttgggactgtgttaaacctgaataggatcaggtcatccatccctcyttaggtcccctgcagggctgaaggtcacaccagggcttctttccatgatctgctcaggagccacacagaagggatacatgcctaaacagcatggagacaggacccccaggggtgttggggaacacagcagaactcaaggacttatagcaggagggaaaccctctctctctgccctttgaatggagtccaagcagtgttttccagtgtggtgcacagatgattcttagaattttgttttaaattacttaaaataatttcatccttttaaaatgttttgcatgtttttaatat

SEQ ID NO: 253219 - DNA, 637 bp, Homo sapiens
ccatggacactatctctaaatgtaaagtgtttccttcccggaagagaacaaaacaaaacaaaacaaaacaaaacaaaagaacctgggaaggaggggatggagaaaatactgtgtaccaaattccagttcatattcttctttccggggcacacggaataccataattcccagctccttttcaagagttgtgagtaaaaaaaaaatgatatattcaaattagtattatccaaagaagtttagttaaagggtgtagggagatcacaasggatattacaaaataacagggttgttactaatccgaggcttgaaggggcaagtgaaagacttggttaaagactgtggagaggtggggaatgtgtagagagaaccacctggagaggagctgtgaccttcagtccagtgtcccagctttggcaaggtgacccaacagcggggagcctggagaaatccaccttcctctccttcctcctcccctgatctcctgcctgaatcccagtgcccaaactcaatggaagccagaacgttgactgtatggcaaagtgtccctttgctctgtaatccatacagatcagcctagcagagcagaaggcaaggtggggaaaggttgatcagaaattagcgggtagggaagggggat

SEQ ID NO: 253220 - DNA, 578 bp, Homo sapiens
ttgaatgttggactccaagttcttcagctttgggactcagattggcttccttgcaaaatgcagtcagtctcatatgatcaagattccatagaaaaacaaaacagcttttctgatggcgagagtggggaaggagttcttggtagagaatgtggcactttagtttgacctggaagaatgggtgaaatttcaactggtagcagtggagacaggtccttccaggctaaggaaggagcaggaacaatggcaacaggagtgattgtaaggtgtaatgtcgggacatttcatgcatccacgtgcagcttgaaatagtgggaagtgaggctgcatagctagttatcacaacgaaggccaaagctagataaaaagtgtgaactacttttggtagaagatctgaaactatgagacattctgagtgtctgagtgacatcagcagagctgtgcttttggcagatttatttggtaatgttgtgcagaaktttttttccaggtagagaccaaaagtagattaaagactctcgagagtaaggtgagatatctggctggcccagcccattggaaatgggactgcacacgggaag

SEQ ID NO: 253221 - DNA, 519 bp, Homo sapiens
aaagaggcccatgtagctggagcaaaatgagtgatgggataagggtataggagaagaaataagaaagatgagatggagccccatcatgtagaccttgagggtgttgcctgtgtgagyggagttaagctgagaagctgaaagaaggcgcatgtttaaggcatccttctggctgctgtatggagaaagggtggaggaagggtaaggagggcagcagagggagcagtagggagccactgcagaaatccaagcagtgggtaattatccaatggataagtcaatccattatccaaaagatggtggtggctgggccaaggcaaagcactggttcaaacatacctgttgtgcctggctctaaatgcaatgcccttgacttcatgacttcgtgactcagccagtgtgcataatactgaaaaacagtatataggtcagtaaccctagcaacttagctgtcagtcttctccttagcactcctttcaaagggcctgtaattttgggaaggggcatgtcttagagagtttt

SEQ ID NO: 253222 - DNA, 519 bp, Homo sapiens
aaagaggcccatgtagctggagcaaaatgagtgatgggataagggtataggagaagaaataagaaagatgagatggagccccatcatgtagaccttgagggtgttgcctgtgtgagtggagttaagctgagaagctgaaagaaggcgcatgtttaaggcatccttctggctgctgtatggagaaagggtggaggaagggtaaggagggcagcagagggagcagyagggagccactgcagaaatccaagcagtgggtaattatccaatggataagtcaatccattatccaaaagatggtggtggctgggccaaggcaaagcactggttcaaacatacctgttgtgcctggctctaaatgcaatgcccttgacttcatgacttcgtgactcagccagtgtgcataatactgaaaaacagtatataggtcagtaaccctagcaacttagctgtcagtcttctccttagcactcctttcaaagggcctgtaattttgggaaggggcatgtcttagagagtttt

SEQ ID NO: 253223 - DNA, 519 bp, Homo sapiens
aaagaggcccatgtagctggagcaaaatgagtgatgggataagggtataggagaagaaataagaaagatgagatggagccccatcatgtagaccttgagggtgttgcctgtgtgagtggagttaagctgagaagctgaaagaaggcgcatgtttaaggcatccttctggctgctgtatggagaaagggtggaggaagggtaaggagggcagcagagggagcagtagggagccactgcagaaatccaagcagtgggtaattatccaatggataagtcaatccattatccaaaagatggtggtggctgggccaaggcaaagcactggttcaaacayacctgttgtgcctggctctaaatgcaatgcccttgacttcatgacttcgtgactcagccagtgtgcataatactgaaaaacagtatataggtcagtaaccctagcaacttagctgtcagtcttctccttagcactcctttcaaagggcctgtaattttgggaaggggcatgtcttagagagtttt

SEQ ID NO: 253224 - DNA, 519 bp, Homo sapiens
aaagaggcccatgtagctggagcaaaatgagtgatgggataagggtataggagaagaaataagaaagatgagatggagccccatcatgtagaccttgagggtgttgcctgtgtgagtggagttaagctgagaagctgaaagaaggcgcatgtttaaggcatccttctggctgctgtatggagaaagggtggaggaagggtaaggagggcagcagagggagcagtagggagccactgcagaaatccaagcagtgggtaattatccaatggataagtcaatccattatccaaaagatggtggtggctgggccaaggcaaagcactggttcaaacatacctgttgtgcmtggctctaaatgcaatgcccttgacttcatgacttcgtgactcagccagtgtgcataatactgaaaaacagtatataggtcagtaaccctagcaacttagctgtcagtcttctccttagcactcctttcaaagggcctgtaattttgggaaggggcatgtcttagagagtttt

SEQ ID NO: 253225 - DNA, 550 bp, Homo sapiens
gatatacatctttgtcttcaacttgtgtttttgttgttggttttttttttttttttttttttttgagatggagtctccctctattgcccaggctggagtgcagtgacacaatctcagctcactgcaacctctgcctcctgggttcaagcaattctcctccctcagcctcctgartagctgggactacaggtgcatgccatcacagctggctagtttttttgtatttttagtagagatggggtttcaccatattggccaggctggtctcaaactcctgacctcatgatccgcccacctcagcctcccaaagtgctgggattacaggcatgagccaccacgcccggccaacttgtgtttttttacttaagagtataccaatcactttagctgttcaggccagtgtatataaatttaccttgttctttaaattaatgcataactgagaaaaaggatttggggaggcagtgtctaggatgaagaacaggacctcttttgatgtttttccagatatataagtgaaaattgaaagtatttttaattacctttggtc

SEQ ID NO: 253226 - DNA, 550 bp, Homo sapiens
gatatacatctttgtcttcaacttgtgtttttgttgttggttttttttttttttttttttttttgagatggagtctccctctattgcccaggctggagtgcagtgacacaatctcagctcactgcaacctctgcctcctgggttcaagcaattctcctccctcagcctcctgagtagctgggactacaggtgcatgccatcacagctggctagtttttttgtatttttagtagagatggggtttcaccatattggccaggctggtctcaaactcctgacctcatgatccgcccacctcagcctcccaaagtgctgggattacaggcatgagccaccacgcccggccaacttgtgtttttttacttaagagtataccaatcactttagctgttcaggccagtgtatataaatttaccttgttctttaaattaatgcataactgaraaaaaggatttggggaggcagtgtctaggatgaagaacaggacctcttttgatgtttttccagatatataagtgaaaattgaaagtatttttaattacctttggtc

SEQ ID NO: 253227 - DNA, 550 bp, Homo sapiens
gatatacatctttgtcttcaacttgtgtttttgttgttggttttttttttttttttttttttttgagatggagtctccctctattgcccaggctggagtgcagtgacacaatctcagctcactgcaacctctgcctcctgggttcaagcaattctcctccctcagcctcctgagtagctgggactacaggtgcatgccatcacagctggctagtttttttgtatttttagtagagatggggtttcaccatattggccaggctggtctcaaactcctgacctcatgatccgcccacctcagcctcccaaagtgctgggattacaggcatgagccaccacgcccggccaacttgtgtttttttacttaagagtataccaatcactttagctgttcaggccagtgtatataaatttaccttgttctttaaattaatgcataactgagaaaaaggatttggggaggcagtgtctaggatgaaraacaggacctcttttgatgtttttccagatatataagtgaaaattgaaagtatttttaattacctttggtc

SEQ ID NO: 253228 - DNA, 562 bp, Homo sapiens
ttaaccaaaaactaccagtttctacttaaagttaaccaatggaaaattcgggtaacagaaactgagctccatacagggaaatgtattcagtataccctgtgatacacaataatagatatgtcttttttttaaakccaagtttaatggacaaactgttcattacaatatgcattaactacttaaagacacactgctggcttatttaaaatttgtggctcaagtgctcttaaaagaaagcaacttctccactagcttgggaaaatgtaaaaagaataaagtttatagaaaaaagacttcttacaaaaactattaaaattaattcatcagaatagtgagcattttacagtgcccactgaagtatttggcttcatttgaaaggctgtttctaatcttttattgcaggtgtaaattatgccccaaaacttacttggtccctttaacttgttgaattaaaaaaaaaaaaaattaaactagcatataatagtgttcacaacactaagagtattctaaagatgaatcacaatttctggatctaggtgtcccactgcctctcactccaccc

SEQ ID NO: 253229 - DNA, 562 bp, Homo sapiens
ttaaccaaaaactaccagtttctacttaaagttaaccaatggaaaattcgggtaacagaaactgagctccatacagggaaatgtattcagtataccctgtgatacacaataatagatatgtcttttttttaaatccaagtttaatggacaaactgttcattacaatatgcattaactacttaaagacacactgctggcttatttaaaatttgtggctcaagtgctcttaaaagaaagcaacttctccactagcttgggaaaatgtaaaaagaataaagtttayagaaaaaagacttcttacaaaaactattaaaattaattcatcagaatagtgagcattttacagtgcccactgaagtatttggcttcatttgaaaggctgtttctaatcttttattgcaggtgtaaattatgccccaaaacttacttggtccctttaacttgttgaattaaaaaaaaaaaaaattaaactagcatataatagtgttcacaacactaagagtattctaaagatgaatcacaatttctggatctaggtgtcccactgcctctcactccaccc

SEQ ID NO: 253230 - DNA, 549 bp, Homo sapiens
aaacagcagtgcctactgcacaggcagttgcaacgataatacatataatcttcatggatttgggagcataggcacgcagcagcccccttctctctgtggctcctgctctcccagccttgggccccctcctctgcttccctctctggcctatttcctctcctcctgtgcacttcttggcctttcttctcctctgctcactccacctgcaggcctcgggcgagctcgccacccagatccttgctgcccaggagaacagggcacggagcctgagatagacctagtgttctgctccccagagacccgagagccaagccccaaactggttgcctctgggaacgagggccgggtgggtctacaggaggtgggcatgtcaatgtcagcaagctgcctcctagccccgcttcctctccctggtggyctggagcccctggcagcagggtgagggtggggagggcagagctggtgtgtgcctgaccatacccctggccctgctatctgcccagggcccctggcccccggcccccaaactccattttcagcatgtgggga

SEQ ID NO: 253231 - DNA, 481 bp, Homo sapiens
atttttgaaacatttcgtatttttcctggcatcaccccacaaattccatgaaagtcacaaggaagaaaatgtacatttttacaatggagaggcctgggggtcaccaccatatgcaagtgatggaacctaacgtattaatagtaggacaacctgccatgatatacctatagatatcatgcagtataatgtattcaaaatcacctacaaagtattcttgccaaaatattcaaccttaatcaaatcaagcctctagacccaattttgcaggaaatatggaggtgagggaaggggatttgaaaaaagttaaatgacaccaagaggaaacaagcagacaaaatcagaatggggaacattctacaagartaatactaggaaaatagtctcaggaaatccagtacgtaactgtaagacccttgttaatggcctcagaaagacttaaaatggtgctttttgtgtgtcctcttagttatatccgaaattc

SEQ ID NO: 253232 - DNA, 542 bp, Homo sapiens
gtagttattcaataggtgttgaatgagtcatctagagtagtcaaattcagagatagaatgtggaatgatggtggctaggggatgggaggtggaggggagaatgaggaattattttttaaggagtatagagtttcagcttgggaagattaaaaagtcytagagatggatgttgctgatagttgtacaacaatgtgaatgtacttaatgccactgaactctactcttaaaatggttaaaatggtaaattttatgttatgcatctttttaccaccattacatttttaaaaatgttgaataaataaatgatggtgtgacaggcagaataattgttctccccaaagatgtccaagtcatagttcctggaacctgggaatctattatgttacccatcaaaggataattaaggttacagatggaattaaagttgctaatcagttgagtttgagctgaagagattatgccgggtcatttgtgttagcccaatggactcacattgattcttctaagtgaaagagggaggcaagagcagaagtcaggggttt

SEQ ID NO: 253233 - DNA, 516 bp, Homo sapiens
gaagtggggtgctttgggaggtgatgaggcagagccctcatggaggaggycacagagagctaactaaccgcttccaccatgggaggacacagccagaaagtgccatctatgaactaggaaacagccctcaccagacaaggaattattgtcatcttgatcttggacatcccagcctctagaactgtcaaatgtaaatttctgctctttataagccacccagggtatggtgttttttatagcagcctgaacagactaagatgccagcaatttcatttctaggtctctggctcagtttgcatcttattgtggcgataacaaatcacaataacgaactgggcaggctaaggagcacaaattcataacctcatagttctggaggacagaagtccaatgggttggcaaggccacaatcctggaggctacagggaagacttcatttcctcgccttttccagcttctagaggcctcctttggcttgtagtcctttcaacaatggcatcactctggcctctgctt

SEQ ID NO: 253234 - DNA, 516 bp, Homo sapiens
gaagtggggtgctttgggaggtgatgaggcagagccctcatggaggaggtcacagagagctaactaaccgcttccaccatgggaggacacagccagaaagtgccatctatgaactaggaaacagccctcaccagacaaggaattattgkcatcttgatcttggacatcccagcctctagaactgtcaaatgtaaatttctgctctttataagccacccagggtatggtgttttttatagcagcctgaacagactaagatgccagcaatttcatttctaggtctctggctcagtttgcatcttattgtggcgataacaaatcacaataacgaactgggcaggctaaggagcacaaattcataacctcatagttctggaggacagaagtccaatgggttggcaaggccacaatcctggaggctacagggaagacttcatttcctcgccttttccagcttctagaggcctcctttggcttgtagtcctttcaacaatggcatcactctggcctctgctt

SEQ ID NO: 253235 - DNA, 516 bp, Homo sapiens
gaagtggggtgctttgggaggtgatgaggcagagccctcatggaggaggtcacagagagctaactaaccgcttccaccatgggaggacacagccagaaagtgccatctatgaactaggaaacagccctcaccagacaaggaattattgtcatcttgatcttggacatcccagcctctagaactgtcaaatgtaaatttctgctctttataagccacccagggtatggtgttttttatagcagcctgaacagactaagatgccagcaatttcatttctaggtctctggctcagtttgcatcttattgtggcgataacaaatsacaataacgaactgggcaggctaaggagcacaaattcataacctcatagttctggaggacagaagtccaatgggttggcaaggccacaatcctggaggctacagggaagacttcatttcctcgccttttccagcttctagaggcctcctttggcttgtagtcctttcaacaatggcatcactctggcctctgctt

SEQ ID NO: 253236 - DNA, 516 bp, Homo sapiens
gaagtggggtgctttgggaggtgatgaggcagagccctcatggaggaggtcacagagagctaactaaccgcttccaccatgggaggacacagccagaaagtgccatctatgaactaggaaacagccctcaccagacaaggaattattgtcatcttgatcttggacatcccagcctctagaactgtcaaatgtaaatttctgctctttataagccacccagggtatggtgttttttatagcagcctgaacagactaagatgccagcaatttcatttctaggtctctggctcagtttgcatcttattgtggcgataacaaatcacaataacgaaytgggcaggctaaggagcacaaattcataacctcatagttctggaggacagaagtccaatgggttggcaaggccacaatcctggaggctacagggaagacttcatttcctcgccttttccagcttctagaggcctcctttggcttgtagtcctttcaacaatggcatcactctggcctctgctt

SEQ ID NO: 253237 - DNA, 542 bp, Homo sapiens
aagcacattcctttcctttaggcacactaagtaagatatggagctaaaagtggattggggttgtgggggatgtctaccgccgcaagatgctgcctgggaacagacacagaaactctccctcgcagataagcaacacagactaagagttggcctaggtggttagggaatggggtgagagctgataaaaaatctctggtctatacagatagcacacctggtcacaactaaatcgttgggctctaggagtagaagacatcccctcctcactagcccgttataaaaaccctgacatttttactaccacctggcaacccgctccggacccctctccatgatacagagctgttctttccttttgcctgttaaactcctgctccaaactcactgtrtatgtgtgtgtgtgtgtgtgtgtgtgtgtgtgtgtgtgtgtgtgtctgcagcctggatctccttgcctgtgagaccaagaacattgatacttatcccatacaacgaggctgcttcttaaggaaacactcactaaatgtatttccacctcttgt

SEQ ID NO: 253238 - DNA, 542 bp, Homo sapiens
aagcacattcctttcctttaggcacactaagtaagatatggagctaaaagtggattggggttgtgggggatgtctaccgccgcaagatgctgcctgggaacagacacagaaactctccctcgcagataagcaacacagactaagagttggcctaggtggttagggaatggggtgagagctgataaaaaatctctggtctatacagatagcacacctggtcacaactaaatcgttgggctctaggagtagaagacatcccctcctcactagcccgttataaaaaccctgacatttttactaccacctggcaacccgctccggacccctctccatgatacagagctgttctttccttttgcctgttaaactcctgctccaaactcactgtatrtgtgtgtgtgtgtgtgtgtgtgtgtgtgtgtgtgtgtgtgtgtctgcagcctggatctccttgcctgtgagaccaagaacattgatacttatcccatacaacgaggctgcttcttaaggaaacactcactaaatgtatttccacctcttgt

SEQ ID NO: 253239 - DNA, 598 bp, Homo sapiens
tggccttttgtgtatttctttattgaaacaaaatcttgcaaataccattagctgtgacatgttttttttgaaagaaaaaaaatatgtattctcayccagttgtataaaaaaccttccacacagcataatttattttaatcctactttcttcaaatgttccatgttttctatgccttttctaatgacaatgctgacaaagaaatgcattttggtatttgcatttcattctatattattttacccattttttactgcagtggaaagaagaagtatttccccaatgacatatgtctcttttgtctttcactaatctcaaaagagacttctgtatatttataatcctatttagtaaacttttataaagtaccggacagagtattgcctgattttacatactactgaaaaaaatggaggcagctttgtcttcatgtcctgagtgtttacctttctaaggtcttgctaatcacaacagctttaaccctcattatctaatatctcccggcataggatcaggtgggctgacaaaaggatgtggcagacgtaggaggctctgctggcccagctcactccttcaccccactaccagcacgttgatttg

SEQ ID NO: 253240 - DNA, 548 bp, Homo sapiens
ccagtttccagattcacattttttcatgagtaacgaagaggcatcttttattcagatttgagagcaatcaatgggaaagcccgwtgtagatcacatggccttctctgaaggttaacactgattccataaggatcaattcccccaacacaatgatcctcaaagtgtggtcccaagccagcaacatcagcatcacctgggaacttgatagggcatttgggggttaccacagaggcgctgaattagcatctggttaactagccctccaggtgatcctgatgcaccatcgggtgggagaaccattgcgttagatgaaggggagctgctctatcggaagagaagggtactgggcagaaaacatcattgcctatgattgcgctagcttctctgaccctagtcaagtgagtcctcaccaggttttgataagctcacatcttggagcttgcaggagctcagaccaagcagtacggtgacttctccagcacaggtgccctgggcaggcctggtgaccagccttcaccacgtgcactcccagttaggggtgtttcaac

SEQ ID NO: 253241 - DNA, 548 bp, Homo sapiens
ccagtttccagattcacattttttcatgagtaacgaagaggcatcttttattcagatttgagagcaatcaatgggaaagcccgatgtagatcacatggccttctctgaaggttaacactgattccataaggatcaattcccccaacrcaatgatcctcaaagtgtggtcccaagccagcaacatcagcatcacctgggaacttgatagggcatttgggggttaccacagaggcgctgaattagcatctggttaactagccctccaggtgatcctgatgcaccatcgggtgggagaaccattgcgttagatgaaggggagctgctctatcggaagagaagggtactgggcagaaaacatcattgcctatgattgcgctagcttctctgaccctagtcaagtgagtcctcaccaggttttgataagctcacatcttggagcttgcaggagctcagaccaagcagtacggtgacttctccagcacaggtgccctgggcaggcctggtgaccagccttcaccacgtgcactcccagttaggggtgtttcaac

SEQ ID NO: 253242 - DNA, 554 bp, Homo sapiens
ttttgtgctttcatggtttggcttggcctttcaccgggagaagagcatgtcccaggaaaccactgacccttcaggaatcaaacacccacagagcagacaaatctaatccacaactggcgcagagctgagcctgatgcatgagcgaacaatacatacttgaaaacccccggaatctgggattgtttatgacacagcattagtgtggcaaaaccctgaccgayacagtagctgtgtcaggtgctgggggacaaggtgcaagaagcagaggagggaaggacaacagggagttgagttgcaaagtccaaactctgagcatgtgctctgagattcagatggtggcttcctgctgaatgccaccagttcccctcccctttatttccctaacaggtaaatacacctttgacattgtcacaggtgctgaaggagctgtggctgaggaggtgaattgcagcactgcctgtaaaaggggataccatgtgcacatccatctatgggggaaaggatacaatctatgaggggatattcaaattcagtggaatatgaaacacagggta

SEQ ID NO: 253243 - DNA, 588 bp, Homo sapiens
gttttacaaaccaagttacatttacatgggtaaagatgggattcaaacccaagtctgcccagctcggaatcaatgtcatagcctgtgtaaagatttgggatgggctaaggagatacaaggatgacttctctttccttggcactgattgaatatgtctttataactatgttgagactggccaggagccagtatctcatgcacagtcatttctgcttatttagcatgaggggtctcataattttgagtttcatagtctcataatattaatcctaaacctcagaagcaccctctgtttttcttatccacaaatattgggagggcgtcttagaatggattctcatcacaatttaattagaaaggaaatgtttaaattgctacayatgtatttccaggcagctcggaactggcccgtatctgtaatctcactgagcatacaaaacggtaacaaatgcgaatggaacacctactatgctgagctcccacagaatagtaaagctgcagaaggattatgaaaaatgacaggccccacgctcacataccacagcccacatggtacttgtgccagctatttattgctcggtaaccaat

SEQ ID NO: 253244 - DNA, 588 bp, Homo sapiens
gttttacaaaccaagttacatttacatgggtaaagatgggattcaaacccaagtctgcccagctcggaatcaatgtcatagcctgtgtaaagatttgggatgggctaaggagatacaaggatgacttctctttccttggcactgattgaatatgtctttataactatgttgagactggccaggagccagtatctcatgcacagtcatttctgcttatttagcatgaggggtctcataattttgagtttcatagtctcataatattaatcctaaacctcagaagcaccctctgtttttcttatccacaaatattgggagggcgtcttagaatggattctcatcacaatttaattagaaaggaaatgtttaaattgctacatatgtatttccaggcagctcggaactggcccgtatctgtaatctcactgagcatacaaaacggtaacaaatgcgmatggaacacctactatgctgagctcccacagaatagtaaagctgcagaaggattatgaaaaatgacaggccccacgctcacataccacagcccacatggtacttgtgccagctatttattgctcggtaaccaat

SEQ ID NO: 253245 - DNA, 518 bp, Homo sapiens
gtggctaatactaatatgctttttttgttgttgtttgtttaatcttgggagtttgcckggccctcctggctgtggagtcagtttgtaccacttctgtgagatagacgttatcctactggcaaagaggataaccaaatacagagccccatcttcttttctgtgtttttttttttttttttttttttttttttttagatggagtcttgctccattgcccacgctggagtgcagtggcgtgatctcggctcactgcaaccttcgcctcccaggttcaagcgattctcctgcctcagcctactgaatacctgggactacaggtgtgtgccaccatgcccagccaatttttgtatttttagtagagagagggtttcaccatgttggcgagctggtcttgaactcctgacctcaaatgatccacccgcctcagtctcctgaagtgctgggattacaggcgtgagccactgcgcctggcctttttctgtaattttgataaatcatcaaaatgaaatgcctgggcc

SEQ ID NO: 253246 - DNA, 475 bp, Homo sapiens
taacacaggataatattatttacatgtaacaaataagaaaagtttagcacatgaagtttaaaactcttattgcaaactctagctgctttcacatcaaaccaagcatttattgaatacctactatgtgtcttatgtgttagataataaaaattaacataaaacatggtctctgcctctatttgtatgtgaagcataatggttatatacaccttagaaaatcatatagggaattggttagctaagtgctgaattttgttacagaaaaagtggcattagaattcaaaaggaaatgggtcaaaagagtatatatgctartacctgaaaaaggctataatgggaaacttaaactggagcttaaagcctggaaatattgggtaatgaggttatagaacctatattagctttctatttctgcataatgaaccaccccaaaactcatagtttaaaaaaactacccatttaatgtagctcataa

SEQ ID NO: 253247 - DNA, 646 bp, Homo sapiens
gttcaagctgctcttcttcccaaggtgggtattacttcaggctgataagcctgtagtaggggatggggaggggttgacttctccatttcccctcctggtgcttcccctctccaccatcccaccacaggcctggagcttcaagggggaagagaggaggggagagggataggaaaggcttccttggcagatcctatcctgattggctggttgtgttctctggccttggcacatgctcagtcctgactctctagaggcacttttgggttcccctctgggaatggctgactgcaggccacatgtttctactctggctgcattccagggtccagctcctctttctgcggaggtgccctgagttttctagattgggatctcttttatttgtttgtttatttattttgttttatttattttaaaagaggggtctcttttaaaatgtcctcctgattgccctcctgttacctaagggctaatcatacaattgtygtgaagatgaaataaaataatacatgtaaagcactcttcctggcatgtatttgttgaattaattaatgaatggtttgttgggtgccttctctgtgaggcagtttgcaagtgctttataaacctcattatacaccagtgctatggatttaaaggaactcag

SEQ ID NO: 253248 - DNA, 592 bp, Homo sapiens
atctgaattttgatgtgggaaagcaaaaccagttctggtatacattttttcaattcactttgtatttgattttgagtttgtgttatgtgttttaggcaggcaggtgtgatgcacagaggtgcttttaagctgtctctgagctttgattacacatttgtgagtttttgaaatgaattaggcaggctttgagctaagctggacataaaagctacaacagttttgctgtttgggagacttgaaaaatggagcattttttaatattctgtaactgagtacatccatcacccagtcgtatttattaagtactcacctatgcatgacaacgtgtcaggcacaaagattactgtaaaaaatgccattatttggaaccagagactatggtagtgtttayacttaggagaaaatgaacacaaatgttaaattgtgaatgttattcctaatggggcaaattatggagttatttagtctctgaaagagacagcatggtcagtaaatctcttgacatgtcccacttatgcaataattaactctgctcctcgttggtgtcttaatgaaaaataatatgttccaaagagagaagtaaggcagaagc

SEQ ID NO: 253249 - DNA, 553 bp, Homo sapiens
agaatgctgtgcttgagaagtagagctgtttttcttggcattctactcagtaaagtaggcaattgaagcttcaagaatttgtgcttaactcccatcccaggactaaatacagctatttttattttgtactttaaaaaaagcaacccataaaccttttcatgtcttgtaaattatyccagcctatagaaggttgcccaagactgtccaaggacaatttggcaaaggtttttttttttcctttctttttccctttgtatctctaacaagggatcggtatttacccaaggccctgactgcctccacccttagagcgattcagatctggaacagcagcagctgtttcatatgatgtttttattggtatcacattttctttttggctgttcattcctcatgcttctttctcaagtcctttgcctaaatccaatctcttctagttcatactgccccacattcatttccttctgttctccattctcttagcctgattccctttattaaaaaaaatattttttagagatagggtcttggcttgttgcccaggttggagttc

SEQ ID NO: 253250 - DNA, 590 bp, Homo sapiens
tctaaaatgaaagtagaacagattgtttaaatgttctcaacaaatgttatgtggcctctcagagtttattaattagttgattaattggttctgtttattttcaaatattgaatagatattcccagctccaagaccaatacagttaaattttcttctatagggtgaatttatttctaggcaccctttcttagagagagtggccctttggtattttaatgttgtggggtgggagtgggtatttcatttcacttgggaaggccctaggtctggtctgctgtgrctcacacaccactgcatggtagccaaagcagatggtcaaggttgcaagggtttggtgaacaaaagcggactttggtccttgtttatatttctagattccagcttccactttgcttttgacctctggggagtccttttgtttttattagctcagttatgcattcgagttttattcaaattactatacttagcattttttgtcatttgcagtgagagagttacttagggtctctagtcttttctactgacaaggagtctaatttagataggctaatgtttgtgaacagttgggtctgtgatgtacagtggaa

SEQ ID NO: 253251 - DNA, 551 bp, Homo sapiens
gaagagttactattatagtaatgaaaatgttggtttgggctgcgatattcactaataaaagttcactaatgtgtacatgaattgacatctctggctcaattttgaactctgttaaacggttatatccatttattttggcaacttaagttggaagatcagcctgggtattaagaattccaatgaaaaactgtagcctggaggcatcctgctagtttcttatttaaatgctgctggaagtctgtctgtcagcactcatacttactactgagactatgataggtatttggtaaaaaatgatagtagattattcagtttgtgtattgcttttgttttaagacgctgatagtgattatctaagatgattgttgtttctgttacccttactcacctgttgcaaacatttttccccctctgtcccaagcacattattgccaggttaaatgtacttaaaaggrgctgggcaccgtgactttacacctgtaatcctagcactttgggaggccgaggcgggagctcgggagtttgaaaccagtctgggcaatgcagtgaga

SEQ ID NO: 253252 - DNA, 634 bp, Homo sapiens
tggtttcactcctaattacagatacagatggccacatgatttaaaaaaaaaatttaaagtgtagaacatttgagccgtgctgaagttcattcaatcctatgatgccttatgtctggttttcacagcctgtctttctttttccttcttatctgtttttctttagaaagtagtgtattgggcagtgtgcgtgtgtgtgtgtgtgtgtgtgtgtgtgtatgtgtgtacctatgtataatttatatatatatttttcatttttcttttgcattatagctcttttttgcctgtacctaacgtggttagtctgggttgagtgaatgatatcrcagtgattttggctttcttccagcaggcagagggagaaatgacaaagttgaccaagaatttcatagcacaatgggaagaggaatgcactaaacagactttactcaaaggaaacatgaggaaaacatcttattataagatatatatttaatatgtttttcatatttggagagaaaagttaatgtctgggaatgccttttgattccctggccagaaggatatgtgttgtttgacatctctccccactccttctaagtctttagattagaaatgatttatttacagagaaaagaatggtactttgatatac

SEQ ID NO: 253253 - DNA, 445 bp, Homo sapiens
ctgagtatctgagtgtgacatttagcctggaagtgatatatttgggcattgtcagtgtttacaatcaggagactggccaggatcactgatttagtttttgctgctgctgtaacaaagtaccataaactttgtaacttaaaacagcacgagttcattatggtttttcgcccccaactctgtcacccaggctggaatgcagtggcatgatcacggctcattgcaccctttacttcctaggctcaagtgatcctacctcagcctscttgagtagctggaatggaagcctggctccgtgtccagctactttttttcttactttttgtagagagaggtctccctgtgttgcctaggctggtctcaaattcctagcctcaagcgatcctcccgcctcggcctctccaagtgctaggattactggtatgagctgctatgcctgtcctattat

SEQ ID NO: 253254 - DNA, 578 bp, Homo sapiens
cacacaccacgtcatgcaccgctctcgcacgtgttgtgttgtgtgaaacaaaccagacaagaagggacgcatcccaagtgactgattggtttatgtacagtttaagaacaggcaaatctcactgctatttatagatggcacagcagtggttacctctgctagtggggcsgggggtcgcttgtgtactgggaaggggctccagggaaccttctggaggctgagggtgcccttgatcctgatttgagtggtgactatataggtataaaaaatgatcaagctggacacttaaagtcaacatagtttatgcactttcacgtgtaaacattattccttaagaaaataaaaacagcaccagtggctccccccttccctgcagactcccccgacaccaccacctccttcttcgccttgcatcggtacgataaggcacttgcttgacgggaaagagaaactcagctgccagctggggttcatttgcactttcccccgcctggtctgcggtctggctgtgcagctagccgctctgacggggaggaggggcccaaagccactgcctgccgcctgggcaggggagaggg

SEQ ID NO: 253255 - DNA, 598 bp, Homo sapiens
gtatattgttagaaatgaactttttgtgtaagttaaggayaattttaaaaattattcctgaaaccacttttgtgttttcagacaagcttgaaaacatgtatgattgggggtgagggcgaacttaaaagccagggtcgagaccacttagttctccccctgcatgtgagggagtttttgacaaacgaacttggagataaatcccgatggagtatgatcgctgtgctgtataacaaaagagatggcctcgaaggagatgtgatcagaaaataaatttgaaaacaaaagcctgatttgatgcaagaacatcaggaaaccaatcagcgtgggattctcttaatagccatcaccaaaaccctgcattcctcattcctttgatgcccttgtctgataacactcagggcacccccagctggctcttccgtgagctgatcaaacccagttccaacagccagtgatgagcacagctcagattcgacaaactgcaagcctgctcaccccacacctgagagcctagacagattccaaacaaccagctaattaaacctggagcaccaagctatcatcattcgagattcatgggcatccaacgagcagaaga

SEQ ID NO: 253256 - DNA, 498 bp, Homo sapiens
ttctaacactgttatgagctgaagtgtgtccccccaaaatttatatgttgaagttctaacccccaatactgcagaatgtaagtatatttggaaagtgagagcctttaacaggggtagttaagtaaaatgcagtcattgaggtgggccctaatcccatgtgactggtgtcctcataagaagagcctattaggagacagacagttacagagggaagmccatgtaaagatacattgagaagacagcatctacaagccaaagaggaaggcctcaaaaaaaaaaaaaaaaaaaaaaaaaaaaaaaaaaaaaaaaaaaacctgctgacaccttgatcttggattttaccctccagaattataagaagatacatttctgttgtttaagccacccaatccgtagtacttttccatgcagctttggcaaactaacacaaacaccaaccagagaatgtccccaaggtccttaaaaacaagtgcttccaaagaacattcatatggctac

SEQ ID NO: 253257 - DNA, 589 bp, Homo sapiens
ttgggggttttttgtgagggttatttgtcttagaaactgagtctcactgtcactgtgttactargtctttatggccctatgaaattgggtctcactatgtctaagaaactgggtctcactatgtcactatgttatcctgccagtgaatcaaggtggtgtggaagctggtggtccatcttgacctcactttttccagtgcagaaaccctgaatcaaggggaaatttcctgcatggcttggtggtagacagattagagggaagggtgttgtggatatggaagtccaattatcttactgtatactcagattttttccacttctccatggccctgggaactgtctcattcccatatatgaattctgggatattgctggtgataatctcagcactgtatatttattttttgttttctgggtagggatgtgaagccagcttgcttctacactgccattttggaaccagaactgattaggttttgaaatcatttgtgtatttttcatttaatgttatataattttatcaagtactacaagtataccaaaaaatatacaaataatacacagtcctgtgataatagatctgcctgctc

SEQ ID NO: 253258 - DNA, 589 bp, Homo sapiens
ttgggggttttttgtgagggttatttgtcttagaaactgagtctcactgtcactgtgttactaggtctttatggccctatgaaattgggtctcactatgtctaagaaactgggtctcactatgtcactatgttatcctgccagtgaatcaaggtggtgtggaagctggtggtccatcttgacctcactttttccagtgcagaaaccctgaatcaaggggaaatttcctgcatggcttggtggtagacagattagagggaagggtgttgtggatatggaagtccaattatcttactgtatactcagattttttccacttctccatggmcctgggaactgtctcattcccatatatgaattctgggatattgctggtgataatctcagcactgtatatttattttttgttttctgggtagggatgtgaagccagcttgcttctacactgccattttggaaccagaactgattaggttttgaaatcatttgtgtatttttcatttaatgttatataattttatcaagtactacaagtataccaaaaaatatacaaataatacacagtcctgtgataatagatctgcctgctc

SEQ ID NO: 253259 - DNA, 587 bp, Homo sapiens
aaactggcaaatgttctgctcggatgctggctactgctttctgctctggttttcagctgaaatctccagctcctgctttctctatcagcaaatgcgttgaagatataagttatgccaaatattgagctcaaatcctaggattaccttctttctgggaatttgtttcatcaaatctttrctgctttggtagctctgctatcccatcaaaaactcatagttcttccttcttttatagttgttttcagtggaagggctgctccaacactatatagccatgtttctttctttctttctttcagaagaagaagaagaggaggaggaagaagaagaggaggagaaggagaagaagatagtgacaaggatagcaaatgcaaacctaagagacaaagaaattcaactactagaaggaccacaggcaaaattgtgatatgggattatcttcctctaatgtcattttacttccctttttttcaccattacttacatctgtcattttctttctactgggacccaatgtcttgtacattctaacttcttggaagtctaaatcaaactaggaatcaggaagaagatgatcatagacagca

SEQ ID NO: 253260 - DNA, 587 bp, Homo sapiens
aaactggcaaatgttctgctcggatgctggctactgctttctgctctggttttcagctgaaatctccagctcctgctttctctatcagcaaatgcgttgaagatataagttatgccaaatattgagctcaaatcctaggattaccttctttctgggaatttgtttcatcaaatctttactgctttggtagctctgctatcccatcaaaaactcatagttcttccttcttttatagttgttttcagtggaagggctgctccaacactatatagccatgtttctttctttctttctttcagaagaagaagaagaggaggaggaagaagaagaggaggagaaggagaagaagatagtgacaaggatagcaaatgcaaacytaagagacaaagaaattcaactactagaaggaccacaggcaaaattgtgatatgggattatcttcctctaatgtcattttacttccctttttttcaccattacttacatctgtcattttctttctactgggacccaatgtcttgtacattctaacttcttggaagtctaaatcaaactaggaatcaggaagaagatgatcatagacagca

SEQ ID NO: 253261 - DNA, 587 bp, Homo sapiens
aaactggcaaatgttctgctcggatgctggctactgctttctgctctggttttcagctgaaatctccagctcctgctttctctatcagcaaatgcgttgaagatataagttatgccaaatattgagctcaaatcctaggattaccttctttctgggaatttgtttcatcaaatctttactgctttggtagctctgctatcccatcaaaaactcatagttcttccttcttttatagttgttttcagtggaagggctgctccaacactatatagccatgtttctttctttctttctttcagaagaagaagaagaggaggaggaagaagaagaggaggagaaggagaagaagatagtgacaaggatagcaaatgcaaacctaagagacaaagaaattcaactactagaaggaccacaggcaaaattgtgatatgggattatcttcctctaatgtcattttacttccctttttttcaccattacttacatctgtcattttctttctactgggacccaaygtcttgtacattctaacttcttggaagtctaaatcaaactaggaatcaggaagaagatgatcatagacagca

SEQ ID NO: 253262 - DNA, 510 bp, Homo sapiens
tcattcattctatattcatgggacaagtttgttgtttttttttggtttgtttgtttgtttgtttgtttgtttgttttagtagagacagggtttcaccatgttgcccaggccagtctcaaactcctggactgaagcaatccacttgcctcggcctcccaaagtgctgggattacaggtgtgagtgatcatgctgggccccatttaaaaaaatgttttgaaaattatattttgatgccctttcctagtagaacacatctcctggaggcccaggaagggaaggtggagactgggatcattgggatctttgagagatttttggtctcatggcacatggtggtgcctcagatgcaagcacagcaacctctgagccctgctccaagtttgtataggtcagtccccacttccaggtgccaaattctgtcacagtgatcttttgctrtgcaataagccatcttgaaaacactggcataaaataatgattatttattaccaatttttaaaaaagagaga

SEQ ID NO: 253263 - DNA, 544 bp, Homo sapiens
aaccatatcatctaccacaggggaagggggtacatgctccagtaagacaaaggcawccctcctaacaggcaagaatgtcgtgtgtgccatagcttagaatttgtccaatgatatcaaggttgtcatgttcttacactagggatagtaaataaaataggcagcaagaggcattcctaggactggagacaatcagaaatcaacatggcagattagcatccaagatggagtcaccgctgtctctgcaagctcaagggtcctcccctctgctccctcctcaaaggcagatgccgatttgggggtcaagtccccaaacataatcagccctgtttctacaccatagcctgttaatagaagggcacttgggatgtagtgggaagctaaacttggcaagagcactgtcccttgttttcttggcaggctttttctcaggctgtctttagagaagtaaggttggggtgcagtgaggcaatcttggctcactgcaacctctgcctcccaggttcaagtgattctcctgcctcagcctccccagtagctgagacta

SEQ ID NO: 253264 - DNA, 530 bp, Homo sapiens
tcagggtgatgccacagtgtgaagtgaaagcaagtttattaagaaagtaaaggaggaggggcacsgtggctcactcctgtaatcgcagcactttgggaggccgagacaggtggatcacgaggtcaggagatcaagaccatcctggttaacacggtgaaacctcatctctactaaaaatacaaaaaaattagccaagtgtggtggcgggtgcctgtagtcccacctactctggaggctgaggcaggagaatgggatgaacccgggaggcgaagcttgcagtaagccgagatcgcgccactgcactccagcctgggtgacagagggagactccatctcaaaaaaaaagagagaaagtaaaggaataaaagaatggctaccccatagacggagcagccgtgagggctgctggttgcccatttttatggttatatagtagatagatatgctaaacaaggagtggatttttcatgcctcctctttttagaccatatagggtaacttcttgatgttgccgtggcatttgtaaactg

SEQ ID NO: 253265 - DNA, 530 bp, Homo sapiens
tcagggtgatgccacagtgtgaagtgaaagcaagtttattaagaaagtaaaggaggaggggcacggtggctcactcctgtaatcgcagcactttgggaggccgagacaggtggatcacgaggtcaggagatcaagaccatcctggttaacacggtgaaacctcatctctactaaaaatacaaaaaaattagccaagtgtggtggcsggtgcctgtagtcccacctactctggaggctgaggcaggagaatgggatgaacccgggaggcgaagcttgcagtaagccgagatcgcgccactgcactccagcctgggtgacagagggagactccatctcaaaaaaaaagagagaaagtaaaggaataaaagaatggctaccccatagacggagcagccgtgagggctgctggttgcccatttttatggttatatagtagatagatatgctaaacaaggagtggatttttcatgcctcctctttttagaccatatagggtaacttcttgatgttgccgtggcatttgtaaactg

SEQ ID NO: 253266 - DNA, 577 bp, Homo sapiens
tgtttttattatacagtttcatccttttagaaatatagaaagatcctaagtttgggcacagtaagacactcaatatagatctactactaaacaagtaagaccaattacacaattaatgtcctaataccccgagtggagaagtaaaatctacttgttttctgttgacttgaaygccttctcttctttgttgaattaatcaatctatttgactccaatgtcaaattaataaatgtcactttagaatattaaaatgtacaattatgaattacacatttaattttaaaacacatcattctgatctctgtcttgattgatactagaagattatcttccaaactaaggtggaaaaaatgacagactttagctattggcaatgataggtcatttttttagggaagaggagtaaagagggccacctccataggtcagatatccctttgttctaagaagccaccacccctgtttcttcatatgaaaaaaaccagaggcatccagtggttcccaaaaccttctcaactttacgcttgaggaacccacagatttcaaataatacaactgacctaagacactcatttgt

SEQ ID NO: 253267 - DNA, 560 bp, Homo sapiens
actggcaaactaacactaaaagaaataaacaagtattgctttttcaaaagcctaaatcggctgagtgcgatgacttacacctgtaatcccagcactttgggaggccaaagcaggcggatcacctgagtcaggagtccragaacaggccggccaacatggtggaatctcgtctctactaaaaatacaaaaattagctggacgcctgtaatcccagctactcaggaggctgaggcaggagaatttttccctgtaaccgggaggcaggggctgcagtgagtcgagattacaccactgcactccagcctgggagacagagcaagactccatctcaggaagacaaaaaaaaaaaaaaaaaaaaaagcctacatcaaggaaaacagaaccaaaacaccagggacaaaatggtacataagaggcaaaaaaattttcaccaaaattattcagatgaacaataataaatgtgcctgcatctgaagatgttctaaaccttcatttaagcaagaagcaagatcaagatctgttccgtcagttacctggagtctgtcatctttctgaatagg

SEQ ID NO: 253268 - DNA, 631 bp, Homo sapiens
tgttccgtcagttacctggagtctgtcatctttctgaataggggacagaatcacctcaaatttaactaataaaaatttatgacttggcaaacaccccaggtatttttattgactaacaaatcagctatgacaatcttagcaacaaatcaagttatgctatggggtatgtccacacttccctgttccctctacaacaggagaaaatcaaatytttccaacatcctaacaaactgttattgcctgtaaccaaatgtatcacagtatcgtctaccaaggcgttacatcctgaaactttcctacaaaaagcacagcttcaaagaaaccttgcaagctttcttgtaagctcctcccttcccccatcgcccctccccagagccaagaaataaagcacttgaaagaaacaacatggataatatttattaatagctcatgtacatattccataactacataagccatttggcttcatacctgtcagcaatgaagtcagctggccctagcacgtggctgcgactcttctctatttatttagaactacaaactacaatttacacttttccaaaagctgtaggactatttgggaagggcactttattcttctaaaaggttactaaattctcttgtatactta

SEQ ID NO: 253269 - DNA, 631 bp, Homo sapiens
tgttccgtcagttacctggagtctgtcatctttctgaataggggacagaatcacctcaaatttaactaataaaaatttatgacttggcaaacaccccaggtatttttattgactaacaaatcagctatgacaatcttagcaacaaatcaagttatgctatggggtatgtccacacttccctgttccctctacaacaggagaaaatcaaatttttccaacatcctaacaaactgttattscctgtaaccaaatgtatcacagtatcgtctaccaaggcgttacatcctgaaactttcctacaaaaagcacagcttcaaagaaaccttgcaagctttcttgtaagctcctcccttcccccatcgcccctccccagagccaagaaataaagcacttgaaagaaacaacatggataatatttattaatagctcatgtacatattccataactacataagccatttggcttcatacctgtcagcaatgaagtcagctggccctagcacgtggctgcgactcttctctatttatttagaactacaaactacaatttacacttttccaaaagctgtaggactatttgggaagggcactttattcttctaaaaggttactaaattctcttgtatactta

SEQ ID NO: 253270 - DNA, 631 bp, Homo sapiens
tgttccgtcagttacctggagtctgtcatctttctgaataggggacagaatcacctcaaatttaactaataaaaatttatgacttggcaaacaccccaggtatttttattgactaacaaatcagctatgacaatcttagcaacaaatcaagttatgctatggggtatgtccacacttccctgttccctctacaacaggagaaaatcaaatttttccaacatcctaacaaactgttattgcctgtaaccaaatgtatcacagtatcgtctaccaaggcgttacatcctgaaactttcctacaaaaagcacagcttcaaagaaaccttgcaagctttcttgtaagctcctcccttcccccatcgcccctccccagagccaagaaataaagcacttgaaagaaacaacatggataatatttattaatagctcatgtacatattccataactacataagccatttggcttcatacctgtcagcaatgaagtcagctggccctagcacgtggctgcgactcttctctatttatttagaactayaaactacaatttacacttttccaaaagctgtaggactatttgggaagggcactttattcttctaaaaggttactaaattctcttgtatactta

SEQ ID NO: 253271 - DNA, 638 bp, Homo sapiens
tgcaggtgaatttgtggatatattagaaggaagatgacaggcagtgatggagtgttgaagagctcaaacattagacagtactgggtctgagttctgactctgccttttgcaagctgtgcaaccataggccagttatgataaccttagttatcaagttataactaataggattgtgttgaacacgaaatgacatgataaacatatgtaaactgcttggatcagttgcccactagctcttgttaaggagctaaaatgttagctcttgctgagggtgctgtcaaatggcttctgtttctcatggagcagaaatctataaggtcatccactggtagtggtggggagaaggaagaaggtgcagaaagttttacrgatgtcttggaaaggaaagaaacctggtgagggaaatgtgggcagcatcagaggcccacttgaagtcagagaaaaggagcattggggcatggaggtgagggggtactttcttcagcttttctctgaagacaattgtgcatgtgaaacaagggttaaaatcagatctattgccctcctggatttattggcttcgtttgctctttctggctaatttgattggagttctgaaagtagagaatattagaggttccttggaaggaaaataagca

SEQ ID NO: 253272 - DNA, 537 bp, Homo sapiens
tattttctggttgctgaataaattctttcaactgctttacagtagccaatcttcggtctcggtcgttttcccgggtgatcctccgaagaagatatgacagtcgagactcatcacaataagacatcgatctctctgtgaatatataaacattttgttgtccactgagtataaataagcaaaggaaattttaaattttaaaataattttaaaatttttaaaattaaaaattatttaaataataattaaattattatgggggctcatgcctgtaatcccagtactttggaaggcrggtagatcacatgagttcaggagtttgagaccagcctgggcaacatggtgaaaccctgtctccacagacacacaaaaaattacataaactagccagccaaggtggggtgcacctgtagtcccagctactcgggaggctgaggcaggagaatcactggagcccgtgaggcggaggttgcagtgagccaagatcaccccattgcactccagcctgggtgacagagcaagaccctctctcaaaaataa

SEQ ID NO: 253273 - DNA, 405 bp, Homo sapiens
agtgaattgtgcagcttcccatayggcccactgccaaaggatagcatctgtcttcaggagattgcgtggaattgttgactggtcacgcttatccagtctctggcagctatagaacagtctttccaaccaattgtccttcctgggaaaagtagtttcatatttaaaagacaatgacaacttcattttaataatgaaaaaaaaatgcaaggggaatgggaataaggaactgtaattttccctactccaaaaaaaggcaaaacctatgaaattgagaagcattatgtccccccctctcattttgaggtcttgtatagttaacaggatgaggtacagtgtggaaggatgattagggtaaacggctcatgccagtcaggaatgaaactcattcaatgcaactaagcatct

SEQ ID NO: 253274 - DNA, 405 bp, Homo sapiens
agtgaattgtgcagcttcccatatggcccactgccaaaggatagcatctgtcttcaggagattgcgtggaattgttgactggtcaygcttatccagtctctggcagctatagaacagtctttccaaccaattgtccttcctgggaaaagtagtttcatatttaaaagacaatgacaacttcattttaataatgaaaaaaaaatgcaaggggaatgggaataaggaactgtaattttccctactccaaaaaaaggcaaaacctatgaaattgagaagcattatgtccccccctctcattttgaggtcttgtatagttaacaggatgaggtacagtgtggaaggatgattagggtaaacggctcatgccagtcaggaatgaaactcattcaatgcaactaagcatct

SEQ ID NO: 253275 - DNA, 405 bp, Homo sapiens
agtgaattgtgcagcttcccatatggcccactgccaaaggatagcatctgtcttcaggagattgcgtggaattgttgactggtcacgcttatccagtctctggcagctatagaacagtctttccaaccaattgtccttcctgggaaaagtagtttcatatttaaaagacaatgacaacttcattttaataatgaaaaaaaaatgcaaggggaatgggaataaggaactgtaattttccctactccaaaaaaaggcaaaacctatgaaattgagaagcattatgtccccccctctyattttgaggtcttgtatagttaacaggatgaggtacagtgtggaaggatgattagggtaaacggctcatgccagtcaggaatgaaactcattcaatgcaactaagcatct

SEQ ID NO: 253276 - DNA, 620 bp, Homo sapiens
agagcagtgtttctaatgtaatgatacaaggcccagggttattcatagtttcaccctttctcttattcctcattaaagcatgtttgaatccaggtaagaggcattacaggggaaaaccttgaatttatttttgaagggtaaatcatttccaagtggtattaaccattagtatggaaagcaacatatcctataactgctctgtgacagtgagactatctttgctgctttagagaataagtacattcctacttcattggctttagtgcaaatctcatttcctggtttatatccattacaaattagatctcaccatgagagcaaaatcccttaataaacctaggtaaaagcaatttgaagtaatatgatgcttaytccagtgtcaccactaggtgtggtgtttgcatcaagtcattttggggtgctttatggaattgcttcctagtagggaattccctgacttcacactttccagagacgacgctctctctctttttctctctaatacttacaagaatggactgcaaggctacatttagtcaggcgataccatccccagcacatggtggcttgttggtgtgaggtctaaggattccggtcatttgaaacgaatggcctcctag

SEQ ID NO: 253277 - DNA, 620 bp, Homo sapiens
agagcagtgtttctaatgtaatgatacaaggcccagggttattcatagtttcaccctttctcttattcctcattaaagcatgtttgaatccaggtaagaggcattacaggggaaaaccttgaatttatttttgaagggtaaatcatttccaagtggtattaaccattagtatggaaagcaacatatcctataactgctctgtgacagtgagactatctttgctgctttagagaataagtacattcctacttcattggctttagtgcaaatctcatttcctggtttatatccattacaaattagatctcaccatgagagcaaaatcccttaataaacctaggtaaaagcaatttgaagtaatatgatgcttattccagtgwcaccactaggtgtggtgtttgcatcaagtcattttggggtgctttatggaattgcttcctagtagggaattccctgacttcacactttccagagacgacgctctctctctttttctctctaatacttacaagaatggactgcaaggctacatttagtcaggcgataccatccccagcacatggtggcttgttggtgtgaggtctaaggattccggtcatttgaaacgaatggcctcctag

SEQ ID NO: 253278 - DNA, 620 bp, Homo sapiens
agagcagtgtttctaatgtaatgatacaaggcccagggttattcatagtttcaccctttctcttattcctcattaaagcatgtttgaatccaggtaagaggcattacaggggaaaaccttgaatttatttttgaagggtaaatcatttccaagtggtattaaccattagtatggaaagcaacatatcctataactgctctgtgacagtgagactatctttgctgctttagagaataagtacattcctacttcattggctttagtgcaaatctcatttcctggtttatatccattacaaattagatctcaccatgagagcaaaatcccttaataaacctaggtaaaagcaatttgaagtaatatgatgcttattccagtgtcaccactaggtgtggtgtttgcatcaagtcattttggggtgctttatggaawtgcttcctagtagggaattccctgacttcacactttccagagacgacgctctctctctttttctctctaatacttacaagaatggactgcaaggctacatttagtcaggcgataccatccccagcacatggtggcttgttggtgtgaggtctaaggattccggtcatttgaaacgaatggcctcctag

SEQ ID NO: 253279 - DNA, 486 bp, Homo sapiens
gactggaggtgcggggcaagtatggaagcatggagaccattaatttatgggggcaatggtagagggaagagaaacaatgctattaactggagtaggagcacacagagaacaagccatgttttaagatttctaatgaaatgtgcagatgagattgttgggtaagctgttaagaattggattttgaactaaggagacagtstaagcttgagagatttgcagatgattagtacacagaaaaggccctctttccttttcagtctctatactctagagcctttgtaagcaaccaaaccagagagaagcctctggagaatagtgagtgaagaggaaggaaggcctgggtcagaatcctagtttagcatttttgtgaaaggatagaagaggaagccattcaaaaaaatacagggacattgagaagggaagtgccctagatataggacatccagatgggagtagtcagccttgtcagatgctctagggattata

SEQ ID NO: 253280 - DNA, 616 bp, Homo sapiens
gaactcttgggcccaggtgaacttcccacctcactcagccctacaagcgggtgtcaccatacccagcttttttttttttttcctttttaaagtggggtggtgccatcacgactcagtgcagcctctatctcttgggctcaagtgatcctcccagcatagctcctgctaattttttatttttgtagagatggggtctcagtgtttcccaggctggtcttgaacttttggcctcaagcagtcttcccacctcagcctcccaaagtgtgggattatagacatgagccactgtgcatgcatggccaagaatgcttccccctccgcctctccccyccactcttttttttttggagacatggtctctgttgcccaggctggagtgcagtggcacgatcttggctcactgcagccttgacctcccaggcttaagtgatcctcccacctcagctctcaagtagttggtgggactactggtgtgagccaccacacccaactaatttagaaacaaatttggtagagatgaggtgttgttatgttgacatggctggtctcaaactcctggactcaagagaaccttccagctaatcctctcaaagtgctaggatgatagatgtgagtc

SEQ ID NO: 253281 - DNA, 616 bp, Homo sapiens
gaactcttgggcccaggtgaacttcccacctcactcagccctacaagcgggtgtcaccatacccagcttttttttttttttcctttttaaagtggggtggtgccatcacgactcagtgcagcctctatctcttgggctcaagtgatcctcccagcatagctcctgctaattttttatttttgtagagatggggtctcagtgtttcccaggctggtcttgaacttttggcctcaagcagtcttcccacctcagcctcccaaagtgtgggattatagacatgagccactgtgcatgcatggccaagaatgcttccccctccgcctctcccccccactcttttttttttggagacatggtctctgttgyccaggctggagtgcagtggcacgatcttggctcactgcagccttgacctcccaggcttaagtgatcctcccacctcagctctcaagtagttggtgggactactggtgtgagccaccacacccaactaatttagaaacaaatttggtagagatgaggtgttgttatgttgacatggctggtctcaaactcctggactcaagagaaccttccagctaatcctctcaaagtgctaggatgatagatgtgagtc

SEQ ID NO: 253282 - DNA, 549 bp, Homo sapiens
atgtagccttttcagttggcttctttcacttaccagtgtgcmttgaaggtttctccatgtctttttgtaatttgagaagctcattttttaaaaattttattcttttagattgttgaacagataaatacgaaactgccatcatcatttgtagaaaaactgtttataccatcatctaaactactattcttgcgttatcataaagaaaaagaggtaagtaatacactgataatgaattttgacaacttgagtcactgaagagttggacctaatgttgcttaccccaggctatataagtgaaattgagtgaaatgtgaaatgtttgatttagaatatagtgattgtatttgttcttttaaatttatatttcttgataatcatactgaatactttcatgaatggtgtgccagatactcttttcagactatgcatcttttgctgttattaaatttattaaattttcataagggtaaaacaagttgacacatttataaagttataaattaagaagtactgtatatttggtaaacaaaaatgactggcttttcaacc

SEQ ID NO: 253283 - DNA, 549 bp, Homo sapiens
atgtagccttttcagttggcttctttcacttaccagtgtgccttgaaggtttctccatgtctttttgtaatttgagaagctcattttttaaaaattttattcttttagattgttgaacagataaatacgaaactgccatcatcatttgtagaaaaactgtttataccatcatctaaactactattcttgcgttatcataaagaaaaagaggtaagtaatacactgataatgaattttgacaacttgagtcactgaagagttggacctaatgttgcttaccccaggctatrtaagtgaaattgagtgaaatgtgaaatgtttgatttagaatatagtgattgtatttgttcttttaaatttatatttcttgataatcatactgaatactttcatgaatggtgtgccagatactcttttcagactatgcatcttttgctgttattaaatttattaaattttcataagggtaaaacaagttgacacatttataaagttataaattaagaagtactgtatatttggtaaacaaaaatgactggcttttcaacc

SEQ ID NO: 253284 - DNA, 513 bp, Homo sapiens
gcctgggttccccggccagactaggccatgctaccctgtgatcatactgtgggactttcctttgtggcacttggctaatttgtaattatttgcttagtagagtgattatacatataatctctgtctccctgaccagaccgaaagaactacgaggtcaggaaatacttctgtttagttcctcttatgtatacctactaatatatttgttagaaactattattactattattattataatattacaatattatagtaatattactattattattgaatttattataaaatgtaaataaacaggaaaaaattaaagacaccagtcagaaatcaaatcacagrcaagaaaatacctgtaccaggatgagacggcatttgttatggttatatgtacccatgaccttacttgttcctacttaaagttctttttttttttttgaaacagggtctcactcactcatcgcccaggctagtgtgcagtggtaccatttcggctcactgcaacctccgcctcct

SEQ ID NO: 253285 - DNA, 559 bp, Homo sapiens
gggtaattcacatcccaggtgggatgagcaggatggcacgagatttcatcaaactactcagaatgacacacaatttaaaatgtatgaactgtttattcctgcaattttagaccacacttgaccaaagtagctgaaaccccagacaatgaaaacatggataagggaggactgctgtacatcaaggccttttaatatataaccaagataacaaatcaactcccacacaatttatttttatcagtagtgactgaaattagaagacattaacctaaggaacattatccaacttgccgttaaattactcaatatacccatgattaataaggtaattaggtttaaaaaggtacaaaaaatattcctsagtatggctctatcatgggtcctacaaagatcttgcccttagtagacaactactccagcttaaacacggatacaccaaacttgtcaagtaaacagtgacatttctaagagaaggataacctaaggcgttattctcgagttttcatttactattttgtataatcctagaagtgaacatgttaacaaagataagattata

SEQ ID NO: 253286 - DNA, 434 bp, Homo sapiens
cctccgggtccgggctggggatgcgggctcctcgccccctcgcggccgccggctgttggtccttttgtctgcactggggagagggccgggggccagctccggcctrggggggcagcccgggctcaccctccccgcttccaaccccaattcctccccggccgctcctcctgctgccccttggcgctctcgggcgcggggcgcggggtgcggggccggggggcttttgcgcgggccgcgggcaccccgcctcctcgggccccggcggggacggccccggcgtctgacagccttgggtggagctgggggaggggaggatgggcgtgggcgtgcagaccggggggtatcagtccccgcgtctgggtctcgcagaaaagcttctaaatttagatttcggagattgtgttgtctaagggtttgtctgagccgcctcggaa

SEQ ID NO: 253287 - DNA, 610 bp, Homo sapiens
ggggacctgcccctttctgcccaggagcctgtctgcctcctgctgccatccatgtcacccatggtgcccaggctgtttgtgccaaggggcacctgcgggcccatgscaagccaccctcagcccccccttaccctccctgcctcacatgcttgtccgtgtccaaagttcggagaaggccgaggcagtagggggctgcttgtcagcactgccccaagcgcacacacacccaggcttggccaaaactttgctccaaaatcagagcaggtgctgggagtggggagaggccatgcagtgggagcaggcacttctgaacctgcaggggcaggggggtttcctgagcccccgagtgcagggatgcccaggtctgcagctgtggctgggcagctgcagctctgcccaggagtgtggggctcccaaccctccaactcagaagggggcagggctcccacctgttactggctcccgcagctcaacagcgcacaaagccccggccatgcctcccactgcagccgatgtcatggcagcagccactccagacagggtgctgctgccatcactaatattttgaagctttgtgaaaggtttgtattcacaagacctttcatgattt

SEQ ID NO: 253288 - DNA, 610 bp, Homo sapiens
ggggacctgcccctttctgcccaggagcctgtctgcctcctgctgccatccatgtcacccatggtgcccaggctgtttgtgccaaggggcacctgcgggcccatggcaagccaccctcagcccccccttaccctccctgcctcacatgcttgtccgtgtccaaagttcggagaaggccgaggcagtagggggctgcttgtcagcactgccccaagcgcacacacacccaggcttggccaaaactttgctccaaaatcagagcaggtgctgggagtggggagaggccatgcagtgggagcaggcacttctgaacctgyaggggcaggggggtttcctgagcccccgagtgcagggatgcccaggtctgcagctgtggctgggcagctgcagctctgcccaggagtgtggggctcccaaccctccaactcagaagggggcagggctcccacctgttactggctcccgcagctcaacagcgcacaaagccccggccatgcctcccactgcagccgatgtcatggcagcagccactccagacagggtgctgctgccatcactaatattttgaagctttgtgaaaggtttgtattcacaagacctttcatgattt

SEQ ID NO: 253289 - DNA, 569 bp, Homo sapiens
gggtatcggtttaatcaaacctccatcgatgctgcctgtttcttaactattgttgctgtatatcaatcagtttctcttgattcactaatcggatggcacggggatatgaattgtcctgggattcaagaaatcaggttgacataattctttataatgtgcctgcttttaaatggcattatttcaccccactcacattatttcatgttcctacagctgacaggtaaagggtccagattgcaattggctgtgggtgagaaagaaatagggaaaaagcctggagccttggggtcaaactattttgactgctggctctactactgcctgttagatgagacccytctgggtctcaacgtccttaatccttacataaggacaagaatctactcaggcacagaactgttatgaggatgaatgaactggtgtatgaatgagcctagatcagtgtctggcaagcaggaaaaagagtctcaacaaacgacagattcactccccagctgccctcatttccactcccgaaaacctggggagttacgaatgtatctgcattatttttataggtaagatgccaa

SEQ ID NO: 253290 - DNA, 569 bp, Homo sapiens
gggtatcggtttaatcaaacctccatcgatgctgcctgtttcttaactattgttgctgtatatcaatcagtttctcttgattcactaatcggatggcacggggatatgaattgtcctgggattcaagaaatcaggttgacataattctttataatgtgcctgcttttaaatggcattatttcaccccactcacattatttcatgttcctacagctgacaggtaaagggtccagattgcaattggctgtgggtgagaaagaaatagggaaaaagcctggagccttggggtcaaactattttgactgctggctctactactgcctgttagatgagacccttctgggtctcaacgtccttaatccttacataaggacaagaatctactcaggcacagaactgttatgaggatgaatgaactggtgtatgaatgagcctagatcagtgtctggcaagcaggaaaaagagyctcaacaaacgacagattcactccccagctgccctcatttccactcccgaaaacctggggagttacgaatgtatctgcattatttttataggtaagatgccaa

SEQ ID NO: 253291 - DNA, 611 bp, Homo sapiens
ttctccacttcctgggaaaatgcctctgccctcccaccactagtctccacattgagcttgtatattccccacaaaacccttatcacaacgtgtaattacacacacatatgtttttctgattgcttaatctctctgttccaccagaccgagttctggtaccatgactgtgccgttcaccattgttcttcagcacctrgcactgggctggcactcaacaagaacttgctagatcatgaagatgagcaagaaaatgaaccaaagcacagccatctatgccagcagagagcaaaagtggttttcagctgtgctgagctgcgctgcacagaggctagactgtccaagacttgagtttgggtctcacttggctcacttcagaatctgaccttggacggtctcctgagctgtcttcacctcagtttcctcatctgtaaaacgaggcggcgaaactagatgatttctctcctgtcttccagctctaaaattctacgactctatattctaggcaataaactttacgactatgaataaattaatgaaaatgaatatttaaatgatgtgcaaacattcatgcgagtgctttcttaatcttttatgcagtgggagagtgagaa

SEQ ID NO: 253292 - DNA, 582 bp, Homo sapiens
aaaatgcaagaaaccttgacaaaattgctactgtttctaattccaatacttaataataaccactgctacatacaaggacatttgtgtctggtctttttccctattccaggcacatgcattttaatacagttgagatcatattgtatgtctgattttttagcgtattagattttttacattattaagttaatacatgctcatttaaataagtcaaacaatatgaatatataagaagaaaacgctcgtaatttatgctctacctcttccctttgctaagtggcaattttggaccttctgtgaccgtgcaaacatgcagattatacatgcactataggagtggaatgtatgtgayttaatagcgtaatattttgtccattattttaaaacttgctttatttggtcaagacatacggaacacgtatagatcaaacaaaaatttttaaaaatgcttgcatactgctctgtgctgtggagtagccctaattaaatcaatcattcctctgtttatgggcattccatttcttttcaattttgatattattgttgttttagcccttatgaatactacagcaatatatgtta

SEQ ID NO: 253293 - DNA, 625 bp, Homo sapiens
agaatatcagggtgtttaaaagccaagattctggagtcagaaggcctgggttcaaatcctgacccctcctcttgcaagcttgtgacaccgggcaagttattaacctctttatgcctttattttactataaatatgggataattatagtttttactgcatagttttgttatgaggagtaaatgagtcactatttctgagacacttcgtgcctggcasagaacgagcactgtgtgtgtgttacagaaatatatgtgggtgggtgtgtttctgttttccgtaattccagctaggcaaagacatatttaacaaaagccttctgggctgatgagcatcctcagaaagtaggctgagggagctcttttaaggcagcaggactaagaaggtaaagacatgtactaggcgggtcagcatagtggtggccctcgtctgacacacatatttcaggaggggtcacccctgccgtcttccatgttggggtgctcttctctggcaacccactatgggtactccactgctggccttcatgcaggtggaaccacaccgggaagacccaagccgaggggagaaggcgtgagcagagcaggtggcaggcaccatgaggcagggctagccttgcccactgtct

SEQ ID NO: 253294 - DNA, 625 bp, Homo sapiens
agaatatcagggtgtttaaaagccaagattctggagtcagaaggcctgggttcaaatcctgacccctcctcttgcaagcttgtgacaccgggcaagttattaacctctttatgcctttattttactataaatatgggataattatagtttttactgcatagttttgttatgaggagtaaatgagtcactatttctgagacacttcgtgcctggcacagaacgagcactgtgtgtgtgttacagaaatatatgtgggtgggtgtgtttctgttttccgtaattccagctaggcaaagacatatttaacaaaarccttctgggctgatgagcatcctcagaaagtaggctgagggagctcttttaaggcagcaggactaagaaggtaaagacatgtactaggcgggtcagcatagtggtggccctcgtctgacacacatatttcaggaggggtcacccctgccgtcttccatgttggggtgctcttctctggcaacccactatgggtactccactgctggccttcatgcaggtggaaccacaccgggaagacccaagccgaggggagaaggcgtgagcagagcaggtggcaggcaccatgaggcagggctagccttgcccactgtct

SEQ ID NO: 253295 - DNA, 625 bp, Homo sapiens
agaatatcagggtgtttaaaagccaagattctggagtcagaaggcctgggttcaaatcctgacccctcctcttgcaagcttgtgacaccgggcaagttattaacctctttatgcctttattttactataaatatgggataattatagtttttactgcatagttttgttatgaggagtaaatgagtcactatttctgagacacttcgtgcctggcacagaacgagcactgtgtgtgtgttacagaaatatatgtgggtgggtgtgtttctgttttccgtaattccagctaggcaaagacatatttaacaaaagccttctgggctgatgagcatcctcagaaagtaggctgagggagctcttttaaggcagcaggactaagaaggtaaagacatgtactaggcgggtcagcatagtggtggccctcgtctgacacacatatttcaggaggggtcacccctsccgtcttccatgttggggtgctcttctctggcaacccactatgggtactccactgctggccttcatgcaggtggaaccacaccgggaagacccaagccgaggggagaaggcgtgagcagagcaggtggcaggcaccatgaggcagggctagccttgcccactgtct

SEQ ID NO: 253296 - DNA, 528 bp, Homo sapiens
acaaaagaggcagtagagtgagaagaacgtgaacttcagagcccacscatcccttttcacatttgaatcgcaactctgtcattcaccagctgtgcatccttgggaaagtcacttagcctctctgagctctaatttcctcacagggccgcaggactgaggttaaggacctgctgtcactggtacagtggttgaagaaaaggtgaatgaaggaagggcctcattttactccttgtctcacattcctttctgctacttctctttggctcaccaaaaggagacagaagtttgtgtccatggctgtgaactgccaaagagttgccaattctctacgatctttgacctctgtgatcccaggggcaaggccagcactttccattccattagacttcattctcttgtgggtgctttctgctggaatctcccaatacagaacagaaagcacaggttatggaatcagatagaccaaagttcatctccaaatttgattccctctgcatacaagttgcttacccttgggggccctgtaaa

SEQ ID NO: 253297 - DNA, 420 bp, Homo sapiens
tgaaaaatgcttaaaattcacaagtctatatcattctgtcctccaggtaccccaagctggtttgggtttataccagtttgaaccgagggaccttcagctgaggaacatgtgctctgtgtgctggaagctcctggaggccccagggttatctctgctcacttaggtttgtgatgttgggcaaaaggagaaaatgctgagtctrttcggacccaacttccattaatgcctgagaaataatttaaatcgcaagatttccaatcccataagcagccctagcctctcttctcctgatactccacatacccagtctccattccttcttcccccaccctccagttctcatcctgtacactacctccagacccccagggattcagatcctgtctcccccaatgagagacttttttttttagggggagc

SEQ ID NO: 253298 - DNA, 539 bp, Homo sapiens
cacattgtgttaatttcaaacaatctaggcatcatctggaattcaagggagaaacacttggcagcatgaaaccatgttcccagagctaaaatccctatcttcagaaaacagtgcaagataccctactgaataaaatcagaatattttttaagtgaaaatgagatgaaaagaattgagaaggagccaagtgatagttaagttaatcttcaggggagggaaaacatgtcagaaaatgtaaaccagatcagtccaacccatgttacaattctgcagagggaattaaattcctgtggaaaaacaagtctctgactatgaaaggatttgactgtatagaagaatctggaacatcagtctattaaaaatacttgtaaaaccaggggcatcatgtaagaaattagagagctaaagaagtgggagagcttcggatrtctgaaatagaattattattgcagacacggtattgtattagtaagacagcaacgaagagaaaattgctttattccaaaaagcaaaatttattatcaggtaggatcatttaa

SEQ ID NO: 253299 - DNA, 539 bp, Homo sapiens
cacattgtgttaatttcaaacaatctaggcatcatctggaattcaagggagaaacacttggcagcatgaaaccatgttcccagagctaaaatccctatcttcagaaaacagtgcaagataccctactgaataaaatcagaatattttttaagtgaaaatgagatgaaaagaattgagaaggagccaagtgatagttaagttaatcttcaggggagggaaaacatgtcagaaaatgtaaaccagatcagtccaacccatgttacaattctgcagagggaattaaattcctgtggaaaaacaagtctctgactatgaaaggatttgactgtatagaagaatctggaacatcagtctattaaaaatacttgtaaaaccaggggcatcatgtaagaaattagagagctaaagaagtgggagagcttcggatatctgaaatagaattattattgcagacackgtattgtattagtaagacagcaacgaagagaaaattgctttattccaaaaagcaaaatttattatcaggtaggatcatttaa

SEQ ID NO: 253300 - DNA, 576 bp, Homo sapiens
tggtaccattccttaatagctgtgtgaccttggccaagttatttaacctctctgagccttaattttcttacctgtaacagggggatgataatgactttacagggttgctgaaagtgttaaaaggacaaatttggggtttagtgtttttttttttgttttttgttttttgtttttcacacttctaagacctattttttttttaactcttagctattaggggacgttgtactaaacaaaattagtgtttgtctgaacacacgctggattggaagtgataggaaagatttctccaatgggatcaggagtaagtgacattgccacaaacaacattaagcttttgctcaaatgattctggcagggcgttttatcttcatcaaaccacagccattgtcttcttcttaaatctcttcttctctcctggtccttactggataataacatcagtgggtggtgggggatggagaagsgggtaaccaaatcatcagcatctcccctgctccattcctcacatccagtcactcatcaatgatgggtctttgccatgcactttctctctctcttgttcctctatcagac

SEQ ID NO: 253301 - DNA, 543 bp, Homo sapiens
ggcatttgtcagggaagagattaatataatactcagtgaattcaggcaagtcctcaagaagaaaaatttaaggagcaaatatgtgagccaggatctcatgctggactatctaagcaagcatgtaggaagagtttgtttcttcctgctrtggccatagaggtttggttgtcactatgaagaatgggcctgtgtttttttttaaaaatatgctgatctgggtgaggtcacattttgctattctcagtggagggaataattgggattatcttatgatttttttttctctttaattttcttacaaaggaaaaagaaagaatccaatttgttataaataactgctgagggcagtacatgttgcaggtagtcactatctgggactggtggcacaggcagtaaaggattcaccaagacagttgtaggtaaagaaaggtggatttattggagaagataagaaagtacactgtaaggttgcaacaggcagcccagcatggaaggggctgtctgcaaagaggcaggggctggagggactgaagttatacaggg

SEQ ID NO: 253302 - DNA, 583 bp, Homo sapiens
cctgccattcaccatgagagaaacatcccccaggggaccactggtccaaggaagacagaracacatccagtagccacggacttaattcatagcctggagccaacccagctgggatcagctgaccctcagcttacagacagatgcaaaagcaataaagacaatgatagctgctttaagccagtaccatttttggggtagtttgttatgcagccaaagctcaccgggaaagtggcatatccagaatttactttgagatgctctggggacatcctcaaagcagctggcagtcaatttacctcatttcacttgctgtagaggatgtttggcacacgggactataagctcaaaagagaagtcacacatagtgaataaagaaaacaaaatttgcagaggagggaagatcacttgaagccaggagtttgaggcaagcctggggaacatatcaagataccatccctagaaaaaataaaaaataaaaaaatattagctgggcatggtggcacacgcctgtagtcccagctacactggagggaggctgaggtggggagatcgcttgagcccaggagtttgaggggcaaccgca

SEQ ID NO: 253303 - DNA, 583 bp, Homo sapiens
cctgccattcaccatgagagaaacatcccccaggggaccactggtccaaggaagacagaaacacatccagtagccacggacttaattcatagcctggagccaacccagctgggatcagctgaccctcagcttacagacagatgcaaaagcaataaagacaatgatagctgctttaagccagtaccatttttggggtrgtttgttatgcagccaaagctcaccgggaaagtggcatatccagaatttactttgagatgctctggggacatcctcaaagcagctggcagtcaatttacctcatttcacttgctgtagaggatgtttggcacacgggactataagctcaaaagagaagtcacacatagtgaataaagaaaacaaaatttgcagaggagggaagatcacttgaagccaggagtttgaggcaagcctggggaacatatcaagataccatccctagaaaaaataaaaaataaaaaaatattagctgggcatggtggcacacgcctgtagtcccagctacactggagggaggctgaggtggggagatcgcttgagcccaggagtttgaggggcaaccgca

SEQ ID NO: 253304 - DNA, 592 bp, Homo sapiens
gggactccagaagtacaacatcagaggaagaaaaaaaaaactttgaagttttgaggatgaaattggtaaaaataattctagatgaagatagacccgtttacattccaaggaagggaaatgttttacccaaactgtttccatggaccctgtgggttcttgttaatrctgttcaaccttgtgattgaaagcccaagccctgtgatccacagcaggggccacagccagaaataattccccgagaatactgcgtgtgccttcaaatggtccttgatcatttttcttggatgccccactttccaaaggccagaaattgtttcagggagtcattccagttggggaaggttttatgttctaagagcaaggtgctgtactcataggaaaatgtgtaattcgtcatgatccttttgtgtggagaggatggcggtggtccacttctcaacttgggagtcccttagtgactcatgatgtatccttcagtacgctgcccagtgccttccccatttgacttagattttctgccacagtttaagtatcacctcctctatgaagtcttgccagacacattcctcgtctctttcctgttggaacaact

SEQ ID NO: 253305 - DNA, 592 bp, Homo sapiens
gggactccagaagtacaacatcagaggaagaaaaaaaaaactttgaagttttgaggatgaaattggtaaaaataattctagatgaagatagacccgtttacattccaaggaagggaaatgttttacccaaactgtttccatggaccctgtgggttcttgttaatactgttcaaccttgtgattgaaagcccaagccctgtgatccacagcaggggccacagccagaaataattccccgagaatactgcgtgtgccttcaaatggtccttgatcrtttttcttggatgccccactttccaaaggccagaaattgtttcagggagtcattccagttggggaaggttttatgttctaagagcaaggtgctgtactcataggaaaatgtgtaattcgtcatgatccttttgtgtggagaggatggcggtggtccacttctcaacttgggagtcccttagtgactcatgatgtatccttcagtacgctgcccagtgccttccccatttgacttagattttctgccacagtttaagtatcacctcctctatgaagtcttgccagacacattcctcgtctctttcctgttggaacaact

SEQ ID NO: 253306 - DNA, 416 bp, Homo sapiens
accttcacctggaggccgccttcacctggaggccgcccaccaccttcacctggaggctgcccttgctctttcaggatcctctttcatgggtttctgcagagccacggggtcagagcacatatgtgggccatgaggacttttcctttgcaccccaacacatctctacccgtcctccctgcacccccaacccgaagacgggcgtgtgatcctgtgggtgggtgcrtggtccgtgtgtgtaattttgtccggagcagtaattctcggagtgggccccagacccgcagtgtaagcattgcctggtgctgtggtttggacgtgtgtcccctccacatctcatgttgaaatgtatccccagtgttggagtgaggcctacggacaggggtttgggtcaagggtcagatccctcaggaatggct

SEQ ID NO: 253307 - DNA, 357 bp, Homo sapiens
ttcctgccgaccccacctgccagtcatgarcgggcccttgctcaattagttcctgcgtgagccaggtgttaaaagagcgtggcccctccctccctttggcttcctctcccactgtgccctctgcacacatggctccccttcaccctccaccctaagtgggagcaggctgaggccccaccagaagcagattctgttgccaggcttcttgtacagcctgcagaactgtgagccaaagagaccacttttctttagaagttgcccggccccaggtgtcccttgatagccacacaaatgttcacctgtgaacttgctataaattcagattctcaggccccacccagacctgctgagtcagaa

SEQ ID NO: 253308 - DNA, 357 bp, Homo sapiens
ttcctgccgaccccacctgccagtcatgagcgrgcccttgctcaattagttcctgcgtgagccaggtgttaaaagagcgtggcccctccctccctttggcttcctctcccactgtgccctctgcacacatggctccccttcaccctccaccctaagtgggagcaggctgaggccccaccagaagcagattctgttgccaggcttcttgtacagcctgcagaactgtgagccaaagagaccacttttctttagaagttgcccggccccaggtgtcccttgatagccacacaaatgttcacctgtgaacttgctataaattcagattctcaggccccacccagacctgctgagtcagaa

SEQ ID NO: 253309 - DNA, 357 bp, Homo sapiens
ttcctgccgaccccacctgccagtcatgagcgggcccttgctcaattagttcctgcgtgagccaggtgttaaaagagcgtggcccctccctccctttggcttcctctcccactgtgccctctgcacacatggctccccttcaccctccaccctaagtgggagcaggctgaggccccaccagaagcagattctgttgccaggcttcttgtacagcctgcagaactgtgagccaaagaraccacttttctttagaagttgcccggccccaggtgtcccttgatagccacacaaatgttcacctgtgaacttgctataaattcagattctcaggccccacccagacctgctgagtcagaa

SEQ ID NO: 253310 - DNA, 357 bp, Homo sapiens
ttcctgccgaccccacctgccagtcatgagcgggcccttgctcaattagttcctgcgtgagccaggtgttaaaagagcgtggcccctccctccctttggcttcctctcccactgtgccctctgcacacatggctccccttcaccctccaccctaagtgggagcaggctgaggccccaccagaagcagattctgttgccaggcttcttgtacagcctgcagaactgtgagccaaagagaccacttttctttagaarttgcccggccccaggtgtcccttgatagccacacaaatgttcacctgtgaacttgctataaattcagattctcaggccccacccagacctgctgagtcagaa

SEQ ID NO: 253311 - DNA, 606 bp, Homo sapiens
cctgtgctgttcattgctgtattcccagtcccttaaaaagtactcaacacgtgaattgcaaaatgaattaacaactttgagggaggtgttattatcatcctggctttacagatgaggaaactaaggtttacttagcaagattaagtaacttgcctaggggttacaaaccactagccagaaacaaacccacatctgaccacaaagtccttgcttctactctaccctactggctagaatarctttttaatgtcttgcacttctgtgtctttactggtggcagctctcttctaaaggggaagctcaatttaagcttcatcaacctgggcatcctcaacctctgattcccatgatggacctatatagacctctgtctcctttgggttgtgcaaacttctattaaaacagcacttttagccctctgctgtacttatttacttctccgtttccccacatctcaactctaaacttcctgaggacaggaatcaggtatcttcaagtgcctctggcatgagttaagagttaagtaaatatctgatgaatgaataaataactcctgcaaatccctgagataaaaaggaaacttttaactcaattccttaaccacag

SEQ ID NO: 253312 - DNA, 438 bp, Homo sapiens
tctgaaccacggcttgttacaagtgccaccatcttgcctcatgtccacatcaacaatcttctgaccctacatctggcttctcttcctgcccctgactttgacgaaaaggtatgcctaattcctttctaaatgttataaattaactcaacccctcgacctgtgcctcccccgctggtcccaaggggccctttgcttccccgactcccttgtatcttctccctgccttccaacagagagggcagcagcctctcccaactggctrattctacgccttgcctttgagggttacttcattcactaaaaccggttcctgctgcccctgttcatgccaccctatgatctggcttctctcctcaatttgctcttggaacacctttttttttttaattttttgtattttgagatagggtctcactttgtcactcaagctggagtgca

SEQ ID NO: 253313 - DNA, 564 bp, Homo sapiens
cttggagttcttggggtgggggatamggaactagcggctgtgtggccctggctatcagagaggacaagaagatgtgcactcagctaggggcatggggcacattcagatcaagatcaagggactctggaatccacgtttctgccctcagcggctccaccttgggttctcggcagagcccaagcaccactaagtggcactagagggagactgaaatgctggaagatgggagaaggcagcagcttcatcctgttctgctctccattcccgccaacgtcaccacagcatctgttctttaccctgagagtgacacttttttttttttttttttttttttttgagtcagcgtctggctctgtcgcccaggctggagtgcagtggcactgtgtcggttatagccacctcccagactcaagcgatcctcccacctcagcctcccaagtagctggggatcacaggcccaatctaccacgcctggctaatttttgtttttgtttttttgtagagacagggttttgccatgttgcccaggctggtcttgaactcctggactcaagcaacccaccc

SEQ ID NO: 253314 - DNA, 564 bp, Homo sapiens
cttggagttcttggggtgggggataaggaactagcggctgtgtggccctggctatcagagaggacaagaagatgtgcactcagctaggggcatggggcacattcagatcaagatcaagggactctggaatccacgtttctgccctcagcggctccaccttgggttctcggcagagcccaagcaccactaagtggcactagagggagactgaaatgctggaagatgggagaaggcagcagcttcatcctgttctgctctccattcccgccaacgtcaccacagcatctgttctttaccctgagagtgacacttttttttttttttttttttttttttgagtcagsgtctggctctgtcgcccaggctggagtgcagtggcactgtgtcggttatagccacctcccagactcaagcgatcctcccacctcagcctcccaagtagctggggatcacaggcccaatctaccacgcctggctaatttttgtttttgtttttttgtagagacagggttttgccatgttgcccaggctggtcttgaactcctggactcaagcaacccaccc

SEQ ID NO: 253315 - DNA, 524 bp, Homo sapiens
ctcactgttgtattaaatactttttgcaaaggcactttcaagctgagggcccaggaaactaagatgaggatgggagctgatcctttgcattgtggttgccatctttattgttgattcttgggatatgcaatgtccctgtctggtgctgagcctacmctgtctcgggctggtagggcttgactgctccaggtgggctgccaagcaccccccaaggggtctgcactgaccacaagctcagtatggggggccatgaccccactgttctcaagcctttgttcctattccctcatcagagattctcccaccctgaggggagctgtccctggacctcagcacccagacacacatccctaacacagcagatcagcacctccatatgcccaagccagtgcttctaggtgtagcccctggagcacctgcattcacatcatctgggaattgtttaaaagtgcagttttcccagcccatcacaggcttcttaagtgaactttcttagtatgtagtccaggaatccacagtggaat

SEQ ID NO: 253316 - DNA, 561 bp, Homo sapiens
gaagaactgaaaccaggaagggaacatctacaggagcagagattacactgtttttccagggctgcctggggttggtgtctccttctgtctgtgccattaccttccttttctctctgtagatttctttcccacatatggcacatggacacacggggctgccctgaacccagccctgcctactgcagtgattacaatccatgcattcatttacagttactgaggacagaacctggttggtccagccctgcccaccacactgattacgacccatgcattcatttacasttactgacaacagaacctgattggcccaggtcttttcagaagtcacccctagtccaatctgctggaccagaggagggtcatggttgctaacccacccggcagcagatacaggggtggattctatgagaaggacagggacccactatagcaattgattaatagatctagaaagtagtgtgcgaagttaccaaacatatatgcccaaataactaagctataataagcatgttcatcacttcagaagacacaactacaaccaatgggtgtaagcgacaa

SEQ ID NO: 253317 - DNA, 629 bp, Homo sapiens
cactatagtatatgtgctatatttactataataaaattaagtatagaaaatgaaaattattttcagaaatttattcttaacaatataaataaatctctatggataaatctatgtacatagatttaagatatactatcatacatagaaaaaaacagtgttttcactttacactcacactcatatagcacagaatacttctgtgaccagatgtgcagggttttccccatcaacaaccagttctccagcagataccaatggggtgtcctataattcagtgccattctgacattatctacctggagatagcatcagatcccacagattaaggattctgccgccaagactgcccccactttggactccagttggaagcctcaggttgtgacctgtgcttctgaaggactggttaggattcccatgtcccttccctgggtttaagttgatcgagtggcttatagaactcaggaaaacactgacgtgcgtttactggtttattataaaggatatyacaatggatagagatgaacagccaaacgagatgcatggggctgagcatgtggataggcgtgcagagcttccttgccgtctctgggtgcatcaccttctaggtagccccactagttaagaag

SEQ ID NO: 253318 - DNA, 525 bp, Homo sapiens
ccacattctcctctctattttcttcagcctgaagtcccaactggtacatgggcttggtgtgagggaactaataaatgcttatcatgagaataataaaagctaagatttatttattgagtgctagtcacatggcagccaagctctaaatgcttcacatgcattaagttagtaagtgtaggaagccctctgcagtaggcatttgtaatatccccaccctgaggatggtgaaactgagagacagcaaccatgggaacacagggagtaaggctgggatgaatccctggcaagcgaactgttaattctatgtctcctaccttcttgttttccctagcctgctgcaagtccagcttaaaggaaggaaagttctaataaattgaaaatgttaactctgtggactagacatcttcacgtgcttcgtgttcaacatgttataacttcaccataatacaaattaccatcatgwgtttatttttgtatatggtgtaaggaagaggtccagttacagtcttctgcatatggctagtc

SEQ ID NO: 253319 - DNA, 576 bp, Homo sapiens
gctctcgacatttattttggggggttttgtgtagccgtgacagcatttcctcacatctctttaggactgctgatgccctgcatatcccctgtagaactttgcggatagttcatattttagcaatgattttggaattcctggctgaaataagaggctttgtgaattctctactcctatgatggcctttgaggaaattctggatctttggtttggaagttttgggattctgtgaaccaacactttcttttcattgggtttgatacagtggcatcaatcttacagtttatcatgtaccgatgtttaaaactctaaccattggttatctggttaccatcattgtcactaygaaataaaggattagagctataaaaatactaaaatagataatacccttgattatctaccctgtgtcaaatacatgaacccaactgctcaaactgtcattcattggccaggtcatcagcctccgctgggaaggagttggcactgccaagtcccagacccttcctcagacctactgaaccacctgttgcattttaatgacggctcacccctctgcactcctggtatggtttg

SEQ ID NO: 253320 - DNA, 586 bp, Homo sapiens
ggagataactgaatcatgggggtggtttcccccatactgttgtcatggtggtgagtaagtcttactagatctgatggtttgataaggggaaatcgctttcacttcgttcttatattctttcctgtctgctgccwtgtaagacgtgactttcgctttctgccatgattgtgaggcctccgtagccatgtggaactgtgagtccattaaacttctttttgtttataaattactcagtctcatgtatgtctttatcagcagcataaaaacagactaacataacccccctttcttcctacccctgtgatttgggtggatattaaaattttgcaagccgccactctagagaagtaccactcaaaccatggtctgcagactaccagcattagcaaggcctgggagtttgtgagagatgcagattcttggtgcccatccaaacctacagaagcagaatctctggtggcaggaaccagcaatctgtgctttcaacaagctctctgagtgcttcttctgaatgttaaagtataagaacctctgctgcacagggagacctcactttcattattctcatttcacagatgagaaaaat

SEQ ID NO: 253321 - DNA, 586 bp, Homo sapiens
ggagataactgaatcatgggggtggtttcccccatactgttgtcatggtggtgagtaagtcttactagatctgatggtttgataaggggaaatcgctttcacttcgttcttatattctttcctgtctgctgccttgtaagacgtgactttcgctttctgycatgattgtgaggcctccgtagccatgtggaactgtgagtccattaaacttctttttgtttataaattactcagtctcatgtatgtctttatcagcagcataaaaacagactaacataacccccctttcttcctacccctgtgatttgggtggatattaaaattttgcaagccgccactctagagaagtaccactcaaaccatggtctgcagactaccagcattagcaaggcctgggagtttgtgagagatgcagattcttggtgcccatccaaacctacagaagcagaatctctggtggcaggaaccagcaatctgtgctttcaacaagctctctgagtgcttcttctgaatgttaaagtataagaacctctgctgcacagggagacctcactttcattattctcatttcacagatgagaaaaat

SEQ ID NO: 253322 - DNA, 508 bp, Homo sapiens
aacgcagggaaatatggttctttcctgttcatcagcattttaccctccaaccttctgtcaagctggcatgttttgttctgttttttttttttttttttccagaaagcagaaaactaacagcttatcctcagatttttgtgccaaattccaatccaactgcaattcatytaaggatccagaaagccagacagaggccatgacattgacacctcttgtcctgctcagacctccaggacttgccccgaccaggcttccagggaagtggaagaggaaatgccctctcatgcatcccagctggttttccactgatttcaacccactggccatctggtcccttctccccgctatgcacacagtttggtctggggagtggaaactttctgcgggattcagcatttttaatttttctactttttttttttttttttttttttttgcaaaccagcatacatgaagagagcagaggacattggctggtatgtaatatgtcagtgctaatccacacata

SEQ ID NO: 253323 - DNA, 508 bp, Homo sapiens
aacgcagggaaatatggttctttcctgttcatcagcattttaccctccaaccttctgtcaagctggcatgttttgttctgttttttttttttttttttccagaaagcagaaaactaacagcttatcctcagatttttgtgccaaattccaatccaactgcaattcatctaaggatccagaaagccagacagaggccatgacattgacacctcttgtcctgctcagacctccaggacttgccccgaccaggcttccagggaagtggaagaggaaatgccctctcatgcatcccagctggttttccactgatttcaacccactggccatctggtcccttctccccgctatgcacacagtttggtctggggagtggaaactttytgcgggattcagcatttttaatttttctactttttttttttttttttttttttttgcaaaccagcatacatgaagagagcagaggacattggctggtatgtaatatgtcagtgctaatccacacata

SEQ ID NO: 253324 - DNA, 587 bp, Homo sapiens
atggacttcccagcctccaaaactatgagaaaacaacttctcttctattcctttcttttcttttcttttcttttttttttttttttttttttttttgcgcaacagtctcgctctgtcacccaggctggagtgcagtggcgcaatctcagctcactgcaacctccgactccattcaagcaattcttctgcctcagcctcccaagtagctgggattacaggcacccaccaccacccccagctaatttttgtatttttagtagagacatggtttcactaagttggccaggcaggtcttgaactcccgacctcaggtgatccgcccrcctcggcctcccaaagggctgggattacgggcatgagccaccgcgcctggccaacgattcctattctttctaaatcaccctggataagcattttgttatagcagcagaactagactaagacacttccaatagggacataattcatgacagtcatcacggtagccaagtcagaccagaatcaccacatggcttcatttggttctaaaccccattcatccaccaacatgtaagggtgcagctcagccagagcatcaggtttggcag

SEQ ID NO: 253325 - DNA, 472 bp, Homo sapiens
agtctacctcattttatgtggcaccaccctgccttctgaagggcaggtggcattggacaaggccagattccagccttgagcacttgatctgaggcgcctgttcattttcccatcctgtgatgtgactgtgtttgcacttataccatggatcctcttataagaaatgctgtaagctttccaaaacagggggccatgtgatgtgcattcctttgtactagatgtacgtgtatttcctagcgcccatcaaggagcagattccttaagggttcctcttgcaatcctatcgggctgcggtttctttcaacctcagaataaaagaaagggaacttctgcctataactatattactttttaaagcacgcaatatttaatcatcatttgaaaaagtaagtttgcaaaatccagaaagatatctttatcattggtcccagcgattttgcaatttggsttgatttttaccatatgtttcctt

SEQ ID NO: 253326 - DNA, 394 bp, Homo sapiens
agatggcagggcagggaagaataaaggaccagtaacatccaggaaattgtgaagctgctaaatcaacgggcttccaaaactaccatactgctgcattccctgttccatgagatgacacatcccctttttgcattagcttgttgaagatgacatattgcctatagcagggtttcttaaacttagcactactgacattttgagccarataaccctttgctgtggagggactccctgggcactgtgggatattcagcagtattcttggcttctacccattaagtgccagtactcctcccaaatgtgtacagatatttccaagtgctccccaaggggcaaaatcttcccaggtaggaaccactgttctaaagcatcctcaccaacatggcgatagtgg

SEQ ID NO: 253327 - DNA, 530 bp, Homo sapiens
atgtcctcaagcaagttaccactgtgggtacctggaaattattccaaataaagacttcttggagctagtataaaacatactccccagagttttcacccaaccccaccccggggcaagggagctggaatgtacattcaccagtttccatcacttattggtgacggttggttatcctggggaggggaggtgttaatcctataccacttacagccttccttggacatgggttgagcagaattcagcgaccaaagagagttgtcaggtgctgagatttggaagtccagcctgcatgcatgttagcagaaaacacctggggatasgaggtgtggggcaacacagcaccctcagtattcttaatgtccccaggaagaaagaagggaaactgttagctttcctgcagcagccacgtgcctgataagaaagaaaaaccccagtatctctcctcatccatggagctccactgacggaatgtcaaaatgtgctgtggctgtccaactgcagtgtatgtaagactcatctgtaatgcttat

SEQ ID NO: 253328 - DNA, 530 bp, Homo sapiens
atgtcctcaagcaagttaccactgtgggtacctggaaattattccaaataaagacttcttggagctagtataaaacatactccccagagttttcacccaaccccaccccggggcaagggagctggaatgtacattcaccagtttccatcacttattggtgacggttggttatcctggggaggggaggtgttaatcctataccacttacagccttccttggacatgggttgagcagaattcagcgaccaaagagagttgtcaggtgctgagatttggaagtccagcctgcatgcatgttagcagaaaacacctggggatacgaggtgtggggcaacacagcaccctcagtattcttaatgtccccaggaagaaagaagggaaactgttagctttcctgcagcagccacgtgcctgataagaaagaaaaaccccagtatctctcctcatccatggagctccactgacggaatgtcaraatgtgctgtggctgtccaactgcagtgtatgtaagactcatctgtaatgcttat

SEQ ID NO: 253329 - DNA, 612 bp, Homo sapiens
tgcagataccaggagagagggatcatttagtgccatcttagagggtgactgtcatatcctcattcccagaaagcttggttccagtgagaaataatcctacatggatggcagagatayggaagaaaaggatggggagagagggtaaatccatattgtcacatccccattcccagaaagcttggttccagtgagatataatcctacatggatggcagagatatgggagaaaaaatatggggagagaaggcggacccatgtgacaaaagagcttgtgtgctgagcatgcaattcaacatatgcccaattaaactctcattccctcctacaatcctcttaggttcccctcatttccactcattgtatcttatcgcctcttgtctggccttgaacaacagctttagctggtattatgaaaacccactctccacatatccaagaccaatattttaaaacactccatttgtcaggtctctctcttccccttctgagtgacagaaactcaactcaaactagttgaagctgaaaatgggatttatggacacacaggtgtaataattataaggaaaactggctttaggcaatgctggagccaaatgcttcatcagtgaggac

SEQ ID NO: 253330 - DNA, 612 bp, Homo sapiens
tgcagataccaggagagagggatcatttagtgccatcttagagggtgactgtcatatcctcattcccagaaagcttggttccagtgagaaataatcctacatggatggcagagatacggaagaaaaggatggggagagagggtaaatccatattgtcacatccccattcccagaaagcttggttccagtgagatataatcctacatggatggcagagatatgggagaaaaaatatggggagagaaggcggacccatgtgacaaaagagcttgtgtgctgagcatgcaattcaacatatgcccaattaaactctcattccctcctacaatcctcttaggttcccctcatttccactcattgtatcttatcgcctcttgtctggccttgaacaacagctttagctggtattatgaaaacccactctccacatatccaagaccaatattttaaaacactccatttgtcaggtctctctcttccccttctgagtgacagaaactcaactcaaactagttgaagctgaaaatgggatttatggacacayaggtgtaataattataaggaaaactggctttaggcaatgctggagccaaatgcttcatcagtgaggac

SEQ ID NO: 253331 - DNA, 584 bp, Homo sapiens
ggaaagagagacattttagaagtcttcaggaggtaagaaatagtaggagcttcttgaattttggaaatcagracacaaaatagaggatacccctctgcagcagaattttaattcaacatcattaatatttttcacactcaagactttttttcccaatcaagactaccttgacttttgttctaccttgtaaatgtttttagtctatggttgactccaccctaatgtagcaggacgagctgctgacaaaactcctcagacaccgagttaaagaaggaaggggtttattcggccaggagcatcggcaagactcctgtctcaagagccgagctcccccagtgagcaattcctgtcccttttaagggctcacaactctaagggggtccacatgagagggtcgtgatcgattgagcaagcaggtggtacgtgacaggggctgcatgcaccagtggtcagagtgaagcagaacagactgggaagtttcacaatgtctttctatacaatgtctggaatctatagataacatcagttgctaggtcaggggtcgaattttaactaccaggcttaggtcaggcaggcccaggcct

SEQ ID NO: 253332 - DNA, 462 bp, Homo sapiens
ggtgcagtataaactagactcagctgagcagcctgcttcacattatgcgggggatgagttagtgccttctgtggacatccctcatgctcttttctgtgtgcactaaattccttaggttgatagagccttctagacaccttggagttcccctcaaatattggttcctaaggagaatttcacctatcaccataacsagctgcctgcctcactcctgtgtattaggaaaaaaaaaaaaaaaaagaaacacaagagattggtatctcgtacacttggtattagttttttattggttgccataacagattactatgagttcagcggctaagaaaaacatccatttattatctaacacttctgtgagttagaagtcccacacagatttctccaggctaaaatcaaggtatcagcaaggctgtgtccctgactagggctctagcgaaagaatctgcttccaagctcact

SEQ ID NO: 253333 - DNA, 462 bp, Homo sapiens
ggtgcagtataaactagactcagctgagcagcctgcttcacattatgcgggggatgagttagtgccttctgtggacatccctcatgctcttttctgtgtgcactaaattccttaggttgatagagccttctagacaccttggagttcccctcaaatattggttcctaaggagaatttcacctatcaccataacgagctgcctgcctcactcctgtgtattaggaaaaaaaaaaaaaaaaagaaacacaagagattggtatctcgtacacttggtattagttttttattggttgccataacagattactatgagttcagcggctaagaaaaacatccatttattatctaacacttctgtgrgttagaagtcccacacagatttctccaggctaaaatcaaggtatcagcaaggctgtgtccctgactagggctctagcgaaagaatctgcttccaagctcact

SEQ ID NO: 253334 - DNA, 608 bp, Homo sapiens
tctacttacaaattttcatctcagcttttaactaggatggaaaaaaaaaagactaaagcaatattagtgtaaagagctggggggtggcaagtgggatggtgtatccaaaaatgttgggttactatgaccattaagtttatctttttgaagaatatttaatgacatggaggaaaatatccataataaaatgtcaagcaacaatagcagggtatggaacatatacagcttaagcccaattaagtgcctgagttctcacatacatacaggaaaacataaataaaaggtaaatccatcagaatgatgttattaactattctagacacaggaatgacaagggaattaatttatatatatatatatwttttttttctactttccaagtttttctcaattagtacatagtattttataagcagaaaaacaaaaaaataaaataaaataaaaggtagtgtccatgaaaataaccatagaagtttaggagacatttggctgctcatttctaaaacaggttaatttttgggattgtctttgctttgcttgcatcagcatgcctctttctagaatgccagtcttaaataggctaagatggcattatcttcaattccaaa

SEQ ID NO: 253335 - DNA, 584 bp, Homo sapiens
caaaatgtttctttgacatattttgaaatgaccctgcaaagctgtcttttctgaatctatgaagaacctccatgaatgcagccaggacttccctggatctagcacagattcggtgggagacggacaccttttaagatctgaaaacaagacatctaccatctattccctctgaagcctgctatctgaaagcttaacctacgtaacaagatgttggtttccacaacgccccttatcttttttttttttttttttttttttttttttttttttttttttctggaaacacaatcttgctctgtcgcccaggctgcagtataatgatgtgatctyggctcaacacaacctctgcctcccaggttcaagcgattcttggtgccttagcctcccaagtacctgggactacaggtgcatgccaccaagcctggctaagcattttatttttcacaaccccccttatcttaaatcaagcatttctttctaccagcttcaagtctttagataaagcttaactctttcaatcaactgtcaatcagaaaatctttgaatccaactatgatctgtaagccgcaggctacttaccccca

SEQ ID NO: 253336 - DNA, 577 bp, Homo sapiens
ctcttccaactttaaagctgaaatcaatattttgttttccttggcataattcatttatcacctgcaacccaggaggcacaatgtgagtgcctaatcgctctagagatttggtgattcttcatggagttcttgaagctaccaagaagtactatgtcagataaastacaggtgtgtgccacattatctgccacatagtcacaaaaaccccaccttcatatcacagagctagcatgtggttaagctctggattttctttttaattataccatcaatcctatcatgtagctacaaattcatgatgctttcagactcaagtctaaaccaaagtaccttgccctagacaacagaatacaattaaataatccatgcagccacactgggctgtttaccttctccttaactgtagaggtccaggctccaacatcttcattctgttctgtgccccaggcaggaggctgacctggaccaacaacagctatgggcttcctggtaggtttggacaatggagagcaccagcagagacggaggtgcttcctggtgggtttggacaatggagagcaccagcagagacggaggt

SEQ ID NO: 253337 - DNA, 548 bp, Homo sapiens
cagatcaggaagtatctgccattgaaaagattgttactcatgttcccaagagkagggggcaggccatgccacatggggccacatggggacacacgaggatccatcctgcgtgtggcagagggtggaaggaggaccatggccaggagcctgtattgtggtttctgtgtaaggatcaggtaggcagcataaggagatttaggaatggctggtttgaataatggcagagaggtctggggcataggagctgttcctaattggtacctggccctggggtgattagggccggtggacagtggcctggagtgtgagagcaggaaagaagaggtagttgggggatctgggttctggactggttggcttgtatttgaaatgcatacttacacaggacttgtttctagtctctaggaattagctgaccctaggaagggcggtccctccagagtcagcaaggtctcagatgttaaagcaacagaatataagaaataaatgacatggatcaaagaccaagagcctggtctacttagcggcagggccaggtttcaaattca

SEQ ID NO: 253338 - DNA, 631 bp, Homo sapiens
gctttgggactgggggtgttgaccaggcttaccttcatctcaagggactgtagascactgcatacatctgtttttcacttacatatttctgctcctatataatcagtgtcagtgtaccttttactcaatatctctgagccttagttttctcatctgtcaaatggggataaaatctggtttgtctgcatcatagacctattgtaagggctaaagtctagtgtggataatttataaataaggccaaaatgttgcctggaaatgtgctaatcctgctttttgctgtgtcttggaattgtgttctctggtctccattggactatctctttatggaaagaacacgagagattgtgcagcttttcctatagtgtgtggatttacaggagcaaaggcatcactttgtgaacaaacttggcaaacactggaaagagagaagtgagaagacagtatccctgtcctcagagaactgaagacctctacctgccattaagcaaatgccatggtttacattctagagtagaggcgtgaaccaagtgttgagttctagtgacacacgtttatttctgtttgggagagttaaagaaaagcccctggaataagcaggaatttttcagcagtgaatatataaatattt

SEQ ID NO: 253339 - DNA, 611 bp, Homo sapiens
tatataaattatacaaatatatgttcatagtatacatacatatatatggttatatgtacatatatacatgcttacatagatatatattgcaaaatgtggttttcagttgacttatttcttatcgatgtcaaatatatgttacaacaggagtaacatccataaagttactttgcttatttgaatagttattaatttaaatcacatttaatttttgggtatctgtttttaatccatcaggataatttcacatgagtatttattttttgctaacattctggccaaaagctgaaacacctctgtacccttttcattcttttcttctccttttcttttctttgcttccgtactttacacagaaaacctggaaccaaaaaatactccttctggaatattctacctatcttggtgtcttcctgggaagtatatagctttcaggtttgtagccagctttctggaaacaaattaaactactaactgtcccatgacctgagcyagaccagtgtctggagccagttctcctccagagtgtctcactgatcgttgctgatggaatttcaattttggccctatttcagtgcacattctcaagctgagtgacttagcaagttcga

SEQ ID NO: 253340 - DNA, 569 bp, Homo sapiens
gtttatgttggaccatttaatgtcgaacctcttcaaagtcttttggagatgtccagatggacaaaatcagccaatatgatgttcatgaccaggcaagggaagccaaaatgaagggcagctttatttaaaatgaatagaacaagatatagttacattcatgccactgttcttttaaaatatatccatagaaatgattagtcctttaaaagtcttcatgccacagttctgcaaagaaatcaggagactttgtaaataycctgtccgcaaaaagttagaatgacaagcacccttaaataaacaggaataattaatcataggtgtggttgttttgatgagcatgcaagagtgacaagttaataaataagcagttcatacagggaaagtggctaaggaggtgctgtggtttaatttacatctttggaaggtagcaaagatttaataatctccctgcctcatacatcaaacgaatacccctgaggcagaaaagcaaaacgtttttaactgttaatctgagaagcaataaaatcctgcctcaggtcacaaataaattgagtttctagtggtctcga

SEQ ID NO: 253341 - DNA, 570 bp, Homo sapiens
  misc_feature (1)...(570): n = A,T,C or G
acctctgcccttcaaattgctcaggccaaaactcgataaggattacccttgactcctctcttccttttgctcctgtatctagtctttcagcaaatcctgttggctctacttttaaaagttattgatagtgtgacaacttttcacctccttcactgctattgccctttcttagcaaccatcacctcccatagaccattacaatagctttctaatggtgtctttgtgtctgtcttgctccctttcattctatacccaacacagcagccaaagtgatctcattgaaaaataagttgggtaaagtcattcctctgttcaaaaaccagagacaaatttccatgtcacttggascaaaagtccaagtccttaaaatggcctacaaggcgctaggtgctttgtgtccccagccctcacattctgtctttggccttctctcttcaccttgcacgagccatccagccacagcagcttccttacaatttcacaaatattcaaagcactttcacacgtcaagatcttcacacaagctgtttcctctgcctggaactctctnnnnnnnnnnnnnnnnnnnnn

SEQ ID NO: 253342 - DNA, 556 bp, Homo sapiens
tcctggaatccttctccatcatagccctcctcttccccacctcagaggtaactgctatcctgacctttacagtcattcttgggttctaatatagttttgccattttgtatacattcctagaaacgtagttcagtttttcctttgtctgtactttatataaattgaatcacactgtatrtattcatgtttcatgttgcttttctgccctcaacttgatgtaaaattcatccatattgttggtctctgtttagatcatctttattgatttgtgatattatattataggaatatggcatttttttctatatgctatcaataaaaacttgggttgtttccaatattccactattatgaataacactgctatgaacagtcttactcatatctctgtagcatgtgcatacatttctctggactgtctaccagggtaaaactgctgggtcatagaacatacgtatctttaagtttactagatgatggaatatgttttctgaagttgttttacgtagttacagcccgaccagcaagtgcttggcatttcccattacaacacaga

SEQ ID NO: 253343 - DNA, 556 bp, Homo sapiens
tcctggaatccttctccatcatagccctcctcttccccacctcagaggtaactgctatcctgacctttacagtcattcttgggttctaatatagttttgccattttgtatacattcctagaaacgtagttcagtttttcctttgtctgtactttatataaattgaatcacactgtatgtattcatgtttcatgttgcttttctgccctcaacttgatgtaaaattcatccatattgttggtctctgtttagatcatctttattgatttgtgatattatattataggaatatggcawttttttctatatgctatcaataaaaacttgggttgtttccaatattccactattatgaataacactgctatgaacagtcttactcatatctctgtagcatgtgcatacatttctctggactgtctaccagggtaaaactgctgggtcatagaacatacgtatctttaagtttactagatgatggaatatgttttctgaagttgttttacgtagttacagcccgaccagcaagtgcttggcatttcccattacaacacaga

SEQ ID NO: 253344 - DNA, 488 bp, Homo sapiens
gaatatgtccttcacacttccaggctgcatatgtgtgagcactaggaggttcctgtcagataaaccaaggacagaaaaagtgaaataatgcagtgcagctgagagggtgcttccaacttacactgtgggaagctattggtgggcctaaaggatgtgaggttgggtacaaaaatcctccaataatttaatttgttcttcttcaatataatctttgttattcttggcccttttcattctcataaaaatcttagactcagcatgtcaagtctcatctaaaattctgtttttttgaggactaaattttttcaagttttgatttatttgaagttccatttccastttgatctggaaaaatatcttttacaatactgaattttctaaccaatgagtgtggtatatctctttattacttaggtcatcttgaatcttaataatgtattatcatttcatctgtggtatagccctaggaatttgaactttttatggta

SEQ ID NO: 253345 - DNA, 595 bp, Homo sapiens
ctctttcatggacaccagtgagtcatagatttggtctcttttcataatcccatatttcttggargttttgttcattcatttttattctgttttctttattcttatctgactgttatatttcagaaagtcggtcttcaagctctgagagtctttcctcagcctagtctgtgttgctgttaatacttgtgattgctttatgaaattgttgtaatgtgtttttcagctctatcggtcagttacattcttttctatactggctattttgtgtgtcagctctgtattgttttattatgattcttagcttccttggattgggtttcaacattctcctgaatcttgatgatcttagtttctatccatattctgaattctatttctgtcatttcagccatctcagtctggttaagaacccttgctggagaactagtgtggttgggaggaaagaagacactctgactttttgagttgctggagttcttgcgttggttctctctcagctgtgtgggccaatgttccttcagtctttgtccttttggatggattgttttgatttttattttctttgatgcctttgaatgtttgattatggtataag

SEQ ID NO: 253346 - DNA, 635 bp, Homo sapiens
tggtcatattcaaatgtgagattcataagaatagaataatttgtgtatggaattacctgtcctgggttacctaatccagagatccagcaatttttcttaattcctgaatttccaggcattgtaaagcatacttmactgtgcttggcacagattaattagtctatatattatatataggtacaaaaagtataagcttattctctcctattctaatagaaatgaggcatttttaacttgcttggaaatagcaattcataccattgcatagtggttatttgcaaatcttcctaataaactccaggaataaattttaggtaaatgtatgatgcctacaaatatagtaattgtcatagagaatgctagatttcaagtgacagaaacttttacttcaatacagcttaatcaaaataataaatttattagtccgtttagttaggacactaggatggttcacaggatcaaaagatgaaccacagacatcagggtctcaaagtttggaactgctctcaatgtctgctatgattcacttgtattcatctttcttacctccttccatccatctatgcatctatccaccctgctcacatctctgcttttatatacttggctttgctctacagaaggacttctccatg

SEQ ID NO: 253347 - DNA, 599 bp, Homo sapiens
tatttataaggaattcactttgtcaagatactatggtcacagcatacagctcagatgayacttgtgtcaaaaaacattgactggctcagatgactcagaagttcgtggctggatctaagaattcaaatgatggcctaagaagtcagtctgttggcactgctgtcatttgtgtggctttgttctcagacagcctctcccctcctaggggcaaaatggctgccagcagcttcaggctcaaatcccgatttcagcacctcaatacaaagaaagcattgcctctcttgcagcagttcaccccaaaatcagaattaagcctcattggctttggtgggcttggcttgggtcatgtgctgtgttctgaaccatatagctagggaggtgcaatactgggataggccactcctggattggagtgaggggtttccttagggaaacccatgacattgtttccagcaagaggttggggggatggatgcaggatagtaaaaaccaataaatatctgcgaaattattctttttttaaatgaagatatctttgagaaggaaaatgtaatgaacagatcagtgattcagctgtcaatccagtcattcaacaaata

SEQ ID NO: 253348 - DNA, 599 bp, Homo sapiens
tatttataaggaattcactttgtcaagatactatggtcacagcatacagctcagatgatacttgtgtcaaaaaacattgactggctcagatgactcagaagttygtggctggatctaagaattcaaatgatggcctaagaagtcagtctgttggcactgctgtcatttgtgtggctttgttctcagacagcctctcccctcctaggggcaaaatggctgccagcagcttcaggctcaaatcccgatttcagcacctcaatacaaagaaagcattgcctctcttgcagcagttcaccccaaaatcagaattaagcctcattggctttggtgggcttggcttgggtcatgtgctgtgttctgaaccatatagctagggaggtgcaatactgggataggccactcctggattggagtgaggggtttccttagggaaacccatgacattgtttccagcaagaggttggggggatggatgcaggatagtaaaaaccaataaatatctgcgaaattattctttttttaaatgaagatatctttgagaaggaaaatgtaatgaacagatcagtgattcagctgtcaatccagtcattcaacaaata

SEQ ID NO: 253349 - DNA, 623 bp, Homo sapiens
caggcacatagtaagtagtccacaagtatgtgttatatggttaatttgaggaaagagaagtcataggtgatgcctacacttgggatatgggcaattgtgtgaatgataattcattcacagagggaatataggagaaagcagagctgggggaacatgctgagcttgaggtgcctgtggacaccctaagtggaagcatcttgtaggcagctgggtcggtggagctggaaatcagaagagatctgagtgggataaaccctctagaatggcaggaagagaaatagctgccgggaagagagctaataaaggaaacrgatgaggtggtctaaggggcccagcagaggctgcagacactgaatttgcaaggttgtgagtctaggctgctgtgtggttttctctggcagtcctaacagcctgggtgtagtagaggactggaacagctggattgaccagtgttagggttttgctggttataacagccttttcttaaatttttcaattttttttttaagttctggggtacatgtccaggatacacaggtttgttacctaggtaaacgcaaacacgcgcattttttcctgtagtattttaaagtatatctcagacaatatttatttttacctgt

SEQ ID NO: 253350 - DNA, 597 bp, Homo sapiens
tccctcccctcactcaggtctcagctcagatcaccccttttctraccctcttcccttgccatcattctctattactttactgggctttatttttcttagactagttgtaatctcttgtcatcttacgtatctatttggttttgtctatcccccccttcccaagaatataagttccttgaggacaaggagtttatttttttctagggccatgtcagcagtatctgaattatattgcctgttgcatagaaggtgctcaaacatgactttaatttttttttccctgaagcaactaaatactaaatatctgctttgttttctctgtacctattgctaatactttccacactcacaaagactctatcaatataatttcctacaatgttcaatttggtagttgggttctcccccctccatccccatctagagacccctgttgaaggagaagtttagttactctttaagctggctacaaagccatcattctctgatttttttctttctcttcttcttcttcttttttttttttttttgagaaagggtcttgctctgttgcccaagctggagggtagtggcatgatctcagctcactgcagcctc

SEQ ID NO: 253351 - DNA, 597 bp, Homo sapiens
tccctcccctcactcaggtctcagctcagatcaccccttttctaaccctcttcccttgccatcattctctattactttactgggctttatttttcttagactagttgtaatctcttgtcatcttacgtatctatttggttttgtctatcccccccttcccaagaatataagttccttgaggacaaggagtttatttttttctagggccatgtcagcagtatctgaattatattgcctgttgcatagaaggtgctcaaacatgactttaatttttttttccctgragcaactaaatactaaatatctgctttgttttctctgtacctattgctaatactttccacactcacaaagactctatcaatataatttcctacaatgttcaatttggtagttgggttctcccccctccatccccatctagagacccctgttgaaggagaagtttagttactctttaagctggctacaaagccatcattctctgatttttttctttctcttcttcttcttcttttttttttttttttgagaaagggtcttgctctgttgcccaagctggagggtagtggcatgatctcagctcactgcagcctc

SEQ ID NO: 253352 - DNA, 597 bp, Homo sapiens
tccctcccctcactcaggtctcagctcagatcaccccttttctaaccctcttcccttgccatcattctctattactttactgggctttatttttcttagactagttgtaatctcttgtcatcttacgtatctatttggttttgtctatcccccccttcccaagaatataagttccttgaggacaaggagtttatttttttctagggccatgtcagcagtatctgaattatattgcctgttgcatagaaggtgctcaaacatgactttaatttttttttccctgaagcaactaaatactaaatatctgctttgttttctctgtacctattgctaatactttccacactcacaaagactctatcaatataatttcctacaatgttcaatttggtagttgggttctcccccctccatccccatcyagagacccctgttgaaggagaagtttagttactctttaagctggctacaaagccatcattctctgatttttttctttctcttcttcttcttcttttttttttttttttgagaaagggtcttgctctgttgcccaagctggagggtagtggcatgatctcagctcactgcagcctc

SEQ ID NO: 253353 - DNA, 620 bp, Homo sapiens
ttattggtagcgttattattattattattattattattattattatgtcatctactaacagatgtaaatataaataacatataataaaaagaatgagagatattggccaattaagaacaaggatacyttagcccagtctacataaaggttccttgggctgtagaaaggagaagcaacaagtgtatagaagttagtggttcattgagaagaggatcctgcactttgctccctgggtcaaatccaggttagagcaggtggatatggcaaaaatcctcaggtcagtttgtggaatctaagagtcatggtgactcatttcccgtttcctgggtggagctccagaaaaagaaagggttgtatggtaaatccaatctaaacagtcagggcctctgagggtgtagcctggtgggatgagttcagtgctatggatatggcatcagagctggccagggagctgcggaaactgaatgaccccatggccagaatgagccatgacttagcagccttctgtgagacccagcaatgagggtggctgaggtgatggctgaatcagatctccctgtacccccacccctcaacgctcctgggaacttagaagcgtatgtggggaagtggtgttgggg

SEQ ID NO: 253354 - DNA, 585 bp, Homo sapiens
caaggataccttagcccagtctacataaaggttccttgggctgtagaaaggagaagcaacaagtgtatagaagttagtggttcattgagaagaggatcctgcactttgctccctgggtcaaatccaggttagagcaggtggatatggcaaaaatcctcaggtcagtttgtggaatctaagagtcatggtgactcatttcccgtttcctgggtggagctccagaaaaagaaagggttgtatggtaaatccaatctaaacagtcagggcctctgagggtgtagcctggtgggatgagttcagtgctatggatatggcatcagagctggycagggagctgcggaaactgaatgaccccatggccagaatgagccatgacttagcagccttctgtgagacccagcaatgagggtggctgaggtgatggctgaatcagatctccctgtacccccacccctcaacgctcctgggaacttagaagcgtatgtggggaagtggtgttgggggtcatcactttggccaagatttggcatgtgttttctggtgcaatgagagatcagaacagattaaattgtagtaaagaaaaat

SEQ ID NO: 253355 - DNA, 635 bp, Homo sapiens
acatcttgttggccacaacatagtcacctggccatacctagattcaacagaatctgggaaatattgccgcttaaatacaactggcatcgttttataaaggaggaaggtgagaatggttgttggcatagcaacaagcagtccttgccagagctggaaggctctgatgacaggcggtgttaccagcatgactctcacctgtaaaaggaattgtatacaatgggaatttttggggctgacagtggggtgaggtggggagcatcaagatcacaatcatatagaaaacacctggagccccagaaagtggcctgccctgcactgcaggttgtccttgggcctcctatatatcttgctctggagtgtctttctttggatcctcttccaagggtctttcctaaccccagctccaaaatgtggtagactgatttccagaagccttcagagtcttttcagtcctttgtacttttcaaagcactttacacacatgattctgttttattcttaccaaagccccatttagtrgtaataggtggtgtttcctgatcttgctagaagccattcaagtgttaaatacttctatgtgcatcatcttgagtcattctcacaatgactctgagagtccagaattgctggaagct

SEQ ID NO: 253356 - DNA, 594 bp, Homo sapiens
actcacatttaatcatcagctgcacaggagtttagaaaagtgtgagctcaaaaaactagcacctaggtgttcccagcactgtgcctcctgagcactgacctgttactccacccccgccccatcgtaggtgggtttcttgggctctggttgctgtagcaggatagtcaagctttaccatctgacagatctaggttcagatccagactctgccacctgttagctacatgatcttaggcaaacatcttttggagactcactttttctcagtagaatgaggcagcaattttatctaactcttgggctgtttacaggttgcccgagacaatgcacgtgaagagtgcctggcacttggtaaagagatcacagtaatggttactatgacatcaccgtgacagyaggtccctggatcattcttttctgtccactcccacccctgcatccagccaggttctcctggctacagtgtagacctcaccttttcccattttgccaaggccagaactgtacttgtggaacttcactaagaaaagaaagatagataaaacccttctatgactcaaaacactcattttcctttaaaatttcaggaaataa

SEQ ID NO: 253357 - DNA, 416 bp, Homo sapiens
cctatatgttgatttagagcaaattcagccarctagaacacagccaattcaagaaagcaggaagagagcacgtgtgttcaaagagcacctatatttgcaatccccataaatacactctctagcttaaaccagagagtttaatatagctacttaaatggtcaatagtataccagtgcaagctttctcaaggtcagctgggcattgcaatattttacaatccagacaactgacacgaaccaaatggcccccttcttcttttataacaacgtgtttacttcttctcatcctccttctgacatttatggagtacctggtcagatgagcaaagaaaaataagacaaggctcatctgctattgaagctgatgcaatctcattccttccagaactgcttattatggatctttgtgtattgcct

SEQ ID NO: 253358 - DNA, 513 bp, Homo sapiens
ggaacatcacacacccgggcctgttgtggggtggggggagtggggaggcatagcattaggagacgtacctaatgtaaatgacgagttaatgggtgcagcacaccaacatggcacatgtacacatatgtaacaaatctgcacgttgtgcacatgtaccctagaacttaaagtataattaaaaaaaaaaaaagatcaagggctttacyatccacagacccaggttgcaggtcctgttttagaggaagtggcaagtttcttaaatcccaccacccagaggtggctctttccagcctcttctcactcatatcagatgtaggcttttcatccctgtctaggatactcgtgtgtgttcttccgggaatcacagtgagtgagccagaaaagcactggacattgtctcaaaagcctccactgtgagttgtctgccacagatactgacaccccagtgggttacagagcaaatctgcaatcatacagaggtttctgtgctacgccaccatgactcactgctgg

SEQ ID NO: 253359 - DNA, 577 bp, Homo sapiens
aatcttttctaatttctttttttcagtgtgaaaatagcactttaccaaaagcattagccatgaaatggttattttgccagttacatttgatttcttttgtatctgcaatgtaatgagttattttatttcttctgtatttgcagtgtaatgagtttttgtggcaaagtgtattaagcaatttttcattatcttgaagttccacaaagtggagaatatttatattctcacatgcattttaggcacttttgatatgtgaaaatagatgtattttctgatgcatttggttaataaatattaatctgaacattttcatgttctttgctattttgaattccattatagattcatgaataaagtcattactagagagattttgtgttcatcttttttaaatggaattatgggagaagttaaaaatataagttggaaacagacatttttaaagggagttttgaatgatagttaatgttctttcattttctctgatttgcattcattaaaatttagtccttaataytgtaatacttatggaaggcctacttcaggaaagaaattgaatacttaagggggattggaa

SEQ ID NO: 253360 - DNA, 569 bp, Homo sapiens
gatgcaaaacagagcagagccttagattttgagagggacctgtctacttacaattcttggagttccatgaggaaaacagctttttcttccaaaacaggatctgtgacatcttctatttttctcccaaggagtcccaggctgtcagaaattaccataggtcctctcatgtgagcatcaagggtagcaagaaaacggmctggagaaataattcagttgactgagaagaaaaacaaaccaaaaaaataagatccaagaaaaggcataaagccctttaatttatatatatatataaaatttgggtgatatggtttggctctgtgcccccacccaaatctcatcttgaattgtaatccccataatcgccatgtattaaggaaaggaccaggtaggaggtgactggatcatagggatgttttcccccatgctgttgttaggatagtgagtgagttaagtgagtgagttctcttaagatctgatggttttataagacagttttccctgctcttgcttgctctctctttgcctgctgtcatgtaagacatgcctcttccccttccaccatgattgta

SEQ ID NO: 253361 - DNA, 569 bp, Homo sapiens
gatgcaaaacagagcagagccttagattttgagagggacctgtctacttacaattcttggagttccatgaggaaaacagctttttcttccaaaacaggatctgtgacatcttctatttttctcccaaggagtcccaggctgtcagaaattaccataggtcctctcatgtgagcatcaagggtagcaagaaaacggccwggagaaataattcagttgactgagaagaaaaacaaaccaaaaaaataagatccaagaaaaggcataaagccctttaatttatatatatatataaaatttgggtgatatggtttggctctgtgcccccacccaaatctcatcttgaattgtaatccccataatcgccatgtattaaggaaaggaccaggtaggaggtgactggatcatagggatgttttcccccatgctgttgttaggatagtgagtgagttaagtgagtgagttctcttaagatctgatggttttataagacagttttccctgctcttgcttgctctctctttgcctgctgtcatgtaagacatgcctcttccccttccaccatgattgta

SEQ ID NO: 253362 - DNA, 425 bp, Homo sapiens
taattttctgtgtcaggcagactcacactgtagtcattgtaggcctggttaaatacctctcttggcttcctgttgttcacagactaagacctaaagcttattgcctggcactcaaggccctctggaatctggtgccctcatccattttctcaacragtaatttttcagaatgtaggaggtgcctgtcccagtgccaggtgttgggtatacagctgcgaacaagaccaacaccatccctccttacacggagtttgcattctaatcaggaagacagacaaatcacacatggatatcaaatgaaagaaataattacagactataatgggctatgaaacaagaaaataaaggactcagaataactgggaggagagtggaatggggaaaaggaagaggtgtattttaggaaacagtgcttttgacaggca

SEQ ID NO: 253363 - DNA, 588 bp, Homo sapiens
attaatggtgagtgaataagctgtagccaatgaaatgaagcaaataacatggttcagaaaaagactggaactattgcattgagaaatgaccatctttgtgtgactttttctccctgcacagagggccctggtatttggaaaaataaaattttcaaatgcttaaaaagaaagaacaagtcttctaattctagtatctattcctgtggcttaaaagtcatttatggaaattatgaccgacactaacatgataattaaagccaaattgaatacctgttcactagagttcaggcttggtaggggccttggtagaggaatctagtgcatatctgagctgccctaattatgtgctccttgtaatcaacattacwtttcctggttacatttcacagttaatttgtttttcccacacaaatcgaattctgtaccagagatgcaaagtttaatgtattattgcacttttttttaggttctagtttaaaaacaataccacaagtacaattaattttaaaaaacgaaattctccccgtgtgggtttaagattaatggcatttatttattattgtatgatctgccttcaataagtagcat

SEQ ID NO: 253364 - DNA, 505 bp, Homo sapiens
gacaggagattccgggatagccatttagggggtcacattctgactggggtgaaccttgaccttttcttggcttgcctttggagttcttggcaccctgagaccagtgtttccacgtcatctagggggctggataagcaggcagattcctgggcctcatcttggagccactgaatgcatggatggagggtggcatctgggaaggtgcggttttaccagctccccacgtgattctgagataccctatagagtaaggcccctgttctagagagagaagagcataggatggggagctgatcctctgggttaaaacatgtgtcawcgtctttctagttcctggccttggaccccacaatgggcttctgtttcctaatctacaaatgcagccaatgtgtctactctaaagggctattctgtgcatgacttaagtgagtctgcagataaaaaatcagtgagcccaatgcctggcacaaaacagacattcaactgataggagccacctagaaaa

SEQ ID NO: 253365 - DNA, 619 bp, Homo sapiens
catccctgtcatctcaatattgacatcaattaatcatcttttctcattcagtttgaggtccttctggttattgtgtgataagtgatttcctattgaaaacctgcacatatactgggtactatgtcgtaagtatacatatacttatgactctatggctcttattttaacctgttttagctgactttttctgaccctgctctggcaggagaagggaagtcactacctcattactttcaggtgagggtagaaatttcaaatttcccacatggcctttgtggacaaccaagtgaggggtctcctcattactgctgggtgaggccagagttccacttcatatacctcaattgatacctcgcaggctgagatggtggaagggactcattactcctccccagttggcctccagtgataccataggagtgtgtggccttgttataaatgggcaggggtcagagtgctgayttttcatgaggtctcctctgacacctcccagcaaggaggaagaggagcacttcatcattcccatgatgggtggaggtccaggttccccctgtgatcaccactgtaatgcggaggagcctccttattaccacccagcagggataaagtcccagttccc

SEQ ID NO: 253366 - DNA, 619 bp, Homo sapiens
catccctgtcatctcaatattgacatcaattaatcatcttttctcattcagtttgaggtccttctggttattgtgtgataagtgatttcctattgaaaacctgcacatatactgggtactatgtcgtaagtatacatatacttatgactctatggctcttattttaacctgttttagctgactttttctgaccctgctctggcaggagaagggaagtcactacctcattactttcaggtgagggtagaaatttcaaatttcccacatggcctttgtggacaaccaagtgaggggtctcctcattactgctgggtgaggccagagttccacttcatatacctcaattgatacctcgcaggctgagatggtggaagggactcattactcctccccagttggcctccagtgataccataggagtgtgtggccttgttataaatgggcaggggtcagagtgctgacttttcatgaggtctcctctgacacctcccagcaaggaggaagaggagcacttcatcattcccatgatgggtggaggtccaggttccccctgtgatcwccactgtaatgcggaggagcctccttattaccacccagcagggataaagtcccagttccc

SEQ ID NO: 253367 - DNA, 420 bp, Homo sapiens
taattcttaccaacacactgagactgcaacaccttcaaagatgaagatcctggcttattctggaaattatataagaagacactaaatgacattctacagtcttgtgatatcttcttggccttcaccattcctaaaagatcctgcctacccctttccccatcagactacgtggtcttgagagctgattccaggccrttcattcattgctaatctcattgtcatcccatttgacaaaaggatagacacacagtaggagctgggttgagtaaaatttatttgctgggagagtaaatggtcctgcacacagtgggtaatctgtcattgggagttgaacttgagtattcatttgctgatggagtccttaagttttgggctataaatggcatttatactataagaggtaacctggacaaagagggg

SEQ ID NO: 253368 - DNA, 420 bp, Homo sapiens
taattcttaccaacacactgagactgcaacaccttcaaagatgaagatcctggcttattctggaaattatataagaagacactaaatgacattctacagtcttgtgatatcttcttggccttcaccattcctaaaagatcctgcctacccctttccccatcagactacgtggtcttgagagctgattccaggccgttcattcattgctaatctcattgtcatcccatttgacaaaaggatrgacacacagtaggagctgggttgagtaaaatttatttgctgggagagtaaatggtcctgcacacagtgggtaatctgtcattgggagttgaacttgagtattcatttgctgatggagtccttaagttttgggctataaatggcatttatactataagaggtaacctggacaaagagggg

SEQ ID NO: 253369 - DNA, 660 bp, Homo sapiens
tcacacggctctttcctatgttcccaaaacagaagaaagttgtattgagattgwtgtcatgctgtatcacttctggtaattttgctaccaccaagggtgttgtataagctgacagtatgatcccaaactcaacagaaatacaactactttttcaacctttcaacccagttctcagaacctggaaagaggactcatggtgataatcctaaatgtgtggcagaaagaactaggtttgtatcctcataaaccttactttgcattatcctagacatcacatccttcacattatcctagaataacataaactctgaatctcagtttcataacttaaaaataggaatgaaacctacctcatgtgtttgttgcattagataacgtaacacaaaagtgtctaacacatagtgaatgtgtagttatgttaattctttttcattcataagtatttctttaatgttacttttgcaatccattttctaataattagcatataatgccatgagttggcaataagggtattagtttaaacaggtagcaggaaatacagtaaaataaagttcagcccgagaccccaaaggtatcttgggctttgcttcctgagtaaaaagattagctaccaatagtcattaatgatttaaaattgaatcacttacaaaacaatca

SEQ ID NO: 253370 - DNA, 647 bp, Homo sapiens
tcctatgttcccaaaacagaagaaagttgtattgagattgttgtcatgctgtatcacttctggtaattttgctaccaccaagggtgttgtataagctgacagtatgatcccaaactcaacagaaatacaactactttttcaacctttcaacccagttctcagaacctggaaagaggactcatggtgataatcctaaatgtgtggcagaaagaactaggtttgtatcctcataaaccttactttgcattatcctagacatcacatccttcacattatcctagaataacataaactctgaatctcagtttcataacttaaaaataggaatgaaacctacctcatgtgtttgttgcattagataacgtaacacaaaagtgtctaacacatagtgaatgtgtagttatgttaattctttttcattcataagtatttctttaatgttacttttgcaatccattttctaataattagcatataatgccatgagttggcaataarggtattagtttaaacaggtagcaggaaatacagtaaaataaagttcagcccgagaccccaaaggtatcttgggctttgcttcctgagtaaaaagattagctaccaatagtcattaatgatttaaaattgaatcacttacaaaacaatca

SEQ ID NO: 253371 - DNA, 616 bp, Homo sapiens
ggcaaggtgagccaccaatcttttctgcagcaacatgaccaagacttcacggtcttgactccactcttctgggtaatggtggtgggggtggtttccggtcattctgagatgacttggtgttgatgtctgtctctgtaccccatcgttaattgtgtgatctaagaaccttatagaggcttgtctcccaatccattctagcccaggatcttgagcactcaatttatttttataattaaaaaaattatttaataaacattgttctccactcccaaacccctcccccagttacctgcatcccagccattcttamcagcgggagttatcaaaatatattaagctctgtctcacctccacacttttacatcctccactattctctctatctgggatttgtttcttcctacttcatctttccaacaatttgctaattcctctcaagactcagctcatgtccctcagtctgcaaatgcagcagatcgtgctgaccccactcctaagttgcagccttggcaggactgcattgagcatcagtctccctcactggtcacagtctgttaataacaggggatgggaatcttttactgtctcatcctcagagctcactacacagtaagta

SEQ ID NO: 253372 - DNA, 609 bp, Homo sapiens
ttggcttgtacagtcacaatgagaattacatgcaaataagacaagacaatattacaacagttaatatttattaaatacttattaggtattcctcactgatcaattcactcccttaaaaatcatacagaatgtggtggctccattccaagatggccaaataggaacagctctggtctgcagctcccagcrtgatcaatgcagaagacaagtgatttctgcatttccaactgagttctgaagagaccagtggttctcccagcatggtgtttgagctctgagaacagactgcctcctccagtgggtccctgacccccatgtagcctaactgggagatacctcccagtagaggccggcagacacctcatacaggcaggtgcccctctgggacgaagcttccagaggaaggatcaggcagcaatatttgctattctgcaatatctgctgttctgcagcctccgctggtgacacccagacgaacaggatctggagtggacctccagcaaattccaacagacctgcagctgaggaacctgactgttagaaggaaaactaacaaacagaaaggaatagcatcaacatcaacaaaaaggacatccacaccaaaacccc

SEQ ID NO: 253373 - DNA, 609 bp, Homo sapiens
ttggcttgtacagtcacaatgagaattacatgcaaataagacaagacaatattacaacagttaatatttattaaatacttattaggtattcctcactgatcaattcactcccttaaaaatcatacagaatgtggtggctccattccaagatggccaaataggaacagctctggtctgcagctcccagcatgatcaatgcagaagacaagtgatttctgcatttccaactgagttctgaagagaccagtggttctcccagcatggygtttgagctctgagaacagactgcctcctccagtgggtccctgacccccatgtagcctaactgggagatacctcccagtagaggccggcagacacctcatacaggcaggtgcccctctgggacgaagcttccagaggaaggatcaggcagcaatatttgctattctgcaatatctgctgttctgcagcctccgctggtgacacccagacgaacaggatctggagtggacctccagcaaattccaacagacctgcagctgaggaacctgactgttagaaggaaaactaacaaacagaaaggaatagcatcaacatcaacaaaaaggacatccacaccaaaacccc

SEQ ID NO: 253374 - DNA, 604 bp, Homo sapiens
tttgaggagcacagtctgtctaattccttccccacccccacagaattttgtttacttataatagcttttaatccttaagggatacaacataacacagattctgtgtcctatggccttcacagagaggtgcttcaggatttgggaccaaccatgctactgtttccatgggtgcmagtgaccttttcccagataactcaggcttggtttgctgccaggatacactgtattatcctttgctttgtacacatgaacatatctcttgcctaactaaaatccggtttcagctcaggcatctcaggcaccttcaattttaagaagagctgtgtgttccctttggtttggaagatgcttccaggcaaaaatgaccttgggccatatccttccagacatatttggcattttagagatcctgatcccagcaggcctccacaggttccacaatggcagaaggagaactactggctgattcttgaacatgctatattggtctactcctctataccttgcacattctgtgccctttgctagaagtgccctcccaactttacctgtccagtgaaaaactttttatgacctatgtctccttcaagagtcagcggatgtg

SEQ ID NO: 253375 - DNA, 588 bp, Homo sapiens
aaggtggggattaagggtagagctgtgagacaaccctgtcagtagactttttttccaaagagcaaccaaagcccagcaattgtatggacagaggcaaacagcccagctaccatccagtccgagttcctgcagttcaaggaggggacagaattcatgtgacatttacaagtcaggaaggcccactctacaatttcccacttacccaggcrtttgcaactgagacatctggagcacgtcgatgaccaaggtccatcccatgtttgtatccatttcctggaggaagaagcagaagtaaactggaatgatttgagtttcatgtgaagggagaatgccgtgcattccagtactgaacaaattttgagaaacgacgccgtttgttcactttgtattgaagaggataggaagtttatgaggttcaagataatgcctctaccctgcatcaatccacaggagtgacgagcatcttcagaatgcaagagaacagggtatttgaaccagtattgggagtgtcagctgtctggtcgcatcttactctcagaaggtaggtcagcaaaatcacaccaaaatttcaagacagttctgtaatgt

SEQ ID NO: 253376 - DNA, 656 bp, Homo sapiens
atgtgcttccccctgcagaaagcctatgaatggacgtgcagtcagggaggtttcacatcaccaagattcctatcccagaaaagcagatgttcatagctctgggaatggaatgcgacccttgtggaaagcctataaacggatgcatggggagcgcctgtccatatggataagatagggctataaacaccctcatcttgccgcggctcttctaggcctctttagggttaaagcatactcccttctgagaatttctggtctaaccagttgtctagcttcatgtcctgtttccatggattgtttgtaaccagcttttgttacaattgttactgctgattaatatcttgctaatcataggttacggaaagactgtgcttctgttctaaggctctgttagaaattactgacgcacacactatattgtaaattgttatctctgtatactgtacytctacatacaaatgtactgtacttcttcatacaaatgttatgttaaagaattacttcatccccatgtgaccatctcacctcataatcaaatgaccctaaatccctcactgacctacccccgccctcactaaacttaataataaatgctggtatacccagtgcattgttggcaccgcgggaccagaaggcagtgacccacctggacccag

SEQ ID NO: 253377 - DNA, 617 bp, Homo sapiens
ccagctcagcagttcagagccaaaaatagaaaggctttgtragcaggtaggtatctttattatggtaatcaactctgggcctaagaaacaatgaggccatcagagttcctgggatgctccataaaggtggtagtagtgggtgtcctggtaagcacagaaatctgtgatctggcgtacagcactcaagtggggctaccaacttcaggcctctctgcatccagggccaccaacttcaggcctctctgcacccaagacctggctaagttttagcccaccagtgaatcaatgtgaattgatagggaaaatgctaaactggaagaaatacactaaaaaaaaatcataaaatttgagaacaaaatggaattcagattatcaagttaaagccctcattttacagattaaagaaaatgaagctcggggtagagaaatgatttgcttcaaggctacagagctaagtggagtggcagatccaagagcctccctgcttggtggttcttctgccattaaaaaccaaccaaacaagaaaccatgggcaaaacacaggcacaccctgaatactgtcaggaggagacggtcttcattctctcttgtggtgcccttccctcttcctgaggagt

SEQ ID NO: 253378 - DNA, 556 bp, Homo sapiens
gctgagcacggtggctcactcctttaatcccagcactttgggaggctgaggcaggaggatcacctgcagtcaggagttcgagaccagcctggggaacatggcaaaacaccatctctactaaaaatacaaaaattagccaggtgtggtggcgggcacctgtaaacccagctactcaggagactaaggcaggagaatcgcttgaacccaggaggcagaggttgcagtgagctgagattgtgccaccgcactccagcctgagtgacagattgagactctgtctcaaaacaaaaaagatttatggagttcaagtgcagatttctcacatgcatatactgcatagtggtggagtctgggctgttagtgtagccatcgcccacatagtgaacattatacccaataggtaatttttcaacccttatcccctttaccccctcccaccttttgctgtgtccggtstctgttattccactctggatgtccacatgtacccttggtttagctcccacttgtaagtgaaaacatgcagtatttgacttcctgtttctataagtgaaaa

SEQ ID NO: 253379 - DNA, 555 bp, Homo sapiens
gatcatgcgttcctgtttctctccatcagactggacacgtatatgttttcaataaatgttttccgaattgagctggtttggacagaaatcaaaggaaaggagattaaacagcattctgagcaccaaattttagagtccgactctgtaggtagaagaccaagaatgctcttgggaaccaggagaagaatcagagctctgggtgatgtgatgcaatggtgatttttatgataattctgatytaaggtaaagaaaagcgactttctctcacatgggaattctcacttcaatcttctgttgcatttagcgggggacaaaaggagatgcaaaagtgtatgtgttgcattgatgaatgtagcaagatcttacttggttataaaatccagagtattttcaatcctgaaggtccaggcatgggtgatggaacatcactcgcactctctgggctcagtagtaggatataaggaagagaacagtgctttgcagccatgacagtctggagaggcagcatgtaaagaatggagaatctcagcccagctacttgccagcaagctgata

SEQ ID NO: 253380 - DNA, 431 bp, Homo sapiens
accatcaagataggcctatcagggtgaaatttgagctgagagctgaaagatgacatgagacagtgaaaggcaatacagattatgtgagctaagagcattgtaggccagggagcagcctgtgcaaaggccctgaggtatgcacaggaacatctgcagtgttgatgggtccctcttttggccccacttacaggagtctaattccctatgcagggcctcccagagactgtgggtctctctcagttcctcactggatttcttctttgctgggccaagaagggaaaaagacactgtatgagtgtagtctctagccttgctgttctctcgcaaatatgacattgcayagtcatcttcaaacaaccctagaggggcctagattttatagatgaggaggtggattcattataaatccagtcacttcctgctcgccccag

SEQ ID NO: 253381 - DNA, 514 bp, Homo sapiens
gtaattttggagggacaaggtcgtgagtgtctcatgaatcaaaaagagtctactgaacaattaggtggtcttgagtattttgctggttttgtcttataaatatcattaatyattataaactccctttcccataccataaacaaaaatcaattccagatgggttgtaaatggattttccagatgggtttctcactgtgagagagaaaacaatcgcgatgcaagacaggatttaggagaatatcttcataactttgtggctggcaataatttcttcaatgggccacacccacatacagtatgcgttcaatgctatacagtgcaaggtgttttacatagtttaattttctacttacacagtcctgtgaggtaagaacaactccttacttctgagtcttggaaaattaaaattccatatttgacatttttagggaaactgagaagcctaatgggagccctcttctaagctcctgtctcaacccacagttggctgcaacaatatttgtagttaaaatca

SEQ ID NO: 253382 - DNA, 514 bp, Homo sapiens
gtaattttggagggacaaggtcgtgagtgtctcatgaatcaaaaagagtctactgaacaattaggtggtcttgagtattttgctggttttgtcttataaatatcattaatcattataaactccctttcccataccataaacaaaaatcaattccagatgggttgtaaatggattttccagatgggtttctcactgtgagagagaaaacaatcrcgatgcaagacaggatttaggagaatatcttcataactttgtggctggcaataatttcttcaatgggccacacccacatacagtatgcgttcaatgctatacagtgcaaggtgttttacatagtttaattttctacttacacagtcctgtgaggtaagaacaactccttacttctgagtcttggaaaattaaaattccatatttgacatttttagggaaactgagaagcctaatgggagccctcttctaagctcctgtctcaacccacagttggctgcaacaatatttgtagttaaaatca

SEQ ID NO: 253383 - DNA, 514 bp, Homo sapiens
gtaattttggagggacaaggtcgtgagtgtctcatgaatcaaaaagagtctactgaacaattaggtggtcttgagtattttgctggttttgtcttataaatatcattaatcattataaactccctttcccataccataaacaaaaatcaattccagatgggttgtaaatggattttccagatgggtttctcactgtgagagagaaaacaatcgcgatgcwagacaggatttaggagaatatcttcataactttgtggctggcaataatttcttcaatgggccacacccacatacagtatgcgttcaatgctatacagtgcaaggtgttttacatagtttaattttctacttacacagtcctgtgaggtaagaacaactccttacttctgagtcttggaaaattaaaattccatatttgacatttttagggaaactgagaagcctaatgggagccctcttctaagctcctgtctcaacccacagttggctgcaacaatatttgtagttaaaatca

SEQ ID NO: 253384 - DNA, 514 bp, Homo sapiens
gtaattttggagggacaaggtcgtgagtgtctcatgaatcaaaaagagtctactgaacaattaggtggtcttgagtattttgctggttttgtcttataaatatcattaatcattataaactccctttcccataccataaacaaaaatcaattccagatgggttgtaaatggattttccagatgggtttctcactgtgagagagaaaacaatcgcgatgcaagacaggatttaggagaatatsttcataactttgtggctggcaataatttcttcaatgggccacacccacatacagtatgcgttcaatgctatacagtgcaaggtgttttacatagtttaattttctacttacacagtcctgtgaggtaagaacaactccttacttctgagtcttggaaaattaaaattccatatttgacatttttagggaaactgagaagcctaatgggagccctcttctaagctcctgtctcaacccacagttggctgcaacaatatttgtagttaaaatca

SEQ ID NO: 253385 - DNA, 625 bp, Homo sapiens
ttgtggttgcagacaccatgctgaggaactaggtgacaccagttgaagaaatctacgcaggatggatcctctaaaataagaaaatatatttagcatgttggctagggtgtctatcctttttctttttttttttttttgagatggagtctcactctgttacctaggctggagtgcagtggtgtggtgtgatctccgctcactgcaatctctgctgaccaggttcaaacgattctcctgcctaagcttcccaagtagcagggactataggcaagtgccaccaagcccagctaatttttgtatattaagtagagacggggttttccaccatgctggccaggctggtctcaaattcctgagctcaagtgatctgcctgcttcggcctcccaaagtactgggattacaggtgtgatccaccgggcccagccttggtgattgcatattatgatttattaatattaacatagcacctttttcttaaggtgagggcctacagaacaaaggtcttgggcccacctcccttgtgcctctatgtggtttttcccattaaacaytgggactttggtaggggggtgaggtaggggcaggatttagatgccaagaaaagactctgaccattagcaaaat

SEQ ID NO: 253386 - DNA, 566 bp, Homo sapiens
cctctttttgagacagggtctcaaaaaaagcccaggctggagtgcagtggtgcaatctcgggtcactgcaaccttcacctcctgggttcaagagatcctcccacctccccagtagctaggcctacgggcacctgccaccacacccagctagtttttatattcttagtagagacggggtttcaccatrttagccaggctggtctcaaactccggacctcaggtgatccacccgcctcagcctcccaaagtgttgggattacaggtgtgagccacagcactcagccaagctcctcttttaataagccatttctcatatgcaccctatgactcccctcattccagcaccacaggtagaactgaccatcactgtaacactgtgaatattccaccacttatttgttgttgtagctttcttttaagaacaggaccttttaagaataggacccagctgtattctttcatccctagaagagtgctggaggtatataaggtgcttggtgacttggctttgaacaagatcgaggacctcacagcacttttcacatgatctttcatgtagccctaca

SEQ ID NO: 253387 - DNA, 611 bp, Homo sapiens
gttcaaggtcctcttcaagctctgtcgttacaggaatagcagaatttatttccttctcaaatttccacgtggcccctccaccttcaagccagcaatcatgcatgtagttcttctcaaacttcaaatccctctttttctgcctccgatctctgctttgaagggctcatgtgatgacgctggacccacctagaatgctccatgatgatctccctatctaaagatactattcaggtcaactgattggtaacttaattacatctgcaaagtcttttgccaaacaatgtttcttaygtttgtcttaacattttctcatcatattcacaacttctgaagattcgagaaggacatctttagggggccatttgaaaaactccccttaacgcaggcatggaaacccagaatgggaggaatattagagaccggccttgcagaaactgcgtgggcaggcagagcccctaagctgcaagatctcagccctcagtgctgtgttacccacctgacttagttacccaacacacctgattcttccctgcctatcagctgctctcccagcccgccctgatttctgctgcccaactttatttgcacatcacatagcctactgatgtgga

SEQ ID NO: 253388 - DNA, 611 bp, Homo sapiens
gttcaaggtcctcttcaagctctgtcgttacaggaatagcagaatttatttccttctcaaatttccacgtggcccctccaccttcaagccagcaatcatgcatgtagttcttctcaaacttcaaatccctctttttctgcctccgatctctgctttgaagggctcatgtgatgacgctggacccacctagaatgctccatgatgatctccctatctaaagatactattcaggtcaactgattggtaacttaattacatctgcaaagtcttttgccaaacaatgtttcttacgtttgtcttaacattttctcatcatattcacaacttctgaagattcgagaaggacatctttagggggccatttgaaaaactccccttaacgcaggcatggaaacccagaatgggaggaatattagagaccggccttgcagaaactgcgtgggcaggcagagcccctaagctgcaagatctcagccctcastgctgtgttacccacctgacttagttacccaacacacctgattcttccctgcctatcagctgctctcccagcccgccctgatttctgctgcccaactttatttgcacatcacatagcctactgatgtgga

SEQ ID NO: 253389 - DNA, 637 bp, Homo sapiens
ataccacgggaagatttgagttacgctgccctaagtgaaagaaatatcagaatctaggagagggtgcctggaacaaatccttacagtgccttcaaaaggagcatttccctgcccacgcactgatctcaggcttccagcctccagaacagtgaagcaatgaattcctgttgtttaagccattaggtttgctacattttgtgaggacaacttggcaaactaacatacggcacatctcwatttagaccagccacatttctttaattttttaattttaatttttttttaacttttaacttccggggtacatgtgcaagatgtgtaggtttgttacataggtaaatgtgtgccatggtggtttactgcgcagatcatcccatcatcccatcaccaagttactaagcccagcatccattagctattcttcctgatgctctccctcccctcaacccccaacaggtacacagtgtgtgttgttcacctatgtgtccatgggttctcatcagtcagctaccacttataagcgagaatatgcggtgtttagttttctgttcctctgttagtttgctgaagagtaatggtttccaactccatccatgctcctgcaaaggacatgatctcattcttttttcttagacta

SEQ ID NO: 253390 - DNA, 637 bp, Homo sapiens
ataccacgggaagatttgagttacgctgccctaagtgaaagaaatatcagaatctaggagagggtgcctggaacaaatccttacagtgccttcaaaaggagcatttccctgcccacgcactgatctcaggcttccagcctccagaacagtgaagcaatgaattcctgttgtttaagccattaggtttgctacattttgtgaggacaacttggcaaactaacatacggcacatctctatttagaccagccacatttctttaattttttaattttaatttttttttaacttttaacttccggggtacatgtgcaagatgtgtaggtttgttacataggtaaatgtgtgccatggtggtttactgcgcagatcatcccatcatcccatcaccaagttactaagcccagcatccattagctattcttcctgatgctctccctcccctcaacccccaacaggtrcacagtgtgtgttgttcacctatgtgtccatgggttctcatcagtcagctaccacttataagcgagaatatgcggtgtttagttttctgttcctctgttagtttgctgaagagtaatggtttccaactccatccatgctcctgcaaaggacatgatctcattcttttttcttagacta

SEQ ID NO: 253391 - DNA, 584 bp, Homo sapiens
taactaacagttttgtgtgcccttctacattccttccttgttcatacaaacatacatacacatagaagaatttggtttaattttttttaccaggaaataacaaaaacaaaaaggatcatactatggtgtttatattttccatgaatttgttttggcttagtaataaatcacagacctcccttcttgtcaatgtctayggattaaaccagagcaacagaatttcccattgaacagcttttagccaatcacttccctatccaatgaccttccagttgttcctataggtttcagcatttcaggcactgctgcagtaaatcgactttcaccacctattcgtttttactttggctttatttctgtaggcaagagtcctcaaagtacagcctggtcgaaggcacattaattttgaattttaatagctactgccagattactttccaaaaagcttgcggtctcccacgctgtctcctgcaaagtgcttggttgttcacatagctgtggggatgagcccttgctagcttgggtgactcctggatatcaggactgcagagaaggagggatgctcacttggaaatgtaggccag

SEQ ID NO: 253392 - DNA, 557 bp, Homo sapiens
ctgggtgatgggtcccctcctttactttatgttccatgaagttgcacacttgctcaaggagaaacaccagagagagaaaggccgtcacatgggcaagggaatacaaaccctgtgcctccccagaatccccagacaagctcagatccatctgtggtttagactagttagggtaagcatatttacaaagcctcttactattcttggagatctgatggataagacagtgcttttaagagaacaaatacctggttgaccattcataccaaaaaagcttacatttatgaatcaatgtccttctgattagaacacttttccttcagagagttgcgcagctcatggcccccctccattaggagtctacctcagtttcacctccttaaagagatctttaaccgtatgatataagatagcatttgccctctaaatacactgaataccttgttttctttttctgtatrgttcatgtcattatctgacatcatattatatattctagctcttctcactatctgacattgtattatatacaatattatatatattatgtatatatgtac

SEQ ID NO: 253393 - DNA, 582 bp, Homo sapiens
caccccgcagaatttcaaagccaagaatcctgtattacaatgtaaacaaacaaaattagactcaaaattgccttttctgattttgatatattaatcaackcttcaggaaagcttctaaacattttcaattacatcaaaacaggctggcaacattttccaactttaaaaaaaaatcaggcttagttaaaggtttgttttctattccattgatactctatactacatatttgcaactgtttctgttttagtacacattgattaatagcattagtcctcaaatcccagcatgttcacacacacgcaaaaaagtatttccatctgtaatcttcattaaggcaagagaaatctatcaattttggcatgcttgctgcttctttcagctgcagtcttgagtccttgcaaatgtctgagactatgagcctcacagctgccattaaatgctaattgtagggcaggtgtgctctctagaaatggaggccaaaaagaatggagcaaaagagccaaagagaaagagaagtcttgacacctgaaagatgcagctccctctgtgctttacaccttacttgactgggcaggaaaact

SEQ ID NO: 253394 - DNA, 554 bp, Homo sapiens
cattgtggacgctaaggtcaagttgtgaaaaataaatttgctacagtatgcaagggctaatccataacaacttgcttaaaaagatagtaacagcttgtttacaactataatgtgaaatgtattccaaataaaagtgctgtgcacttctattcccatatacttgctatgtcttgtcctaggtttatggaatagataaattaaaaggaactttatgacattttccactgacaaaaaactttaggcagctgaggcacaatacaaaaagccattgatgacaagaaccacctgcttgtcatgtaaatgtttcctaaatcacaaaaggcatgaagttccttttgtgttgtttctccctttcatctttcaggccaatcagatactatggacaacggataaaatgggaggaattactactctgtcttgtctgagccattgagttcataataaaataaggataatatrgcaattcagcaacaaaagaggcaaacaagtatgaattgaaataacaaaattcatttggtaatattgagacttcagaacccagggaagcagaatga

SEQ ID NO: 253395 - DNA, 507 bp, Homo sapiens
tttagtatcttaagaactgtgtttaaagctgtgaaacatttaaggtgagtataaaacccagaattgtcctcctgcacctgaaatcgttttagttaacaatgaaacgtagtgtgtaattaaacactgaaactataamacagccctatcatcattttcagttgatgtaagaagaaggtgaaatttgaattgggccctgaggagtaggatttgaaaagttgaaagaacaccaaaaacattattccaggcatcattccagaagagaaggcagtatgaaatttatatgaaggataaatatggaatgtttggagggacagtaagtagatcaacttggctagaggagagtacgttgagacatataagacagatgaaaagctagaagataaggctagaaggcaggtgtagaaagtcttacccatcaagtctcgacctgggtttggattttatctcaaaggtgataggattaactagataaaatggaagattaatctacaggaaattacgaagtgt

SEQ ID NO: 253396 - DNA, 507 bp, Homo sapiens
tttagtatcttaagaactgtgtttaaagctgtgaaacatttaaggtgagtataaaacccagaattgtcctcctgcacctgaaatcgttttagttaacaatgaaacgtagtgtgtaattaaacactgaaactataaaacagccctatcatcattttcagttgatgtaagaagaaggtgaaatttgaattgggccctgaggagtaggatttgaaaagttgaaagaacaccaaaaacattattccaggcatcattccagaagagaaggcagtatgaaatttatatgaaggataaatatggaatgtttggagggacagtaagtagatcaacttggctagaggagagtacgttgagacatataagacagatgaaaagctagaagataaggctagaaggcaggtgtagaaagtcttacccatcaagtctcgacctgggtttggattttatctcaaaggtgataggatkaactagataaaatggaagattaatctacaggaaattacgaagtgt

SEQ ID NO: 253397 - DNA, 578 bp, Homo sapiens
tatataatatgaaaaaatattgagattttttttagagtaagtcttttgaagtgtggtatgtcttttacacttacagcacatctcaatgcagatgctaaattttgaaaggttaaagtgatatatgttccttccaaaacaatatagcctcatatacagaaaaataactcacactgttacttttaacatttaaattgctgggcatggtggctcaagcctataatcccagcatgytgggagcccaaggcaggcagattgcttgaggccaggagttcgagaccagcctggtcaacatggtgaaactccatctctgccaaaaattcaaaaattagctgggtgtggtggtgggcgcctgtaatcccagctactcaggaggctgaagcatgagaattgcttgaacccaggaggcgaggttgcagtgagccaagattgcaccacgacactccagcctgggtgatagagcaagactctgtctcaaaataataataataataataataataataataataataataataataataataaaatttaatttaaattaactaaaatattcagttcctcagttgcactagctc

SEQ ID NO: 253398 - DNA, 578 bp, Homo sapiens
tatataatatgaaaaaatattgagattttttttagagtaagtcttttgaagtgtggtatgtcttttacacttacagcacatctcaatgcagatgctaaattttgaaaggttaaagtgatatatgttccttccaaaacaatatagcctcatatacagaaaaataactcacactgttacttttaacatttaaattgctgggcatggtggctcaagcctataatcccagcatgctgggagcccaaggcaggcagattgcttgaggccaggagttcgagaccagcctggtcaacatggtgaaactccatctctgccaaaaattcaaaaattagctgggtgtggtggtgggcgcctgtwatcccagctactcaggaggctgaagcatgagaattgcttgaacccaggaggcgaggttgcagtgagccaagattgcaccacgacactccagcctgggtgatagagcaagactctgtctcaaaataataataataataataataataataataataataataataataataataaaatttaatttaaattaactaaaatattcagttcctcagttgcactagctc

SEQ ID NO: 253399 - DNA, 587 bp, Homo sapiens
tcaatcaataaatgaatctaatacttwaagaagcagaagtgttactttctggagaactgtatttaactttcactgaatttcattctatttcttaaaattgttataatgaggctcttgtcttggaagccctagaacagacactatatcaatttcccctttttaaaatgtgtaataactgtaaacagcaactgtagtccccaagaaagaatagttgagataaagaaaataagagaaatcatcaatgtagctaagaaagcttcactgtgaagtaagacaggggtgctatctaaagcaaattaatataggttattgaccatagaagaataaaatttattggtatgtgaaaacaaactccccagaaccactctgaactttccctgttagccaacaccatcaattattattattaagtgcctgctcagctgctgcttggtggaagaggtagggaggtttggtagctaggcaacgagctggaaactcaaagggtaggagctgtgattctggctcctccataaaagtgataagtggccttgagtaaactccccctgccttgttttcttcatgtgaaaaatagcatcaccagtctg

SEQ ID NO: 253400 - DNA, 587 bp, Homo sapiens
tcaatcaataaatgaatctaatacttaaagaagcagaagtgttactttctggagaactgtatttaactttcactgaatttcattctatttcttaaaattgttataatgaggctcttgtcttggaagcyctagaacagacactatatcaatttcccctttttaaaatgtgtaataactgtaaacagcaactgtagtccccaagaaagaatagttgagataaagaaaataagagaaatcatcaatgtagctaagaaagcttcactgtgaagtaagacaggggtgctatctaaagcaaattaatataggttattgaccatagaagaataaaatttattggtatgtgaaaacaaactccccagaaccactctgaactttccctgttagccaacaccatcaattattattattaagtgcctgctcagctgctgcttggtggaagaggtagggaggtttggtagctaggcaacgagctggaaactcaaagggtaggagctgtgattctggctcctccataaaagtgataagtggccttgagtaaactccccctgccttgttttcttcatgtgaaaaatagcatcaccagtctg

SEQ ID NO: 253401 - DNA, 658 bp, Homo sapiens
tgcagggaccttgcttttagtcaggaggcaaatcaagagccaagagagggaggggtggtcgtgagtttttatgatgttccttctcttctccgctccttcctgacaagagtctgtctcttttctctgtgtgtcataactacccacattcaccccggcagcccatctaccttgtttctctcataagtcagcttctctcccatctttcctgtgaaaatttctaacaaaatgggagttaaggccgggcatggtggctcctacttgtcattccagcattttgggaggctgaggtgggaggattgcatgagctcaggagttcaagaccagtgtgggtaacatagagactctgtctctacacatttttttttttaattagctggggatggtggcttgcacctgtagctccagctactcagagggaggctgaagcaggaggatcccttgagtccaggagtttgaggctgtagtgagccctggtctcaccactacacttcatcctgggcaacagagtgagatgctgttttgtttttgtttttttttgtttgtttgtttggttttttttggaaaaagaaagaatcaccataaaaaagatgggtaactcrgaaatttcaaatgcttgaatttcttgggttgggaagaatatcccaaaatgtgtttccaa

SEQ ID NO: 253402 - DNA, 529 bp, Homo sapiens
cattttaattagcaagtacagccttgacacaaataaaggcatggctttggttatgcagtgcatttatttgrttttcttgaaataagaaaaaaagatttcttctccatcaccagagttgctgagtttgacagtgtgaatgagatgacctctaaggcctctacttatagatctgcacggttgggcctgggagctgtactacctcagctggtgggtgataacttactcacagtctgtgctgtgtcctgcactgtccattatctgcaggggtggtactgctgtccccagggaagagaatgctgtccacaaagagccagccatttatactattaaaagaatacacaggagttgaacaatgagaacacgtggacaacgggaggggggaacatcacacaccggggcctgtctgggggtagggggaaaggggagggagagcattaggacacatatctaatgcatgcggggcttaaaacctagatgacgggttgataggtgcagcaaaccaccatggcacatgtacacctatgtaaca

SEQ ID NO: 253403 - DNA, 529 bp, Homo sapiens
cattttaattagcaagtacagccttgacacaaataaaggcatggctttggttatgcagtgcatttatttggttttcttgaaataagaaaaaaagatwtcttctccatcaccagagttgctgagtttgacagtgtgaatgagatgacctctaaggcctctacttatagatctgcacggttgggcctgggagctgtactacctcagctggtgggtgataacttactcacagtctgtgctgtgtcctgcactgtccattatctgcaggggtggtactgctgtccccagggaagagaatgctgtccacaaagagccagccatttatactattaaaagaatacacaggagttgaacaatgagaacacgtggacaacgggaggggggaacatcacacaccggggcctgtctgggggtagggggaaaggggagggagagcattaggacacatatctaatgcatgcggggcttaaaacctagatgacgggttgataggtgcagcaaaccaccatggcacatgtacacctatgtaaca

SEQ ID NO: 253404 - DNA, 529 bp, Homo sapiens
cattttaattagcaagtacagccttgacacaaataaaggcatggctttggttatgcagtgcatttatttggttttcttgaaataagaaaaaaagatttcttctccatcaccagagttgctgagtttgacagtgtgaatgagatgacctctaaggcctctacttatagatctgcacggttgggcctgggagctgtactacctcagctggtgggtgataacttactcacagtctgtgctgtgtcctgcactgtccattatctgcaggggtggtactgctgtccccagggaagagaatgctgtccacaaagagccagccatttatactmttaaaagaatacacaggagttgaacaatgagaacacgtggacaacgggaggggggaacatcacacaccggggcctgtctgggggtagggggaaaggggagggagagcattaggacacatatctaatgcatgcggggcttaaaacctagatgacgggttgataggtgcagcaaaccaccatggcacatgtacacctatgtaaca

SEQ ID NO: 253405 - DNA, 585 bp, Homo sapiens
ggtgaaaggttatggaatgggtttccatgccatgtctccccctgtcccacaaatctcagctggcctgcaaaggttccactgtggatttttgccagccagccacgctgatgtagacagaatatttcggatttatattattgcttacttggcacatcttccattggaaatggaatagagaaaaggtggcttggctgtttggtttatgtcctaaaaccttatcgtaatgtgattctccttaacagagggattcgtaagcttaggactgatagagatttggcttttctgctgttggattgatagctccttgactgctgaagccattgcccatctgttcaactgttgtattcacgaggaggttagacccctgacccaaggcccaggtacctggctttcctcagttgggatcagaaggccacaaagttttcttatattttaagcatcaaagtagcaccactgtacagcatctttacttaatctgccctctttcacgtgtgtgcatccctggcatgcttaaacaagaaaggcaaatgagagagagcgagtgagtgygagcgagagagccctgaggtgccagaaggctgtggt

SEQ ID NO: 253406 - DNA, 521 bp, Homo sapiens
ttccatcaatccctcccatttacaaggaattacagaagagtgatgcccccttcaaagtggctcacacctggctgacatctgttcattaagaatgcctgcctttgggttctaagacgtccaaggagctcttatgggtaacacctgtagatttatagacgttcctctctgactgtaagggccatatgcctgaatctctcacccccatgtttataaaacttaacaattgtggaagcaatgaattgaaggactagggtcaccagtggagtcccataaataggttgtttatgatccctgtgaaacaagaagaccctyttaatttcatgcttcttaaactggggtatgagtggccccaggtttccctgttgggggtactgataccagagttcatttgaagtcattggaaaccaaggcatattttcttaaagagacaactgtttttggtgaataggccatgttgtttatagtaaaaacaaacatgaatattctgtaatagaagatatcgtttgcatggtgttttaaag

SEQ ID NO: 253407 - DNA, 409 bp, Homo sapiens
cacatgagccctatgcttcctcttaattctgaatgagtttcagattcctgcaggcagcatcagcaacatgcaaaagacgcttcttagatgcttgagactgtaaacccttatcaggaacataatgcgatgggatgtttctctctctttaggcaaaatttaaggatactggtggataawatttacttaatgattgctatgtggcaagtgttttgctaaatgctttacaaatatttattttctgtgagatggttcctgttcttccatctcaaagatgaggaaattgagattctgagaaggtgactgagtaccttaaacaatcacacagctgataagggacggacttgggccttaaagtacagtctccctgaatctaaaacccacctttggaatctcagctgttttctagttc

SEQ ID NO: 253408 - DNA, 559 bp, Homo sapiens
aacaatcacacagctgataagggacggacttgggccttaaagtacagtctccctgaatctaaaacccacctttggaatctcagctgttttctagttctcagaatttatgtgtgagattaaaagtgaagcttcagagaagaagcagagagtgataacagcgatggctccaaaaataaagctgaggagaccaagttctgtcaggtgcattgagactctttttataatcccaaaactgtagaactgtaaagactagaaaagccagccacactctgtatggtactataatactgatgatgtcctatgtacttaatgtgtgtttctttctcattaatcatcaatgctgagggatgttgcatgtcttagagtttaacagccacccatagctccccatttgtaataaactstagtcagtgtgtagtcactgcctgaacaagttacaatcttaaaataaaaaccttattgatttcttttttaactttgaaattaacacatgcctagaaaaatctagaaagtatagcaaagcaaagaaaaatcactcaataaaaccactgttaatatt

SEQ ID NO: 253409 - DNA, 633 bp, Homo sapiens
tccagcccttttatatctaattttaagagcttttgagactatcgtagtttatgccttaaaggaagcttataagtttccccttttctgggtatttccaaggaaaggcaaaaatgtgtcaccctgaaatgatgctgatgttgtctgacctagagatgaactaagtccagtctgggacaggctccccagggagcattttcatggaggtcagtgtgaacccccttttccagattggcggcagggccagctttaggtcccttgagattgtctgcatcccacttcctaagtaaacaaaataatgactagaaaagtcttttcaggaaagggaaaatgtgcaaatwtacgagacaaaattgcttttctttcccagcagttttctcccttaggaccatttcacaggcctgagctaccctaggagtctgttttgcccacaggctatgcgtgaagccgacccttaccctctcacccagtgacgaccacgacaatgttgatgatcataagcagtgcttgcaggcttggctagtccttcacagatgctacgtcaccagtccttgtgctgactcaacgagtaggtggctgtattagttttctatttctgcccaaacaaattactgcaggcttggtggcttaaaacaa

SEQ ID NO: 253410 - DNA, 595 bp, Homo sapiens
tgacaaatcagctttgacaccatggaccaggtccttaaatttctttgctgcgatgagtatttgttcagattgttttaagccaaatgagacagtgcaaaaaaaggccagacctgtatgggacaccaaatcaatgttagtcctcttctttttaaaaaaaaaaaaaaaaaaacaagtaatcagtttaatgtactctgatattgtttaccactgggattcttsttcatcatttaaggctacagagtccaccagcctagagtccatggagtcagaccaactgtcagctgtaatatgccggagatggagagaaaggacagatggccagagctcaggccaaaactttggattccagtctcttaaagaggcatagcctcttccaaagagggctctctgcagtcaatatcatatcagctacctgtttggcaccaggcattgggtccaggcttcaggatttgctaataaactcccgtcctcatgtggccagacagagaggtagacgtaaattgaattatcacaccaataggtaataacccatgggaagtgttacaaagcaaggaggctgacgccatgggaatgtaagccagggacaccctagctg

SEQ ID NO: 253411 - DNA, 595 bp, Homo sapiens
tgacaaatcagctttgacaccatggaccaggtccttaaatttctttgctgcgatgagtatttgttcagattgttttaagccaaatgagacagtgcaaaaaaaggccagacctgtatgggacaccaaatcaatgttagtcctcttctttttaaaaaaaaaaaaaaaaaaacaagtaatcagtttaatgtactctgatattgtttaccactgggattcttcttcatcawttaaggctacagagtccaccagcctagagtccatggagtcagaccaactgtcagctgtaatatgccggagatggagagaaaggacagatggccagagctcaggccaaaactttggattccagtctcttaaagaggcatagcctcttccaaagagggctctctgcagtcaatatcatatcagctacctgtttggcaccaggcattgggtccaggcttcaggatttgctaataaactcccgtcctcatgtggccagacagagaggtagacgtaaattgaattatcacaccaataggtaataacccatgggaagtgttacaaagcaaggaggctgacgccatgggaatgtaagccagggacaccctagctg

SEQ ID NO: 253412 - DNA, 539 bp, Homo sapiens
ttcagcgtgatggctgacatgtagtgagtcctcaaataatttttattaaattaactttaagaaaatcccacttaacagcccttcactgtttttagagaccattccaaaggtcttgacttstgttgatattattgtcctctgaaaagtctgagtcaaactctgattagttttgtaacataaaataccattggattgtctgtttgcataattggttttctgagattcagctccacattctgtattcatcctaatcaatggtgtctccttagtttctgtctttctttccattgtgttaagatggatctgttgtctgcccttcccagtttcagcatatttgaatatttggcaaatgtgaattctgattacctatcctacttgtagcttatagatactggccaagtcttatagaatgtagaatcttaggattcagatccaagatatttgttatctttaggcacagtgtttttttgtttctgtttttttttttttttttatttttggttgagttaaagtcaagtccttggctattttgggaagat

SEQ ID NO: 253413 - DNA, 593 bp, Homo sapiens
aatactcctatgcggggaccaacacttatatccaagaggaagtattactcttatcgctgagttaaatcaaggttgaattacgcacagaaaatgtgcgcataaggtccccgtgattcactggaaatgccatgacataattcttcgtttccaagacaaacaaaaaagttgtttttttatgctgccttcttcattgagatctgaaagtagttccctatggaagtgattcatggtgttgtgaaatcctccgaaattgtaaacagcctggtgggcaggaatcccgasgtctcattcaggccccctgcaaattctgagttcctagcctgaggaaagcccccaacaaatactgacctgactttctcctaaaagattgccataaacacttttggttatctcttaatgtacttggttcataactgcttagtcaattatttttattagcataacattccttttaagcataatgatattgggaaaacagaaatgatacaagcgtaatttcttggctatgactgtttatgttttgagtttttttgttttgttttaactttctttgccgatttgatgaattaattgtaaatttcccaagggggatc

SEQ ID NO: 253414 - DNA, 593 bp, Homo sapiens
aatactcctatgcggggaccaacacttatatccaagaggaagtattactcttatcgctgagttaaatcaaggttgaattacgcacagaaaatgtgcgcataaggtccccgtgattcactggaaatgccatgacataattcttcgtttccaagacaaacaaaaaagttgtttttttatgctgccttcttcattgagatctgaaagtagttccctatggaagtgattcatggtgttgtgaaatcctccgaaattgtaaacagcctggtgggcaggaatcccgaggtctcattcaggccccctgcaaattctgagttcctagcctgaggaaagcccccaacaaatactgacctgactttctcctaaaagattgccataaacacttttggttatctcttaatgtacttggttcataactgcttagtcarttatttttattagcataacattccttttaagcataatgatattgggaaaacagaaatgatacaagcgtaatttcttggctatgactgtttatgttttgagtttttttgttttgttttaactttctttgccgatttgatgaattaattgtaaatttcccaagggggatc

SEQ ID NO: 253415 - DNA, 597 bp, Homo sapiens
tttgtacgagtttgaattgggcacattcgaaatgattcattatagaaatataaataaaattttatttgtgcacagaattagaaacagtgtrctctccaaattttaaatatttgtcacaaatttgcaatttcagagtggttgtcaggattctctctctcactctttctcagttttaatgagatatcattcatataccatacaatttaccaattcatccatacaaaatttgtcattcggtggtttttaatatattcacagaattgtgcgatcattgccacagtcagttttgaacatttctattatcccagaatggaaccctgtagccattagacgtcgttccttatagtcttaggacaccacacatatactttgtgtttctataaatttgccttgctgggcatttcatagagagagagtacatagtacgtgatcctttctgcctggtttattttacttagcgtgttgttcaggtttcatccatgttctgtgtagcaggtaacagtacctccttcagttctattgccaaagatagggcttccttttaaaataaatttgctctcgccataggaaatatcgctttagcttgtgcagatgaat

SEQ ID NO: 253416 - DNA, 523 bp, Homo sapiens
gtggtggtgtttttttttttttttctcattgcagaagacaaattctatttccttactcctgagggaaaactaattccagcaaaggccatttgtctttggtaccttaagatctaggtaatttactgcaagtttatttttattgaaaattatgtagataytattcagaaacacaattttcaactatacggcacacttaagcacgttatattttaagtgttaatacatagactgaggatatatgctagaatgtgcatttctcaaagacacttttttcttttttgtcactcactgcattcgaggtccttaaacttgtgtgctatgaagtgctaaaggattaaaatattttcaaatggatattgtgctgtaagttttgagttgttaccatttgactgcaattgaaactcatgatgctttatatagcttagatgattaattcagaaataatttgcatttaaatgcgtttaagatatttaacttatgattccaaatgtgcctattttaagcctggtagaagtactttagt

SEQ ID NO: 253417 - DNA, 459 bp, Homo sapiens
tatccatgttgctacaaaggatatgagttcattcttttctatggctgcatagtattctgtggtgtatgtgtacattttctttatccagttcaccattcatgagtacctaggttgattccatgtctttgctatttgaatagtgctgcaacaaacatatgagtgcatgtgtctttttggtagaacaatttaktttattttggatatatacccaggaatgagattgcttgttttaagtgctttgagaaattgccaaactgctttccacagtgcctgaagtaatttacattcccacgaacagtatataagctttcccttttctccacagcctcatcagcatctgttgctttttgactttttaaaatagccattccaactggtgtgacatggtgtctcattgtggtttcagtttgcgtttccctgatgattagtgatcacaatttttcatatgttttttggata

SEQ ID NO: 253418 - DNA, 616 bp, Homo sapiens
atggatattgtgctgtaagttttgagttgttaccatttgactgcaattgaaactcatgatgctttatatagcttagatgattaattcagaaataatttgcatttaaatgcgtttaagatatttaacttatgattccaaatgtgcctattttaagcctggtagaagtactttagtctccaaagtatgyggacgctctacttctccctagtttgtggacctgaaaaggatttagatattaatatagaataacttttccaaactagttctgaaaacataagaactgagagatagccccctgcaacacacacgcacatgcacacacacacacacacacacacacataggttttgtgctgtcttgggagcatttaagatactctgcaaactacaattgcttccttaaaatgtacagtggacgtttgacatagtaaagatattttgaagatttgcaggccagaaacctgtttaagccaacatattacacacttttaagaaagaaaagctcttaataacatcctataagaaaatcttaaccattatagaagttactctttgaataatattgtgagaaaaaatttaattagtgaaaccctaaggaagttatcagcatggagatt

SEQ ID NO: 253419 - DNA, 616 bp, Homo sapiens
atggatattgtgctgtaagttttgagttgttaccatttgactgcaattgaaactcatgatgctttatatagcttagatgattaattcagaaataatttgcatttaaatgcgtttaagatatttaacttatgattccaaatgtgcctattttaagcctggtagaagtactttagtctccaaagtatgtggacgctctacttctccctagtttgtggacctgaaaaggatttagatattaatatagaataacttttccaaactagttctgaaaacataagaactgagagatagccccctgcaacacacacgcacatgcacacacacacacacacacacacacataggttttgtgctstcttgggagcatttaagatactctgcaaactacaattgcttccttaaaatgtacagtggacgtttgacatagtaaagatattttgaagatttgcaggccagaaacctgtttaagccaacatattacacacttttaagaaagaaaagctcttaataacatcctataagaaaatcttaaccattatagaagttactctttgaataatattgtgagaaaaaatttaattagtgaaaccctaaggaagttatcagcatggagatt

SEQ ID NO: 253420 - DNA, 616 bp, Homo sapiens
atggatattgtgctgtaagttttgagttgttaccatttgactgcaattgaaactcatgatgctttatatagcttagatgattaattcagaaataatttgcatttaaatgcgtttaagatatttaacttatgattccaaatgtgcctattttaagcctggtagaagtactttagtctccaaagtatgtggacgctctacttctccctagtttgtggacctgaaaaggatttagatattaatatagaataacttttccaaactagttctgaaaacataagaactgagagatagccccctgcaacacacacgcacatgcacacacacacacacacacacacacataggttttgtgctgtcttgggagcatttaagatacwctgcaaactacaattgcttccttaaaatgtacagtggacgtttgacatagtaaagatattttgaagatttgcaggccagaaacctgtttaagccaacatattacacacttttaagaaagaaaagctcttaataacatcctataagaaaatcttaaccattatagaagttactctttgaataatattgtgagaaaaaatttaattagtgaaaccctaaggaagttatcagcatggagatt

SEQ ID NO: 253421 - DNA, 453 bp, Homo sapiens
cagacttgaagaagaaaaccagctcacatctgtgcacaaggagacacacagttgttcattactgcattgtttgaaaaccactacgttgtaaattgcataaatgtgtatcaatgggtgaatggctaataaaaactttaaaaataaatataaaactgcmattcaaaggaatgaacgaaatattatataaatatataacccaataatttctataaagattatatgtgtgtgtatatagatatatgtattatatatgtgtgtgtgtatatatatatatatatatagagagagagagagagagagagagagagactgtcccagaacaaggaagccaattttagggcatattccatataatacaatttttaaacaattaataaacatatacataaaatataccatattattctcagaaacaaatatatgcctaagatgattcaaaatggacattggtat

SEQ ID NO: 253422 - DNA, 586 bp, Homo sapiens
tactatcaacaggaactgctgtttctattatcaacaagaatatgcctccaagccaggagtcctgctgatcccactgtctcccyaccccaacagccatggcccgagatcagattgtctccatggattctagtgctcagggaagttaagaaaactcaattcacggtgctcagttcaaccttagacatgcatcagaatcactcacattgctgtttaattttttaattaaataaaaatatttattcagccgaggtagctgaagcaggagaaggaagagcctcaactcaggggaagatttgctgtcaccccctgacactgagcagaggccagtcaaatccactggagctgacctctttgatgtcaggctcagcagaggcctggctcttagcaggccagcttcctgtgcttgggattgcttgtcttagctttcagaggatttaattgctgattcaaaccatacaaagtacaacgaacagtatctactggtgggttgaacaaatgggttccaatgactcaggcccgagtgacctctgctgcctctaacctccttcaccatctgctgcccagggggtcctgagaggccaataag

SEQ ID NO: 253423 - DNA, 586 bp, Homo sapiens
tactatcaacaggaactgctgtttctattatcaacaagaatatgcctccaagccaggagtcctgctgatcccactgtctccccaccccaacagccatggcccgagatcagattgtctccatggattctagtgctcagggaagttaagaaaactcaattcacggtgctcagttcaaccttagacatgcatcagaatcactcacattgctktttaattttttaattaaataaaaatatttattcagccgaggtagctgaagcaggagaaggaagagcctcaactcaggggaagatttgctgtcaccccctgacactgagcagaggccagtcaaatccactggagctgacctctttgatgtcaggctcagcagaggcctggctcttagcaggccagcttcctgtgcttgggattgcttgtcttagctttcagaggatttaattgctgattcaaaccatacaaagtacaacgaacagtatctactggtgggttgaacaaatgggttccaatgactcaggcccgagtgacctctgctgcctctaacctccttcaccatctgctgcccagggggtcctgagaggccaataag

SEQ ID NO: 253424 - DNA, 586 bp, Homo sapiens
tactatcaacaggaactgctgtttctattatcaacaagaatatgcctccaagccaggagtcctgctgatcccactgtctccccaccccaacagccatggcccgagatcagattgtctccatggattctagtgctcagggaagttaagaaaactcaattcacggtgctcagttcaaccttagacatgcatcagaatcactcacattgctgtttaatwttttaattaaataaaaatatttattcagccgaggtagctgaagcaggagaaggaagagcctcaactcaggggaagatttgctgtcaccccctgacactgagcagaggccagtcaaatccactggagctgacctctttgatgtcaggctcagcagaggcctggctcttagcaggccagcttcctgtgcttgggattgcttgtcttagctttcagaggatttaattgctgattcaaaccatacaaagtacaacgaacagtatctactggtgggttgaacaaatgggttccaatgactcaggcccgagtgacctctgctgcctctaacctccttcaccatctgctgcccagggggtcctgagaggccaataag

SEQ ID NO: 253425 - DNA, 454 bp, Homo sapiens
ttataaaaccatcagatcttctgagacttattcactatcacgagaacagcatgggaaagacccacccccatgattcaattacctcccaccaggtcactcccatgacatggggggattgtggagctacaattcaagatgagatttgggtcaggacacagccaaaccatatcagatgggatttcttgtaggacttgaaaccctggggaaacatgtggttgtgtgatggatttctatgtccatagtggtctttgtttcttacctaggttggttctgggtaggttctggactggattggcaggggagatcctggtctctttcatctcaggcacctraagtcaaatctttcagaaataacatttaaccagtacctccatatgtgtttttttgtttgtttgtttgtttgtttgttttagcgttgaacacttcttgttgaatgccttctttttcattctat

SEQ ID NO: 253426 - DNA, 565 bp, Homo sapiens
ctatcaatcactattcaaggcactcagtaacagcagtgaaccagagtttccaccctcagggaacttacagcagaagagcaggcaggtgatgagaaatgcccctgagtaaagttaaacaggaccaggaggatggggaatttgtggggggcaggggagctggaggaggtgcatgatattstagtctatacatgatgatcagagatggcctttctgaaagggagacatttaaacagagatctgatgaaagagaaggtcatgagctatacaaatatctgtaaagagagaaagccccacaggtgtacagccagcaagatggtggaggatgcaggaggttgggtgcaggggaactgttgcaaatcgtagggccccagagtctgacaagctcaaggcaaatcctatggaaagatttttttcttttagctgctctgcctttgttggtgtacccctcatttcttttttcagcaggccgtgaccccttcttggcaaccctggaagtaggtgcaaagatccggaggtcaaagtgggcttagcatgtgtagggaacgtaggcctgggagggggtgga

SEQ ID NO: 253427 - DNA, 565 bp, Homo sapiens
ctatcaatcactattcaaggcactcagtaacagcagtgaaccagagtttccaccctcagggaacttacagcagaagagcaggcaggtgatgagaaatgcccctgagtaaagttaaacaggaccaggaggatggggaatttgtggggggcaggggagctggaggaggtgcatgatattgtagtctatacatgatgatcagagatggcctttctgaaagggagacatttaaacagagatctgatgaaagagaaggtcatgagctatacaaatatctgtaragagagaaagccccacaggtgtacagccagcaagatggtggaggatgcaggaggttgggtgcaggggaactgttgcaaatcgtagggccccagagtctgacaagctcaaggcaaatcctatggaaagatttttttcttttagctgctctgcctttgttggtgtacccctcatttcttttttcagcaggccgtgaccccttcttggcaaccctggaagtaggtgcaaagatccggaggtcaaagtgggcttagcatgtgtagggaacgtaggcctgggagggggtgga

SEQ ID NO: 253428 - DNA, 549 bp, Homo sapiens
tcatgagcccccttaagacccagtgaaagtggaacaattccacgtgcacataagccatgcatttacgatttcaggacatctttgaacccagggcaagaactgcagctttgggaaattcccagaacagtaaacagtgtaaattctcaaaagggggtttatttcatgttacttccttttttaaagaaatgtaactgtgttgtattaccattagacgtaattgggtgagaaattacttataaacctgtcatcataacatagctattgttttctttgtccaatatattgacattttattccactgtgcacrtagagttctgcatttggctgtttttacttaatacatcatagcatcaaacagtggtaatgccatttcacagtctgtatttaattggaagtgttttagtataatgttattgtaatactcaaatgcaaaggcacggtgatgcagtgaagattggtttctgttttgtctaaaattattgtagaacccattaaattttgtaatgcacattctcttccatctacaggtctcccataaaatagcttcaa

SEQ ID NO: 253429 - DNA, 662 bp, Homo sapiens
tggcagattgctagaaccccttcatcttgtttaattgaaactttatgcctgttgattagtatctctcaagttttccctccccctagaccctgacagacaccaattcagtctttggtttgggttatatgactattttgagtacttcatgtaagtggaaccatgcagtattagtctttctgagactggtttatttcacgtcacataatgtcttcaagattcatccatgttgttgcatattgcagaatatccttcacttgtgaggttgaatcatattttattctatgtatgtgtcatatttatccactcatccatcactgaacatttaggttgtttgtacctcttgtgtattgtgaatagtgctgcagtgaacgtggtagctctccagtaatatcttcaaactatctcttgaagatcctgatttcaatattkttggacaaatacccagaagtgggttgctgggtcatatggtagaaaagttggttttttgaaaagataagcaaaattgacaaacccttagctagactaaggggaaaaaagagagaagattcaaataaataaaattagaaatgaaagagggaacattaccacttataccacagaaataaaaaggttcataagagacccctatgaacagttccctgccaaaaaaaatgaaaaaaaaa

SEQ ID NO: 253430 - DNA, 576 bp, Homo sapiens
gatactcactgtcaccagttctattcaacatagtcctggaagtcctcacaggagcaagtaggcaagaaatagaaacaaaagggatccaaaacaggaagaagtaaaatgtcccggtttgtagacaaaatgatctcacatatagaaaataactgaagaacccattaaaaactattagaattaataaatgaatttagtaaatttgtgggatacaaaatcaacaaacaaaaattagttatgtttctatacactaacactaactgatctaaaaaggaaatcaagaaaacaatccctttacaatagtaccaaaaagamtaaaatacacagtcataaacttaactaagacagtgaaagacatgtattctgaaaactacaaaacattgacgaagggaattttaaaagacacaaacagatagagatcttgtatagatggattggaagacttactattgttaaaacatccacattacccaaaattatctacagatttaatgcaatcagaatttcagtggcattttttacagaaataggaaactcagtggagcttcttccttctttttgactctcatgaccctgtcc

SEQ ID NO: 253431 - DNA, 545 bp, Homo sapiens
ctctgccactaaatagctatatgtctttaagccacctaattaacctctctgtgcctaaggattctcatcagtaagatggggataaaaatacttgccttataaaattattgaaatggttatgctaaaaaaaatgtgcaaagtctttagaacagtgcccggcacatgttaagtactgtttagctatcagccataattttaaaaatagtgtttttaaaatcagtaatattattgacaaccttttctgaatattgtccaagtgctttacagggattatttcacttatcatgggaatgatcctatgagatagccactgttattattcctactttacagatgaggaaaagagaggttaattagcccaaggacacacagtttccccaagatcaaagagtcagtggtggggccataatttaaaccagggcagtctgacttcagatscacacttttgacctgggcttccctgctcaattacaaataccaaattgactccttatcttctccccagaacagcctccctttccggttttctcccctttccccaagat

SEQ ID NO: 253432 - DNA, 374 bp, Homo sapiens
gttcaacttgaatcttggcaggtgggagaaccccacrttccttaattttctcttctccacccccacactggtctttgcacctgtggcacctggcccacactcggtacttagcacacatccatggaatgaataaatgacaggatggctacccttttttttctgttttagttgtctaactacaaccaggtctacttcatcatgctgattcttcaaattacttggcggcattttctttcccaaggtgcggaagcatcgcaatacattgggactgcaagagccttagacccattttgtccagcccagcagcccagcgaatttacagggaacaagttaaataacggggcaactgctcagactcccaggacttgagattc

SEQ ID NO: 253433 - DNA, 575 bp, Homo sapiens
aaaattttgcaacatacatgccagacagttactgtccttagtgtaaaaagagctcctgtaaatcaacaagaaagagacaaataggaaatggaagaaagttggcaaagaaataagttcttccagtgccttgagagaataagttttcctttccagcaaacctggacaccttaggggcttctgaacacattgcattgcttcctcattcagggctgctgatgggtggattttcatcaaagcatattttcatcctgttattctattgagcaattgacctctgtgggtctccatggttgataggctaacatgtaacctcatcatggtatttgatatttaattaaatgagataatttgtataatgctctagtacagttttaggccatggtaaactccgaattaattctgttcttcactccttatttatagcattgytgagaaaattaggtgagattctgtatttagaagaagaaaagttcccacttaatgatggggctgctcaataaatgttggtcctcttctctagaaaccctgactcattcagcacaatcccttagatcttcacagatttttaaatcttt

SEQ ID NO: 253434 - DNA, 333 bp, Homo sapiens
cattgtaatgtaacatttttgaaactcaaaattaatgcatagaagtccatgagaagtaaaatgttaaagacaggatcaaaatcaatgcagaaaatccataatgagcaaaatatsaacatgttttaaaaagagggcatcagtattactgatttctttcgtttgactcaggctccagtacagcttatgttggcactgtgatgtatcctgtctgtatttaaaatttttaggtagtgtccatcatgacctttttgcagtaattgcgatttttaaaaatattgcgttaaaatagtacatatcttgattactgagttttttggtgcctcctttgagatg

SEQ ID NO: 253435 - DNA, 536 bp, Homo sapiens
ttgaaactcaaaattaatgcatagaagtccatgagaagtaaaatgttaaagacaggatcaaaatcaatgcagaaaatccataatgagcaaaatatgaacatgttttaaaaagagggcatcagtattactgatttctttcgtttgactcaggctccagtacagcttatgttggcactgtgatgtatcctgtctgtatttaaaatttttaggtagtgtccatcatgacctttttgcagtaattgcgatttttaaaaatattgcgttaaaatagtacatatcttgattactgagttttttggtgcctcctttgagatggtgcagaaagcaagctcctcactcatctcctctagcccagccccaatagctaactcactcttagcgcctgyccttgagtgctgtgtgagccattgtgttgcaccagcttgttttaagtcccaacaatcttgttccatggtgtcttttaataatggaagagcaaagaggttaaatgactagcccaaggtctacatgaggtggaggaggagggaatcaaatta

SEQ ID NO: 253436 - DNA, 642 bp, Homo sapiens
gggcaaaacccaattaatacacagttgtaatcacagtgggacttagtggtactttctcctttgcacagtgggactcttagaagtggcttcattaatgttgcatttgtagtttgagttctgctcttcttctcatattgcctagttctgggcctccctgtcctctgtcctgtggccacttttccatgtggggacttttggggcctgatggctttttggtacctctgctgtyctgctagctgccaagaactctccattactccccctttgattgcttgggacacatttttaaataaagcagctttgggccacagcgacaaaaagtgtagagccatctttttgttttgcagcctctatttctgttttgaacaggtcttttcaaatcaagcggtaggagctatacctctcccagatgaggcccatcacacactctcactaagtaggcaatttctttggggtgataaaaatgattacaaatatttgaattggaatcgttgggaatctcattaaaaacaacaaccatgatcaggtgacattgtatttgtgaatatcctcagggtatgttcagaaaatcagtgttataagagcttgaacgattatattagtttagcttgatagtgctctgtttcttttctctttacactt

SEQ ID NO: 253437 - DNA, 405 bp, Homo sapiens
cctgaagagtcacagacatgtaaccttccccatgccttctggggtccttgctctaatttgggagatacaacacatagagaaaaaggtacatgaggcagccttgccacyggaagaaaatggcactcaaattcccagctgtcatctgggaaaggtcaattgttttctttacaaagccaccttcatagcaagactttatccatgtcagcagtctagaatgtcgtcatctttatagactcagaagcttgatttggtgtctatattcagaggttatttctatctcagggatagtattttactaatcaaatacataacagatatatacataaaccagaatgaaaacatattatagtgagaaatgtaattattgattgaactggatatttgtcttttcatgtcaacttattc

SEQ ID NO: 253438 - DNA, 619 bp, Homo sapiens
ggttcagccttcggaaggacatgaggtcaaagcaaattctcaagaatgaggaatgacaggagacagagacgcggacggggcaggaagggttttgtgagaacagctgatggaagaaagcatttaatggcacctccagcggagtgcgtgcagtttagagcagacgcaggtggggccatggcagggcttgactaggagcaaaggtgggactcgcatgctaaggagtgagcttagacatgatactcctgcggcgaaagggacaaatgatggaggattttaggctgaaagtgacatgatcagatttggattttacagggactgatccggttgacatgcaggggatgaatgggagacagtgagttctgtctctgggtctttgaagccagagtgacacacatcagatagatgcagttttcacccaagaagacctgggtagtgaatgggattagtcyaaactcatagtgaagatattaaatataccttgggatgaaaagagtagcaggaatgcggacttgtgggaggagggcaggccataccggggcctcacagggcaggataaggtgcttggattttactctaaggaagcctcagcctcagagggttctcaggaagggagtgacat

SEQ ID NO: 253439 - DNA, 543 bp, Homo sapiens
tatctgacaccatatataaaaatcaactcaaaatgaaataaagatttaaatgtaagacttgaaactatgaaacaactggaagaaaacatagggaaaagttccatgacattggtctaggcaaggattttttggacataacctcaaaagcacaggcaacaaaagcaaaaataaaatgattatatcaactaaaaaacttctgcacagcaaatgaaacaacagggtaaaaagacaacctatggaattaaaagaaaatatttgcaaactgtacatctgataaaatagaaaaaacaatgaataattgaaaaatgggaaaaggaactgaatagacagttttctaaagaagacataaaaatggccagcaggcrtatttttaaaatgctcaacatcactaataatagaaatgcaaattaaaaccacaatgagatatcacctcatacctgttaatatggctgttatcaaaaagataaaatataaatgttggcaaggatgtggagaaatgaggaacccttgcccactgttgatgggaatgtaagtacagctata

SEQ ID NO: 253440 - DNA, 543 bp, Homo sapiens
tatctgacaccatatataaaaatcaactcaaaatgaaataaagatttaaatgtaagacttgaaactatgaaacaactggaagaaaacatagggaaaagttccatgacattggtctaggcaaggattttttggacataacctcaaaagcacaggcaacaaaagcaaaaataaaatgattatatcaactaaaaaacttctgcacagcaaatgaaacaacagggtaaaaagacaacctatggaattaaaagaaaatatttgcaaactgtacatctgataaaatagaaaaaacaatgaataattgaaaaatgggaaaaggaactgaatagacagttttctaaagaagacataaaaatggccagcaggcatatttttaaaatgctcaacatcactaataatagaaatgcaaattaaaaccacaatgagatatcacctcataccygttaatatggctgttatcaaaaagataaaatataaatgttggcaaggatgtggagaaatgaggaacccttgcccactgttgatgggaatgtaagtacagctata

SEQ ID NO: 253441 - DNA, 647 bp, Homo sapiens
gcctcggagtgacttggaggatgtggtaataaaagcatctgcatgtacccttgtggctataagtttcagttaattagtacaacacaagtacacacacacacacataagtggatctcagccatctagatgggacacagagtttttatgacaggcagggttaatgatttcataatggtgaacttttgccaatctcactactatttgaatatttcacaacttgttcaaattgttaagtacaacagcagattgcatgtacacccaataacacgggtttatgtaatgtacatgggtaaatgtacatcttccaagggagaaagggtgctctgtgtttccagcatgatggaacycagtttcatgatggattggcatattccatagatgaagaataattactggaaagaatgcagagccattggggactttctaaatagaggaatgatgagataagatatttgtttgggaaatcgctctgaagaagatggaatgaaggagagagggacttctggaaggctgtggatctattttcattttaataagcatggggggagaagggtaggagagaggatggtcaacaggtacaaagctacagtcacataggaggaataagctctggtgttctattgcataatagggtgactatagttttc

SEQ ID NO: 253442 - DNA, 664 bp, Homo sapiens
gttaatgatttcataatggtgaacttttgccaatctcactactatttgaatatttcacaacttgttcaaattgttaagtacaacagcagattgcatgtacacccaataacacgggtttatgtaatgtacatgggtaaatgtacatcttccaagggagaaagggtgctctgtgtttccagcatgatggaacccagtttcatgatggattggcatattccatagatgaagaataattactggaaagaatgcagagccattggggactttctaaatagaggaatgatgagataagatatttgtttgggaaatygctctgaagaagatggaatgaaggagagagggacttctggaaggctgtggatctattttcattttaataagcatggggggagaagggtaggagagaggatggtcaacaggtacaaagctacagtcacataggaggaataagctctggtgttctattgcataatagggtgactatagttttcattattatattgtgtatctgaaaatagctagaagggaggattttgaatgctctcaacacaaagaaatggcaagtgtttgagatgatggatatgctaattacctggatttgatcattatacaatgtatacatgtaccaaaagctcacattgtaccacataaattattaatacaa

SEQ ID NO: 253443 - DNA, 612 bp, Homo sapiens
ctgtttcagtatcatgatggctccagcaattgcccacatgatggcatcagagagacaaggggcatctcttttatctgtcatctttgggaggagaaggaaggaaaagagaatttcctatgttcttttcagcatgggccagtgttggggccaagggaaagcttccccttcaccttccgaaggttcaccttctgccctctgaaaaagaactaatgttaggaagatgaataggagaaaaggcacacaaatttatttaatgtgtattagcctagaaaatcaaaggaggatgatcacgcaataacccagtaggtccagatgcttatacaactttcttcattggggaakgagagattgagtcaatgtgtctgtcaatttgaaggggagtaaataacttttagggggaatgaataagcccagtgctgagacaatggttagtaaataatgttctctttgggaattgaacaggattggagacaaagtttgtctgggctgtaggtgtgatgtttaatttccaggctctttgtcataataggagttttaatcttctggttaatgaagttacagggagggggttgaaggccatttgttccttttgctgggtatggtttgtaggta

SEQ ID NO: 253444 - DNA, 544 bp, Homo sapiens
ctctcccttcttttttttttgagacagaatcttactctgtcacccaggctggagtgcagtggcatgatctcggctcactgcaaccttctgcctcccagcttccagcaattctcctgcctcagcctcctgaggagstgggattacaggcgagtgccgccacgcccagctcatttttgtatttttagtgaagatggggtttcaccatgttggtcaggctgatctcgaactcctgacctcgtgatccacccaccttggcctccccaagtgctgggattacaggcgtgagccgccacgcccagccccctccttctgaaacttggaatgtcctgttgcaatccttagagcacctgtactcagggtatggaagcactcatgaggacatgagcctcagccttctggaaaagaggacttttcgcttgctataactcccatgggattttttttttttttaactttgtctttgtggacttcagaagtccttccagacaaatggctgctttatttgtgaggtagtgatttatatccctggcagaataatcctggg

SEQ ID NO: 253445 - DNA, 544 bp, Homo sapiens
ctctcccttcttttttttttgagacagaatcttactctgtcacccaggctggagtgcagtggcatgatctcggctcactgcaaccttctgcctcccagcttccagcaattctcctgcctcagcctcctgaggaggtgggattacaggcgagtgccgccacgcccagctcatttttgtatttttagtgaagatggggtttcaccatgttggtcaggctgatctcgaactcctgacctcgtgatccacccaccttggcctccccaagtgctgggattacaggcgtgagccgccrcgcccagccccctccttctgaaacttggaatgtcctgttgcaatccttagagcacctgtactcagggtatggaagcactcatgaggacatgagcctcagccttctggaaaagaggacttttcgcttgctataactcccatgggattttttttttttttaactttgtctttgtggacttcagaagtccttccagacaaatggctgctttatttgtgaggtagtgatttatatccctggcagaataatcctggg

SEQ ID NO: 253446 - DNA, 542 bp, Homo sapiens
cccaaaagccttgcttccttcctttctcctggataacccacctctgcctgccacagacacccagaaccctgctgcctccatcttcccactcatgcagttagatgaggcctgagctccaatcccacccctgccatttctccaaggatccgctcttgggcaagtgacttcacctccctgggcctcagtctccatttgtgaatggggccataattcccacctctcaggggtgtggggagagtcggtgacataatgacccaggtaaaactttcagcatctccacattattttcaggggtgagaaaaaaraaatggcttggagtctgagcttcctgggatgtgcagaattcatcaggctcggaaagacgagagtgtgggacctcagtcatgccgtcacccccaggcctaggggtagttaaaggcattttgttcctgacttgctgcctcacccgctatcttcatgttctgggaatttgtgacacaaagaacaatgcctagccaagcaatagtttctattattttcatataaattcttggtaaacagct

SEQ ID NO: 253447 - DNA, 570 bp, Homo sapiens
gtcacacagtgatatgactatttgtgataatactgcccaatggtatcattgggattctgacaccttccctgatttctctgttctcctcttatctggggccctgtgmtcagctacactagctgttctgtcccagcacaccctgttctgtcaggcctccatgcattgccatagtgtctcctttcagaggatatttctattcttcatattaaaatcccatcacacttcaagccttcactcaagtttcgctatctcggtggcagctttctgtgatcctcaggctcagaaataattatccatggcatttcaagattaaaagtgacatttaggaacatatatttccatatgacagtacttggatcttatcttcaacattttagaagggtgctgtgcagagtctgtttgaacatctgcagtgatggggaactcaccacctattgaggtagccctttctagctatggcctcttctgcctgtaggaaaagactttactgtattggtcttggctaaatgcttagtatttcatacaatatttaactcctcttgcaccagagagcccttgagtatttgagga

SEQ ID NO: 253448 - DNA, 596 bp, Homo sapiens
ctatctgcacctgagttgggtatgttcggtctcacaataccaaagcaaagccataaytttctatttttttattctattagctgactggttatggtttggaaaattggatatcagtttttacatatgtctttgaaattttgatgattatttaagtgttaatcactgaaatcaagaatccaactatggattgcaaatttggtatgcagaattatcccataggtttaaagatttgcttagggtagaggaagaatgaaactgtccaagattccaagaatatagacttgaaagaatagcttttctctctcccggaaaagcaccatctgatatagacactgaagttctatgcttcagtgagaatggaattaaaacagaagagtgtttcaaatcccaggctcctagttgcaaaagcaataaccacttacacaccctactctccttccataaataataaccattgtaaaatatcaagactgtgattggcacatagaataaaactaataggcagtaaattatagtttttcttgtcattattatatcattctattccattgactagcattattctcattttatagatgaagaaattgaaatttgag

SEQ ID NO: 253449 - DNA, 561 bp, Homo sapiens
ttccttctttcctttctttcttgtctttctccccaccaccagctctgccttttctctccattttcttccctctttcttccttctttcaatcgttcatatcttcagaagcaccagttcttcttcagtgccaaaatcaaaagcatgcagttaattattccctttcagatcctggccacctaaccttaatgctgatatttacttgcttgaggactgcagcccttctgaccctttggaaagaacatctgtaacatttcaattttcatckgagaaatggccaactagcttctaataagaagataagaaattgtatatgcagagaaagacttgagtatattctgttttcatcctgaaatcatgttgctgcaaaagcaactaaaagtagcttccctctcctgggtgatgagcctcctttgtatttggttagaagaaggcatgactctcatgaaggacttgacttacctcatttactgccctctgtttagcttgacataagcactactctccagcagagagctgtttaaaaactggcttagggactatatttttttttaaataacatga

SEQ ID NO: 253450 - DNA, 434 bp, Homo sapiens
cctttgtgcattaaggtgtctgcatatccactgatcaattggaagtacatggaacttataacagagatgtgggcagaaataaagattttttaattattagaagcaaagacaatagtcaagaccatccaaagagaatctgcatactggaatgagaaaatgttaagtgcagatccttgaagaacaatgcatgaggcaaccagtttcagttacctggaaaaatcacatcctttaaaaaagaaattgatgttccttacagaagacattctttagagatcaaaattgaaaataaatattttagtttaatttgtgyattggtttaattagtgatactaagtcttgaaaaaatatatttttgtggggttaaagataatgcagaggctgggtgtggtggctcacacctataatcccagcattttgggaggcaagaggctgtc

SEQ ID NO: 253451 - DNA, 639 bp, Homo sapiens
taccagcaataaataggtttccaactcaatgtcatctcatattattttcttaggatgtcttgggtcatttgtctcacttattctccacatgcttatttctattgactatccagcacttctctttgtctatttttctatgttacactaaaaataaatcacaattgttggtgtattcctgctgaagtttgtcattaattccacccagcttatggaatagctgcattgagaaaataataagggacctcatcgcgagtttccccattaacttcctcaggaaaatgttagacatttggtgycaatcatctcagttaaccacagacttagggaatgagatgtcagaatcatgggcctttatctgtgtcttattgttagtcttcctgagtatggaagggaatatttggattattctgagtgaaagacagtgaagtagatgtctctgacacataaatccaccatatcggagtttcgtagcaatgataatcctgtcacagctgttagaatttattcctttatccctgtgacattttaacaggagacaaatccaagttattataaacagataaaaaccattcagtccaaaatggcttgtattagcaacttcatcctgctgacaagccttgtttcagaaatttgtaaaca

SEQ ID NO: 253452 - DNA, 639 bp, Homo sapiens
taccagcaataaataggtttccaactcaatgtcatctcatattattttcttaggatgtcttgggtcatttgtctcacttattctccacatgcttatttctattgactatccagcacttctctttgtctatttttctatgttacactaaaaataaatcacaattgttggtgtattcctgctgaagtttgtcattaattccacccagcttatggaatagctgcattgagaaaataataagggacctcatcgcgagtttccccattaacttcctcaggaaaatgttagacatttggtgtcaatcatctcagttaaccacagacttagggaatgagatgycagaatcatgggcctttatctgtgtcttattgttagtcttcctgagtatggaagggaatatttggattattctgagtgaaagacagtgaagtagatgtctctgacacataaatccaccatatcggagtttcgtagcaatgataatcctgtcacagctgttagaatttattcctttatccctgtgacattttaacaggagacaaatccaagttattataaacagataaaaaccattcagtccaaaatggcttgtattagcaacttcatcctgctgacaagccttgtttcagaaatttgtaaaca

SEQ ID NO: 253453 - DNA, 553 bp, Homo sapiens
catctcagttaaccacagacttagggaatgagatgtcagaatcatgggcctttatctgtgtcttattgttagtcttcctgagtatggaagggaatatttggattattctgagtgaaagacagtgaagtagatgtctctgacacataaatccaccatatcggagtttcgtagcaatgataatcctgtcacagctgttagaatttattcctttatccctgtgacattttaacaggagacaaatccaagttattataaacagataaaaaccattcagtccaaaatggcttgtattagcaacttcatcctgctgacaagccttgtttcagaaatttgtaaacattattcttgcacatttgatttttcccctctacaaacctgaacctacgtcaggcttttatcctataaaatttaaaactgccagtttaaaatgtttatttagttacatcctaggatataagcgatggaaatatatagccatttaaccagctaagtgatggagaaaacggtgagtggctgttatttgcytgattttagtattctgtcagtaccaatg

SEQ ID NO: 253454 - DNA, 380 bp, Homo sapiens
cacactctccagctctgtgacagcactagttcaactaggcaaggcagaaccacaaaaaccacagctttgcttctgctactagagggtgttcacttgatttggartttaaaaacttcagtttaaagagaaaatcttagaggcaagcaaatagggagatagtgctcccgctagcctgagattgtggtcctgtttggagtaataaatggacttagggaaataagctgagataagcttgataaactcgtcacacaacccagattgatgcaaggatgtgcacatgtgcagcagagacgggagagggtttaatccacatgtacgttgctggttagcagacactgtgtgcacatgcaaagagatgcagaaaatctcagcagaaagta

SEQ ID NO: 253455 - DNA, 442 bp, Homo sapiens
aaacagttgggctcctcagcaagttcaaaatgtctgcacagcagggaaaaaaaacatgctatcttttctaaaagctgttttggtggttctattagaaggcataactctttctcttttatatagtagtagggaacagtcttgtcattcccttcacccctgaccacccctccaaaaaagaaaagcttttaattgatgaaattttcagagatttctgtgaccaaactcaaatgtcacaataatacaaggtcaactgatttgaattgttatgttctttattaaatagcatatctgtggattccaaaacctagatgagaaaaaaagatccattttataaagtgcactcatgctatttcatgacaaagtagaaaggttacacagaagttttacaaaatggcttayatagtgcaatgttattacctaaggctgggaaattatacaatcc

SEQ ID NO: 253456 - DNA, 583 bp, Homo sapiens
gaagttttacaaaatggcttacatagtgcaatgttattacctaaggctgggaaattatacaatcctggtttgcatcccaactctggacacaatttcctgtgtccttgactgagtgcagccttggatcctaaggatggtgggaatatttgtttctttaacaagtaggttgcctcttttgaatatctttcagttgactctgggtactttagacattttctgttttttatcttacttcttcctctagtgatgtcaatcaggcacacaaactttatcgagtatatactatgatgtaggcattagacatcaaaagaaaatgactaggcagcatgtagacgtgggcagctctctctgtatctgcattacttactgtgtcatgtactggattaatatatgttagactgagttggtaggttacatctcactgaaacctcctttgcaaaattatgacagtaagagaaatatgacataactgactccatctcgtttytgacctccaagctgcccttggtcattcctgggcataagccaagtaactttaggtagaatttagtttataattttacttaaaagcaaggacaataat

SEQ ID NO: 253457 - DNA, 574 bp, Homo sapiens
aataaaatcattaagacttagtggttgaagtgyaggaaattatagccaggtggcaacggggactatcagatttctggttgttcaccagagggatggaactgccaaaaatcaaatgaaaacataattaaaaagttcgaatgttcctttgcacatatacagcaaataactgatgctcaagtatagtatgatgtgttcagtagagatttgggttgggatatagatttcagaggactcgccataggaaatgtgcaacatgcatattcctagaactgccaataacttggagatggtgtagtagaagaccatatggcaaacagaaaggaaaaatagtctcctagtataagaagaatgaggagagggagtggttaaaaactctgttggacatatcagttagaaagccattggtgacttttggaaaatgcggctttactggaatggtcaaatacatgatcatggaagtttgaggagtaaaagagaggttcagacatggaggcaatgggtacagacaattcctctgagaggggagatacaatatgggtgattaaggaagactcagagtcaaggaagaggattg

SEQ ID NO: 253458 - DNA, 574 bp, Homo sapiens
aataaaatcattaagacttagtggttgaagtgtaggaaattatagccaggtggcaacggggactatcagatttctggttgttcaccagagggatggaactgccaaaaatcaaatgaaaacataattaaaaagttcgaatgttcctttgcacatatacagcaaataactgatgctcaagtatagtatgatgtgttcagtagagatttgggttsggatatagatttcagaggactcgccataggaaatgtgcaacatgcatattcctagaactgccaataacttggagatggtgtagtagaagaccatatggcaaacagaaaggaaaaatagtctcctagtataagaagaatgaggagagggagtggttaaaaactctgttggacatatcagttagaaagccattggtgacttttggaaaatgcggctttactggaatggtcaaatacatgatcatggaagtttgaggagtaaaagagaggttcagacatggaggcaatgggtacagacaattcctctgagaggggagatacaatatgggtgattaaggaagactcagagtcaaggaagaggattg

SEQ ID NO: 253459 - DNA, 626 bp, Homo sapiens
aggggagatacaatatgggtgattaaggaagactcagagtcaaggaagaggattgatagatgagcaagggagacctgcttaattgttgctgagaaaaaacaacagtggaagaagatttgaagatacagggtacagaatgtataatagatgaagagctgaattaagagttgactcgacaaagtttgggtatttaaaatttcaatggatattgatatttccacattaggtatatgaaatgtttttaaattgatttttgggactgcaatacagttacaactgaatgataaaattgttcccatagtctgtctatataagtagaaatccaaaaccattgtcagaagcaattagaacatatttatagaacaagtaatttattattgtattaaattataataatataataagtaataatttatcattattattgctagtaagcagccagaggatggaaatgacttgccagaaattgtaaatgccaagtagggtctagaactgagcatcaccacttctgattgtgctcataattcccactcattcttarcctttattttaaaatcaacttaggttttactggttaaatcacttctctttctctctttgtctctttctctctgtgtattggtgtg

SEQ ID NO: 253460 - DNA, 622 bp, Homo sapiens
gtgggttctgaacttatgctacatgggttcaaatcctatctcagccacttaatggctatttaacgttagacagtacttaamtgctgtatgtctcagtttcaccatctgcatattaaatcaacatattaaatcatagccatgggaggatgaaagagcaaatgcatgtaattaacacaaaacaatgcctgactttaaaaaaataaactgatgtttatttttttttctgagtagtagcatgggtggtggtaccagtagttacactgtgactagatcaaataataagtcaagtaataatttgctcaggaaaataatccactttcattaaataaactcttgtcgtgccatatggttcatattccaagcagacaatccttcccaaactgggcaaacatccagccagccatagttgtaagacgaaataaaaaaagatatagatccaggcaaacaaaactgagtttctattagcatcagtattagaagagtcttttcctggaatcgcgtgatgacagctatcatcttctgcactctgcctcaaccagggaggagaaatccattgggcagggtaaatgacctggggctcaccacaaagtacattgtctctaaatgtgaagctctgtgttca

SEQ ID NO: 253461 - DNA, 365 bp, Homo sapiens
cagagagagactccgtctcaaataaataaataaaataaaataaaataaaataaacagtgtaatttgattgttcgtaactcaaaggataaatgcttgagggaatgggtatcccattctctatgatgcgcttattttacatggcatgcctgtatcaaaacatctcatgtatcccatagatctatatgcctactatgtacccacaaaatttttttaaaaatttacctgtcccatggtagatactcagtaaatacgtgttgaatgtagaatgaatttwaaaaaaaaaaactgttttagtattactataacaaaaagtagacagggtaatagatgacaagcagaaaaaaatgaatgaatgaatttgaaat

SEQ ID NO: 253462 - DNA, 591 bp, Homo sapiens
acgaaactgcgctggggagagggcagagcttccctgggggagctgcgtggacacagcagagctggggtgtggagccgggctttcccgtcaccactgctacccctaacggtgccagtgctggtgggtgtgcaagggccgcgaaagccatcgtgtgtggcatggcaggccccatcggagggtctccctggccgaggggcctgctgtggcgttggaggggtaggggcctactgcttctcatgaggctcctccctccctgacagtggcgagaaggcgcccgcctaccagcgcttccatgccctggcccagcccggcctgccgggrctcgtgctgccctacaagtaccaggtgctggcggagatgttccgcagcatggacaccatcgtgggcatgctccacaaccgctccgagacgcccacctttgccaaggtccagcggggcgtccaggacatgatgcgtaggtgagtggccgggggtgggctgtggctgtcctggagttgggggtgggcccgggcctgcctcctgagccgcccccatcctcccataggcgttttgaggagcgcaatgttggccagatcaaaaccgtgtacccgg

SEQ ID NO: 253463 - DNA, 573 bp, Homo sapiens
ctctttgggtgcaaaagacatggatgtgacatgacccttggaagaaccaaagtttgtttttttgttttctacaaatcagagggatatggaacatgcagtgaaataatcacatcgggccagaaaaaaagaaaatacatttattgcactactgactttgaagtttgaaatgtgtacctataacaaatggaaaaacaatttcttggcttcagggaatgggrtgatagtgccctgggttatggtgagtggagagtgggttatggtgactgggttatagtgagtggattatggtggctttatactgaagtcagcattgctgctcactaaaaggcaaattttatctattcatttgtgtttctctactcactgttcctactaggatgatggaaaatattgaaaattgaggtctagataaactaaagctagaaccctgatagggctattgtctcagtgaaagggggactaatacattgtgcccaccagtctggagaagcaaactgaggaatttgtcactcaccagggctctgggttggaaaattacaaaacgactcatccatgagaaactgaaatgccaag

SEQ ID NO: 253464 - DNA, 561 bp, Homo sapiens
tgaaatctgacacttttcagcttaaggttttgcctgccaccaagacttagtgtagggaattgcataaacataggaaaggtgctcaaagctgagcagcttaaaagaacaaatgtccactatgatattatccaattgtcggctcagaaattcatagattgatgatgatgacaatgctattgatcacaataaaggctaatcttttttgaacattcacttctatcaggcagcatgcaaatctctttacactttttactctcatgacaactctaagacatagtcccttttgttattgccacccccaacagagataagaaaaccgagatggtaagaggttagatcacttagtcaaggtcacttgggtagcaagtagcacagacaggcttgaatacaagtacrcctggttccaggaactccaaggtttacctctacactggacatcctctagagagtaggctggtagagatcacctccaaatcaacatatatgttagcagctatctgccttaactatagaaaacctgaccaatgctgcctacaaatgtttgattctgaaccagaaaac

SEQ ID NO: 253465 - DNA, 477 bp, Homo sapiens
ggacatttaaagaaacaaatccccgtgattttccagatggctcttgtagagaggtggttagacacatgcttagaagaagatgctttagctcagtgctctgttgcaggtggggatggggtgggtggacagccttggctcttgcaygtagagggaacctgtgtcctgggttgctggtgggtgtgttgcagagagtgtcaggcaggcattgtgtatagggcatttcctaagccagatcttcctccttcctgatgcccacagcctcagagcatttgtcctttttatgtttggggagctgcgcttcggtggaaggccctgattgtatttttggtgcacttaagaagccaagaggaaacaccccgtttctcaagtagacagagtcagagggcatgtccataaaagatttgcaagctctccttttcctctcagcctcttttaaagctcttaaatattagaattattgggtggattgcagctgtt

SEQ ID NO: 253466 - DNA, 477 bp, Homo sapiens
ggacatttaaagaaacaaatccccgtgattttccagatggctcttgtagagaggtggttagacacatgcttagaagaagatgctttagctcagtgctctgttgcaggtggggatggggtgggtggacagccttggctcttgcatgtagagrgaacctgtgtcctgggttgctggtgggtgtgttgcagagagtgtcaggcaggcattgtgtatagggcatttcctaagccagatcttcctccttcctgatgcccacagcctcagagcatttgtcctttttatgtttggggagctgcgcttcggtggaaggccctgattgtatttttggtgcacttaagaagccaagaggaaacaccccgtttctcaagtagacagagtcagagggcatgtccataaaagatttgcaagctctccttttcctctcagcctcttttaaagctcttaaatattagaattattgggtggattgcagctgtt

SEQ ID NO: 253467 - DNA, 477 bp, Homo sapiens
atttccacactatggggactccaacagagccatacctttctgtctactgcggttggacctccaggctctctgctgtacatccgtggatccatcatgtccatttcgagaccagaagatagtcttcaggaaagacacctaggaaataataatataagaatgacggctgggcacggtggctcatgcgtataaataatcccagtactttgggaggccgaggcaggtggatcacggggtcaggagttcaagaccagcctggccaagatggtgaaaccctgtctctactaaaaatacaaaaattagccaggcatggcagcgggcgcctgtaatccaagctactcgggaggctgaggcagagaaccrtttgaagctgggaggcggaggttgcagtgagccgagatcacaccactgtactccagcctgagcgacagaatgagactctgtcacacacacacacacacacacacacacacacacaca

SEQ ID NO: 253468 - DNA, 580 bp, Homo sapiens
gcacgtaccactctacctggctaattttttgatttttggtagagacggsgtctccctaagttgcccagacttgtcttgaactcctgggctcaagcgatcctcctgcctcagcctcccaaagtgctgggattacaggtgtgagccactgcgcctgacctgttaatttattttttgagacagggccttgatctgtcacccaggctggagtgcggtggcacgatcacggctcatagcagtcttgaacttctgggctgaagcgatcctttcacctcagcctcccgggtagctgggactacaggcacgcaccattatacctggctaatttttttatttttggtagagacggggtctccctaagttgcccaggctggtcttgaactcctgggctcaagcgatcctcccaccttggcctcccagtgttgggattacaggcgtgaaccaccatgccagtctgggtcaagtattttatattcattacttgagtttcataacaaccctataaagtaggcatcactgtccattttaaaacaagtaaacagaggcctaggaaaggtaaccacccaaggtcgtatacaccaag

SEQ ID NO: 253469 - DNA, 580 bp, Homo sapiens
gcacgtaccactctacctggctaattttttgatttttggtagagacggcgtctccctaagttgcccagrcttgtcttgaactcctgggctcaagcgatcctcctgcctcagcctcccaaagtgctgggattacaggtgtgagccactgcgcctgacctgttaatttattttttgagacagggccttgatctgtcacccaggctggagtgcggtggcacgatcacggctcatagcagtcttgaacttctgggctgaagcgatcctttcacctcagcctcccgggtagctgggactacaggcacgcaccattatacctggctaatttttttatttttggtagagacggggtctccctaagttgcccaggctggtcttgaactcctgggctcaagcgatcctcccaccttggcctcccagtgttgggattacaggcgtgaaccaccatgccagtctgggtcaagtattttatattcattacttgagtttcataacaaccctataaagtaggcatcactgtccattttaaaacaagtaaacagaggcctaggaaaggtaaccacccaaggtcgtatacaccaag

SEQ ID NO: 253470 - DNA, 580 bp, Homo sapiens
gcacgtaccactctacctggctaattttttgatttttggtagagacggcgtctccctaagttgcccagacttgtcttgaactcctgggctcaagcgatcctcctgcctcagcctcccaaagtgctgggattacaggtgtgagccactgcgccygacctgttaatttattttttgagacagggccttgatctgtcacccaggctggagtgcggtggcacgatcacggctcatagcagtcttgaacttctgggctgaagcgatcctttcacctcagcctcccgggtagctgggactacaggcacgcaccattatacctggctaatttttttatttttggtagagacggggtctccctaagttgcccaggctggtcttgaactcctgggctcaagcgatcctcccaccttggcctcccagtgttgggattacaggcgtgaaccaccatgccagtctgggtcaagtattttatattcattacttgagtttcataacaaccctataaagtaggcatcactgtccattttaaaacaagtaaacagaggcctaggaaaggtaaccacccaaggtcgtatacaccaag

SEQ ID NO: 253471 - DNA, 603 bp, Homo sapiens
atgatttcccttcccttccttacaggtccctccctcgacacctggggattacaattagagatgcgatttggatggggacaccgagagaaaccatgacaggggctctccagagaagcagcccagccttgggcaacttagttctcccatctgaccatccaacccaataaggctgctgactcacataggaccaggttagtgtttttcttaaaggcactacctttttgtggctaatttttagaatttatttttattattatttttttgagacggagtctcactctgttgcccaggctggagtgcagtggcgtaatcttggctcaccacaacctctgcctcccgggttcaagcaattctcctgcctcagcttcatgagtagctgggactacaggtgcatgccaccacaccctgctaattttttgcagttttaatagagatggggtttcaccgtgttagccaggatggtctctatctcctgacctcgtgatccccctgcctcagcctcccaaagtgctgggattacaggcgtgagccactgtgcccrgccgctagaatttaatttttatcagatatataaatactagtttgaagtcaagtaatactaca

SEQ ID NO: 253472 - DNA, 603 bp, Homo sapiens
atgatttcccttcccttccttacaggtccctccctcgacacctggggattacaattagagatgcgatttggatggggacaccgagagaaaccatgacaggggctctccagagaagcagcccagccttgggcaacttagttctcccatctgaccatccaacccaataaggctgctgactcacataggaccaggttagtgtttttcttaaaggcactacctttttgtggctaatttttagaatttatttttattattatttttttgagacggagtctcactctgttgcccaggctggagtgcagtggcgtaatcttggctcaccacaacctctgcctcccgggttcaagcaattctcctgcctcagcttcatgagtagctgggactacaggtgcatgccaccacaccctgctaattttttgcagttttaatagagatggggtttcaccgtgttagccaggatggtctctatctcctgacctcgtgatccccctgcctcagcctcccaaagtgctgggattacaggcgtgagccactgtgcccggccgctagaatttaatttttatcagatatataratactagtttgaagtcaagtaatactaca

SEQ ID NO: 253473 - DNA, 523 bp, Homo sapiens
caactaggtgacaatactttgcagggctggggcaaagttctccagaaggccgtgtatgctctgaatcagcatccaatatacggtactctttctcccatagccaggattcatcaaggggtggaagtggaagtggcaccactcaccatcacccctagagatccactagcaaaatttttgtttcctgttcccccgacattatgttctgctggcctagaggtcttagtcccagatggaggaatgctgccacgaggagacacaacaacgattccattaaagtggaagttaagattgccacctggacactttgggctcctcctacctttaagtcaacaggctaagaagggagttacagtgttggctggggtgwttgaccaagactgtcaagaagaaatcaatttgctactccacaacggaggtaaggaagagtatgaatggaatccaggagatccattagtgcatctcttaatattatcctgtgattatattactcttaatactgccctgtgattaaggtcaatgggaa

SEQ ID NO: 253474 - DNA, 588 bp, Homo sapiens
attctgaagtagtcataaattctatctgaaaaaaaattcaaggtccacttcttgcaaaggtagtacggagagttcccatatagccttcatccagctgccctttatatcatgtcacaaattttagtgtcttctcaaacatcaagttgtttgaaaacaggaaattgcagttggtttgagatagacctatatggagaataagtcttttagaagatcatcatggagccccaacttcttccaaacttgatccagtactggagttcacagagaaagtccttcctgtgaagcaagcaacaaaacccattctcaggatatctctgttgtgtgctgttgacacactgaagaaagggggaaatggagagaagcctttttatacacacaaagccactcatactcagagggaaaaaaaagcctattgactctggctgtctgacacacttgtaaaaacattagtaattacygaatcctggaatttcacagttaatacttggagaaataagtgactcactcctaaaacatacatacatatacatacacacgttatatgtgtgtataatgtttatgaattatatacatatgtttatttacata

SEQ ID NO: 253475 - DNA, 564 bp, Homo sapiens
ttatcaatgtagtgtcctactatgtgtgttcayatattaaacttctttaatatacaatttttaaaagatacaagtgcattttcataattacatttaatgtttaacatattccaattaatgtttttaaatttccttcctactgtattcaatgaactggctatatatttaaatttgattttcattgctaattatagtcaaatgtaacatcactcaatgaagggattacattttttttcttatcaacttaaggtggcactgggtttaactattcatttaaagttttaacataatgtgtttaatatatttattcctgaaagaagtattttcaatgactactaatccaaattgtgctcattatcctccatttgtcccctggatacactctccatccttctctaatagagggtctcttgacctcttccttctggttgggtttagccaaaaagaacactgcctggagatagaagggagagaagaggtcgcgtatttatttctttagctctgtttttctggcatacccttgcatctgctgtttctcaaaaccaagtttataattgcacttat

SEQ ID NO: 253476 - DNA, 530 bp, Homo sapiens
catacatgcatataacttatgtgtgcatctgtttgtgtgtatgattcagtatttagcaaattactggattttgatctaacagtaaataataattttaaaaaacttgatgcagttgcaaactaaaatattccatttgagtttactagataataatgtattaatatttaaaataacatacctcctaaccatctgtctgatatatttcaaaagtgcatttatatgcctttgtggaactataaagcaacttttgtaaaatgttcgtactaaaaaatcttgtgaggaatatacggtcatcaatccataatggtttactgagctacccaaagcaacacacaatattttaaattttcataggaaacacagcaaaacttgagatattttgaatatttcatacacaactagtttgatattcttctctgcttcartattaaattaggttacattcctttgataccaacgtgtctttaataattcagaatttctgttgtcgccatgattaaccacaccaacaacaaaagtaaaatgtcaaa

SEQ ID NO: 253477 - DNA, 607 bp, Homo sapiens
cttcaaatgaaacttcaaggtttttagagttgtttctcaattttcaaaaatgctatatttttaataatgatatatgttaagtcaaacttaacactggctcaaatttaagaaactaaaattttgtttttcttagtgagaatattccaattgaaattaatgctattatttatgcctatggagttgaggaaacgctagcccaatacatggctctttggcatttgagaaaacarcagaaacaagaagctttcactctgaccttcttccactttatcccaggaaacatcataaaactccgaaagaattttctgactttccactaaggctgatcattagaccctcattcaataaaaatcttccctagaccaaaaagaaaggaacatccttttctctgaagacacagggacacagaaaagaatctgaacaaacaggtctcactaagttcctcccagtttattaccattagataatagtttcttttaatccaatcatacttctccatgactatccattcattcatcaaaactagcataaaaataaacacggtttaccattttggggggtcttcatttcttcataaagtctcccatatcatgtaaaatttatatta

SEQ ID NO: 253478 - DNA, 594 bp, Homo sapiens
tgtctctagcataccactggttacatctcaactctaatattgtacatagaaactatgttatctgagataatatatttaaacatttttatatttcccttttctcaaacataaagtgatataaaagggcatctttattctatgttgagaagtaaatgctctsaatcctcccacacattacaatgctatgtaggtacttattattctcaatattctactcatctgctgctgcctaaaacagaatgcttcagatcctccttctatgttatggctatgcaaatatttaaatccaggcattgtcttttctctaaattaccccttttgaatgataaaccttattttgttatttttagttattcaaaactatatttccatgtactattcacattccttaaataggccactcaaaaacaaattctaccttatagcttaccccacatatgtcagatgccaatattttcatgataattcagtttgttgcttctcctgaagaaattggcaacaatgagctagactgaccttttaagattaggtacatacacaatccaacacccctcttttatctagaatgctggctatgtcactgacacacactgt

SEQ ID NO: 253479 - DNA, 603 bp, Homo sapiens
actgggtctttgtgagtaaatgatttgctgaatcaatcagtgcctcaatttctctaggtatgaaataagagttacctctgctgtttcttttttgctgcatagtcaaatgcaatatcttgaaattaaatatctgtgcctccactgaaaatgatgccatataaactcaagcaatacttatttgtatttactagttgacaaactaatttacttctgaagtcagttwttgaaagagattcaaccttggtacactgagcttccctagaatctttaatggcagggagcagaaattccttagctagtgccctcatcaaagagaacatttgatattttactattttgtggcttcagggaaacacaattcaattttgactcattttgacagttaaaaaaatgagcccttgtttggagcatgaaacaaaaatgtagaaattggaaagaaaaataaattctggtgagcatcaaatctgtgtcaagtattgtgctagtagatgctttattaacttctctagtagactggcagataaaatacaagacaccaagtttaatctgaatttcagataaaaaagaaaccatatatatagtatatagtataagtatatatca

SEQ ID NO: 253480 - DNA, 615 bp, Homo sapiens
ctccagggaagagtgaaatttaatcacagatcatataaggcaaagtcgccagccctactgctatgagtggaaggccacaaggctgagtaaacccatagagagactgtgacttygtcagttcaaacttctgtgagctttttccaatcccaagaggtgtctggatgcctgatattttaccttgattctgtggtttaaagaaaccccatccatgtaagaaagggtccttctctgggaaaaagaaaaagaaaaagaaaatcagtgttttaccaaaaccgtcattaataagctaacccattttgttacttaccaatgacatgttttgaagtcagtcatttttcatttttggatctcagttttttatctggcaatgaaagggattgaaaaaaaaatcttctaatctccttttagccctaactttctgtgatacagggtaggtaaattgcctacataatatatacacaattaacttctttccaagctcgagatataggtcataataaataacttgcctttatgttagagtttcacccctcccaccttttaaagagttttcaaatataattacacttaaattttctgtttaccatcactaagcttctgtcaagtaggaaagat

SEQ ID NO: 253481 - DNA, 522 bp, Homo sapiens
gatattatagaaaaagaatgtgggagatggtccctatggctaatcagtacaataacgctttcaaacccagcttatctaagccaaagggttttcatttcttaccataaaaggagctgtgtctaaggtgtccttcaagctcccactgtgatttgcacacactaggtgctcgaaaaaatttttaaaagtgcctcactgtatggctgattcaaagactagttagagtacattggattccttaaytggtaaaagttcgaagagcaaacttgacccttttatcttggtttatgcattacaaatttaagtatctgcaaacggtatctagtttcaaaatattttcttcacctctcttgaatgatttctccttgggtgatgtgttatgatgcagctatttttaaaaacctcacagtgcttttccaacttgaagataggctattaaaataaagataaagcctgacattctggaaaacagggattgctaaaccattaatttaataagtaaattctattgtgttgtgagactaa

SEQ ID NO: 253482 - DNA, 522 bp, Homo sapiens
gatattatagaaaaagaatgtgggagatggtccctatggctaatcagtacaataacgctttcaaacccagcttatctaagccaaagggttttcatttcttaccataaaaggagctgtgtctaaggtgtccttcaagctcccactgtgatttgcacacactaggtgctcgaaaaaatttttaaaagtgcctcactgtatggctgattcaaagactagttagagtacattggattccttaattggtaaaagttcgaagagcaaacttgacccttttatcttggtttatgcattacaaatttaagtatctgcaaacggtatctagtttcaaaatattttcttcacctctcttgaatgatttctccttgggtgatgkgttatgatgcagctatttttaaaaacctcacagtgcttttccaacttgaagataggctattaaaataaagataaagcctgacattctggaaaacagggattgctaaaccattaatttaataagtaaattctattgtgttgtgagactaa

SEQ ID NO: 253483 - DNA, 581 bp, Homo sapiens
ggactgggaagagggcatgagtgtgtgaacacaggctacagaagcaacctggggctgagtgaggaggtctgggcctcaccataattgtgcactctctctcatggtgtttctttggggtatgcagtaagagctctcagtgatagaactgtgctgcctctccatagagatataaaggcttgttcttaaayccttgttctgccatctcccagctatgggcagattccatattctttcagcctcaacactcttctctgtaaaatggggatgatggtaatgtacctatctcaaagggttttgcgaagattaatgacataataatttacgtaaatcctaaagcctagtgttcttacatgttagtgattttgaattttaatattaccagtgacaaaatcaatgagacatagctcttaagcattagtcaagattacagccaaaagccagtgtctaagcttatggtatttttttttttttagataagctgccctttaaaaaatacatgtgttttgtatattttgttttttactttcctgttttttctttttttttttttttctccaagtgaatggacgttacctttcccc

SEQ ID NO: 253484 - DNA, 561 bp, Homo sapiens
caaaaacttttaccctagaataatatatttggcaaaaatatcctttaagcagtaagaggaaataaagaccttcccagacaaacaaaagttgaagaatttcatcaacaccagacctgtcctacaagaaatgctaaaggaagtccttcaatcaaaagaaaaggatgttaatgagcaagaaaaaaatcatctgaagggacaaaactcactagtaatagtaagcatgcaggaaaaacacagaatagtattacactgtaattgcagtatgtaaatttctcttgacttaagtagaaagactaaaatataagccaatcaaaaacactaaycacaacttttcaagacagagagagtacaatcagacaaagaaataacaaaaaattaaaaagtgggagatgacgctgaaatgtagagtttttattagtttctttttgtagagtttttattagttttttaaggtgtcttcagtttaaaataattggttatgagatagcatttccacccctcatagtaacctcaaataaaaaaacacacaacagatacacaaaaagtaaaaagcaataaatt

SEQ ID NO: 253485 - DNA, 550 bp, Homo sapiens
atcagtacttatataaaaaagaaaaactttaaataaataacctaatgatgcatcttaaagaattagaaaagcaagagaaaactgaaccccaaattagtcaaagaaaaaaagtaataaatatcagagcagaaataaatgaaattcaaataaagaaaacaaagatcaatgaaacaaaaagttggttgtttgcaaagataaacaaaattgacatacatatagccagactaagaaaaaattatatacaaataaataaaatcagagatgaaaaaggagacatgatgactgataccacagaaattcaaaggatcattagtggctactatgagcaagtatatgccaataaagtggaaaatctagaagaaatggataatttctaaacacatacaacctatcaagatttaactatggagaaatccaagacctgaacaaaccaataacaagttacaaaattgaagctgtaattgaaagtctcccagtaaygaaaagactggagccaataacttcacttctgaattttaccaaatattcaaagaagaactaatatcaatcc

SEQ ID NO: 253486 - DNA, 577 bp, Homo sapiens
cacataaattaaaaacaattattttttttaaagtagggctttgtgagtggtgttttggatttaattttcaaattagaatttcaaatgccaatggcagagaatgctatgtttttcttaaaaggggtttctccattsactaacacacatttacaaaaaggaaacatatcagagtcttcttatcttcctgctcaactctaaacaagtaattattggaatcctgttagatcttcctagtcattcttatgcaagagcataagtctaggtcctgttttaaatatagcgatcatgaaaagagcatatctccctacattctgttattatggggagggcataggcagtcaagggatatgacttttctttaactctagaaatctactagccctgtggcttaggacaagtcactgcactgagtcttagtttctccatctggacacagatgagatatctcaacatatgcctcacaatttgcattaaaaactaaaaaacagatagagtgaacatgctttataaactctgacgtataccccatatgtaatattttccttccctcagtgggatggaattcttatttggcagg

SEQ ID NO: 253487 - DNA, 577 bp, Homo sapiens
cacataaattaaaaacaattattttttttaaagtagggctttgtgagtggtgttttggatttaattttcaaattagaatttcaaatgccaatggcagagaatgctatgtttttcttaaaaggggtttctccattgactaacacacatttacaaaaaggaaacatatcagagtcttcttatcttcctgctcaactctaaacaagtaattattggaatcctgttagatcttcctagtcattcttatgcaagagcataagtctaggtcctgttttaaatatagcgatcatgaaaagagcatatctccctacattctgttattatggggagggcataggcagtcaagggatatgacttttctttaactctagaaatctactagccctgtggcttaggacaagtcactgcactgagtcttagtttctccatctggacacagatgagatatctcaacatatgcctcacaatttgcattaaaaastaaaaaacagatagagtgaacatgctttataaactctgacgtataccccatatgtaatattttccttccctcagtgggatggaattcttatttggcagg

SEQ ID NO: 253488 - DNA, 412 bp, Homo sapiens
taaaagcattgctttgctgtgactacaatcctcagtgaaaacttcagcctacatgcaatgtcaagacatcggtagtcgaacattcattcaggaatcaccataatccaacttctctatattagtctgtagatggtttccatgtgttcgtgacagccaggcaaatccagccaggaatacaacagccaggcaaacgtttataatatctcaaaccttgctcaaaatagtaagtgctatttctgcataagaacagcatgatctataatgttcaaactgtattgtagcaccccagtagaaatatattgctgcctatctggggtatcagaggcacaaagggacactggaagataggtgtgccttcttggagaatyaattttagcctaacctgtgagaagaatatatttttatattgatt

SEQ ID NO: 253489 - DNA, 420 bp, Homo sapiens
gccttctcacaaagattcaacttctgcattctccaagagctatatctgagaaatcatcatgagcaagagctccagaaaataagaattacagtaatccaagcttaaaaaatcagaagcatttacctgcatagcaaaagcctttgtgctgatctgtacccacagcctggctaggtttatttcagaacagaaagtttaaagcaataatagtttcagccaatacaaataamcctggcaaagattaaaaattaggtgtttacttgaatgtgagctcactaatgtttttctatttgcactaaaagtaaacgttataataacaatgattttagattactagattctaattgctagtgggagataactcattatttggtagtttaatgtagtgaaccctcaaataactggcacgttacagcatagttg

SEQ ID NO: 253490 - DNA, 586 bp, Homo sapiens
ctgaggaattacacggaagagaaccaagacaccagagctgatagccaggactaactgtcagccacgtgactacagccacactggagcttccatagccactgagtcaactgagaatataagatctygtccacaattgttgttatatgacaataagtttcagaatagtttgttacaggccaatagataactgacagaccatttggaaagggcttcacaaacagagaatactgagctatttctggaattagtggtgatgtggccaacagttctttgtcacatgggcttctccaacatgtcaacttgcttcctaaaagccagaaaggaagagaagctgccaataagatggaatctttagtattttgtaacctaataatagaaaagatatgccatcacttctgctgtattcgatttgttaatctctaagtacagcccacactcaagggcagggaataacacaaagacgtaaatgccaagagataggaatcaatgggggtcatcttagaaatattcctatcatatgcccatagacaatgctgaatatcattttaaacaggtttatacataaatgaatatgcaaacatgtatt

SEQ ID NO: 253491 - DNA, 478 bp, Homo sapiens
actgattgaaggttcatagaggtgatagtcagagaggtatattataaaatgcctgctacctactaggatattgatggctggctaaaataaagctgctaaaagtgttgtaccctaataactcaatgaatcagaaaaaattaagtactgtgagtggcatagacaaattgctgacaattcagaagrgtgattactttctattagaataataagagagccttcatacaggcaagggttgtatttgagttgggcattgaaggatctatagaactgagaaaaggaaggttacccaggctagtcttgcactcctgacctcaggtgatccacctgccttggcctcccaaggtgctgggattacagacatgagccaccgcacttgacctactttactttcccttaacagctacttagtagtccctagtacagaaacacccaagttcttaagccaggtccctatgaatgggcatgaaagtgggttctt

SEQ ID NO: 253492 - DNA, 609 bp, Homo sapiens
tagtcaacacatttaattaagccattttattgaaaaactggagataaaatgcttaccaaatgataatacaagaaataagtgaaaaaacatttaaaagacctttccactttttgtgggcccttgggtactgtatttttgaacaactggtctaagaatttcttcagatccatgctctttgtaaattctctattcttttcttccctggtactactgtaactttttaagcttttgggagcatttcaatgtccttctaaagcatgatctttgctatggattcctttccactctgcccacttctctgttcctgcactgaattagtccttctaaatttatgccaatataatcaagtgttcctcatacttgtcacccttcactgttgcctaatcctcactttctgccatgctatggtagacccttgtcattctagctcctaaccctctcatcatcgcctttactaaaatcactaaccatttttataaacatcttatgctcttttacaactcaccacccttgttcatgtcagctccattgtttttckccaactgataaactcatgatcagttttacaagctaggtttacttgtaacagtctcattgattaattcttag

SEQ ID NO: 253493 - DNA, 572 bp, Homo sapiens
gtggctcaacatgctatgggaatcaatgaatatattttaccaaggaatagtgaatatcagtgaagtcagcacattggttaggcagactttggttgggagagttactgttaggttggcgcaaaagtaattgggtttataccaacctaatagtaagtctcttagttttgtaccaacctaatataattgcgtttttgccgttacttttacactaacctaatataagtgtatccgtggaagggatgagagtgctaaggaagagtgtgtagaaaatgatctgaaagatctaggacagagtcacaaggcataccagcatgtcagagttgaatcaagacggggaccatctgagaaacaggattaggagaacaaggtcaggaatgttggaggtttaccaggaattatttgttacttaaaaaagygtatttcatatcctaatgtagttaagttcacaaatcatttttagttatatcatagcttggctgctttctgctgagatgtaggggagtgtttgcttcttgagaaacacggtatttggagatgagcgcaggacagtaaattgaagagtcctggctgtg

SEQ ID NO: 253494 - DNA, 397 bp, Homo sapiens
attatttgtagagagagtttctatggctgaccccasctccactcccacacaatccagttaagtaaaaagttttctaagcagaggcttttgatgctcctatgtgtcttaaacagggttatttaaaagcgtgttaaggcaattatcccctgttgatgcctaaggagaagaaaaaagctgctttttaaaaagcttttaaacaacacttaaagcaataaacagcctttgaaaaagctatttttttttcataaaacaccttctccccccaccacaagtggtgcttttgttggtgcctacagagattgcaagggaaagcaatactgccaaaaattctttgctttaatgtaaaattgatttgagattgtcctcccccctcccctttttctaatcatagtaatgt

SEQ ID NO: 253495 - DNA, 520 bp, Homo sapiens
ataaggacacaggcatgcatctgttcattgcagcactattaataatagcaaagacatagaatcaacctaaatgcmcatcaagggtataccagataaagaaagtgtggtacttatacaccatggaatactatgcagctatacaaaataacaagatcatgtcctttgaagaactatggaaggagctggaggttattatccttagcaaactaacacaggaacagaaaaccaaacactgcatgtcctcatttgtaagtgcgaactaaatgatgaaaacacatggacacatagaggggaacaacagacccaggggcctaccagagggtggagggtggcaggagagagaggatcagaaaaaataaccaatgggtactagacttaatacctggatgataaaataatgtgtacaacaaacccctgtgacatgagtttacctatataacaaacctgcacatgagtttgcctatgtaacaaacctgcacgagtttacatatataacaagtctgcacatgagtttacctat

SEQ ID NO: 253496 - DNA, 520 bp, Homo sapiens
ataaggacacaggcatgcatctgttcattgcagcactattaataatagcaaagacatagaatcaacctaaatgcacatcaagggtataccagataaagaaagtgtggtacttatacaccatggartactatgcagctatacaaaataacaagatcatgtcctttgaagaactatggaaggagctggaggttattatccttagcaaactaacacaggaacagaaaaccaaacactgcatgtcctcatttgtaagtgcgaactaaatgatgaaaacacatggacacatagaggggaacaacagacccaggggcctaccagagggtggagggtggcaggagagagaggatcagaaaaaataaccaatgggtactagacttaatacctggatgataaaataatgtgtacaacaaacccctgtgacatgagtttacctatataacaaacctgcacatgagtttgcctatgtaacaaacctgcacgagtttacatatataacaagtctgcacatgagtttacctat

SEQ ID NO: 253497 - DNA, 520 bp, Homo sapiens
ataaggacacaggcatgcatctgttcattgcagcactattaataatagcaaagacatagaatcaacctaaatgcacatcaagggtataccagataaagaaagtgtggtacttatacaccatggaatactatgcagctatacaaaataacaagatcatgtcctttgaagaactatggaaggagctggaggttattatccttagcaaactaacacaggaacagaaaaccaaacactgcatgtcctcatttgtaagtgsgaactaaatgatgaaaacacatggacacatagaggggaacaacagacccaggggcctaccagagggtggagggtggcaggagagagaggatcagaaaaaataaccaatgggtactagacttaatacctggatgataaaataatgtgtacaacaaacccctgtgacatgagtttacctatataacaaacctgcacatgagtttgcctatgtaacaaacctgcacgagtttacatatataacaagtctgcacatgagtttacctat

SEQ ID NO: 253498 - DNA, 410 bp, Homo sapiens
cagacacagtctatttctatgctcrcatctttgcccccgtggtagattgcttttgattgttacttgctgcacactagctaggtttgggacgaaaggggattctttgttgtccaggtccaggctttagttttatacacattttgtgtccctggttctcaggggttgggttttctcaacgatcttgccaccacccctcactgtgtgagaaggcatctcatggcctgagtgcaggatgagttcctgctccttcttcaaggaaatgaaattatttttcttttccctttctctggtttcccaaccacagtggatcttgttttctgtcctgtggtttagggttcatcaccctttaccaactggcctatgcttttcattacctgggaagagggccccaggtggtacttagtgtcttt

SEQ ID NO: 253499 - DNA, 410 bp, Homo sapiens
cagacacagtctatttctatgctcacatctttgcccccrtggtagattgcttttgattgttacttgctgcacactagctaggtttgggacgaaaggggattctttgttgtccaggtccaggctttagttttatacacattttgtgtccctggttctcaggggttgggttttctcaacgatcttgccaccacccctcactgtgtgagaaggcatctcatggcctgagtgcaggatgagttcctgctccttcttcaaggaaatgaaattatttttcttttccctttctctggtttcccaaccacagtggatcttgttttctgtcctgtggtttagggttcatcaccctttaccaactggcctatgcttttcattacctgggaagagggccccaggtggtacttagtgtcttt

SEQ ID NO: 253500 - DNA, 608 bp, Homo sapiens
gccaacaattggtttttaatccctatatttacacatatattattcccttgaaggacattaataacatcttagttaattgatttctcaccattggcttgtttgcattcctctggttggtttataactgatcatcttggtatgtaactacttggtcttagaaatattaagcaatgacatttgtctttagtagaaacacataaacagtaatttggatcatagtctacaaccagtttctagaatatatctctgaagtcccaaagggatttaaaagtagaagcaaatcactgttgcatgtaaatagaagctcatttaacgtacagcctaataatttgaatgataaaagtggataattcaagacagatgctgacacctaaattatggcagtgagtaaatacatcagagaaacgtaaaaagcaccagatggatgcaaacacattggagaattgagctgcccaytagtagatgatatctgacttggaggactgtaagcaaaatgtatatgtttatgtatttctagtatttgcctgatgatacaatccccacaggatattcaggagaaagtaaaataagccagaagaaatccagggtccattaatacaaattttgct

SEQ ID NO: 253501 - DNA, 559 bp, Homo sapiens
ttcaatttatgagaccagcataactatcatattaaaatctggcaaaaacatgaatttacatacaaaatcctatacaaaatattggcaaaatagtgcagaaatagacayaagtttgattaattccaggactccaacattgattttagcatctaaaaatacatcagtgttattcatcacattatcagaataaaggataaaaatatatgatcaccttgcgttttgaagaaagcatatgataatatacaacatgctataatgctttcatgatgaaatctcttatgatactaaggttttcttaagctgtctaaacacacacacacaatctttatataaaaatatattaagtagtgaaatatgaaaatacttgttcatgacattagaaaggggcattaaaaggtccacactccatttctgttcaacattttccttaggatgcaagtcttaagcaagagaaataaggcaagaaaaagaattaagattatcataatttcaaggaagaaataaaactttcctttaaggtaacatgtatataaaacatacatatcaaatcaaaagacaa

SEQ ID NO: 253502 - DNA, 416 bp, Homo sapiens
ccatccaaaaataatagaatatacattctcatctgcacatggctcatactctaaaatcgaccacacaatcggccmtaaaacaaccctcagcaagttaaaaatactgaaatcatgccagacacactcttgggccaccgtgcaataacataaatcgatactaagaaaatcactcaaaaccataacattacatggaaattacacaatctgctcctaagtaacttttgggtaaacaatgacaataaggcagaaatcaagaaattatttaaaactaataagaacaaagatacaacataccagaatctctgggttacagctaaagcagtgtaaagagggaagtttatcaaactaaatgtaaagttttcttataataagttttcttataaagtaattgtaaaggcaaagttttcttttttttt

SEQ ID NO: 253503 - DNA, 593 bp, Homo sapiens
gttcctcttctgcttaaaacttctcaaaataaaacccaaatgttttactaagatctgctagcatgtggagcagggagataaaggaaacagaagcgtgctcaccctcttaaatgggactgctattctttggctccaacatacacagcaatgtgggcccagtgtggccagaccttttgttttctttttaaaataaaaagcagccatccaggtttctttggtcttcataacttctcagactcctcatcggggtttttaaagctcttttagatttcagttctctctccatctttccaaattcttctctcccacaccgcggtctgcatttctccctccagccatggtgatctaactgtgattttccttctgcatccggctgtttctcacctccaagcctctgcaccttctgtttcttgtgctcaggcttccctccacctcccacccytttgttctcatggttgatgcttcttctcctatgccatgtattccatgaagacgtctttgactccaccacttcaagttgagttcactgtccttccccggggctaataaaaccgctacgcctccccatgagagcaggcttttatgcttccttt

SEQ ID NO: 253504 - DNA, 601 bp, Homo sapiens
ataaacgtataaagaaattagttaaactagagcccttttgcttatttagcaagagtaatccaatttaagcaagcttaagctttataaaagggaagctaactgactatgataatgatttcaggaacagttgggattcagttgttcaaatgacgttatcagagttttctctttcttctcatctttgatccacttcactttctattggtataattttcattcaggttcttctattctggtggcaaagacagctccaagggcaaccatcttgacaattcatcaattctagcagaaagaaagggcctctgttctaattcatcctggaaatattattagcatcagtctcattggttmtatttgaggcacacactgaagtctgaaccaaccactgactcccctttagagagaataactttattggctatttccgatttatcaagcactttatggttttgagattagctacccacttcagtgctggttgctgtgaccagaagagatgccagacagataatgcaacaatttgaacatagaaattagtttctatgcccttttataaatcacagacttttagagtctggagaaactacagagataatctatt

SEQ ID NO: 253505 - DNA, 646 bp, Homo sapiens
gaacatgggagggatctcatgccaaaattcttcattctatggtttatgaaatatgtagctagtgccttaaagcaggaagtcaaaaatagaggaatgtgagcacttttattctattgcagaaaagaaaaaaaattgaaccttttgtacacaggttcttatgtttaaatacaattatataaaagtcaggaaagcatagtggttaagaacaaaggctttgggtccraacatacctagtttgagttcaggctttgctactttctagcttttttacttaaaaaactattgatatatttgagattcagttttctcattggtaagatatgtctaatattagaacctaaccttataagggtattataaaggtgaaattaaataattcttataaagacacttaggagaaatgactggactataatgtgatcagctaatatcaatacttaaaaaataaaaaaaaaacgttttgatttattactggtggagtgaagtggcttcagtctttcctaaaagaatgcagaattctttatcattccccaccactatctgcaaacataattatgaaagaatggctggaggatcatacaacactgtgggatgggcctttcctagtccatcctctcctgaaggaaatttttaagccatctccttc

SEQ ID NO: 253506 - DNA, 578 bp, Homo sapiens
tgatgcatgtgattttataaaagtcagttactatcattattataatctcccattttacagaagagaaagttaaggctcaagtgttcaaatgacttatctgaagtcataaagtgagtcagtggcacggtcactgccttagacatctgggcttctcaagttttcccttgggcttggagaggggctatggagaacaggagatggagaagaaagggaaaagtcaagcattttccagaaaggagttcctcatccctgatccctgggaggattgtaagctctccctccycatcttcctctcctttctctcttgcccccatccacacatttcaagcagctattcttatggttggctagcagcaggatgccaaacacccattgaaagaaatgacctgtgctaagcaccatggtcttgacacagctttattaaaaattaagttgcaaattataacactcactggggaagacttgcttttctcccaattatagttaatagaataaaattaatgtagcaattaatgtggctgctcttacagcccactgtaatctgcgcagggccacagctcctgttcttaccacggcct

SEQ ID NO: 253507 - DNA, 578 bp, Homo sapiens
tgatgcatgtgattttataaaagtcagttactatcattattataatctcccattttacagaagagaaagttaaggctcaagtgttcaaatgacttatctgaagtcataaagtgagtcagtggcacggtcactgccttagacatctgggcttctcaagttttcccttgggcttggagaggggctatggagaacaggagatggagaagaaagggaaaagtcaagcattttccagaaaggagttcctcatccctgatccctgggaggattgtaagctctccctccccatcttcctctcctttctctcttgcccccatccacacatttcaagcagctattcttatggttggctagcagcaggatgccaaacacccattgaaagaaatgacctgtgctaagcaccatggtcttgacacagctttattaaaaattaagttgcaaattataacactcactggggaagacttgcttttctcccaattatagttaatagaataaaattaatgtagcaattaaygtggctgctcttacagcccactgtaatctgcgcagggccacagctcctgttcttaccacggcct

SEQ ID NO: 253508 - DNA, 517 bp, Homo sapiens
agttaaataataagaacacatggacagaaggagggaaacaacagatactggagcttacttgaggaaggagggtggtagaaggtagagattcaggggaaaaaaaactgttgggtaccatgcttagtaccttggtgactaaataatctgctaagtaacacctgagtcatgagtttatctgcatgacaaaccttcctacgtattcctgaacttaaaataaaagttaacataccttttcaaaaaaaaaaaagaagaaagaaaaagaaagaatagcccacaggaactttctggagagaaactctgatcactctgcacccctgcctcagcaagttcccatggccctgtggatgaagtccaaactctttagcatagtctgagaggtctctaccatcagacccctgccgcccctccagcttcttctctcaccacccactcactccacttctagtcttctgccktaccgaatgactttctgctccagaattttctatcttctctctttttcattctgccactcatg

SEQ ID NO: 253509 - DNA, 517 bp, Homo sapiens
agttaaataataagaacacatggacagaaggagggaaacaacagatactggagcttacttgaggaaggagggtggtagaaggtagagattcaggggaaaaaaaactgttgggtaccatgcttagtaccttggtgactaaataatctgctaagtaacacctgagtcatgagtttatctgcatgacaaaccttcctacgtattcctgaacttaaaataaaagttaacataccttttcaaaaaaaaaaaagaagaaagaaaaagaaagaatagcccacaggaactttctggagagaaactctgatcactctgcacccctgcctcagcaagttcccatggccctgtggatgaagtccaaactctttagcatagtctgagaggtctctaccatcagacccctgccgcccctccagcttcttctctcaccacccactcactccacttctagtcttctgccgtaccraatgactttctgctccagaattttctatcttctctctttttcattctgccactcatg

SEQ ID NO: 253510 - DNA, 637 bp, Homo sapiens
gagtactctacatatattaattagattcagttactgatggtgttgttcagttcagctgcatcctcactgatgtttgtgtgatagatttgtcaattactgatagrtgggtgttggagtcaccggttttaatagtggatttatctatttctcctttcagttctatctatttttgcctcatgtaatttgatgctctgtagttagttgtatacaccttaaagattgttatttcttcttggagaatttgttcctttatcattatgccatgctcctctttacttctgacaattttatttgctctaaagtctgctttgattgaaattaatatagatcctccaggtttcttttgattagtgttaatgtgttagaatagtatatctttttccatgcatttatttttaatctatctgtgtatttatatttaaaatggggttcttatagagaacacatagataaatcttggctttgttttaaaaataatccaatgtgacagtctctgtcttttaactagtatatttaaactgttcacatttaagtttattattgatatacctggattaatatctatcatgtttgtagctttttctattcattgcacttgctctttctcttttcattgcacttgctctttctttcttat

SEQ ID NO: 253511 - DNA, 449 bp, Homo sapiens
tggactcactgagtctctaatttggtgtctattggatggttggttggtgccaccttggtgaagatgtggcttgaaggagagaggaaggctgtgaaagctggggtcgaagtcagtgatgagattgtgaagcaacaggaatgcagaggatgctacagccaggggtcaggtcctcaggattcggagtgtaactctgacaatttcattttcttgctagaattgcaaaggacatgaggcactcttgggcctgattcatttcccactgccaacctgtggtcygtgggacatggatgaacagaggaaagacacaaggatgctcccaagatccctttcctacagatgctgcctcctgctctgtgagccagcatcatggtctcagttttttgagcatgacttatttccattttttatttctgttacatctattccaagatctgcttccagctgtctgt

SEQ ID NO: 253512 - DNA, 621 bp, Homo sapiens
cccttcttacatgtgtccccttcccctttgatcttctctgccatgtagtgatcagcatgaaagccctcagaagacaaggctatgcccttgaacttctcagcctgcagaacaaacatacacttcttttctttacaaattctcccatctcaagtattcttttatagcaacataaaataggctaagacactgggttaccacattttttatgtttggtctcttctatcatctggaaaaataactcctattaaattccttcagttttattttattttatttaacttttattttaagttcaggggtacatgttcctgtttgttacataggtaagcttgtgtcatggagtttgctgtacagattatctcatcatccagatattaagcctagtacccattagttatttttcctgatcctttccctcaccaaacctccaccctcccataggccccagtgtgtgctgttcctctccatgtgtctttattagtcygttctcacacgtctatgaagaaatattcaagactgggtaatttataaaggaaagagatttaattgactcacagttccgcatgactgggaaggcctcaggaaacttacaatcatggcagaagggacagcaaacacatc

SEQ ID NO: 253513 - DNA, 506 bp, Homo sapiens
cacctgcttcatttatatttacaatttctatcaccactcaactccaacatgtatgttatcttctttttttatttttgaaacaggggtcccactctgttgtccaggctggagtgcagcagtggtgcaatcacagctcaccgcagccttgaactcctggactcaagcaatccagcctcctgagtagttgaaactataggcacacaccaccacactcagctaatttctatttaatttttttttttgtcgagacagggtcttgctttgttgctcaggctggtccccaactcctggcctcaagtgatcatcctcccttggactcccaatgtgcaagkattgcaggcacaagacaccatgccttttcactcatttatttattattgtatgtcttcctccattagactgtagattctatgagagtaatgtttattgtcttcactctttgtatctccagaacctagaacagtgcctagcacataatagatacccaataaatatctgttgcctga

SEQ ID NO: 253514 - DNA, 656 bp, Homo sapiens
tcccatccttcacaatcagggaaggtcacagtgactattttcttctcaactggaaatgggagtggtccactaaatggggttttcctctgccacgatgtcaacttttccaagagagaggctacatattccaagggatcaaataataaaacacatcttccttcagatcattgctgttatggcagaataacctgaaaaagaagaacaggaaaggaaaaaagaaagaaaatcagcctattcacactcaaaacttatttttccctgaaagtgccttgatcttgataacattctaaccaagaatgctctagtcartgctgctttgtcccataaatcagagaggcgggaccagttctcaagaagagggctctctccaggaaacctccaactccagtcctcctcttcttaagctaaagttcactttcatcatccctcagatctcagttcatgcctgccctcaggtccatgcaagccatgacctctcctccctccaggttccaggacttgctgtctataaagacctacattgcttcttcacaccccagcatccccctctaggtcagacttgatttacacatcccattttcaaggtatggaactgatgattcgtgcagtgaggctgatgcaaagccaggcatccaagaagctggatcctaattctg

SEQ ID NO: 253515 - DNA, 656 bp, Homo sapiens
tcccatccttcacaatcagggaaggtcacagtgactattttcttctcaactggaaatgggagtggtccactaaatggggttttcctctgccacgatgtcaacttttccaagagagaggctacatattccaagggatcaaataataaaacacatcttccttcagatcattgctgttatggcagaataacctgaaaaagaagaacaggaaaggaaaaaagaaagaaaatcagcctattcacactcaaaacttatttttccctgaaagtgccttgatcttgataacattctaaccaagaatgctctagtcagtgctgctttgtcccataaatcagagaggcgggaccagttctcaagaagagggctctctccaggaaacctccaactccagtcctcctcttcttaagctaaagttcactttcatcatccctcagatctcagttcatgcctgccctcaggtccatgcaagccatgacctctcctccctccaggttccaggacttgctgtctataaagacctacattgcttcttcacaccccagcatccccctctaggtcagacttgatttacacatcccattttcaaggtatggaactgatgattcgtgcagtgaggctgatgyaaagccaggcatccaagaagctggatcctaattctg

SEQ ID NO: 253516 - DNA, 535 bp, Homo sapiens
ctctgcctcctgggttcaagcaattcttctgcctcagccttctgagtagctgggattacaggcggccaccaccatggccagctaatttttgtgtttttagtagaggcagagtttctccatgttggccaggctggtcttgaacccctaatctcaggtgatctgcccacctaggcctcccaaactgctaagattacaagtgtgagctaccacgctcagccctcatggttctttttatagccacacgctctcgcctctaacctgtacctcctccttaacctctgacaactgtgaatttattctccattttcataaaggtgtcatttcaagaatgttgtataaatgaaattatgcaatatgtaacttwctgtgactggattttatcaacatgattcccttaagattcattacattgttatatgtaccaacagctcattcatttttatcacttaatagtattctgcataagtaccaagggctaaccaactgcaccactggcgctcctatcactgaatggtattctatagtatgaatgtat

SEQ ID NO: 253517 - DNA, 552 bp, Homo sapiens
ctctgcagaactctcaggactccactgacacagctaaaaaccattaatgcagaaaatgaggccattgtgatcagctcaataaggccctgaagtctcttccattaattcctccctctctactgccctattaggatggggtggtttgactaagagctttatgatgggacttatttaggaggtaatcatctttctatgccagtgcctgatcctggttcatggacgaggagtttctagggattgggcagaatgtgaagacactgcctgacctgtcttcatcaactcttcaaagcaaggmaagtctttccctcctggtcctgaaggatgcataagccctttttagagctccataaaacaccagcagtttatgaactgtggtctcggaggctattgattgccatcatttcttgctcttcacatctgctctattcatagctatgccacacaacatgcgaaatattaggttgtgtcagagtagcaaaatcctctcaatgaaccaatactcaactgtccattgaatgcctaccatgttccatttccttaatgaataagtgg

SEQ ID NO: 253518 - DNA, 593 bp, Homo sapiens
catttcaaggtttaggaccagtctatactaaactatttcaacagacctgacacaataatagcaaatctaaatctaaactgagtatttctaaaatattcatatagatcctgtagaagtcccacaagargaatggaggttggaggtagtaggcaaccctcatagatgtggactgggtgctttgtaaagcaccaggtccccaaaaacgtggtcttggattcaaggtgaagttcatggaaggtgagtggggaacagtttttataaactagagaagacccaagtggacattcgattctatgaactggacaatcacagacacatgaagctctatgaggatgggagagcatttatctttctcatccttgtttccccagcacgtggcactgtgtctgcgcatagaaagttctcattaagtgtttgtcaagttcagggctggatagtaacattaatgaatacaccaaagagtgggagattttgattttgcttctaaattgaacatagtttttatcttggtgggtgaggggtctcatagcctagaatgttgaacagctacaacttggctccaaattgccaggactcaaagtagagaagagata

SEQ ID NO: 253519 - DNA, 604 bp, Homo sapiens
ttaacataatctaaatttttttctttttaacataatctaaatttaacaagcccattaaagtaaatgtttcagcaggcgacactgaactgattataatatttaataaatcctactccyaaatgagggcttttaaatgccagcgagaaaccaaagttgcatattcatcccttttgtgccaagatcttgtgggagtgttagacagggcaccccctttgtgctctatcaaagagggaaataattatgatcacctttaaaagagccgtttatagttcccaagtcacttgagactgatgcttgaattctgggatccagctttgtttgccacagcagagtaagatgccattccaatggagaggcaaaatcctactgatccaagaccctaagccatggccaaagatgtctggtttctacctggcttccgtattgaatttgtgacatttaatggttcccctagtttcgtgtactacatttgctcagctattcaataaaagggttggataaattaggattttgcttcgctcatctccacctttgtgattgctgttctagaatcacttctttgctaaatgtctgggagaagggaacacttcccataaaaaatgga

SEQ ID NO: 253520 - DNA, 604 bp, Homo sapiens
ttaacataatctaaatttttttctttttaacataatctaaatttaacaagcccattaaagtaaatgtttcagcaggcgacactgaactgattataatatttaataaatcctactcctaaatgagggcttttaaatgccagcgagaaaccaaagttgcayattcatcccttttgtgccaagatcttgtgggagtgttagacagggcaccccctttgtgctctatcaaagagggaaataattatgatcacctttaaaagagccgtttatagttcccaagtcacttgagactgatgcttgaattctgggatccagctttgtttgccacagcagagtaagatgccattccaatggagaggcaaaatcctactgatccaagaccctaagccatggccaaagatgtctggtttctacctggcttccgtattgaatttgtgacatttaatggttcccctagtttcgtgtactacatttgctcagctattcaataaaagggttggataaattaggattttgcttcgctcatctccacctttgtgattgctgttctagaatcacttctttgctaaatgtctgggagaagggaacacttcccataaaaaatgga

SEQ ID NO: 253521 - DNA, 542 bp, Homo sapiens
ctactctattacagtcaaaggatacacatcaaaatcagcaaaaaaaaaaaaaaaaaaaaaaaatacacataggtcagagtctaggaaaaaccagacctgagcttgcagctgtcctctctcagtggagtcattaattctcccagaaataatatgtgacaatacctgtgaagttgccaaccaggggagctcacctgagccttgttgtctggggtttttactaaagataagtcatgkaggcatgggccacccatatgactggccttagttactcagcatctattccacaacccccaacatgatgttgaattgatacagtatggcccaaagtccaggcatataataatgaccatttactgtaaatcacattgttagcataaatgatctgacatggctcaagatctcaggtatacaaagacattcttctgaggcaaagacgctcttaggatattccaaggacttaaaggactggctcctgatgacctctgggatgtgcagagtttgggcaactcaggtctgctgagttaataccttctgtgcaatgc

SEQ ID NO: 253522 - DNA, 592 bp, Homo sapiens
caggggctaaaaataagaccagaaaggttcattattacccatttcttgcctctgatttctaattgtagattcatcatcaagctctacaagatggcctttggcagctaaccaagctcacatcctcccaagttcaagtgcaaaagtgaagatagcatctcacccacaaaggttcaagtaattgtcatgggcctgaaggcctctgcctccaattaatcccatgcccatccctgaactaatggctgtggtcagagaatgggacgtactgatttcctcacccatgggtctgaaggttaagagaattaggtactcctccaaagaaacaaaatgcattcagggtatttttatcagaataggatgagagggtttgagatgggaatagcagagctccactacagtagtacttctgaaacattcatgtgcaaaagaagcacctgggagttggttcagacaaagcctctgattcattagatccgggatgaggcttggaattctgcatctgtaacaaactccagrtgattctgatactgctggtctatagtgtccacactttgagtactgtgacattatatcacatattccagaggttagctga

SEQ ID NO: 253523 - DNA, 558 bp, Homo sapiens
aggttgatataagatcttatctgtcatcaaataatgtctgatttcaatttttgttatcaaaatagcctcattcttcttaattggttttctaattaggaattggtttaaatttagacataccaataaaattatatgaacatataactacaatttttcatatttgtatggtaattatttttaaaatactactccaatgtaakaaatttttactttgcatatatcttctgcatatatttatacatttaagatgattttttaaccagtattcattttttaacatgaatattccatttagtcataatcagtctacatgtaaatttatatactgcttttttgcatataacattacataatattcttagtttataaaaatttaaactcaaaagactggattatgttactaaaagagaataataaatgtggtactgtcatataacacatttttagaatttttaagttctttaggtagatatctttgtgccctcaaatatattctaatattgacaattattaaaagcagactacaatctcaactaccagatatctctggggatttaa

SEQ ID NO: 253524 - DNA, 618 bp, Homo sapiens
tataaaacttattcctggtgggcataatgggaaaaatgttgtctcaaaagttactggagaaagtataaatttttatagtctttttggaaagcaaaatggcaacagctcttaaaattaaaagtacacatgctgttcaacccagcaattccacttctgggaatccaacccatagtaataaaagcatcaatatagtaggagacatataccaggatgttcgttgcaacattgcttgtaatagcaaaaataaatgccgatgacaaagacaggcttgaaaaatccatgtaatggaatagtttgaagccactttaaagaatgaattatagctgtaacagttagaaggatttctatgaggtattgttgaatcaagaacagaacggtacagaaatatatttgatataccattttgttcaagctaacaatgataaaaatgtgtatctatgcacaggtatgcataaatttgcaaatagttacatgataatgaagaaaagcagagaagaacttacaaccrttttgttagcacagttaattggttattggatttggaagtggggcaagaaaaacactgtaatagaaaaataaaactcaccacctgtgatatgatcccttatttgtttatta

SEQ ID NO: 253525 - DNA, 647 bp, Homo sapiens
gtctgtctgacttggctacaaattgtgggttccccatgaccctcttctcgggcttgataatttgctataacacctcacagaacccagggaaaacagcttactattagcagtttattattaaaattattatacagaatacaaatgaagtcagatgaagaggtacacagagcaaggtctggaagggtctcaagctcaggarcttctgtctccctagagttatgtacatgccaccctcatggcatggggatgtgttgaccaatctgaaagctcctgaactctgtagtttacggtttttgcacaggttccattatgtaggcatgatttattaaaccattggccactggtgactgaactcaatctccagcctccctcccctcagaagtcaagggatggggctgaaagttctaaccctctgatcacatggttggttctccccatgaccagcccccattctccatgagccaactcattagcataaacttgggtttattatgaaaggggctcattatgagtaaccaaaaatgctcctttcacccctgttactcaggaaattacaagagtttcagaagctccatgccaggagcttctatatatgaagaatatattcctttcttctatggggagaaaaacaaaatacatactcatta

SEQ ID NO: 253526 - DNA, 549 bp, Homo sapiens
ggggctccctttcctgtgagcagttttgaggtggaaaggagctgcaaagactcatgccaaagtacagactcatgtgtcgatattcttcatagatcagggcattttattaactgcaagacaagtacattcttaaataggtgrctgagcttgggttttttgtacactaccataaacacatgtattagagtgatgagcctctagttgttgtggctgagtcttgttgcttcagatgtaagtggtcagatacgcaagaatggcagcaaggacaccacatgtggacaccacaattgtcttttgaaccagttataacatctatccattctctcatgagttgaatggaatattttaagacatgtttgttttatatctgtatgcctggcatgattttaacttgttttaagatatcctttacttcttttagatttcacaacatgctcaatggatttacctaccatagataggtaaacactgttgacagagaagagtacctcatgcatgcttcaaacccaggagtgttttttgttttttttttgtttgtttttgactcct

SEQ ID NO: 253527 - DNA, 549 bp, Homo sapiens
ggggctccctttcctgtgagcagttttgaggtggaaaggagctgcaaagactcatgccaaagtacagactcatgtgtcgatattcttcatagatcagggcattttattaactgcaagacaagtacattcttaaataggtgactgagcttgggttttttgtacactaccataaacacatgtattagagtgatgagcctctagttgttgtggctgagtcttgttgcttcagatgtaagtggtcagatacgcaagaatggcagcaaggacaccacatgtggacaccacaattgtcttttgaaccagttataacatctatccattctctcatgagttgaatggaatattttaagacatgtttgttttatatctgtmtgcctggcatgattttaacttgttttaagatatcctttacttcttttagatttcacaacatgctcaatggatttacctaccatagataggtaaacactgttgacagagaagagtacctcatgcatgcttcaaacccaggagtgttttttgttttttttttgtttgtttttgactcct

SEQ ID NO: 253528 - DNA, 567 bp, Homo sapiens
tgtgtgtatacgtgtgcgtgtgtgtataatcatatatgtaatgtttttaaagttcactttctgaaaggagagtctcaatttctattgacaccaagagtctgagtgtatgcccctttatttaccatctcaacaacaacagactaatttgtatgttttataaaatgtattttggtagacaaatgcagtatgtgtggtactcatttgtttcaatggatttctttggattccattgagaaagaatcctttttaaatacggtgtgttacagcttatcttctcctaatgttgatgatgataaaaaccacaatagccataacaaatagggcttacccaaggcttactaacatacaacaggctttatgttaaattcgtcttaggtctttttaggcccartgcggtaggtacaatgattaactactgtttacaaatctagaaactgcagtaaagacaagttaaataactcaaaatgtgagcaagggcagagctggtgcaggacctcctgtatgtctggccaaagctcataatctagtatacatgaataaagccataaaaggtttggggcagagctc

SEQ ID NO: 253529 - DNA, 610 bp, Homo sapiens
agatgaataaaatacaaaacaaacacctcatttatttgagggtagaaaagagccatggaggcagccaagacccaatgagycaaggtcctggagagttgggaacctttagagagaagctaaattttctacacttactcatctctggaggtatttgaagtattacaatagcacaaaggaagaggtcaagaactggagcagaaagtgacagctaaatagacctcttgcagtctcttgggttgagattaatgaaaagtggggttcaaagttaccaaagtgattagcatttgagggaccaagatgtcagtgagaaagaaggctcagagaaataggcatggaactataggccatgcttcccccagaggcatttgccaacctataaacgtcacaggggcaatatcaggaaatgatatgtacattttaagaggccgagaatctaagcacatattttgacaagttcacagtgctgcaaaaccaaaattgaagttcagggtcctgcaagctactcaggaatctctcatagaaactcttgaagggctgtatcctagggttaaaagtaaactagaaataggacctgtctgaaactcagtcttaaattagcttaacccctgac

SEQ ID NO: 253530 - DNA, 610 bp, Homo sapiens
agatgaataaaatacaaaacaaacacctcatttatttgagggtagaaaagagccatggaggcagccaagacccaatgagccaaggtcctggagagttgggaacctttagagagaagctaaattttctacacttactcatctctggaggtatttgaagtattacaatagcacaaaggaagaggtcaagaactggagcagaaagtgacagctaaatagacctcttgcagtctcttgggttgagattaatgaaaagtggggttcaaagttaccaaagtgattagcatttgagggaccaagatgtcagtgagaaagaaggctcagagaaataggcatggaactataggccatgcttcccccagaggcatttgccaacctataaacgtcacaggggcaatatcaggaaatgatatgtacattttaagaggccgagaatctaagcacatattttgacaagttcacagtgctgcaaaacmaaaattgaagttcagggtcctgcaagctactcaggaatctctcatagaaactcttgaagggctgtatcctagggttaaaagtaaactagaaataggacctgtctgaaactcagtcttaaattagcttaacccctgac

SEQ ID NO: 253531 - DNA, 613 bp, Homo sapiens
ctagggttaaaagtaaactagaaataggacctgtctgaaactcagtcttaaattagcttaacccctgactgaattaacatgatcaaccacaatctaactgccttccagtggctgaaatatatactctggagaaaaataccatcatctagagactcaacatcttttcttttctttctttcttttttttttttttgagaccgagtcttgctctgttaccaagctggagtgcagtggcaccatctcggctcactgcaacctctgcctctctggttcaagcgattctcctgcctcagcctcccgagtagctgggactacaggcacccgccaccacacccagctaatttttgtatttttagtagagacgaggtttcaccatgttagccaggatggtctcaatctcttgacctcatgatcygcccacctcggcttcccaaaatgctgggattacagggcgtcagccactgcacttggcctcaacatcttttcaaatgcaatgtccagcattcagttagaaattactaagcatatgaagaaatgaaacgaagaagaactctagtagaaacaggctcacacatgatgcagatattgaagatggaacagaagcttgaaaata

SEQ ID NO: 253532 - DNA, 593 bp, Homo sapiens
catggaagccaaaactgatgaaccactagcttttctgctctctggctaatttcaaccatgtacagcttcatggcttatttctgacaattttctaggctaggatataaaaactaaatcataagctatttggggagtcatttaattaccttttatgtagtctcagaagcattctagattatattatggttcttggacatattacaaaatattcatcccaagtggtatctcaaaaagattaaaatctctatttcagtagcatcccttgatcctgactaacatttttcattagggcatgttacagcttaacatacgcacatcaaccaacatgcatgctgcgccaagactgtgccttcttaaaatagggcttctaacatgaagattaacatagacaacaactgcacactccttgtatgcctttcacccgatttggctacytgatgtaaatttttccatggtaccatctttgccagggaaacacatgatgatgatgatgttttaacctcgcgctaaaggtggcttttgaatctccctttgaggctgtcttctatcttgagttgtgacaaggagacaacacaactaactgtggtttgcac

SEQ ID NO: 253533 - DNA, 558 bp, Homo sapiens
ggaccattaggggccatccacagacacccatccctgccagacttcctttgcagagcttccagctcctatctgaactacagccgcagaggtaaaatgccctttctctaatctgcatgcaaaatggattttagcgactggattttattgagaaacagactccctcttcccccacccccaacatttgaaaacatattgtcctctttactgtagttcattttgctttccgaggtgattaatgaattaaagatgcagcktatttattcttttgcctgattatcattctgtaataaatctaagctctggagtctgtcgatacaagaaggccaacctgcctctttggaaaataaagatttgtacattaagcttaactttcagctctgcgacgcaggagaaaattcacctttagagccttataaaaataaatagggaactcaaagagacattagctggcaggtggaagattccatttctgaggactagaaggtattttgcacacatctccctagacataggaaagcctgttgccctgtagatgggatttacttattggaaatgcag

SEQ ID NO: 253534 - DNA, 537 bp, Homo sapiens
ggaaatcaatgcccaaaacaggagtgaacagctcccataataaaactgaagagggactactgctattaataatagttaatcattaataataatgataatgatcataataatgacagtagttgggctgcttactgagcacattcgaagcatcgtggtgagagcttgcagacattttattgtgtaattctcataataatccatttattgtcaccatttcacagatgaggatactgaggctgagaaggtggtcacatcactggaaagtaatggggagggagttagaactcctgtctgtaaagtcttttaacaaccacatgggtttaggttaaggataaactgtgagctccacacatagtcrctccctcattccagagttatttattgcatgttgaccccatcgctgggaactaaggaatagatggaaagaacacaaagatgaattagactcagtggtttctccagcattgcaaatgaggcacctgtgaggaacagctggcagctggtgtggtgaagaagctgtgagaggttgggagctgt

SEQ ID NO: 253535 - DNA, 612 bp, Homo sapiens
ccacgagtctcaggctatgatctcacctcctttgtccaagcacatcccaaagaacatgtcacccagcagcgtttccagtgacagcaacacaatacaggcatttcagtagcacttggaataaatgttattttcattccaaatgcagtggtgggaatcagagaaacaatggccttttcctgcccgatgatacaagttaaaaatattgcctgcttctttgctaactcccatcttagccctgcacatttaaaaatacacccgtcactggctctgcatttgaaaatgtattttgcatctgataattatgatgcatttaaagggcaaaattagaaagcacaaaattaggctgccagacttaattagcccattcttttttctaatgggtggaattcgggcaaccgtgggctctaggggcacaaagacccctaatgggsgtagtggaaattcacccacatctctataaactcagtctctcagcgaaccagatcagggggattaactgcacaatgagaaatgtgagacacacaaaacaagacaattacaccctcttgtcctcaagaaaacgatgtgagtgcaattacagagtaatctatcaacagataacagaggaccacg

SEQ ID NO: 253536 - DNA, 563 bp, Homo sapiens
tgaaaaatggatttgattccatttttattctccaagtttgaccatagtaactcaagatagggacagccagcgagggtaggagcgacaggaataarggtttgagctcaacatgcagtggaatcttgtaacaattgcagcttttatgcagcactattcaatagaaaaataacatgaggcatacataacaattgtgtagcagccatattacaaaacgtaaaaagaaacaggtgaaattaattttaataatatctgttatttaacctaatccttccaaaatgttgtctctttgacatgtgatcggtattaaaattattaatgagagagtttacattcattttctttttgtagtcagttctaacctaatgtgtgctttacatctttagcacacctgcatccagaccagccaccactgttcctgcactccgtgggcagtggccacaggtggcttggagctccagtattagacagcgaagcgttagtgaatcagccagcatgaaacaaacgattcctcattctaatcagttgctctgttctgttactgactttgggatttaatgacattg

SEQ ID NO: 253537 - DNA, 563 bp, Homo sapiens
tgaaaaatggatttgattccatttttattctccaagtttgaccatagtaactcaagatagggacagccagcgagggtaggagcgacaggaataaaggtttgagctcaacatgcagtggaatcttgtaacaattgcagcttttrtgcagcactattcaatagaaaaataacatgaggcatacataacaattgtgtagcagccatattacaaaacgtaaaaagaaacaggtgaaattaattttaataatatctgttatttaacctaatccttccaaaatgttgtctctttgacatgtgatcggtattaaaattattaatgagagagtttacattcattttctttttgtagtcagttctaacctaatgtgtgctttacatctttagcacacctgcatccagaccagccaccactgttcctgcactccgtgggcagtggccacaggtggcttggagctccagtattagacagcgaagcgttagtgaatcagccagcatgaaacaaacgattcctcattctaatcagttgctctgttctgttactgactttgggatttaatgacattg

SEQ ID NO: 253538 - DNA, 494 bp, Homo sapiens
taaagaaatgagaccacctgggagascacatagcttaaggtgctaagacattcaataataggtagtgattgataaattattggcctcacggaatgcctgcattccacagattttagattcagcaaattctcagtttgagcctagactcttccacccatgcgctgaaaacttttctgcaagtttcttgctctctctaaatgtcaggcccctcatcagaatgaaaataacaccactactgaactcacagagttgctgggtgaatagtcataagaatttatatcaggcatggtgaatgcttagagatggccggcttcttctcgtgctccaactttttctctaaaatggagaacatcttatggaaagaaaaagtagctactttccccctaggggaaagcagtaggccaggagaatggacagaggcaatgaatttgtaactgttaagagaaaggttcattcccaataacacaggtcacataatggtctttcagagaaag

SEQ ID NO: 253539 - DNA, 494 bp, Homo sapiens
taaagaaatgagaccacctgggagaccacatagcttaaggtgctaagacattcaataataggtagtgattgataaattattggcstcacggaatgcctgcattccacagattttagattcagcaaattctcagtttgagcctagactcttccacccatgcgctgaaaacttttctgcaagtttcttgctctctctaaatgtcaggcccctcatcagaatgaaaataacaccactactgaactcacagagttgctgggtgaatagtcataagaatttatatcaggcatggtgaatgcttagagatggccggcttcttctcgtgctccaactttttctctaaaatggagaacatcttatggaaagaaaaagtagctactttccccctaggggaaagcagtaggccaggagaatggacagaggcaatgaatttgtaactgttaagagaaaggttcattcccaataacacaggtcacataatggtctttcagagaaag

SEQ ID NO: 253540 - DNA, 494 bp, Homo sapiens
taaagaaatgagaccacctgggagaccacatagcttaaggtgctaagacattcaataataggtagtgattgataaattattggcctcacggaatgcctgcattccacagattttagattcagcarattctcagtttgagcctagactcttccacccatgcgctgaaaacttttctgcaagtttcttgctctctctaaatgtcaggcccctcatcagaatgaaaataacaccactactgaactcacagagttgctgggtgaatagtcataagaatttatatcaggcatggtgaatgcttagagatggccggcttcttctcgtgctccaactttttctctaaaatggagaacatcttatggaaagaaaaagtagctactttccccctaggggaaagcagtaggccaggagaatggacagaggcaatgaatttgtaactgttaagagaaaggttcattcccaataacacaggtcacataatggtctttcagagaaag

SEQ ID NO: 253541 - DNA, 494 bp, Homo sapiens
taaagaaatgagaccacctgggagaccacatagcttaaggtgctaagacattcaataataggtagtgattgataaattattggcctcacggaatgcctgcattccacagattttagattcagcaaattctcagtttgagcctagactcttccacccatgcgctgaaaacttttctgcaagtttcttgctctctctaaatgtcaggcccctcatcagaatgaaaataacaccactactgaactcacagagttgctgggtgaatagtcataagaatttatatcaggcatggtgaatgcttagagatggccggcttcttctcgtgctccaactttttctctaaaatggagaacatcttatggaaakaaaaagtagctactttccccctaggggaaagcagtaggccaggagaatggacagaggcaatgaatttgtaactgttaagagaaaggttcattcccaataacacaggtcacataatggtctttcagagaaag

SEQ ID NO: 253542 - DNA, 608 bp, Homo sapiens
agtataaaattatgaattagattaataatcagcaaattcagggtagttgcttctgagaagagactgagaaaaacagaatgagaaattcagtggatttcaactgtctgtaataatgaatcatttaggaaaaaaatgaatgtgaatatggcagagaaaaacattttaacaaagttgagtgatgaatgcactggctaagttatatcattgtctgcatttttctatatactttaaagatttcataatatgacaaatatttttaaagcttataactaatacctattgcaactgcagttaaaggaataaaacctaactgttcacaaatatgccaaatgaaaagcacattggtaaaaaaaaaatagtaataataaataaaggtctggaagaggagtaacttcccagggagggaactgctaaatggaaaagttgagtttttcttcttgactggctgatatcttctggaattttcttgtattaagtgtcaagccatttgtastcggtaccatgatgtggggaaacctggagccacaggcatccatgcattctgcatttcccccaccggcaccacaaccaaacacaaaacaaaaacatttggaccatgaccagcaaag

SEQ ID NO: 253543 - DNA, 547 bp, Homo sapiens
aagagttccatcaccacaagcatgccttgggtgcctttttttaaccctcctccctgacccatccctaaccctggcaaccattaatctgtgttctgtttctataattttctcactttaagaattctatatcaatggaattgtagagtatgtattatttcagaattgactacgttttcacttagcatcattatctggattcatcsaagtcgttgcgtgtatccatagctcatatctttttattgctgagtagtactccatactatggatgtaccacagtttatttaaccattcacttgctgaagaacatctgggttacttctggtttggggctcttttgaatgcagttgttttgaatatccacgttaggtttttgtgtaaacatatattttcatttttctgggataaatatcccagagaataatggtgcggtcatatgacaattacatagttaattgtataagaaattgccagactgcttttcagaatggcatggccgcgttacattcccaccagaaatgtgtcagtgatccagtttctctgcatgctc

SEQ ID NO: 253544 - DNA, 475 bp, Homo sapiens
gacatccactgttatttttctggaagtgaggaacaaaagataggagcaagagaggaggagggagagttttgagataatgaaatccttttaatgacagagccatgccgttaacctaattaaactgtaaagtggttaaaaaaaaaagtccaggtactaaatggaaatgaagaaataaatcagcggagacagcagcagttctgggaaaccttctgaattcygaatactctgacattgcaatgtccaattctcaccgttgtcctccggcccccctcggccttgtgcaggggtcctttaaactgacctgtccagtaaggtttgatttacgatgtccatatcaggtctccagttcctctgggaatgtgtgttatgcagctcatatatttcaaaagacagaccagtcagttggatatgagggcagagcactggctacagggtcaggaggaatgtgctctcctggccctactgctaaccagat

SEQ ID NO: 253545 - DNA, 677 bp, Homo sapiens
ccttgttcatattgatacagacctctggcacctctttcattagatttattcttaagcatttgatgtttatgttattgtaaatgatattttttaattgatttaaatagtataggaataaatacctcagtagccatgaaatgagaaccctggattttcacaagagtatacatgaccttcaaacagaatggagagtggactgttgaattcagaacagcacatgttgttcagaattgcagtttatcttgataagaaaattaaacaaagacattcacatgattacacctatttctagaatttctcctttttttcacagtcaccaggaccaggggctacagggtcccayggtgcctggaacataggcattgcttcccagttgcactgccttacggtcagcaattctcttctccaaaactgagccactggcagacacacatattgatattttgtaccatacacattgatattttaagctttttaagagcttcttaaaagtaggatcatccctgacagtttgtaaatgaggaacttccaagatccaggctgctaaatcaaatattatcctcagaccagcttcctgtcagcaaagacagccaaccaaggtgggaaacccacacagcctgtcaaaacttacaaagaaatgctgcctttcccagcatgaaactggtcagatgtcaaag

SEQ ID NO: 253546 - DNA, 575 bp, Homo sapiens
taaggaacttgttcaaggtaacacagctagcaaagagaggagccaggattcaaacccaggccaagcccttgaccaccctggggtgctacctctcccacatgacaaactacacagaattctcaagactccctcacatgtgctgggcacagtggctcatgcctataatcccagcacttgggaggacatgctggaggattgcttgaagccaagagttcaaggtgagcctgggcaacatagggagatccatctctacaaaaataaaaaaataagaagttagccaggcatagtggtatgcacctatagttccagctactcaggggactgagtggggaggatcacttgagcctgggagaggctgcagtgagctctgattgcgccactgtactccagcctgggcaacagatcaagaccctgtctsaaaaataaaataaaaaagattccctcacataatcagcatcaagggctcaccattagagtcacttttaagggtcatctggagacagatctttcactgggttaaggcatttcttacctggaagggataacaaacttgctagctaaccacattagccagg

SEQ ID NO: 253547 - DNA, 536 bp, Homo sapiens
gtcaataggtagtacatccctactacagaatacaaggtagtaagtaaaataaattgtcaagatgtgcagtttaggctgggcacggtggctcacgcctgtaatcctagcactttgggaggctgaggtgagtggatcacaygaggtcaggcattcaagaccagcctggctaacacggcgaaaccatgtctctactaaaaacacaaaaactggccgggcatggtggcgcgtgactgtagtcccagatactctggaggctgagtcaggagaatcacttgaacctgggagatggaggcctcagtgagccaagattgcaccactatctcaaaaaaaaaatgtgcattttgaaagtaagttttaaaaccacattgataaccacttaggtaaaaataacctcctgcccatttatatatgtaactgtatatagcacaagccccgagaggattctcaacacatgattcaagtaattacctaagaagaggaggagaatgatggggaagaggttgaaggcagactttcatatttaatctccatacttc

SEQ ID NO: 253548 - DNA, 536 bp, Homo sapiens
gtcaataggtagtacatccctactacagaatacaaggtagtaagtaaaataaattgtcaagatgtgcagtttaggctgggcacggtggctcacgcctgtaatcctagcactttgggaggctgaggtgagtggatcacacgaggtcaggcattcaagaccagcctggctaacacggcraaaccatgtctctactaaaaacacaaaaactggccgggcatggtggcgcgtgactgtagtcccagatactctggaggctgagtcaggagaatcacttgaacctgggagatggaggcctcagtgagccaagattgcaccactatctcaaaaaaaaaatgtgcattttgaaagtaagttttaaaaccacattgataaccacttaggtaaaaataacctcctgcccatttatatatgtaactgtatatagcacaagccccgagaggattctcaacacatgattcaagtaattacctaagaagaggaggagaatgatggggaagaggttgaaggcagactttcatatttaatctccatacttc

SEQ ID NO: 253549 - DNA, 352 bp, Homo sapiens
tcagttcagccacttatttactatgaccttgagtaagttttgtattaccctggacatcagtttctgcatcttaaaaaaaaatactaggataagaatgtgctataatataaacctcttaccctaatggtggtcataggtttggtgatcaataaattatagttatttttatcattactattaataataaataaacgtagaaaaaccttttgtactgcttggaattctctctgtatgytatgctgtatctttcagcactaaaatactcattagctcatgtggaaataaaaaagaaaggaagaagaaacaaggctaaatcatgtaataagagaatcagggggaacataagtgctcg

SEQ ID NO: 253550 - DNA, 661 bp, Homo sapiens
ttcagttcaacaaaagttggaatagcaatgatgtgagcatttaaaataaaagcagcatggaaaccatataatrtattggtatctataatattttcttccttcttttttgacaggccataatatgcatgtgtatattcagagaacatctttgtcatcatcatcatcaccatcatcaccatcattaatgtaaatctgcctgataataaaacaattttcttctccatcacacaacaaatgtttagaagtatgtgattgataactttgtgttgcagaattcttctacagaaaaggcaaactctgtcagtgttgtgtatcttaagagaagattgttgcccctgcattaagtgtgtaagcagtacacacacacacacacacatgaattttttcctaagaattaaacctagtttatttccattgtcaaccttcattattccaccatggtagcagaaacttaatctcagtctttttggggcttttctttttaatttttggcaggaaggctggatgtctgagtctcaactcaggagagctgtgcatagcttagtttagggctaggaagacagatggcccttattctccagtttgtgcacatagatccctattcacatatgccagaatattcctcccctttcagtactgaaggctttcttcaatacatgag

SEQ ID NO: 253551 - DNA, 539 bp, Homo sapiens
ttatatcaactatgacaaggaaagtatcatctgaaaaccgtttagagatggacataggataattactgatatcaatgccatattttatgcaaagaatgtaaatgtccatacctatatcttttcagaaatacctttccaaagcccatatatccaaagcccatatatccaaagccatatatcacctttaatcaccatatatacatatacatatacatatatacgtatcaccatatatacatatacatatatatgtatatgtatatatgtatatatgtgtgtatatatatatatatgagagagagaaagagaggagaaaagagcaagagtcttattaacataataccattaacaagcatgtactgaataattcttatatgtcagtaacagtgcccatcactttccaagaagtagctcctttgatactcttcagaaactttgaagtgaaaattttttcaaattaagaaatagagttacttcagcctttcagaggtgcattttcattctgaaaaggyaattagatgacatgcattaaagaccag

SEQ ID NO: 253552 - DNA, 582 bp, Homo sapiens
tggtaatctagataaaaagaaagacccaatgatatgctgtcttcaagagacttatctcatgttcagtgacacctataggctcaaaataaagagatggaggaaaatcaaccaaacaaatggaaatccaaagaagcaggagttgcagtcctaattttacacaaagcagactttaaaccaaagcatatcaaaaaagacaaagggtttacatacagaatacattacataatagtaaagggttaaaatmaacaagaagacttcattatcctaaatgtatatgcactcaacacaggcgcattcagaatcataaagcaagttcttagagacctacaaacagacttgactcccatacaatagtactgggaaacttcaacaccccacttacagtattagacaggtcatcaaggcagaaaattaacaaagatatcaaacctgaattcaacattggaccaaactgatcttatagaccactacagaactcttcaccctaaaacagaatatacattcttctcatcatcacatgggacatactttaaaatcagccatataattgtacataaaaaaaatccttagcaaatgcaaaaa

SEQ ID NO: 253553 - DNA, 454 bp, Homo sapiens
ggtgtgactgagttgactgagctgttacattaccacatgtaccaaatcagatccctcaatgctgcttgatgtaccttcctttgtgatcctggccacctccctttttatggaaacataactgtaaatatactaaagcttcagtctgtgggttttttttttttcctttattttgtgtctttctcttgccgctaaatctgtcttatgtacagaatttctgccgtttttttttcccacactaatttaattcctttcccccactatttgactatgatgcctttcttccctctagagcaagtggttcttctgaaatgtaacagattcctttaaataaaacatcaagtatttgtttataatttgttttwaaaaaaagaagaccaacaatatactactctaaagtgagaaagctggggaggtaaacacacatttaaaataaatatttggtttcaaataatgt

SEQ ID NO: 253554 - DNA, 414 bp, Homo sapiens
tttcaaactgcagtatgtaggttcctgagtgtctgcatctatatttaaagggtcctccagttttccacataatgtgcagacttctattagagggcattaattttacattaaggactagggggagcttctggatgaccacattatcacatcagcccctgcaggagactgatgcgatcattggcagagagggtctggcttgaacgtcaaataaagtgtctttcacactgaatggctttggcatctgtggtgtttacatcttcttgatggtcctcattttttcctgtttgaaaagcacagttgtaargaacattgtcttcggagtcagataggtcacagattttatctgtgtgaaactgaccaagtttttaagttctttttacctgtttcctcttctacaaatggggggcattcata

SEQ ID NO: 253555 - DNA, 571 bp, Homo sapiens
tctttttctcagtttcttctatgttaaggtgaagtaaaattcaagtttattgggcaaaattagctaccaatgtggttaagcaagtctaattagaaatctaaatgcaattaattttgtaaattgaaaatgttcttctgtactgctctccaaaattctttttttcaagggtcattcatctttatttgactttcagaccatattatatttatattttaaatatatatatatatatatatatatgtattacatataaagtaaaaagtgtaattgtcctaaaaggatcaacttttgcctgaggaatgtagcagtatttggtgctgttcaaagaccagaaatggctacttgctgctgtcaatcactgatgcttctatattaactatagttgcaggatttttttttaatttcttcttctgtcattttcaccttttgatattcttgtragccaccctatccataactgtaagccatcctatccatatctgggatttacagcacaaactgaatttcctttgtcatccagagcaccatataggaatgaattaagaatttgatttaacaaaatattccagga

SEQ ID NO: 253556 - DNA, 614 bp, Homo sapiens
acacgttttatattcttaatggatgaatatgaggttagaatataacttactgttaatatctgtgaaaatatctggatgagaaagtagtttacatttttatatgtttcataatttatttttaaataaatatggaacaaaaataacatgaaaattccatgtacctattgacaagtgtaatagatgataacattttgctgggactttttgttagttcttattgattctcatattacaagtattacctctaggttttcttttcattttcctgaagtaacccttttagtatttccttcaacaaagatatatgaatgttaaacttttcattcactgcctaaaaaatatgtcacccttgcataatagtttacctgggtaaagaatttcatgtaggtggttagttttgctgttaactctgaaagtaacagtctgttatgtttctttattgagaakacaactgttatttataattgttgaacatttttctcaggtaatcttaaaagcaaccagaaagaaaggatatatattccccttatctctgatatcttgtagttttactatgatatgccttgtgattttttttttaattctgactgggatctacagtgattctacacctg

SEQ ID NO: 253557 - DNA, 546 bp, Homo sapiens
aacccacctaacgaaagaaaaagatttcagagatacttgaatatatattaatttaagaatctgatgttagtcaatagaaagttattccagatgtcatatttcttaggactgcgttaacattctgttttctcccaccattcaaatacctactctccaaattccttggtaaaataattggattatagaataacttcatagttctgtaaaataatttaattgtcataacacctctagtttctctgtgaaaccaaaggtttaatttgcttctgttgtagcctaatttctgcttgactttttaaggtactgatagtcaatggagaaaaagtaggcgacatgttaaaatgtcatcraagtagcattctattttaaacaaagacatatattctaattccaatgacaacgataaagcactccagggtgtgctttaatgggccattagttttcttctcgggtggttgaaattctttggcctatagccttatgctcccctgagtctctgggcctctattagacccattaaaaacaccctggaatgcgttttttgtc

SEQ ID NO: 253558 - DNA, 521 bp, Homo sapiens
agtcaccttggaaagtaagtcatgatatacagggttaaataaaacccatctgatgagaatttatggtttgtagggcatggcttcccagactccttagataggaatttgggcaagataaaaaaaaatcatagcttaatcctcaatatgataattatgtttctaatgttttgagaaaactccacactatgttttatagtagctgtactattttacattcccaccagcagtgaacaagggtgacaatttttttacattttcaacaacacttgttattttctgcttttgtattagaggccattctaaaggttatggggtgatttttcattgcagttttgatttgtatttctctaataataagttattcttagcatcctttcatatgtccgttggtaatttgtacattttctttaaagaaatattcattcaagtcctttatgcattttyaaattagattatttttgttgtggctggtgagttgtagttttttatatattttggatattaacccctcatcaggtaca

SEQ ID NO: 253559 - DNA, 552 bp, Homo sapiens
acaggcatatgccaccacaccctgctactttttgtattttcagtagagatgggatttcaccatggtggccaggcktgtctctcttagctcctgacctcaagtgatctgccagcctcggcctcccaaagggctgggattacaggcatgaacctctgtgcccagcccagttgtggactttcgatatatgaccttaattatgttgaggtagcttccttatatttaaaatgagttaaatattttcattatgaaagttttttaattttgtttaatgctttttcttcatcaaatgagataattcagtattcattcatcattctgttaatgtggtgtattacactggatgttttttctatgttgaaccatccttgcattccaagaataaatcctacttggacatggtgcataattcttttactctgctgtagaattcaatctgcttgtattttattgaggattttgcatcaatacttatcaggtaccttagtctatagttttcttatagtatctttttctagctttggtatcagggcaatgctggtcacataaaatgag

SEQ ID NO: 253560 - DNA, 552 bp, Homo sapiens
acaggcatatgccaccacaccctgctactttttgtattttcagtagagatgggatttcaccatggtggccaggcttgtctctcttagctcctgrcctcaagtgatctgccagcctcggcctcccaaagggctgggattacaggcatgaacctctgtgcccagcccagttgtggactttcgatatatgaccttaattatgttgaggtagcttccttatatttaaaatgagttaaatattttcattatgaaagttttttaattttgtttaatgctttttcttcatcaaatgagataattcagtattcattcatcattctgttaatgtggtgtattacactggatgttttttctatgttgaaccatccttgcattccaagaataaatcctacttggacatggtgcataattcttttactctgctgtagaattcaatctgcttgtattttattgaggattttgcatcaatacttatcaggtaccttagtctatagttttcttatagtatctttttctagctttggtatcagggcaatgctggtcacataaaatgag

SEQ ID NO: 253561 - DNA, 631 bp, Homo sapiens
atttattgtttgttttctttatgctatttatttctagttacataacactcattgaaaaaaaaatactttgtatgatttcaatcctcttaaatcattaagatttgttttgctacctaccttgtgttctagattgtagaatgttccatgtgtggttttatatgtctattaggtctaattgctctgtagcatggttcaagttctctgtttccttactgatcttcrgtcttgtcgttctatccataactgaaaatgggatattcctattactatgttgccaacctttctctttcattctgtcaatttgtgcttaatatatttgagattattaatgttatgtgcatatatatttataattattatgtgtacctggtgcattgacccttttatgttcatataacgttttacctgtgtcttttgtgacactttttgttttaaagtctactttgcctaataaaagtataggtacttctgctctccttaggttcctctttgcaggaaatatctttttccaattttcatttttagcctattgtgttcttcagtctaacatagatcccttgtacataacatataattggattctggttttttaaaatattcccccaatctatgtctttagatgagagagtgt

SEQ ID NO: 253562 - DNA, 617 bp, Homo sapiens
aagtggtatttatttcctatttaagagtaaatgacagcttataaaaagttttgctaatgctaagatcttagaaacatcatcattcaagcatttatttctgtaccyttaatatgatgtttcttttcatgaatccgattcaagatcatataacaaccttaaccaattcattagtaaattctaaaaggcctcttcttgttccattgtacattgtgtaacaccattacctacacaatttttccagaatttctccaactggaaacattgttctatgactggattgtatattctcagtgcttccctgactctcacttctaggatttcttgaaaaggggtatacagagtcagataaattctgaacatgaagttatttttagctgttttcctctgatgattcatgcaatttttgtcttgccttcccatccctgctgttttctaacaaggctatatttgccctatcaaaaaagtccaggacccaaaagggctgaagagtctggaaacacatatcataaaccttcacatctgcaaaaaaataaacaagccaagcaacccaaactcacgctaaagtaaaagccaaagccaaaaccacaagccagtacaaccaaacaaatgtaaacttc

SEQ ID NO: 253563 - DNA, 617 bp, Homo sapiens
aagtggtatttatttcctatttaagagtaaatgacagcttataaaaagttttgctaatgctaagatcttagaaacatcatcattcaagcatttatttctgtacccttaatatgatgtttcttttcatgaatccgattcaagatcatataacaaccttaaccaattcattagtaaattctaaaaggcctcttcttgttccattstacattgtgtaacaccattacctacacaatttttccagaatttctccaactggaaacattgttctatgactggattgtatattctcagtgcttccctgactctcacttctaggatttcttgaaaaggggtatacagagtcagataaattctgaacatgaagttatttttagctgttttcctctgatgattcatgcaatttttgtcttgccttcccatccctgctgttttctaacaaggctatatttgccctatcaaaaaagtccaggacccaaaagggctgaagagtctggaaacacatatcataaaccttcacatctgcaaaaaaataaacaagccaagcaacccaaactcacgctaaagtaaaagccaaagccaaaaccacaagccagtacaaccaaacaaatgtaaacttc

SEQ ID NO: 253564 - DNA, 576 bp, Homo sapiens
atttttaaaagactgtcttctggggacactctaaggagacagtggttttctagcagcattttatgaaggattaggaaaagaagctttgagagaacaaatcattaaggaactttcattgatctcaaagagtctctttttcaacagatgtgcaggaaaatgaaatgtttctatttctcccccagagagtttggtcatttttcaggatgagctcctcgtaatttcatgcatttgacacttgggtaggaaaaaataaagaagtacccacccaatacagacatatttgataaaacctttctcttaaagtatagtactattctgattatctacaatgaaaaagaaagaaaaacatttcactctcttcactgtcatctagaatgtgatgacmagttcaaaataagcattcccctaattagaaataggtaaattatctgaattatctgggaaagtattggaagacagcaagaaaaacttgaggcaaggggatttggcatgcacatctgtaggaagctatgtaacattttttttttttttttttggcaggaaaggatgcttactagaacagagcaattagtgacc

SEQ ID NO: 253565 - DNA, 551 bp, Homo sapiens
ttctcactcattgctgtatagcagtcaccactgatacagtctagttttttccaaagcatgtataattgggcaaatcatctaaacccccacaagcrggcaattattcaactgcactgacgcagaatcactgggtccagtacttcattagaatataccataatcccttgttcttgtcttaaccttcgctgtgaaaaatctaattcatccaaaactgacacagtgtcctgttggttatgcaaacagtggcaatgcaggagacggagtttcaagccagtcttctatctccagtcccatgtgtagggctcttatccaaatctttaatagagcctgtgagttctaataattattcaactaacacgtataagctccctttgtgctcctttttgaaaatgtgcttatctttttctcttacagaaaagcgagggagacactgacagtgagattgaatggcactgccaccaccagaggaataactggaaaaggaagcaggagggcacttgggtacaagggaaatgataagaaaagtataaagccacaggagcagaatgtta

SEQ ID NO: 253566 - DNA, 551 bp, Homo sapiens
ttctcactcattgctgtatagcagtcaccactgatacagtctagttttttccaaagcatgtataattgggcaaatcatctaaacccccacaagcaggcaattattcaactgcaytgacgcagaatcactgggtccagtacttcattagaatataccataatcccttgttcttgtcttaaccttcgctgtgaaaaatctaattcatccaaaactgacacagtgtcctgttggttatgcaaacagtggcaatgcaggagacggagtttcaagccagtcttctatctccagtcccatgtgtagggctcttatccaaatctttaatagagcctgtgagttctaataattattcaactaacacgtataagctccctttgtgctcctttttgaaaatgtgcttatctttttctcttacagaaaagcgagggagacactgacagtgagattgaatggcactgccaccaccagaggaataactggaaaaggaagcaggagggcacttgggtacaagggaaatgataagaaaagtataaagccacaggagcagaatgtta

SEQ ID NO: 253567 - DNA, 551 bp, Homo sapiens
ttctcactcattgctgtatagcagtcaccactgatacagtctagttttttccaaagcatgtataattgggcaaatcatctaaacccccacaagcaggcaattattcaactgcactgacgcagaatcactgggtccagtacttcattagaatataccataatcccttgttcttgtcttaaccttcgctgtgaaaaatctaattcatccaaaactgacacagtgtcctgttggttatgcaaacagtggcaatgcaggagacggagtttcaagccagtcttcyatctccagtcccatgtgtagggctcttatccaaatctttaatagagcctgtgagttctaataattattcaactaacacgtataagctccctttgtgctcctttttgaaaatgtgcttatctttttctcttacagaaaagcgagggagacactgacagtgagattgaatggcactgccaccaccagaggaataactggaaaaggaagcaggagggcacttgggtacaagggaaatgataagaaaagtataaagccacaggagcagaatgtta

SEQ ID NO: 253568 - DNA, 534 bp, Homo sapiens
agcttgcaggagaattattccaaggagaagaaccaagatctcagccacaggacagagatcagagttcaggaaggaaggcttaagggggagtgccagacaggctagagggtcaactttgacaaaagagacaccataggtatctgaaggccaaggagaataatttgtttttaaaataaaagagtggcaaggaaatcaaagagccctcaaggatctctggctgtttatgaacttcccctgaatatcatctctgtmcttgggtttgctgctgtgttgaactcaaacaacacaacactaagagataagatgagatagaaagtaaaaccattgaaatgtaaggggatgaagaagtttattcatggattccaagaaataacaacgatatctgagggaaaacacaaatctagagccaaggctttgttctccagaatgataacagcaggaatttatttctggaagggtaacagtggaattccagctacaaaatagcacattagtgggcttccagagacacctatttcaccatagggtcccaaa

SEQ ID NO: 253569 - DNA, 534 bp, Homo sapiens
agcttgcaggagaattattccaaggagaagaaccaagatctcagccacaggacagagatcagagttcaggaaggaaggcttaagggggagtgccagacaggctagagggtcaactttgacaaaagagacaccataggtatctgaaggccaaggagaataatttgtttttaaaataaaagagtggcaaggaaatcaaagagccctcaaggatctctggctgtttatgaacttcccctgaatatcatctctgtacttgggtttgctgctgtgttgaactcaaacaacacaacactaagagataagatgagatagaaagtaaaaccattgaaatgtaaggggatgaagaagtttattcatggattccaagaaataacaacgatatctgagggaaaacacaaatctagagccaaggctttgttctccrgaatgataacagcaggaatttatttctggaagggtaacagtggaattccagctacaaaatagcacattagtgggcttccagagacacctatttcaccatagggtcccaaa

SEQ ID NO: 253570 - DNA, 538 bp, Homo sapiens
tgtgtccctgaccccagcaaagtctcagcatagcctccactaataagcacagctaacccactgaggaaatcacaaatatgattaaarctagttacagctgtataaataacatagagactacaagactacaaggctctgcacctagaatcagagctaaagcacactgcccaaccaatactagagacacatacataaaaaaaatgtattttcctacaaaacccaagttataaaattggaagaaaggactattatactatatgtccagatatgaacataatgatacacacacacacacacacacacacacaacaaaattaaaaagcaaggaaacgtgacacctccaaaggaatgtaatatttctctagcaacagattcagtgaaaataaaatatataaaattcctgaaaaataattcaaaatcgtagtataaaatgagctcagtgagacacaagagaacacagataaataatacaaagaaattagaaaaataatttatgaacttagtgaaaaatccaccaaagagttagatcatgaaaaag

SEQ ID NO: 253571 - DNA, 649 bp, Homo sapiens
caatattaccttattttttttgacagattctttaaataaacattaatttaaatatatttgatagtgacaggagacagagaaattcctaggcagactaggagaggtccctggtgaaacccgaccttcaaaccaatgacaacttaaagcctgaaaaccaagccatttccagatagaatccacgactggagtgagaacttctatttctattggcccactctttcccagttggttttttctgaataatgcttttaaccaatccaatgttgccttttccaaggctacctatagcctgtgccttctcattccaaacctataaaaaccccagactcagctacacagatggctacccgcttttgggccccctctcacacagaaggctacccactttgagttctctctcattgttaagagcttttctgttgctcgatagaattcttctctgcattgctcactctctgatgtccacctacctcattcttcttggtcacgggaggagaacctggcacctgacaaacggtgggagcataaaacagttgtaatatgctcctcgcaggctcactgagctgcaggcggtgtgaatgaaatgaactgtgatgacctggcrcagtggctcacgcctgtaatcccagcactttgcgaggccaaggca

SEQ ID NO: 253572 - DNA, 569 bp, Homo sapiens
ctatctagtgcaagagataatgtctttttccagaccaatgtttgggaaggcttccttacagtttattatatgtttaaaaaattktattcaccaatcttgaggctttttctctgtgatgaaaatccactctatgcacagcttcaactggacctctcagggttgcctccatgaaacttgtaggagaaggagaactgatgcaaaaatgatactcatgctaattactgtgccattagtaataaagccctgtgtctctgatccaggggtctcatgtcttctgctggcatccattaaactgtggtatgttaaattgttagtgggttagtaaggtaaaaatctcagaaccttcactgtttttgtgacaccttgatctgattatgttattaaaagtgatttagagaaaacaacctaaatgtccatcagcaaaatgtggtacatccacgcagtgggatgttatgcagccataaaaagaaatgaaacactgctgtatgctataagaaggatgaaccttgaaaaccttatgctaaatgaaagaatccagaaatatattgtaagattccatttatattaaa

SEQ ID NO: 253573 - DNA, 549 bp, Homo sapiens
attgatgtctgttaattactgactataaaggtgaaaatggcaacaatttcttcagaaaataaattaactaaaagaaaaagaagtggctacacttctaatgtatgccaccatgtgcttataaatgcatatscagagttacagtgagtctactgtggatttgtagaaatatttatcttaccaacatttaaataaatacacttaaaaaatagtgttgtttatgtttctgctagtaattggaagtatcctttctcatgcacagttctatagtaaggataataatacactgtcaacagaatttatatgcaaataactccttagtgtgctttagttggaagatgttggataattaaatcatcctgagaatacatttctaatagcttctctgtttctggaccttgctcattttaagaagtggtgtatcattttgtaatcaaggtggcaatgtcagaaagccttgttttattaaaaaaaatcattgtattttcttaaaatggtgaaattctttcattgatatgactgagataggctgacggaatgtatttcatgatg

SEQ ID NO: 253574 - DNA, 579 bp, Homo sapiens
gacacaaactaggtatgtcacatttttagtattttctgacccaaattatayagcatcctgttcaactagtcatattttctatgatgttaaacaagaattcttacattttgctagtacaagcctaaagtagaatcaatcttttgaatagcatctatgtaacatatattaaatattacatacattacatatattatatttatataatatatattaaaattcatattgcaatgaaatctactcaatgatcaatctggcagtcagtaagaaaaaaattattgatgcacacaataacattgatgattttcaaatgcattttgctaagtgaaagaaggcagactaaaagacaaactttattgtatgatttcatttatatgactttcttgtaaggactaatctgtatggacaacaaaaaattttatgtttgcatgggctaaacatgaaaggaggggttgatttaaaaaggagcacggaggattatttgaaatgatggaagtattctctatttttattgggatgatttttacaccactgaaagagtttgtcgaaactcatagaacagtaagccaaaaagagtgactt

SEQ ID NO: 253575 - DNA, 583 bp, Homo sapiens
ttcttacattttgctagtacaagcctaaagtagaatcaatcttttgaatagcatctatgtaacatatattaaatattacatacattacatatattatatttatataatatatattaaaattcatattgcaatgaaatctactcaatgatcaatctggcagtcagtaagaaaaaaattattgatgcacacaataacattgatgattttcaaatgcattttgctaagtgaaagaaggcagactaaaagacaawctttattgtatgatttcatttatatgactttcttgtaaggactaatctgtatggacaacaaaaaattttatgtttgcatgggctaaacatgaaaggaggggttgatttaaaaaggagcacggaggattatttgaaatgatggaagtattctctatttttattgggatgatttttacaccactgaaagagtttgtcgaaactcatagaacagtaagccaaaaagagtgacttttactgtggtaattataccccaactaacctgacaataccgtttaagaacaaaaaaaaggctgacaaattaggaataaaaacaagcactccatatgtcaaaa

SEQ ID NO: 253576 - DNA, 263 bp, Homo sapiens
agctttattatgtgtgagataaggctattgaagacaacaaatggatgggtcttcttttttctatacatatacaacttgaaactgyaccttttaagtgagggatttagatcacttatattcaagattaatattgataagtaagcgtttgattctatcatggagttgtcagctggttgctttgtagtttctcttgtgatgctgcattgtagggtctgtgggctctgtacttgtattttttgtggtagcagatattgttcttttgt

SEQ ID NO: 253577 - DNA, 263 bp, Homo sapiens
agctttattatgtgtgagataaggctattgaagacaacaaatggatgggtcttcttttttctatacatatacaacttgaaactgtaccttttaagtgagggatttagatcacttatattcaagattaatattgataagtaagcgtttgattctatcatggagttgtcagctggttgctttgtagtttctcttgtgakgctgcattgtagggtctgtgggctctgtacttgtattttttgtggtagcagatattgttcttttgt

SEQ ID NO: 253578 - DNA, 503 bp, Homo sapiens
atccctctgaaatgctgcttcctcatagctttaatggagatgattatacataccacgtggtaatattgatcatatatatttaatgagattattgtgaatattgtataaaagaatgactgctcatatgasatgcattgtggtgtagtatgcaattgtgtaggcttaatgtgagatcacttggatttgaatctgatttttctgcaataactagttgtgtgacttgagccaattaatgatcttctacatcttttaatttcttctataaaatgggaataatgtaggcacctttgtcataaagatattatacagataacactaaaattatataaataaatattaaaacatgatttggtaaatatcaaaaaagtttagctaattttaccatcgaatgcatcatttattgtcattaaattttcaccatctcctttgctcacatttaatacctctaactataaataaatattacgtactcagtgtcagaaatatagctttgctattttact

SEQ ID NO: 253579 - DNA, 548 bp, Homo sapiens
attgtataaaagaatgactgctcatatgagatgcattgtggtgtagtatgcaattgtgtaggcttaatgtgagatcacttggatttgaatctgatttttctgcaataactagttgtgtgacttgagccaattaatgatcttctacatcttttaatttcttctataaaatgggaataatgtaggcacctttgtcataaagatattatacagataacactaaaattatataaataaatattaaaacatgatttggtaaatatcaaaaaagtttagctaattttaccatcgaatgcatcatttattgtcatyaaattttcaccatctcctttgctcacatttaatacctctaactataaataaatattacgtactcagtgtcagaaatatagctttgctattttacttctagacttgccaaaggcattttaatctataattttaaatggtgtatttgtcacatattttctcatttaaagagaggtgatttttgccgctggcttcccaacaggcatttttctagccactgtgcagctttcttttgaaatgac

SEQ ID NO: 253580 - DNA, 579 bp, Homo sapiens
ataagcagaaacaggagtgggattgacagggagaagcaaagtttagttccatgtgaggaaacgcatttcaaaractagagcctcccccccagtggaatgggctgatggaagggcagttctcagtctctgggggtgggtaaacagacatttcatggctatgtgaccttgggctagtcctgtaaccctctgggcatccatttccttggctgtaaaatggggaattcttacataatagtacctagttcatagtgttgtggttaagattaaataatagaaagcatgtaaaatgtcggagcactgcctgacacaaagtaacttaggcattgaaaggctgtctagatcagatgatgcttaagaacgtatactctatgttgtttttgtaatggattttattttaactggtatcaaaacagtattatatatagtcatatctggcaagaaaattaaagtctgtagttgcgatcttaacatagcaaaaaccaatcagtcacaaaaaccaaacagaatctacagttccctatgaggatccctctgaatgatgctatcatatttctgatatgactgtggtccaaccccaat

SEQ ID NO: 253581 - DNA, 579 bp, Homo sapiens
ataagcagaaacaggagtgggattgacagggagaagcaaagtttagttccatgtgaggaaacgcatttcaaaaactagagcctcccccccagtggaatgggctgatggaagggcagttctcagtctctgggggtgggtaaacagacatttcatggctatgtgaccttgggctagtcctgtaaccctctgggcatccatttccttggctgtaaaatggggaattcttacataatagtacctagttcatagtgttgtggttaagattaaataatagaaagcatgtaaaatgtcggagcactgcctgacacaaagtaacttaggcattgaaaggctgtctagatcagatgatgcttaagaacgtatactctatgttgtttttgtaatggattttattttaactggtatcaaaacagtattatatatagtcatatctggcaagaaaattaaagtctgtagttgcgatcttaacatagcaaaaaccaatcagtcacaaaaaccaaacagaatctacagttccctatgaggatccctctgaatgatgctrtcatatttctgatatgactgtggtccaaccccaat

SEQ ID NO: 253582 - DNA, 481 bp, Homo sapiens
atgtgtgtttcagtcttcatgtgtgtggcacggccagagcttgcgcttcgggctgtgtgtgtgtgtgtgtgtgtgtgtgtgtgtgtgtgtagatgaaccacttactcatttactgatgggcttggatgttgtgggggtggggagcagggtagtcacatctttaactctcaagccacagcaatgacctagggtccgagtggatgccctcagggtgaargtagcttcaggttgctttgtgcctagcctgcctggcctgcgaaaggcccagtaagtggggaattcacaactatgtggagccttcttcagcccttctgaggtctcaggtctgaccctgacatactcaccagtgccctgcccttcccattttatcagaagctttatcctactgtaataggctgctccaaagaccagaattctgccccctcaccaccaccatgtgtttccaagtgaggcttggcaggggactcatcaacagagtcac

SEQ ID NO: 253583 - DNA, 481 bp, Homo sapiens
atgtgtgtttcagtcttcatgtgtgtggcacggccagagcttgcgcttcgggctgtgtgtgtgtgtgtgtgtgtgtgtgtgtgtgtgtgtagatgaaccacttactcatttactgatgggcttggatgttgtgggggtggggagcagggtagtcacatctttaactctcaagccacagcaatgacctagggtccgagtggatgccctcagggtgaaggtagcttcargttgctttgtgcctagcctgcctggcctgcgaaaggcccagtaagtggggaattcacaactatgtggagccttcttcagcccttctgaggtctcaggtctgaccctgacatactcaccagtgccctgcccttcccattttatcagaagctttatcctactgtaataggctgctccaaagaccagaattctgccccctcaccaccaccatgtgtttccaagtgaggcttggcaggggactcatcaacagagtcac

SEQ ID NO: 253584 - DNA, 481 bp, Homo sapiens
atgtgtgtttcagtcttcatgtgtgtggcacggccagagcttgcgcttcgggctgtgtgtgtgtgtgtgtgtgtgtgtgtgtgtgtgtgtagatgaaccacttactcatttactgatgggcttggatgttgtgggggtggggagcagggtagtcacatctttaactctcaagccacagcaatgacctagggtccgagtggatgccctcagggtgaaggtagcttcaggttgctttgtgcctagcctgcctggcctgcgaaaggcccagtaagtggggaattcacaactatgtggagccttcttcagcccttctgaggtctcargtctgaccctgacatactcaccagtgccctgcccttcccattttatcagaagctttatcctactgtaataggctgctccaaagaccagaattctgccccctcaccaccaccatgtgtttccaagtgaggcttggcaggggactcatcaacagagtcac

SEQ ID NO: 253585 - DNA, 588 bp, Homo sapiens
tgccatagcactgaccagtgcacacactgcctgcctccttctcaccagtggtcttctgacctgtggcctgtccctgaggccactgttgggaaagctttgtccgagtcaggcagaggatcactgacagcaggccagtcccactcctgcccctcaggccccccagaagatgaggcccttcttggcctgtgtctccctctggagaacttgggccctggcaggatgtccctcccaccccagccagcccccaccgtgcctttcccaggccccagcccttcctgtctgtggccctcggcagaactggcacctctgtgttaggggatacgggggagcaaccaacttgaataaatgaaaaaaaaaatgccagagtgtttaattttaaacaaaccacttaaagctgctaattgccctgtagagagttttaatatgcaatatattagagcaatamctggttaagagagtagacaaatggaggcactgaaaaagccctcactgaaattccatttacaagtctttaaaaggattttttaaaacagtttgtatgcccaggaagtttcccagctgagaccaataggccctgacccacctttc

SEQ ID NO: 253586 - DNA, 570 bp, Homo sapiens
ttctgttttgatttcccatatacagagaattgacaaccaaaggtctaaagccagaggttctaattctggcccttgtaagccctactatctgataagtgggagtgagtgccatgactaccaacccacaggcaccatcccatcagctgaggcccaggcctctcttccacatcttcctgggaggaggtttctgcatcttttattagggactgttttcttaagaacattcttctggtttataatatagccaggcgcagtggcttataccagcaatcgcagcattttgggargccaaggtgggcagatcacttgagaccaggagttcaagaccagcctgagcaacttggtgaaaccctgtctctaccaaaaatacaaaaaattagccaggcatggtgatgtgcacctgtaatcccagctactcaggaagctaaggtgggaggatcacttgagcccaggaggcggaggttgcagtgaactgagatcatgccactgcactccagcctgggtcacagagtgagaccccatctcaaaaaaaagagaaaacattcttctggtttataatagagtcatgaa

SEQ ID NO: 253587 - DNA, 565 bp, Homo sapiens
gctgcctttatcattagtgtcattatactcattttaggagtaaggcttcattatggttgtcatcttcatcatcatcattacatggggttcatggaagctgggccctggggcatctgtgctatgttggaggtgaggagggttctctctatcttccataggaagggaggaaagttattgttgtcaagatagaggtgaagtacatggtttttctcttaccaaaactctggagatgcaaggaaatgtgtaacaggatttgaggaaagacagtcaacagatgttggatgctgcatccccatcctgccccatccctctggctaggcgttgagggggacattgtccccacatgtgatatacaatgagctgcctgtgggtgatagggcagtagattcctggycacccagccatcacctgtttctcccgcactggctgatcccccaaaggaaggttccagagacctgacacaaaatcctcagtcttgttaatgtgctcaatgcatgttccagaacttcagccagtccctgcagtgggaccctggctcaagcgccatcaaccttgacttcttcct

SEQ ID NO: 253588 - DNA, 570 bp, Homo sapiens
gcaggcaggcatgggagcaagtggccttgctgggctggtaaagctcaagctgtttcctccctccctaagttggggtcctcaagggktcacattcccagagctttgtgtaggtcaaacttgagtcctggcagccgagtcggggaccctccccttcacaaacacttccagggaagatgatttcacaactcctcagggtgcgttctagtccacacagcccccaccctccacgtgtgttcctggggttgcacccaagtcccgatgtcacagttgagcccttttctatcttcagagtaaaagggaggtgagcccagcatggtccatcacccccagactttctcctcaacttgtatggggtcctggtgccttctcgaaatctgatgagtgccttagactctcttcccagaaaaaaaaagttttcccaaatacattgttcactcatcaaatgttgcaagattccttatcttttaggaggggtccctattataagttggtggttatgctggtggcctctggagttgaatttcctgggtcccccaaatctgcttctactattttctggctacaagaaca

SEQ ID NO: 253589 - DNA, 573 bp, Homo sapiens
ataaaacaatttctatttgtctccctttgtcctttacactgaccctatggagtttcttttccctttgtccctcattgaaatttaggctaagtcccctgacaaccccttctttgccccttggcccaggagtaaccttcagtttctttctgccaatgtctttttgttcttcccaggaggctttttttttttttttttgagacagagtcttgctctgttgcccaggctggagtgtagtggcgcgatcttggctcactgcagcctctgcctctgggttcaagcaattctcctgcctcrgcctcctaggtagctggggttacaggcgccggccacaatgcctggctaatttttgtatttttagtagagatggggtttcaccatgttggccaggctggtctcgaacacctgacctcatgtgatctgcctgcctcagcctcccaaagtgctgggattacaggcgtgagccacggcgcccagcaaaatgtgcctttctgatctccaccaactacctccagggagaataatgttcccctggttacattgtgagaatgggtaggccagagaggagaagggtac

SEQ ID NO: 253590 - DNA, 606 bp, Homo sapiens
cagcccgcaagccctgggcagtgaggggcttagcacctgggccagcagctgctgtgctcggtttctcgcccaaccttagctgcctccccgccgagcaggcttgggacctgcagcccgccatgcctgaacctccccccgccccaggctcctgcgcagcccgagcctccaagacgagcgccgctcctggctccacggcgcccagtcccatccaccgttcaagggctgaggagcgtgggaccacggcgcggaactggcaggcagctccaactgcagccccggtgcgggatccactgggtgaagccagctgggctcctgagtctggtggggacttgcagaatctttatgtctagctaagggattgtaaatacaccaatcagcactctgtatctagctcacagtttagtaaacacaccaatcagcaccctgtgtctagctcagggtttgtgaatgcaccaatcggcactctgtgtctarttaatctggggggacttggagaacctttatgtctagctaagggattgtaaatacaccaaccagcactctgtatctagcttaaggtttgtaaacacaccaatcagcaccctgtgtctagctcagggtttgtga

SEQ ID NO: 253591 - DNA, 606 bp, Homo sapiens
cagcccgcaagccctgggcagtgaggggcttagcacctgggccagcagctgctgtgctcggtttctcgcccaaccttagctgcctccccgccgagcaggcttgggacctgcagcccgccatgcctgaacctccccccgccccaggctcctgcgcagcccgagcctccaagacgagcgccgctcctggctccacggcgcccagtcccatccaccgttcaagggctgaggagcgtgggaccacggcgcggaactggcaggcagctccaactgcagccccggtgcgggatccactgggtgaagccagctgggctcctgagtctggtggggacttgcagaatctttatgtctagctaagggattgtaaatacaccaatcagcactctgtatctagctcacagtttagtaaacacaccaatcagcaccctgtgtctagctcagggtttgtgaatgcaccaatcggcactctgtgtctaattaatctgggggracttggagaacctttatgtctagctaagggattgtaaatacaccaaccagcactctgtatctagcttaaggtttgtaaacacaccaatcagcaccctgtgtctagctcagggtttgtga

SEQ ID NO: 253592 - DNA, 584 bp, Homo sapiens
cacaaggagagaaagcatcattcttgttaaatggtgtgaaaagcacttatttttcaagttctttaaaatgttaagcatagaaactcagaaaccatagacttgtgtcttctggtataccttttaagaattcttttttttttgtttttgtttttgctttggaaaatgacatgtttttatcgctatgtttgcacagtaagaatgtccctgcaggcccaccaccctccctcagccccagccctccagcctctgtcttttaagaattctaaacacaatttcaaaatactgaatttttaaacaatctaaatataggagcagggatactcaattttttttwaaaaaatgtaataaattatgttcattttacaattacaatgctagttttgagattgaaaatgaagtacagattaaagaacacaggtatgaaaaccatgtatctattgcttgagacaagtttataatccagatcacaaggaaagttattcttagccagagagagaggaaggggttgcctagctagggaacactgacaatttatggagacatttctgtttgttgaaactctgggggaaagcaggtgctactag

SEQ ID NO: 253593 - DNA, 611 bp, Homo sapiens
gggctaggccctctggaggtgaggagaagccacccaggggagctcccccccacccccagcacacccagtgtcttccttatctctttcctgccagtgtcactagatggacactggattcaytagatgatctctgtgatcacttctagttttaagattctatgatcctgttaatgataataagaacttctagagcccttaccatgtgtcagactcaatgccatgtgtcttagtctgtttggactgctattttacagagtaccataaattgagtgtctcataaaaaacagaaaggcgttgcttacatttctggaggctgagaagtccacggtgccagcacgttcagcatctggtgagggtctgcttcccggttcatagacagcatcttactgcatcatcatgccatagaaggggcaagagaaccctctgaagtcttttttataaggtcactaatcccattcacgaaggcttcaagttcatgacctaattatctcccaaagtcctcagctccagataccatcacactgcagattagatttcaacatatacattttgggaggacacacacatttagtctcttgcaccagctcttttaaatgtgctgactcatatgt

SEQ ID NO: 253594 - DNA, 611 bp, Homo sapiens
gggctaggccctctggaggtgaggagaagccacccaggggagctcccccccacccccagcacacccagtgtcttccttatctctttcctgccagtgtcactagatggacactggattcattagatgatctctgtgatcacttctagttttaagattctatgatcctgttaatgataataagaacttctagagcccttaccatgtgtcagactcaatgccatgtgtcttagtctgtttggactgctattttacagagtaccataaattgagtgtctcataaaaaacagaaaggygttgcttacatttctggaggctgagaagtccacggtgccagcacgttcagcatctggtgagggtctgcttcccggttcatagacagcatcttactgcatcatcatgccatagaaggggcaagagaaccctctgaagtcttttttataaggtcactaatcccattcacgaaggcttcaagttcatgacctaattatctcccaaagtcctcagctccagataccatcacactgcagattagatttcaacatatacattttgggaggacacacacatttagtctcttgcaccagctcttttaaatgtgctgactcatatgt

SEQ ID NO: 253595 - DNA, 592 bp, Homo sapiens
tggtgatctgtaaactttcaaggagaagaggacaggggaaagaacaagtgggagagaagcagaagtgggacctggattggggtgaggaagtgaaatgaggacatgaggatggatgggcattgagggaatcagctcagagccarcaaagggtaagtttaaggagcaagttatagagtaagcaaggctgaaaagttcaacttttagttgctaatgctgggaattcattagacttttcttaatgtacagcatttaagtattgaacacatgaggcagaaggagtagggcaccattacatattttacaaaactgaatgctcaaacatacattcaaaccgaagcccacatacttctaatttggggtgtctaatttgactaggggcaaaggagaagcagccccctgggaatgggtgtagaagtttcatttgcagttccccacacattctcttcattgaattcttagctactgttcagccccatcatgtaactgtgacatttgacatatgacacccatgagattcacttgacccttttgtgaggtgccattaaatggcccaaagttaaaatgttaattatcattaatcattttttatgaa

SEQ ID NO: 253596 - DNA, 554 bp, Homo sapiens
gggtggtgccttcttgatggggtcagtgcccttataagaagagacattagaaagcttgccctctttctctctttctgtctccctgcctccatccaccatgtgaggagaaagtagctgtctacaagccaggaagagggccctcaccagaaaccaaccatgctggcaccttgatcttggacttcccatcctcaagaactgtgagaaaataaatttcactctatggtattttctcatgacatccatgctgacwaatacaagagtcctaggtttgactagaagctcagccaagtatagacactagtctcttgggtaaaacatttgttcactctaaaccccagtcctctccccagtaaaatgagagatttacagaagtcccactttatccatggttttgttttccatggtttcagttaccctcaatcaatggtggtccaaatatattcagtggaaaattccagaaataagccactcatatgttttaagttgcaagcaattctgagtaacataatggaatcttctagcaccctgctcttttctgcccagggtgtagaaat

SEQ ID NO: 253597 - DNA, 434 bp, Homo sapiens
ccgccatagaaaggtaacacatgycagctccaatttaatgcttaacatgtattaattaatagaattctcacaaagccctgtgagagagacacttttactctgttctcattttatacattaggaaactgagtcataaaaaggagaatactttgtctagggttatacttctggtaggtcgatgggctaacgctgtctagagccagaaccattctctaaccacaagattgcactgcctagctacaaagcctagctgcatccttaagtggaaataaaagtaagttatgaaataacgcattgagagttggcagaaggcagaaggtagggagagaaagaaagaagacatctgcatgaaaatatctgaaaacaacagctagggagtgggacagaaggaggtgactacttttcatttcttataaatcctgctgcttgtataa

SEQ ID NO: 253598 - DNA, 591 bp, Homo sapiens
tggtccctgtcttctgtcttctggcaggggttctaaatagcttcaatgctacaagaccgactgctcacagcttgagcagtaagatggtattgattgtgcaggtgccagaggatgcaaatgtcctggctgcatcatctggactggcgacaagccgctatataccagggagggtttgtctggggagaggacacactcgatcttcaggccctgggtccaaggtctttctctgccaaagcaggcctcaatacctgggggagactcawgtctccctgtcgacatgctgtttccttttctagctttacaaggggtgaatcttgagtaattcatgtaaataaattcacctaaataaagtgaaattaactattttatcaatgaaagaaacataaaatactaccaaggcctaaaatgaaaaagttttcatgttccaagtgtaaataaaactggcatattttattgcagggattaaaatatagtgagtcacagaaatggtgcagggttttttttttctagctttttcacatttatgatttggtgttggactttggaaattttgtttgcattttcatgttgtgattaaggatgcatatagtt

SEQ ID NO: 253599 - DNA, 578 bp, Homo sapiens
caacagataatcatgacataagccaatgaaaagaaacactagggctttcttcttcytcttggtttcatgttttgtaaaatgaatgtcccttgggacagtttaagagaatgtggaatccaatttcctcactggtgttaggagttttatttttaactcaactactcaaaataatagacattctctacgtacccttatccacagttggagtacaccagacatgaagcagaattatctttccattttcgtttttagatagttcagggtaacttagagttctgaattcctgaatgttggccaaggtgatgtcattaaatctataatgaaaacagtgtcactgagagaattaattcattatggtggaattaagttaaatcctttatgatatgctattaagcacccacactaacttgcttgcatcaacctaaatgaagcacattcaaatgcaaaaaagaaaaacaagttccaatctcaaacctcattggatattaggtaactttcgaagttaaatttaactattaaaaatatttataaatctcatggtatttaagacatcttacatgtgttgcagtggccaaata

SEQ ID NO: 253600 - DNA, 552 bp, Homo sapiens
atcatgtatttatttaaaatggataccctgactgcttctcaaaaggtttgaagtggcttgcaaaaaccaaccaaccaaacaaacaaaaaaagccaagatgttttaagacttaaaaaacgttaagagtacaaaaaaagagaaaagaaataatcaaatgcattagcagcccgggcgaatgcagctcctttaattgagcattaaacaaacttaaacgtagcatttcctgttccagaagcaagcaggrctgaaaacttggctggtgcaccactaaagcttaccagttgtgttttcggctggcatccactccaactggatgatgctcatgctgtattatatgttaaatattgttatcattattccaggagccaggcagagaataggcactcaataaatggcagcagttttcagtatttttctcctgcattcccagcagccatatcacctgcagcattcagttaatatctatttcaaatgcacagaaaatatattcatgttttccctttaagcatctgactgttaagtgccctctaccagcaaaaggaggcaaggacg

SEQ ID NO: 253601 - DNA, 627 bp, Homo sapiens
ttccttttaggtctattattttctgttagccatacaataacattgggatgtaaacaggctgagcatgattgtgtacccatttcaaagaggacaaaactgagatgtgaaaagccttgcctagggccacagagagttggacttagactcaaatattctggcttctccagtacacttttacaccccaacctaaaactacactgaaaccttaaccctgccacccaccaaacaaacactagccatgatgtgcttgttcttgtctccaaaagtgtccatttatgagcttatcctgtacccaatccagagctacgtgctgcacatgcgccatctcacttagtccttggagcaattccacagaatcgactttattgcctccattttacccaaaaagaaaccaaggcctagaaggggtaggtgaggagcccaaggtcacacagggacagaaggaaatccctattcaaatgaggcctgtgtgatgacaaagctgagcttcctcaccactactgtaaaccagggtcagaactgaaaagctcaaggyccagaccgctccttaaagtggttcatcatccatcctgggaggatgacatggctcaaaatagacggcatcaggatttagacccaggctgactg

SEQ ID NO: 253602 - DNA, 648 bp, Homo sapiens
cctcctctaagaagtagatcttaaatctctttcccttgagtatgggctggacttagtgactccttccaaagaataaagtatgaaaaggaaaagtattaaccttacagtggagaaacctagcaaatactaccttaagcaagtggtgaaggttagmatcaccaatgacaaatcatggtgatatcataaactcctgatatgaagtgatgagaagggcatctcacctctgtaatattccccctctccctagacaaaccataactccagtctaaacatcagacaaacccacaggaaattctgcaaaatacctgaccagtattcctcaaaattgtcaaggtcacacaaaacatgagaagtctgagaaactgttatagattggaggcataagagacatgacaattaaatgtactgcaaaaatttgtattctacattagtggggaaacagtgaaatgctaataaagtctggaggttagttaatagtaactgtagcaatgttagtttcttagatgtaacaaatgtctcatggttctgtaaaatgttaacattaggggaagctggatgaagggcatacaggaactctctgtactatctttgtaagttttctgtaaatttaaaattatttcaaaataaataaatttaaatttaatttta

SEQ ID NO: 253603 - DNA, 607 bp, Homo sapiens
aagtggcatagcagaaattcaaactcgagactgtctggcttcagagattctgctctcatcaccagctccagaacgcctcctctggatgtctgttgtccacttggaggcctagttctattcaagctcctaaatcaatgttgtaacttctgttctaaaataatcacatgtaccaggcaggatagagcagggaatgctgcagtagcaaatggctgaaaatytcagtgccttaacacaacaaagacatggtttttgcacacactgcatatccactgcaggtccgctggagggttatgtccctcaagttcctcattcagggatttgcacagctggagcttctggagcattacaaactgtgtggcaggggaaagaagcaaagactaaattgcacattggctcttaaagtttctgcccagaagtgacatgtgtcacttctgctcacaccccattggctgaagcaagtcaatggctacactggcagggggtgaggagatgtagctctaccatgcgctcagatggaggagaatttgactatagtagtgatgttgctaatgaccaacacatctgaaaactccatttatcataagattttgtttaacaacggggagga

SEQ ID NO: 253604 - DNA, 576 bp, Homo sapiens
tgaacaatgaatcaaaaagtttcctggaagtacagataggcaaaatcattccgaacagtttttgggaaggaagcaaaaaagactgatttacttgaccatgtattcaawtgtattcaattaaaacaaaatgttcagcaggaccttgaatagcatcattttattcaacatcctttcattgtaacattgatgagggaaaaaagtcaattcccggccaggatccttgtcggtgtcgagtttacacgttcttcccatgtctacgtgggtttttttccaggcactgtggtttcctcccacatcccagagctgtgcccatttggtgaaccggcatgtctaaatggtcccaggatcagtgattgtgggtatgtgtgagtgcaacctatgatgggagggcatcctgtccggggctggttcccactttgtgattgacagctgggtatttacactcagctgtaaatgggcaaatcaatccctgagcttctgggataggctacagtgatccatgacttggctggcataattgggtacataattctctcacttgtttttattaatctttcttacacgtatgtatatatc

SEQ ID NO: 253605 - DNA, 457 bp, Homo sapiens
tctgttgcctaggctggagtgcagtggagtgatcacagctcactgcagccttgacttcccaggctcaagcaatcctcctgcctcagcctccctggaagctggaaccacaggcatgcgtcaccacgcctggctaattttttaaaattattattggtagagacagggtctctctatgttgcccaggctagtcttgaactcgtggtcycaagcgatcctcctgcactggcctcccaaagtgctaggattacaggcataagccaccatacctggcccagtttggtatctgtgaagttaaaaccactaaactaagaatcttactagggatggattcaatgccacttgttcatctctgaggtcaccctcacaggacacatttgccactacagctctgaagcaatctgcccttgatgagactcgtaggtatcagagaacacctggcattgctatggcagctatt

SEQ ID NO: 253606 - DNA, 457 bp, Homo sapiens
tctgttgcctaggctggagtgcagtggagtgatcacagctcactgcagccttgacttcccaggctcaagcaatcctcctgcctcagcctccctggaagctggaaccacaggcatgcgtcaccacgcctggctaattttttaaaattattattggtagagacagggtctctctatgttgcccaggctagtcttgaactcgtggtcccaagcgatcctcctgcactggcctcccaaagtgctaggattacaggcataagccaccatacctggcccagtttggtatctgtgaagttaaaaccactaaactaagaatcttackagggatggattcaatgccacttgttcatctctgaggtcaccctcacaggacacatttgccactacagctctgaagcaatctgcccttgatgagactcgtaggtatcagagaacacctggcattgctatggcagctatt

SEQ ID NO: 253607 - DNA, 580 bp, Homo sapiens
aaacttatattcatctgaatgtacaaaagacatttggaaggcacacgagaaacaaataaaagtagatgtctggagggatgataagaactgaatagactggggacagaattagggaaaaaagttactatattttaaaaaatagtttactttgtgaatttgtcagtgtatgaacgcaataatatttgatgatgcattaaaaattgagtatctaatgagaaagtagagaatacaacactgtccaaatatatttgaccaaaaaaccttttcttctggaatacttatggaattgctgctctagatcaatcatggatccaaatttatgcagttttggacagagatgacctttttattcaagarctcagtgtcatctgccttcagaaggaactatgagatttctacagctgatcatgacagaataactggttccagattttaccagacttttcctcatacctggaaaattaaaatttgatcaaatatttaatcttttaaaattaaatattttaatttatttaaatttaatttaaaattaaataaatgagcagcactgttgtcaatgagaaaactcgaaggaaaaaca

SEQ ID NO: 253608 - DNA, 568 bp, Homo sapiens
cacaatgaccaggcctttgtaccgtccctcacccaagtgcccactaacccaggaagggcataacctcaggcaaggtggttctctgcagctcagacagaccctaaaggagctgccacaacccctcaaggtcctatgagagagtgtctgtgctatgtgaaaccttgattgctaaaggtctgtgttcaaaagaggtagcaagtcagaagccattgtaaatcaagcttggggtgataaactatgacttttttttctaaaacactcaattccattgagtctttatggtgaccgagttaaggcatagaaatttttctagttattttggtatattggaaaagatacctggccaggtgggagctayatcacctgaagtcaagctgcagttggaaccttctttctgggtgacttttgtcacttccttttcccttttttgggcctcagtctttatatctaaaaaaaaaaccaacaggaattgcatgacaggtgtgtttcccagctttccaaatcaatggctttccctcatggggaacttgttaaaatccaggttcccgggctctccaggagagtggcc

SEQ ID NO: 253609 - DNA, 568 bp, Homo sapiens
cacaatgaccaggcctttgtaccgtccctcacccaagtgcccactaacccaggaagggcataacctcaggcaaggtggttctctgcagctcagacagaccctaaaggagctgccacaacccctcaaggtcctatgagagagtgtctgtgctatgtgaaaccttgattgctaaaggtctgtgttcaaaagaggtagcaagtcagaagccattgtaaatcaagcttggggtgataaactatgacttttttttctaaaacactcaattccattgagtctttatggtgaccgagttaaggcatagaaatttttctagttattttggtatattggaaaagatacctggccaggtgggagctatatcacctgaagtcaagctgcagttggaaccttctttctgggtgacttttgtcacttccttttcccttttttgggcctcagtctttatatctaaaaaaaaaaccaacaggaattgcatgacaggtgtgtttcccagctttccaaatcartggctttccctcatggggaacttgttaaaatccaggttcccgggctctccaggagagtggcc

SEQ ID NO: 253610 - DNA, 576 bp, Homo sapiens
tgaacaatgaatcaaaaagtttcctggaagtacagataggcaaaatcattccgaacagtttttgggaaggaagcaaaaaagactgatttacttgaccatgtattcaattgtattcaattaaaacaaaatgttcagcaggaccttgaatagcatcattttattcaacatcctttcattgtaacattgatgagggaaaaaagtcaattcccggccaggatccttgtcggtgtcgagtttacacgttcttcccatgtctacgtgggtttttttccaggyactgtggtttcctcccacatcccagagctgtgcccatttggtgaaccggcatgtctaaatggtcccaggatcagtgattgtgggtatgtgtgagtgcaacctatgatgggagggcatcctgtccggggctggttcccactttgtgattgacagctgggtatttacactcagctgtaaatgggcaaatcaatccctgagcttctgggataggctacagtgatccatgacttggctggcataattgggtacataattctctcacttgtttttattaatctttcttacacgtatgtatatatc

SEQ ID NO: 253611 - DNA, 450 bp, Homo sapiens
agcttttaagtcatcatcatcatcaccatcacaccactaacattatttttgtaatatctgccactatccatcaaacatattccatatgacaaaccatgtgctaagcattttgcatgcatcatctcattaacagccttatgaattattgctgttatttataccattttacaaatgaacaaaataaacctcagagaagttatttgcccaagatcacataggtattaagcaatagaatcatatattagtctgagtaggctaggatatgctgcaataagaaatawctcccaagtatcactgtgttaatttatgcaaggtttgctgcaagtctgagtctcaagaccaactctcctctctagtggcttagagatccagtagctccaccatgtcaacacaaaacctgcacatttgcagaagcagggaaagagagtaatgatcatctcacacggagac

SEQ ID NO: 253612 - DNA, 408 bp, Homo sapiens
cccttctgaacctcagctgctcatctgtgaaaagggggtgagaaaacctgccccatataacccccagagtgacagggagagtagcagagagcaagttatgaaagtgttatacatgtaacaggtaatatgagaagatttcaggcaactgaaatgctgatgttccaaaattccaacctggctatactccctcctccagccccatcatccaatatttatgagaggtgtatttgcatggtcatttggacgttaactgtggcactaggtgaaggtaaatgtgtaaaatatcagcagagygtccaaaggcattggtgtcaagaagactgtaacatctatttgaatgccccaactttgtcattttctatacagatatttggtattgcatagacataaaagggcagagaaagccaa

SEQ ID NO: 253613 - DNA, 642 bp, Homo sapiens
cctggctcaacgagcaccgcaaaaacccctaccccactaagggtgagaagatcatgctggccatcatcaccaagatgaccctcacccaggtgtccacctggttcgccaacgcacgccggcgcctcaagaaagagaacaaaatgacatgggcgcccaagaacaaaggtggggaggagaggaaggcagagggaggagaggaggactcactaggctgcctaactgctgacaccaaaggtactgaaaacgttcaccaccccaccttaagggttttacaagtcatcaagcagtttggtctttcaaaagctgccctgtagggtagattttctggaaggtcctcagacttacccttgcacttccctgcctgtctcagagcattagcctgtgcactgccttctacctgtaattctctacacaaccggcttcttcttgacatcaaagtgttacctcctaaagttcttcctgcctcacccaagccaaaatagcctcccagttattttctgttctgccagcctgtttggatttcctttgccatacttgtcactgtgagaaagtttacatayccaacttccctctctagaatggcagctccaccagaagccttacttgctgccatatgccctacacacctaatacctaaatgat

SEQ ID NO: 253614 - DNA, 620 bp, Homo sapiens
gcactctcgaccccaccccctactagggggccaggtagacccctccggagaccgcagaggtggcagaggcgtcctagggcttccagttgagagtagggccctagagagccatttcstggaggggagagggatccttagaatcagagagtcaacacttggagatgggaagctgaagatcagattggagaagggaccccactaaactcagttcatgtggctgagcagggtctgggatccagagggtgggggttagggggaatctcaccttcacacgacctcctgcagttcagctctaacctgggaaaggaggccttcccgagttgccctacttcaccacccaggaccccaggaagttgtctctccagctgcaagaaacatctcttgcctgggtggcctagcctttccctgccttccccagcccaaagcaggagcctgcagcctagggttatctcaaaggtctgatcctagttggctggagacagtggggcgtgagaggggctgaagggcagcctggcatcccagaaacctgctttaccttctcaattgtgttaccaccttgttttgtggcttggacaagccccttcccctcctagttctgccactgtaaaatacagggatga

SEQ ID NO: 253615 - DNA, 564 bp, Homo sapiens
tagccaaataatgccagtacttagagttttacaaaagtaagtgttgcacattaatagttgcatcagaatgcaaattgtggacttcatggcacctgaaccttggaagtcaaaggcagtgtaaatctttgggtgtgagtttcattatctgaaaactggggacaagaatcagctacatgatatatcaaaggaattctgggcagtgaakggaagcatcatctctttcttcacctctatagtcattttattgattgctactagctttgtatggcgagcttcatcttctttcttaaaaaatatgttaactgcaaataaaaatgcatgtttatcctctgcctctctgttgtctcctcaagactatattcatctagcttcctgtttggtccattgggagccctggcagagatctgcagcagatagaaaaatgatgttgggatattccatacttttaacaaaggggtctgatctttgttccaagttgtggggagggaggttttaagaccttggaattttcctactgttaggattattattcattcttcattgtgggcttccaggagtacaccc

SEQ ID NO: 253616 - DNA, 574 bp, Homo sapiens
ttggcaggtgtgggattcaggctggtagcttgagctgctcgtagcctgccaggctgagtgagtaaaacaagccccacaggctcagcaaaacttgggcaaaaggcaacaccagccacagagctttctggccagaaaagagacattccaaggatcctgcaaacagaatcaggaaatggattattcagcttttaatgctggcttttatcattgtatcagtgttgatattggaatatttatgctacatctattagtttgctagggatgccaaaacaaaacaccatagactggttgtactaaataacagaaagctatttttccacagttttggggtttagaagtccaagatcaagatgtcataagggttggtttcttctgaggcctcgcttcttcgtttgtaaatgtctgtctttttcctgtgtcttcctatcatcttacattcrtgtctctgtgtcataatcttttcttacaaggacaaaagtcatatcagtctaaagcccaccttagttacctcattttgacttaattacctcattaaaaccctatgtgcaaatatactcacattctgaggtaacca

SEQ ID NO: 253617 - DNA, 606 bp, Homo sapiens
tccagattttggaaatattctcagattactaaattggccatttgtccttagaatatcyaaaatgtaccaattgaacatctacatagtagccgtcattgtattagttatattgcatgtattcttactgaaatggcacagtaacccaaagaggtagctatgattaatcacattttagaatagcagagcaagaaaaatagcttaaaaagtcaagtaacctacccaaactcacagaggtgataagggaagataagagaaggtgtgcctggcattaatgtctctactctttctgccactcctggaacaagaagaaagagaacaaaatgaaaactgcaggacagaacaaactgaagttttgctggttgatagttctgggttccattaaaaatgatgaagataaaatgcctttaaattgccatcaagtttaaaatctatatgtagattttaagctgtgtggcaaaagcaatcttcattttcatttgcttttatttaggtccatctcaaatgattttgacatgaaaatattctctaaaattaagctggagggtattgaaatataaatgaagacacattgaaaaagaaatggaagcacaaaattgatttgtgcgg

SEQ ID NO: 253618 - DNA, 634 bp, Homo sapiens
tttttttttaacatttattttaagttcagaggtatttgtaaaggtttgttacataggtaacttgtgtcatgaaaggttgctttacagattatttcatcacccaggtattaagcctagaacctatttgttgtttttcctgatcctctcccttctcctaccctccagcctccaaaaggccccagtgtgtgatgttcccctctatgtgtccctgtgttctcatcatttagcttccacttataagtgagaacatatggtatttggttttctgttcctgcattagtttgttatcaatttacttactggctatatagactgttaggaccagtgggaagcccatggaayttctggaacctcttagtagtaaaggaccttttaagaaaatacaggtgtgttcaactgacaggttgcctccttcaggtgaggtctatgttcatgccatgtaaaagcttagcttattcctagagggtaatgcaaatccctttccagactccatttctaaataaatattatgcctagccagccttaagatgacatctctgaatctgtgcattttagcatacagatacatggcctggcaatgtggcctataagaagggtttctctgcttatggatagtcttgatgtaggattaaga

SEQ ID NO: 253619 - DNA, 634 bp, Homo sapiens
tttttttttaacatttattttaagttcagaggtatttgtaaaggtttgttacataggtaacttgtgtcatgaaaggttgctttacagattatttcatcacccaggtattaagcctagaacctatttgttgtttttcctgatcctctcccttctcctaccctccagcctccaaaaggccccagtgtgtgatgttcccctctatgtgtccctgtgttctcatcatttagcttccacttataagtgagaacatatggtatttggttttctgttcctgcattagtttgttatcaatttacttactggctatatagactgttaggaccagtgggaagcccatggaacttctggaacctcttagtagtaaaggaccttttaagaaaatacaggtgtgttcaactracaggttgcctccttcaggtgaggtctatgttcatgccatgtaaaagcttagcttattcctagagggtaatgcaaatccctttccagactccatttctaaataaatattatgcctagccagccttaagatgacatctctgaatctgtgcattttagcatacagatacatggcctggcaatgtggcctataagaagggtttctctgcttatggatagtcttgatgtaggattaaga

SEQ ID NO: 253620 - DNA, 462 bp, Homo sapiens
tataaaataaggggtagaagttaattaggcatatttttgtcagcattctattttaaaatggaaataaacagaaaataactctttgaaatccagtattgtatgctctcgtggtagctgaagctcaaagaagatagtaaaaaaacaaacaaacaaamaaaaaactgaactgcccagcaactgagtgcacaaccttgtatgggaatgaacagctgttcttagagtagttacacaaaatctggggttctttagaaattacataaaaatgaaaagaaacaagaaatcttccaggtgacagtcttcaaccaagctgagttttctctgtaggtagctgggagccacttacagtgaatgaagagaggggtgcagaccaggactcagtcatgtaggataaggtagaatgtcttgataaaataaaatacaattagtaaagaaccagaaatcatctagttggtgtgaaaaaat

SEQ ID NO: 253621 - DNA, 514 bp, Homo sapiens
ttttggccttttgcttctccatataaactttagaactactttgtcaatatctacaaaataacttggtggtactttgattgagattgcattaaaagtatatatcaagtagggaagaactgatctcttgacaagattgagtcttcctatccagacacatggaataactctatttggttctttttttatttctttcatcaaagttttatagtttttcttatatagagcctgtacatattttcttagatttaaacctaaatatttcatgttggagagtgctaatgtaaataatattrtgttattagtttttaatttcatttgttcattgccagtacatagaaatgcaattgacttttgtatattaaccttgtgtctttcaatctttctgtaaacacttattagttctgggagttatattggttggttcttttgtattttctacataaaggatcattttgcctttaaacaaagaaagtttcacttcttcttttccagtttatataccttttcttatctt

SEQ ID NO: 253622 - DNA, 514 bp, Homo sapiens
ttttggccttttgcttctccatataaactttagaactactttgtcaatatctacaaaataacttggtggtactttgattgagattgcattaaaagtatatatcaagtagggaagaactgatctcttgacaagattgagtcttcctatccagacacatggaataactctatttggttctttttttatttctttcatcaaagttttatagtttttcttatatagagcctgtacatattttcttagatttaaacctaaatatttcatgttggagagtgctaatgtaaataatattatgttattagtttttaatttcatttgttcattgccagtacatagaaatgcaattgacttttgtatattaaccttgtgtctttcaayctttctgtaaacacttattagttctgggagttatattggttggttcttttgtattttctacataaaggatcattttgcctttaaacaaagaaagtttcacttcttcttttccagtttatataccttttcttatctt

SEQ ID NO: 253623 - DNA, 514 bp, Homo sapiens
ttttggccttttgcttctccatataaactttagaactactttgtcaatatctacaaaataacttggtggtactttgattgagattgcattaaaagtatatatcaagtagggaagaactgatctcttgacaagattgagtcttcctatccagacacatggaataactctatttggttctttttttatttctttcatcaaagttttatagtttttcttatatagagcctgtacatattttcttagatttaaacctaaatatttcatgttggagagtgctaatgtaaataatattatgttattagtttttaatttcatttgttcattgccagtacatagaaatgcaattgacttttgtatattaaccttgtgtctttcaatctttctrtaaacacttattagttctgggagttatattggttggttcttttgtattttctacataaaggatcattttgcctttaaacaaagaaagtttcacttcttcttttccagtttatataccttttcttatctt

SEQ ID NO: 253624 - DNA, 612 bp, Homo sapiens
tttgcatctattgatataaacattcaatttttcttatttagcctattgatgtgatagattacactaattggtttctgtaatgtaagttttaattctaataattttggaaactttaagtttgtttctctaattacctaactaatgtgtaatgactactagtacattgactgtaagttccgtgaagtcaggacaatgtttctttctgctcatgatttgtcaccagtggcaagcaaaaaattgaaargtgatagataatcagtagatatttgttgaataaatgtataagttttaaaatgagttaattaatgaggcatttttatggcttgctagtagtatatttacgataggcgtatgaatgttctcaccctagtcttttagcaaagtagaatgtaaatggcatctatttgaataataaattgttagctgatattgttactgaattttttattaatacaaaatttgaatgaagatgtttgtttggaaagttgttcggcgtcatagtaaaagtatgtgtggtaaatatagattaaagcagaacaaaactgatcaatatatgtattatgatttaaaaaaccatgcaggctaatcagagcttagatttatctaggtaat

SEQ ID NO: 253625 - DNA, 612 bp, Homo sapiens
tttgcatctattgatataaacattcaatttttcttatttagcctattgatgtgatagattacactaattggtttctgtaatgtaagttttaattctaataattttggaaactttaagtttgtttctctaattacctaactaatgtgtaatgactactagtacattgactgtaagttccgtgaagtcaggacaatgtttctttctgctcatgatttgtcaccagtggcaagcaaaaaattgaaaggtgatagataatcagtagatatttgttgaataaatgtataagttttaaaatgagttaattaatgaggcatttttatggcttgctagtagtatatttacgataggcgtatgaatgttctcaccctagtcttttagcaaagtagaatgtaaatggcatctatttgaawaataaattgttagctgatattgttactgaattttttattaatacaaaatttgaatgaagatgtttgtttggaaagttgttcggcgtcatagtaaaagtatgtgtggtaaatatagattaaagcagaacaaaactgatcaatatatgtattatgatttaaaaaaccatgcaggctaatcagagcttagatttatctaggtaat

SEQ ID NO: 253626 - DNA, 612 bp, Homo sapiens
tttgcatctattgatataaacattcaatttttcttatttagcctattgatgtgatagattacactaattggtttctgtaatgtaagttttaattctaataattttggaaactttaagtttgtttctctaattacctaactaatgtgtaatgactactagtacattgactgtaagttccgtgaagtcaggacaatgtttctttctgctcatgatttgtcaccagtggcaagcaaaaaattgaaaggtgatagataatcagtagatatttgttgaataaatgtataagttttaaaatgagttaattaatgaggcatttttatggcttgctagtagtatatttacgataggcgtatgaatgttctcaccctagtcttttagcaaagtagaatgtaaatggcatctatttgaatrataaattgttagctgatattgttactgaattttttattaatacaaaatttgaatgaagatgtttgtttggaaagttgttcggcgtcatagtaaaagtatgtgtggtaaatatagattaaagcagaacaaaactgatcaatatatgtattatgatttaaaaaaccatgcaggctaatcagagcttagatttatctaggtaat

SEQ ID NO: 253627 - DNA, 601 bp, Homo sapiens
atttgaataataaattgttagctgatattgttactgaattttttattaatacaaaatttgaatgaagatgtttgtttggaaagttgttcggcgtcatagtaaaagtatgtgtggtaaatatagattaaagcagaacaaaactgatcaatatatgtattatgatttaaaaaaccatgcaggctaatcagagcttagatttatctaggtaatgagayaagaaacaaaggaggatttggaataaaaatttgaagcaagtgtactgacagcaggttttattgagaaatacgatattttatattgaggatttactgttccctagattgtaaatatgagacattgttccaatggataataaggagctaaagtcctgctaagattataccagaaaaattgcaaaccaaggtcatggataggacacacagtaccattttttccctggggcttgaaccttcagagtatcagtaaagcctttcggaagaacaagactgaccgctgcaccgtgatggagtttacaaacctatctaacaattttattgatttgattggtcattaactgaaacaactgattattcaataacattgacttgttagtttagtaaac

SEQ ID NO: 253628 - DNA, 462 bp, Homo sapiens
tataaaataaggggtagaagttaattaggcatatttttgtcagcattctattttaaaatggaaataaacagaaaataactctttgaaatccagtattgtatgctctcgtggtagctgaagctcaaagaagatagtaaaaaaacaaacaaacaaacaaaaaactgaactgcccagcaactgagtgcacaaccttgtatgggaatgaacagctgttcttagagtagttacacaaaatctggggttctttagaaattacataaaaatgaaaagaaacaagaaatcttccaggtgacagtcttcaaccaagctgagttttctctgtaggtagctgggagccacttacagtgaatgaagagaggggtgcagaycaggactcagtcatgtaggataaggtagaatgtcttgataaaataaaatacaattagtaaagaaccagaaatcatctagttggtgtgaaaaaat

SEQ ID NO: 253629 - DNA, 584 bp, Homo sapiens
atttcttgtccatggccttgggaaattattatatatctctcttttcatcaatttcctcatctgttgagtagaacaataatagtattataataatagtttttaactcataggactattgagaaggatccattaaataatgtttgtaaaatatgtatacatgyttataatagttggatgctaagtttcatccatttacacttagctcttgttcctgaacacaattatatgcaagactctttgctctgttcccagagaatgactagctttggagaacagtcaactgatgacttgatgggaattactagttaacccctttcattttcccctcaagtcagctgctatgatgtctcttagaggtccccaatggggctgaactccagtcgcgacggtggttatcttcccattaatacaacctatgttggtttcctgccctcctctatgtcacttttacatgccttcactagtacgtcctgaagtcattttccaaataaactgcttgatctgagctatttgtcttaggatctgattctgagggaacccaaagtaagacactgattaataaatgtaagtgactattattacct

SEQ ID NO: 253630 - DNA, 575 bp, Homo sapiens
ccattaaataatgtttgtaaaatatgtatacatgcttataatagttggatgctaagtttcatccatttacacttagctcttgttcctgaacacaattatatgcaagactctttgctctgttcccagagaatgactagctttggagaacagtcaactgatgacttgatgggaattactagttaacccctttcattttcccctcaagtcagctgctatgatgtctcttagaggtccccartggggctgaactccagtcgcgacggtggttatcttcccattaatacaacctatgttggtttcctgccctcctctatgtcacttttacatgccttcactagtacgtcctgaagtcattttccaaataaactgcttgatctgagctatttgtcttaggatctgattctgagggaacccaaagtaagacactgattaataaatgtaagtgactattattacctattggaatacatttgattcatgctgaattatgttctgtgcaaattttctgaaaaatgtattgctcacagaaagtgttgattacttttcttctttctgcccttaaggactcaaggatt

SEQ ID NO: 253631 - DNA, 584 bp, Homo sapiens
atttcttgtccatggccttgggaaattattatatatctctcttttcatcaatttcctcatctgttgagtagaacaataatagtattataataatagtttttaactcataggactattgagaaggatccattaaataatgtttgtaaaatatgtatacatgcttataatagttggatgctaagtttcatccatttacacttagctcttgttcctgaacacaattatatgcaagactctttgctctgttcccagagaatgactagctttggagaacagtcaactgatgacttgatgggaattactagttaacccctttcattttcccctcaagtcagctgctatgatgtctcttagaggtccccaatggggctgaactccagtcgcgacrgtggttatcttcccattaatacaacctatgttggtttcctgccctcctctatgtcacttttacatgccttcactagtacgtcctgaagtcattttccaaataaactgcttgatctgagctatttgtcttaggatctgattctgagggaacccaaagtaagacactgattaataaatgtaagtgactattattacct

SEQ ID NO: 253632 - DNA, 575 bp, Homo sapiens
ccattaaataatgtttgtaaaatatgtatacatgcttataatagttggatgctaagtttcatccatttacacttagctcttgttcctgaacacaattatatgcaagactctttgctctgttcccagagaatgactagctttggagaacagtcaactgatgacttgatgggaattactagttaacccctttcattttcccctcaagtcagctgctatgatgtctcttagaggtccccaatggggctgaactccagtcgcgacggtggttatcttcccattaatacaacctatgttggtttcctgccctcctctatgtcacttttacatgccttcactagtacrtcctgaagtcattttccaaataaactgcttgatctgagctatttgtcttaggatctgattctgagggaacccaaagtaagacactgattaataaatgtaagtgactattattacctattggaatacatttgattcatgctgaattatgttctgtgcaaattttctgaaaaatgtattgctcacagaaagtgttgattacttttcttctttctgcccttaaggactcaaggatt

SEQ ID NO: 253633 - DNA, 522 bp, Homo sapiens
tcttaatattctggattattgcccagcttctctactggagactttgtgatatgattcagagacaaaccaggtaggtatgccagctgcacattttccaggagacttttatttaaatcttccttttgyttttatcttagcctgtattcccatgaaagatgactccagaaacttcagaaggattgctggtcatttagccacacaaaccatactctccctgtctccatgaacctccagtatatttagtaaccacaagaatttctgaaaatcattcagacagataagcgttccctgaaacattcattcaatgagtgtctctagaggccctattaaagcacatgaaatgaggagtaaacagccaaacaggtaaatatctaatcttgatatgtaaaaacactgtaagagttcaggaaggataactaactctgactcggagatactgaaagaacaaagagattggccaggtgcagttgactcatgcctgtattcccagactttgggaagctgaggtgggtggatcacttg

SEQ ID NO: 253634 - DNA, 552 bp, Homo sapiens
ctcgggtggctgaggcataagmattgcttgaagctgggtagcagaggctgtagtgagtgaagatggcaccactgcactccagcctgagtgacagagcaagactgtcttaaaaaaaaaaggtttgagtgtcaaagatagaataggagtttgccaatgaataaacattgaaaattgagactcaaaatagagttaacactgtatataaaggccttggattttgaaaacttgtggagagtttcagtgaggcagaatcacaatcccatgtgttgtggtagaagatcattcttgagagagggagaaggtgttctatgctaaggccatggatctcaaaggttaacgcacatgagaaaaacctcaggacatgttagaccacagattactgggccttactgagactctgattcagtaaattaataacttacatttttaacaaatccccatttgatgctgttgcttctggtccagggaagacactttgaaagccactgtcctaaagcaatattgtgcattttatattgcaggtattgatactggcagatattaattttaatc

SEQ ID NO: 253635 - DNA, 552 bp, Homo sapiens
ctcgggtggctgaggcataagaattgcttgaasctgggtagcagaggctgtagtgagtgaagatggcaccactgcactccagcctgagtgacagagcaagactgtcttaaaaaaaaaaggtttgagtgtcaaagatagaataggagtttgccaatgaataaacattgaaaattgagactcaaaatagagttaacactgtatataaaggccttggattttgaaaacttgtggagagtttcagtgaggcagaatcacaatcccatgtgttgtggtagaagatcattcttgagagagggagaaggtgttctatgctaaggccatggatctcaaaggttaacgcacatgagaaaaacctcaggacatgttagaccacagattactgggccttactgagactctgattcagtaaattaataacttacatttttaacaaatccccatttgatgctgttgcttctggtccagggaagacactttgaaagccactgtcctaaagcaatattgtgcattttatattgcaggtattgatactggcagatattaattttaatc

SEQ ID NO: 253636 - DNA, 552 bp, Homo sapiens
ctcgggtggctgaggcataagaattgcttgaagctgggtagcagaggctgtagtgagygaagatggcaccactgcactccagcctgagtgacagagcaagactgtcttaaaaaaaaaaggtttgagtgtcaaagatagaataggagtttgccaatgaataaacattgaaaattgagactcaaaatagagttaacactgtatataaaggccttggattttgaaaacttgtggagagtttcagtgaggcagaatcacaatcccatgtgttgtggtagaagatcattcttgagagagggagaaggtgttctatgctaaggccatggatctcaaaggttaacgcacatgagaaaaacctcaggacatgttagaccacagattactgggccttactgagactctgattcagtaaattaataacttacatttttaacaaatccccatttgatgctgttgcttctggtccagggaagacactttgaaagccactgtcctaaagcaatattgtgcattttatattgcaggtattgatactggcagatattaattttaatc

SEQ ID NO: 253637 - DNA, 552 bp, Homo sapiens
ctcgggtggctgaggcataagaattgcttgaagctgggtagcagaggctgtagtgagtgaagatggcaccactgcactccagcctgagtgacagagcaagactgtcttaaaaaaaaaaggtttgagtgtcaaagatagaataggagtttgccaatgaataaacattgaaaattgagactcaaaatagagttaacastgtatataaaggccttggattttgaaaacttgtggagagtttcagtgaggcagaatcacaatcccatgtgttgtggtagaagatcattcttgagagagggagaaggtgttctatgctaaggccatggatctcaaaggttaacgcacatgagaaaaacctcaggacatgttagaccacagattactgggccttactgagactctgattcagtaaattaataacttacatttttaacaaatccccatttgatgctgttgcttctggtccagggaagacactttgaaagccactgtcctaaagcaatattgtgcattttatattgcaggtattgatactggcagatattaattttaatc

SEQ ID NO: 253638 - DNA, 497 bp, Homo sapiens
taagtttatgtttccacaaatgaggaaggcattgtttcctagctcaaagagtttcactgaatcccatgcagcataaacacacacaaaaatttagcctagacacatttgagtgaaactatggattagaggaaaccttacaatttgcagtaaataagggattattattgacacagtgaagtakactaacagctgactttcatcaacagtaatagatgccagagcattatatgatatcatctctaagtgagctcaggaaaaataagagacatattagctagtttattctgcctttcatcttgaaagttaaatgtatttttgagagttaagtaaatgacatccattcaggaatcctcaaaaagagaaatataaagaatgcacttgagtaagaataagaggaaatccagaaggaagtgagacaagataggaaaaagctgagcagagttaaaggggctaatattttttatgattaaaaaaagtaaaactaaagtttcagacaa

SEQ ID NO: 253639 - DNA, 580 bp, Homo sapiens
ggtcctgatgttttcctttttcagtaaggtaatttcagtaatttactcttacytccaaaacatttgtttttcttttttttttttcacttaatattggtgcttactttccctcatgtggcttataaatagaacaatggcaaccttattcagatgatatcaatagaaagacaagatggtgcattagaaaaagctcagactttggtattaagtccagctttaaatcccggaccatccacttgacagctgggtgtttgggaagttgtttttctcccaagctaaagagtcttcacttactggttctgcttggtctgactcttccaccagctaagatgcatcttgctccagattgccctttgattttctgtttttctgccacaaccatttatatttccttttatgcttctccttgccacagtgactttgcacaagctctagctttgcttggaatgacacccatctcaaatctcactccacttcacgaagttaacccttatcctgtcttcagactgtgcccgatcatcattttctcaagagcaccttttgcacctaggtaaatttcttctataacatattttcagaa

SEQ ID NO: 253640 - DNA, 617 bp, Homo sapiens
ttggtattaagtccagctttaaatcccggaccatccacttgacagctgggtgtttgggaagttgtttttctcccaagctaaagagtcttcacttactggttctgcttggtctgactcttccaccagctaagatgcatcttgctccagattgccctttgattttctgtttttctgccacaaccatttatatttccttttatgcttctccttgccacagtgactttgcacaagctctagctttgcttggaatgacacccatctcaaatctcactccacttcacraagttaacccttatcctgtcttcagactgtgcccgatcatcattttctcaagagcaccttttgcacctaggtaaatttcttctataacatattttcagaaccacatatccattaaaatattacaaaaccattttttcagtgcttattttattaaattctgtctgtaccacataatgatgtaaaactaggagtgtaggaaccatttttacttcatgcttccagcacttcattgtccttcagaactagtccttcactcaaaacttaactgtcacttgaaagcacagtgtactacctgcctcttaccggttcttccaggctgagtctgtggaatagca

SEQ ID NO: 253641 - DNA, 617 bp, Homo sapiens
ttggtattaagtccagctttaaatcccggaccatccacttgacagctgggtgtttgggaagttgtttttctcccaagctaaagagtcttcacttactggttctgcttggtctgactcttccaccagctaagatgcatcttgctccagattgccctttgattttctgtttttctgccacaaccatttatatttccttttatgcttctccttgccacagtgactttgcacaagctctagctttgcttggaatgacacccatctcaaatctcactccacttcacgaagttaacccttatcctgtcttcagactgtgcccgatcatcattttctcaagagcaccttttgcacctaggtaaatttcttctataacatattttcagaaccacatatccattaaaatattacaaaaccattttttcagtgcttattttattaaattctgtctstaccacataatgatgtaaaactaggagtgtaggaaccatttttacttcatgcttccagcacttcattgtccttcagaactagtccttcactcaaaacttaactgtcacttgaaagcacagtgtactacctgcctcttaccggttcttccaggctgagtctgtggaatagca

SEQ ID NO: 253642 - DNA, 587 bp, Homo sapiens
tttctgtttttctgccacaaccatttatatttccttttatgcttctccttgccacagtgactttgcacaagctctagctttgcttggaatgacacccatctcaaatctcactccacttcacgaagttaacccttatcctgtcttcagactgtgcccgatcatcattttctcaagagcaccttttgcacctaggtaaatttcttctataacatattttcagaaccacatatccattaaaatattacaaaaccattttttcagtgcttattttattaaattctgtctgtaccacataatgatgtaaaactaggagtgtaggaaccatttttacttcatgcttccagcacttcattgtccttcagaactagtccttcactcaaaacttaactgtcacttgaaagcacagtgtactacctgcctcttaccggttcttccaggctgagtctgtggaatagcaaagaaccaaaagttaattcctgctaccagagctcagcaaaacttcagaaataatagtgtgaatgctttcrctaatgaaaacacctcgtttgctttttaaaaaattaaactttattttcaagtagttttag

SEQ ID NO: 253643 - DNA, 606 bp, Homo sapiens
ctaactatctctattcatttgtagctgtgacatacattttgaagcattagaaatgcttcctgagaaggtttcctgagacaaggacttgcttatatacttctgcattattttcagtgactagtggataaaatcatagtcttatgtctgctattatccaggtgtgaaccgaggattttggactcaatgccctcacccccatctacacctgtaggtcagctgctatcacagtggtagcaccatcatccacttagttaattggccaaattatttaactcgaaaaatttcagggtcaaagttggcttaaggaagctggcaacactgaattakgtgatagttctgggcaatcctactgactttattatttttaaaatttcttacctttcttcacatccccctgctagtagcttaattcattggcattttcatgggaactttactgaaattgcagccagtctctttattcatgtttcttatctgttgcttctttttcatgtcacattcaggtggtaaatttggtatagtgagcgcttttcatgccatcctcccttctgaacccttgacattgcagagccctggctttaggacagtctcttaatgtgacttaca

SEQ ID NO: 253644 - DNA, 606 bp, Homo sapiens
ctaactatctctattcatttgtagctgtgacatacattttgaagcattagaaatgcttcctgagaaggtttcctgagacaaggacttgcttatatacttctgcattattttcagtgactagtggataaaatcatagtcttatgtctgctattatccaggtgtgaaccgaggattttggactcaatgccctcacccccatctacacctgtaggtcagctgctatcacagtggtagcaccatcatccacttagttaattggccaaattatttaactcgaaaaatttcagggtcaaagttggcttaaggaagctggcaacactgaattatgtgatagttctgggcaatcctactgactttattatttttaaaatttcttacctttcttcacatccccctgctagtagcttaattcattggcattttcatgggaactttactgaaattgcagccagtctctttattcatgtttcttatctgttgcttctttttcatgtcacattcaggtggtaaatttggtatagtgagcrcttttcatgccatcctcccttctgaacccttgacattgcagagccctggctttaggacagtctcttaatgtgacttaca

SEQ ID NO: 253645 - DNA, 515 bp, Homo sapiens
ttgggataatattaatttttgtctttctaatggagtattagttttctattgatgtgtaatgaaagaaaacacatgtagtgactttaaacaatacccattgattatctcacagttttgtaggttagatgtctgagggggctcagctgagcgttctgcgcgrggttacacaagacagaaaccagtgtgttcaccaggctgagctcttacctgtaggcaaggtaagagctgttctaaacacattcaggctattgacaaaatccatttacttgtagttgaatgtcttttatccttgttttctcacacgtgcaacctgagattgctgctctgctgctagagttcttacacattccttcacaaatggctttctgcatcttcaggcaaggtgtggcacatcaaatctcccttatgcttcagtctctctacctacctcttactctacatcttcctgacttctgtctctgatgttaaggttcctgtgattacatttagcccactcagataatttaggattattt

SEQ ID NO: 253646 - DNA, 577 bp, Homo sapiens
gaactttgaaatttggatttatttcactgtttaagaggggaaccaacaagaaaggtaactaaagaagaaggcaatgtgttgaaggtaacgtgttgctgctcattttaccccaactggctttaaaacagatgtagaaaatggtattaaaaatactttattggctttccataccctaacagcccaattcacatcaagcatttcattaactaaggctgtggtagaaaaaaagtcatttaaaaaggtaattgtctaattttgttctcttgtcacagaagttacaaaatataatatttaaataacagcacctatattgctcttagtctatcaagtaatcattatataaaatataaactgacagaaaaataaaattcgaataatgcaatgtttaaaatttaaagcatacgtcaaaaaaatacagcatgcattttcaaaayagtaactagctttttaaaacatgtaaacaaagagcaagtggcaatgggagcggataaccagcactgaaccttcgttttggcctatgccttgggctggcgtgataggcaaaacttttcttaagaggaagatagcaagtattgct

SEQ ID NO: 253647 - DNA, 521 bp, Homo sapiens
ataaccagattacattgtgttttcttttcctctttctctttctatgtacatgtgtgtatatatatgtaaaatacaacatatttaatatgatttcatttataccctatatttgaagtttacaacatrattatttaatatgatttcatttataccctgtatttggggtttttgagttatgggtgatatggatctatctgtattattttttatatctatagtcaattatttccacaccatttatttttattcaatttctccccactcatttgaaatgccacattaatttattctcacttctttaactacacaatttaggttctgatacattttttatattgcatttacatacctgccattataacatcacagtattttaattactatagctgtaaaatactgtaataggaaatgtccaccctttttgtagttgctttttccaatttttaaaaaattttttgtaaactaatgtttttattttaattgtgaaacttcacagaaatcgtggtaaagtttttattgac

SEQ ID NO: 253648 - DNA, 521 bp, Homo sapiens
ataaccagattacattgtgttttcttttcctctttctctttctatgtacatgtgtgtatatatatgtaaaatacaacatatttaatatgatttcatttataccctatatttgaagtttacaacataattatttaatatgatttcatttataccctgtatttggrgtttttgagttatgggtgatatggatctatctgtattattttttatatctatagtcaattatttccacaccatttatttttattcaatttctccccactcatttgaaatgccacattaatttattctcacttctttaactacacaatttaggttctgatacattttttatattgcatttacatacctgccattataacatcacagtattttaattactatagctgtaaaatactgtaataggaaatgtccaccctttttgtagttgctttttccaatttttaaaaaattttttgtaaactaatgtttttattttaattgtgaaacttcacagaaatcgtggtaaagtttttattgac

SEQ ID NO: 253649 - DNA, 521 bp, Homo sapiens
ataaccagattacattgtgttttcttttcctctttctctttctatgtacatgtgtgtatatatatgtaaaatacaacatatttaatatgatttcatttataccctatatttgaagtttacaacataattatttaatatgatttcatttataccctgtatttggggtttttgagttatgggtgatatggatctatctgtattattttttatatctatagtcaattatttcmacaccatttatttttattcaatttctccccactcatttgaaatgccacattaatttattctcacttctttaactacacaatttaggttctgatacattttttatattgcatttacatacctgccattataacatcacagtattttaattactatagctgtaaaatactgtaataggaaatgtccaccctttttgtagttgctttttccaatttttaaaaaattttttgtaaactaatgtttttattttaattgtgaaacttcacagaaatcgtggtaaagtttttattgac

SEQ ID NO: 253650 - DNA, 521 bp, Homo sapiens
ataaccagattacattgtgttttcttttcctctttctctttctatgtacatgtgtgtatatatatgtaaaatacaacatatttaatatgatttcatttataccctatatttgaagtttacaacataattatttaatatgatttcatttataccctgtatttggggtttttgagttatgggtgatatggatctatctgtattattttttatatctatagtcaattatttccacaccatttatttttattcaatttctccccactcatttgaaatgccacattaatttattctcrcttctttaactacacaatttaggttctgatacattttttatattgcatttacatacctgccattataacatcacagtattttaattactatagctgtaaaatactgtaataggaaatgtccaccctttttgtagttgctttttccaatttttaaaaaattttttgtaaactaatgtttttattttaattgtgaaacttcacagaaatcgtggtaaagtttttattgac

SEQ ID NO: 253651 - DNA, 547 bp, Homo sapiens
aagtcacttgttattaatatttagggagtgagttaacagaagctgttgtaataaacatacatttttggaatgtaatttatttaaaaattataagctcatgtaaaatttttaatcatataaaccttattaaaccctcatcattatattcatgttgtaactgtaycttaataatttttacctttttgtgtttcctttgcattgtgaactttaaaagttgaccaaccattctttttgtaaagaagtaacccttttttttatctgccagagctaaagaacacataaaaacaaactttgtcgtttgataaactaaatatttttcaatattatccagtatggttgttgagagtattctctagtatgtgggttgtgacattttcttctctgggatttttgtttttttgttttttttgttttctttctttcccttttttccattgccatctcacaagttgaagttatttgaaaacacacacaaatattaaattaaaaaatcatttattttaagatacaccatttttctaatgtctgaatatgggtgagcattgaa

SEQ ID NO: 253652 - DNA, 534 bp, Homo sapiens
tgtacacggagcaaggggtgtctatgccattcaaatgagtatgcagttcttagaggacatggaaagtcaacactccaaggtyacaggctggacagaaagatgggactatggacataaaataagtgtatgtgtctgcaaaagataatataataaatagatatgtagcagcttgcacacatatcaagtcaggaggttttgaacacaattgataagtaatataagattatgagaagctagtgtctttgcagcatggaattcaccatctttactatgccaggtcaggaaagacaaaggattctcaaagagagaatgaatcgtgtgtctccctgaatactgaatatgttactgatgaacacagagaattgaaaagaactaatataatcaagttaaaaaatagagtagtaagttttggattagtagccaaaaccaatttctagtaacatattggtgtccttcaaaatattggaggatatatgtacatgaataattaatgtaaaaacatcaattactattcatcgagaagtgaacattttg

SEQ ID NO: 253653 - DNA, 597 bp, Homo sapiens
tttacaaatacttgttttttaagttttagctcattgttccataaaaatcatgggtggattagtctttggaattgcagacaacagccaaaaaccttatttaaactccagcatacttgaggtgctatagcaataacattatttcagttattgttaaccactatttgaaaatggtttctgtttgaaacagcattttgarttacatatcaagaagccttcagaagcactgcacaatacttagaatttaataaccatgaaaagcactccacatcaaaatttgtgtgatatagctaaagtagtatttggaaaaatgtgaagtcctcaatgcaattgtcagaaaacaagaatgagtgaaaacaaatgaatgtccaccaccacacgcagttggaaggagcatcaacaatgtgaaactctccttttttttttgtaataatcagagaagttgggaaggggttccaatgagggaagcagtcagttataacaaagcctaaactttctttttaatatgtctatcccagtggaccccaaacttactggaaaatagagcgttctttactctaacctgaaatactgaatgtgttgaattaggctgggtctgtg

SEQ ID NO: 253654 - DNA, 571 bp, Homo sapiens
ttcctgattcattcatctattattttgtaatgttattccattagccctgggcgaccactcttggrgaaggggaatcaaatccatcataaacccctttattgatagaatactgccgcttgtctataataaacattatctctgctatttgaataaggtattcctatattttatttttctttaggcgtttgggttcattcttcagttccatgtttaaaaacaaatagaataaaattgaagaaaaatccaatcagatcgcagaatctctaactagagcatatgtttgggattcatacgataggttttagagaagctgctgctcgttcatgtacattaactcaaatactgtgatctcacttgaagttatccaaggttctgtcattactatcattaacattcgtatttggtgatattcttaattgaaacaataatgattatttaaaaattttcattttctaaaagcaatttgaactagagcctctagaaactgaagtcttatataaatacttcataatttgaacccagagtgatatcaacctgggtcctaaatttgtaaagaataaaattaatactt

SEQ ID NO: 253655 - DNA, 584 bp, Homo sapiens
tgtaaaaggacacaggtcaagcaggcacagcaaaacagcatatctgacagccttttttgcactttcttcaatatgagagcattacatagttatcagagcaagggaactgacatcagacaacctgtactcaaaccccatttctgtctctcttagttgtgggacattaggcaggtttcttgacctctcatagctgtattattcctacctacagtgttgacataatgtcatcttacttcatagggattgactgagaatttaagtcactgcagagaaagctctcagtccagggactgatacgcaataggtactcaataaatggtagctgttcttaccaatgagtcacaagtatrtctttcacacagccatcaatctaagtaacaaaaagctctaaataaacagttcttttaatctgtttagaaggttagaaattcttattattaatacttgccgtgtatacatacacacagattaagcatacagaggcattgctcacaaatctcattctcaggtggggcagagatcctgggaaaaaaagcaactctaaggcacaaaacaagtgttgcactgatctacatgggaggtga

SEQ ID NO: 253656 - DNA, 561 bp, Homo sapiens
catcatctataaagcagaaaacaggccctcaccagacacagaatgtgttggttacattcttatggacttctcagctttcagagctgtgataccttaatttctattatttacaagctatttgggcaatggcattgttttatagcagcccaaatggactaaggccacctactatgtgttagattcagtgttacaaagtgggaataaagataaaaaatgtataattgtttctgctctgaaggtacaagtggggrctgtgtagggataaacaaataaataactagtttattatattatggaagataaattatctgagggtaataggcaccactttacatagaagcacagtaaagagacaaccttgaagtcctccagggtaggagaaaaatttatcgcaatttaaagagagaataggaataactcagacagagatgggacatggtggtcatttcagaccaagggaacagcgtgagcaaaggccaaaggcaagactgatcattcaaagaatagtcagtagttcatgttagactagaatcaaactattattatttattacttgtaagt

SEQ ID NO: 253657 - DNA, 604 bp, Homo sapiens
cagcggaaataattatagttaagatgcatgatattgggaagaacttttggaaacagaacaaaacgtgtggagtcctatttttgacattctatctttgcatgaacttgtgattttgcatactgtgcctaatatttctaaacttccaatcctttccttctaaggcaaatgtggattaatagctattaagatcataatgaggattgaatatattaatgtttacaaaatatgaatcatagtcccagacataaaataatcrttcacaaaatggtagctatcattatttaattatctaggctgctgttgttgttgtttatttttttcccggaaggcttatctgataaaatgtttataggctagaaaaatacttcaagaaaaatctaaacaaaaatatttcctttcccataaatcattttaagtgaaaatgtttttgaagttttacaaattgacttctgatactatctgtaggataatgtctgtgaatagagaaggaaataacgactttaggcttgtgcagctccctagtgacataaaatcaatcacttacatccttgcatgtagtctttctcctgctcattgcacatactggtggagcaagacagctatt

SEQ ID NO: 253658 - DNA, 604 bp, Homo sapiens
cagcggaaataattatagttaagatgcatgatattgggaagaacttttggaaacagaacaaaacgtgtggagtcctatttttgacattctatctttgcatgaacttgtgattttgcatactgtgcctaatatttctaaacttccaatcctttccttctaaggcaaatgtggattaatagctattaagatcataatgaggattgaatatattaatgtttacaaaatatgaatcatagtcccagacataaaataatcgttcacaaaatggtagctatcattatttaattatctaggctgctgttgttgttgtttatttttttcccggaaggcttatctgataaaatgtttataggctagaaaaatacttcaagaaaaatctaaacaaaaatatttcctttcccataaatcattttaagtgaaaatgtttttgaagttttacaaattgacttctgatactatctgtaggataatgtctgtgaatagagaaggaaataacgactttaggcttgtgcagctccctagtgacawaaaatcaatcacttacatccttgcatgtagtctttctcctgctcattgcacatactggtggagcaagacagctatt

SEQ ID NO: 253659 - DNA, 537 bp, Homo sapiens
ttatctcggccaaataattcctcaaggttcaaatgaagtttcagataggcattgttctaattcttaagcctatacttttatacattataatgatgttaaccacacaagtattttatttttaaaaagtgtaagttttataaaccatcaacacaaatcagtttacttcaaattggcgttattcatttccagatattgccctccatgtgtgcaccaaatctctaagaaaaaagagaaaggtgaatatatagcatattcttttaaagctttaatggatgtccaaacatggtaagttgtctgatactggtaaataagtggacaaaagccgaagatatttttgagattattttgtagccaaggggtggataaataaaatataaaggagatttcaaaggaagacttgaaaaattaawggaaataaaagtgatcaggctagctgtgatctgatgtggaattatttaattctgatcagaggcataggaaccatttatattaacagagaggtatctggcaacactttttatggcaatatcacttcaa

SEQ ID NO: 253660 - DNA, 602 bp, Homo sapiens
ttttctgggcattttacaaacaacagctagcataaaaagcttacgtaaaaatagcagttgggcaaatgatcaattaactgatattataaggaactagagaaatgaacaatggtgctgacgtgactgcaccgccctgtcccccagtcaaacccatgtgaactctgcactcaccttgaaagccagctggatggtgtccagggtccgggccggccggcagacgacagacagggcaaccacacactctcgcaggtccacctcgccgctgccgctctgtggggagagacgctctcagccacagctcggccgccttcggcactggagaaacgccagggtttcccaygggtgctggtgttaattaaaggccagtcccactctcactcgggaacatctgcccatgtgaaaagggaatcttggaaggacattccaccaagtgggttctccaaggtcactgtgctgtgtacacttcttggggccattacagtgacttcccaaagttcacaaggctgccacaggaagcacctcagcaaagcacacgcgatgcaatgcctgccacctgccaagacctgcatttgagaataccccctaagcaccaaggctgattc

SEQ ID NO: 253661 - DNA, 472 bp, Homo sapiens
aatgagccacggcctccctctggcacgaacggttagcctttgggaaaccctcaacagatgcccacattcaactggcaagattctcaaacaccggcccacaagccagcacctggagggctgctcatgcacatggtggcacttatcaataacttttcagtgatggaaaaatcttatcaataacttttcgatgatggaaagatgttcttgggtgggctaggaagtcctgtaagagctgtgwccttgcaagaggagagccagcagccaggcacggtgtgacaccttgggcctagatgtccctgcccctgacctgctagaaagctgactggtctgccacagaacgcttctgctttgcctccaggaaaaggccttgttatctgcgaactcccagaggcacccatcgcaggatacccagctttgcctgagggctcttgtccctgctttcctataaatatctgcacctgggacagaattt

SEQ ID NO: 253662 - DNA, 527 bp, Homo sapiens
cagggaccatagcacatgcctgcaatcccagcactttgggattacactttgggattacacttagcactttgggaggccaaggtgggcagataacctaaggtcaggagttcgagaccagcctggccaacatggtgaaatcccatctctactaaaaaaaatacaaactattagctgggtgtggtggcaggcacctgtaatcccagctactcaggaggatgaggcaggagaatcacttgaagccaggasgtggaggttgcagtgagctgagatcacgccactgcactccagcctgggtgacagagcgagactctgtctaaaaaaataaaataaaataagaaggcatgccaggagctttctgaatgtggtaaactggacaacggccttctcagagatgtgcaacttccaatccccaaaacctgtgaagatgtcaccttatatggtcaaagggactttacagatgtgatcaagttaaggatcttgagagatcagccttcattattcagctgggcccaatttaatcacaagga

SEQ ID NO: 253663 - DNA, 577 bp, Homo sapiens
catacataaaccatccaacccagtaatttcctttctaggtacatactgaagagaaatgtttgcacacacttgtataagtcataagwctaggcacaagaatgttgataaaagtactgttttgagtaatactgaaaacttgtggaggagaggaggcagaggaagatggccaaacagaagcctccaccaattgtcctgcccacaggaacaccaaattgaataactgttcacacaaaacagcatcttcagaagaaccaaaaatcagctgagcaatcacagtacctggttttaacattacattaaggaaagaagcactgaagagggtaggaaagacagtcttgaattgccaatgccacccttcctccttcccccagcagtggctgtgtggcacagagaatctgtgcactgggagtgggacagcacagtgattgcaggacctcgcattggaacccagtgctgccctgtcacagtggaaagcaacatgggggagaaatcagccagagccaatggagggagcatttagaccagccctagccagaggggagtcatccatcccagcggttagaatctgaattcagcc

SEQ ID NO: 253664 - DNA, 553 bp, Homo sapiens
aagttgtgcaccattggccacagtgactgggtcagggatgggcacattatataattcaggccaatgggaaaagtgaattttcagacttgtgctcaagttgtcagaagactctttctttattttgtaagatgcgtttgagaatgagaatgtgagatgtggaatagcttctgttgtttagctatcatgagacagagagcatgtgtctgtgtgtttgtgtgtgtgtgtgtgtgtgtgtgtgtggagtggtgtgggagggatgatcaaggatcacwgcttggagtcagaggatgaagccaacttctggaaggcagagccctgagacagatagaaaccaggtccttggtgactgtattgttgtgtctggattatgctttgactgtaactcgacctactttttgacttttccattacataagtcaacaaattcccatcatggcaacggaagtttgagttgggtgttttacaatttgtgactgaaaatattaactcatatggactattttagtcaaataaaaatatttaaaagtttggcaaagtttaaaggtggccaaag

SEQ ID NO: 253665 - DNA, 632 bp, Homo sapiens
catcatcaagcctgcaaaagagagcaaatctccttgcaagatgagcattataatctcccgtaacaaaatcattcacatgtaatcawgcacatgaggtcacgtacatcccatcgctttgctgtaaggattctttctacaactggcttccacaagatggaaggaagggctatggaaattagagtttcaggattagggctggactcactgcctttctcttattatacacgcatcttgtggatgactgtagaatttaatttcctgctttcatgaaccaacacatttctttaattgagtcagttctctctcacctgtcattgaaaaagtccttacaatacattccatgctgcagtgtctgcatctataaatggggataataagagaacctacctcatagggttattgtaatgagcacagagctcctagcactgaactgctgttattatcattactgtttgcaaagacctgggagctaagactgtattagggagtttatgtgcagagactctttaatattatctaaggttgaccaggaggccttgaagaatggaagccaaagtttggttgcaaaacatgcttcctgacctggagttgagaaatattaaaataagtgatcgaatgcactgttcaacaca

SEQ ID NO: 253666 - DNA, 578 bp, Homo sapiens
tctcacatcatcaagcctgcaaaagagagcaaatctccttgcaagatgagcattataatctcccgtaacaaaatcattcacatgtaatcatgcacatgaggtcacrtacatcccatcgctttgctgtaaggattctttctacaactggcttccacaagatggaaggaagggctatggaaattagagtttcaggattagggctggactcactgcctttctcttattatacacgcatcttgtggatgactgtagaatttaatttcctgctttcatgaaccaacacatttctttaattgagtcagttctctctcacctgtcattgaaaaagtccttacaatacattccatgctgcagtgtctgcatctataaatggggataataagagaacctacctcatagggttattgtaatgagcacagagctcctagcactgaactgctgttattatcattactgtttgcaaagacctgggagctaagactgtattagggagtttatgtgcagagactctttaatattatctaaggttgaccaggaggccttgaagaatggaagccaaagtttggttgcaaaacatg

SEQ ID NO: 253667 - DNA, 578 bp, Homo sapiens
tctcacatcatcaagcctgcaaaagagagcaaatctccttgcaagatgagcattataatctcccgtaacaaaatcattcacatgtaatcatgcacatgaggtcacgtacatcccatcgctttgctgtaaggattctttctacaactggcttccacaagatggaaggaagggctatggaaattagagtttcaggattagggctggactcactgcctttctcttattatacacgcatcttgtggatgactgtagaatttaatttcctgctttcatgaaccaacacatttctttaattgagtcagttctctctcacctgtcattgaaaaagtccttacaatacattccatgctgcagtgtctgcatctataaatggggataataagagaacctacctcatagggttattgwaatgagcacagagctcctagcactgaactgctgttattatcattactgtttgcaaagacctgggagctaagactgtattagggagtttatgtgcagagactctttaatattatctaaggttgaccaggaggccttgaagaatggaagccaaagtttggttgcaaaacatg

SEQ ID NO: 253668 - DNA, 606 bp, Homo sapiens
aaacatctatgcaacatacatcccatgctctctttggggttgagttttagaattaaaatgagatgcaatttggctctttacgtcaaaaggcgaactatagggcacagagacaacttatgcatagcctgtataagttgctgaaactggcttgacrtctgcaatatcttatcagagaagaatgtttgtaagtctcatcctctgtccaatcagagttgtagtggtctgggttgtaagtggggttgacagctcatattgttagtgagttcagccataggaacttagatatttgccatgccagcccggccctgaacctgtgatagtgggtaacttggtttctttaaccgtagggtgtcagttgataaatgagcatctattttgttctctctaatcacatctacaatggagtgggaactctagaacatgagctgtaaacacagaagtcctggagcagccagagaaggcccaggaaagtccatggagaagcccacacttctgcttcccagagctgagctgaaggaggaatgcagagtagtatatactcagctgctccagcatgtgagtacacagcataactagcatgtgtactgtcccttttctgtcctgccc

SEQ ID NO: 253669 - DNA, 606 bp, Homo sapiens
aaacatctatgcaacatacatcccatgctctctttggggttgagttttagaattaaaatgagatgcaatttggctctttacgtcaaaaggcgaactatagggcacagagacaacttatgcatagcctgtataagttgctgaaactggcttgacatctgcaatatcttatcagagaagaatgtttgtaagtctcatcctctgtccaatcagagttgtagtggtctgggttgtaagtggggttgacagctcatattgttagtgagttcagccataggaacttagatatttgccatgccagcccggccctgaacctgtgatagtgggtaacttggtttctttaaccgtagggtgtcagttgataaatgagcatctattttgttctctctaatcacatctacaatggagtgggaactctagaacatgagctgtaaacacagaagtcctggagcagccagagaargcccaggaaagtccatggagaagcccacacttctgcttcccagagctgagctgaaggaggaatgcagagtagtatatactcagctgctccagcatgtgagtacacagcataactagcatgtgtactgtcccttttctgtcctgccc

SEQ ID NO: 253670 - DNA, 606 bp, Homo sapiens
aaacatctatgcaacatacatcccatgctctctttggggttgagttttagaattaaaatgagatgcaatttggctctttacgtcaaaaggcgaactatagggcacagagacaacttatgcatagcctgtataagttgctgaaactggcttgacatctgcaatatcttatcagagaagaatgtttgtaagtctcatcctctgtccaatcagagttgtagtggtctgggttgtaagtggggttgacagctcatattgttagtgagttcagccataggaacttagatatttgccatgccagcccggccctgaacctgtgatagtgggtaacttggtttctttaaccgtagggtgtcagttgataaatgagcatctattttgttctctctaatcacatctacaatggagtgggaactctagaacatgagctgtaaacacagaagtcctggagcagccagagaaggcccaggaaagtccrtggagaagcccacacttctgcttcccagagctgagctgaaggaggaatgcagagtagtatatactcagctgctccagcatgtgagtacacagcataactagcatgtgtactgtcccttttctgtcctgccc

SEQ ID NO: 253671 - DNA, 624 bp, Homo sapiens
cctgcatctacttcatctcccccagcctccacagttaggcttagtgaaaccccaagggggactcgccgcccagagccagccaacatggcaaaggtccatgtgcttcagctgtggactgtcctcatgacctcacatgggtggggccataggcccaggtactcccaccccaacacacttccccttgatttcaataaatattgatgagtgcctactttgtgcctggcactatgctaggtaactgagacatggcccctgcactcttacaactcagtcaagtggggaaagcagaaaaccagtcaggtaactgcagcacagcatgggtgaacttaccatcctgtggaagctyagggtatagtgtcaagaatagcttcctaggggaggagaccacctagctgaggcctgaagggttaacatgagttatccaagtagaggaacattacaggaacagggaaagagcagcaatccagaggcctgggaatgaaaatgggtgttgcagtaggtgtggattaaaggttatgggaagtagtaagagagaacaggctgaagagacaagcaggggctaggaactagatgcaaccttgtggccaacgagaaatggggaaggctttatgcaggggagggaca

SEQ ID NO: 253672 - DNA, 559 bp, Homo sapiens
cttatagcattgcagtcaaagaatatgggcaataaaatttctgctttgagaaatttgctgaggttgtttttatgactttttaagagtaatgtatagccaatgtttatgggctatagtgtttaatgtctctcttaagccaagtttattaattattaataatagtcaatttctctgtcttcttcatgaaagaaatacgttcacgatgttcattattatcatggttttatcagttttatcttgaattttctttattccttgttgttttggttattttgtaaactgttattcagcccagaaattgttacgaatgtttgtcttcattctgtattatcatagcaaaatagtcctctgatttcattgtctattactgcttctgatttcttattttatgtatttttgcycatctattttaatccatttgcttgtgtctatatccactgctaaaacccaagtccacgtttactgtgatccattttctagactattgacataggttcctacttggtgttcttgcctcgtcttttaccaacaacaatttattgttcacccagcagccaaa

SEQ ID NO: 253673 - DNA, 617 bp, Homo sapiens
taaggggagaaaagagagactagtggcatcataaccaatgaaatcagatgatctgtcaccacttttggtggctgcaactcagcccacacccacagcccactcaccatgggcaagtattatcatttttcttttctttgagacagggtctcactctgtcacccaggctagagtaaagtggcaccatcttggctcactgtaacctctgcctcctgggcttgcctcagcctcctgagtagctgggactacaggcacatgccacaacacccagctaatttttttttctgtatttttggtagagacagggttttgccatcttgcccaggctggttacaaactcttgagctcaagcaatctgtttgccttggcctcccaaaatggtgagattacaggtgtgagccaccttgcttggcatatcattcttaactaataaggcagcatacaattttcttaaaattcttattttgaaataattaaatatttrgaataacttgcagaaatagtacagagagttcccacctacctttcattcagtttctccccatggttatacctgagcaactatagaactacagcaaacccaggaaactggcatttgtacctgtgtgtgtatagctgta

SEQ ID NO: 253674 - DNA, 609 bp, Homo sapiens
atatgtgtatgttgcaatttcatctcaaactaatgataaaatttagataattctaaactagtatcaataactgatctttcaataattgatagattcaatagatgaaaagaaagtaaagatacagagaatctaaatattccatctaaaaagttttatctaattttctctctcacacacacacagactttaacaattagaagattcatattatgttcaaacatgtatcgaactttttctaaagttgccaatgccaccaaacaacacttactacctatacaaagaacaacrtcatagaggtaatattctctgactgcattgcaataaaattagaaatcaacaagaaaatggttacccttccaattcctccctctcttcttcctcctaaaaagtggatattttggaacagagttttaaataatgtatggatcaaagaagagaaactacagtggaaataataaatattgtagaagtaaacgtatccattcattacataacaaagccagtggtacacagtgtagagtagttcatagtgttccaatattcctgttgggaacaactatgaaggctggataaaacagaaaataatatttgtaaaggcatcagtgaact

SEQ ID NO: 253675 - DNA, 569 bp, Homo sapiens
ggtgttgcattcttctaatttgaatcttagaggaaacagacaacaaaatatgacatttttatttgagaattamtcattaaatgtatttcgaaaaaaattgtaaggcaacacagaataaacaaagctcagcaaggcccaaattcaaaacacggataacaccacatgctgaagagaatgtggagcagcaggaaccgtcattcattgttgattggaaagcaaaatggtacagccacattggaaggtagtttggcaattgcttataaaactaaacatactcttaccatatgatccagcaatcacactagttagtatttacctaaagcagctgaaaatttatgtccatacaaaatcctgcacatggatgtttatagcagctttattcataatggccaaaacttggaaaaggtgaatggtttcataaactggtatctctatccaacaatattattcagtgctaaaatgaaatgagctatcaagccatggaaagagatggaggaaacttaaatacacattactaagtgatagaagctagtctgaaaaggctacctattgcatgatttcaactatgt

SEQ ID NO: 253676 - DNA, 647 bp, Homo sapiens
tcctcagcagccaccgaggcctccagttccgtctccaaagatgatgggttccttccagtgggtgcaaagtgagagccccagtgattggtgttcatagtgggtcagtgtgaacaacgcccaatggcctgcctgggccagctggggcctcgttttgctttggtctgaaagacatttttgttttctggtgagaacagccccagcctggccaggagccggccagcggcaggaatacaaaccctttcatgtgacagacccaagtggagtgatgccctcctgccagcagcaggccctcccctgccgctcctgggaggcggccatttgcatatttcccattcatcctggccttgaaaaggaggcctgagttcccagtgctcctgcccgctgagggctgggccgctccagtctartgttaactctgtggacactgtaggctctcacaggccaacagcagaacttgaccgcttgctgccggagggagagcagcttaaggctgcagctgctgtgccgcctgacctccagaggggggattcaggaggtggcagattcccgttgaccagcacagccttttgctaaactggaggaaattcagatttgtttcttcttgaggcattcagaagaggaattttgtcagactatggggatgccag

SEQ ID NO: 253677 - DNA, 608 bp, Homo sapiens
ggtttgttttcttatttatgccaggcccaagggggcacaatttgaaagtgagggacttctttgcaaaataatgtaaggtactcgctttattatgggtagagaaaattttggagcaattaggaaaatgcttttcctccttcttgtaaatttagaatatccagtctgtaagaattaatgtgtgtgtgtgtgtgtgtctgtgtgtgtgtgtgtgcgtgcatgtgcacgtgtgcctgatctaatagttaccagatgggcaactggaataatgaagaagttatactttctatagtggcaacagggaacgtgataggaatgtgccttggagtacttacatctaccttgatagtcctgctggaatttggcagtattattctagattagcattatccaayagaactttctgtggtaatcagaatgttgtatatctgcactgtccaatgtagaagctactagcacatgtggctattgaacacctgaaatatggttacggcaactgagagttttaaatttctaattttatttaattttaattaattggccatatttaattaaatagccatatatggctaatggctactgtactggacaacacagttctagattaattg

SEQ ID NO: 253678 - DNA, 566 bp, Homo sapiens
tccatacacataataaaagacgatttgtataactctattaataaccttgacctaattaatatttatgaaacactgacaactgtggaaatgcattctgtcaaatgcatatagaacattcacctggatagattataaatgagtctcaataaatttaaagagatcatgcagagtatatttttggatctaggagtggaaagtttggatcatataagaggtgaatgcttaagtgataaaaaaaaaaaaaaaaaaaaacctaaaawtttcccaaagtgattatactatattcccaatagtggtatgtgaattctgattgctctgtattatcagcaacaatttagttttttcaattctttaaacttaagacattgcaatgtatatgcaaatgtaggtctttatggttttaatttgcatttcttgatacaatattaatgatgttaagcatcctttaaggagtttgttggctatctgcatatcttcatttctgaattgtctgttgaaatgttttgcccattttattgtattgcttggtcttttattactattacagggattatatattttggaca

SEQ ID NO: 253679 - DNA, 605 bp, Homo sapiens
gccagtctaagtaatttcaggaagctattacaatgacttgatgcagttggagctggctcagccacaagatgccagatggcctaaaggtacccagcaccaattgcttaggactcaggaacaargccatccaagaagtcagccattaattctgcaaatttatgcagaagagtgagctattattgcctgtgatcaacatttttcaccagaatctctacatctgtgcctttaaacactttgcagatgtaagttgttatcctaagggtaaatttatatcattaattagatcagcattatgcaataatgctgagcctctagtgtttgtgtttaaatatctgtttataagtatggaagtgatacatctaatttagatgctatggcccaactgcctttgtcagattcagagttaccttgtttttaagattttgcctgaaacatacatattgaaggttgctgtgaaccctcacactacaaatcttgatgtttatttgtaattgattagaaatgagctggtcataaggatgcctaattgaattatgaataagctgtgaaacaagatacctgccctatagcataggtaggcttttatgtagtcattgcattaatat

SEQ ID NO: 253680 - DNA, 502 bp, Homo sapiens
attttctatggccgccctcaagctacaatggcagtattgaatagttgcaacagagaccacctggccaagaagcctaaaatatgtactatttggcaatttacagaaagagtttgctgacccctgttgtagagactctggattctgttatattccttcaaagactgttttttgttttcacaggcaattatattaattagatttaaactggaaattttgtctcatctattgtaggcagcagctcatatcttagatcaattcatttttctcttatctgtgctatttgtagtgcgtgttgtgtatgtatgggtcagttgccaaggggagacttaagctcttctaattctattccctctggaaatctcccttcagtttatggcagccttgaccacctcagtttccrtcttcacgagtctataagatgatatgtttttccagttggcacctaatgtcaggacactcccttcagtttatggcagccttcaccacctcagtttctgtcttc

SEQ ID NO: 253681 - DNA, 593 bp, Homo sapiens
tatacactgttggtaggaatgcaaaatgctatagccattttggaagagagttcagcagtttcttacaaagctaaacatagtcttactatacaatccagcgatcatgctgcttggtatttacccaaatcagttgaaaatccaagtacacccaaacacctgcatacaaaygttcacagtagctttattcataattgccaaaacctggatacaaccaagacatcctccaatagatgaatggataaacaaactgatacagccatacaataaaatattatttggcaatataaggaaatgagctatcaagccacaaaaagacagggggaaaccttaaatgcatgttgctaagtgaaagaaaccaatctgagaaggctaaataatgtatgactcaaattacatcacattctggaaaaggcaaaactatacagatggtagaaagaccagtggttgccaagagtttgcgggcagagggaatgatgaataagtggagcacagaacatttttttggcaatgaaattatgctgtataaaactgtaacggtggacacatgtcatacaattgtcaaaatctacagaactgtacaacacaaagagaga

SEQ ID NO: 253682 - DNA, 542 bp, Homo sapiens
tgctcctttagctcagaggaatttgttattacccatcttctgaagcctacttctgtcaattcatcaatctcattctctgtccagttttacamccttgctggagaggtgctgcaatcagttggaggagaagaggcattctggcttttggaattttcagcatttctgtactggtttttcctcatcttcatggatttatctacctttgatctttgaggctaatgacctttggatggggttcttgtgtggggatcttttttatgttgttgttgttgctgctttctgtttgttagttttccttctaacagtcaggcccctcttctgcaggtctgctgtagtttgctggaggtcaactccagaccctgttcacctgggtatcaccagtggaggctgcagaacagcaaagattgctgcctgctccttcctctggaagcttcatcccagggggcactggcctgatgccagccagagctctcctgtatgagatgtctgttgatccctgttgggaggtctctcccagtcagaggcacaggggtcagggaccc

SEQ ID NO: 253683 - DNA, 542 bp, Homo sapiens
tgctcctttagctcagaggaatttgttattacccatcttctgaagcctacttctgtcaattcatcaatctcattctctgtccagttttacaaccttgctggagaggtgctgcaatcagttggaggagaagaggcattctggcttttggaattttcagcatttctgtactggtttttcctcatcttcatggatttatctacctttgatctttgaggctaatgacctttggatggggttcttgtgtggggatcttttttatgttgttgttgttgctgctttctgtttgttagttttccttctaacagtcaggcccctcttctgcaggtctgctgtagtttgctggaggtcaactccagaccctgttcacctgggtatcaccagtggaggctgcagaacagcaaagattgctgcctgctccttcctctggaagcttcatcccagggggcactggcctgatgccagccagagctctcctgtatgagrtgtctgttgatccctgttgggaggtctctcccagtcagaggcacaggggtcagggaccc

SEQ ID NO: 253684 - DNA, 624 bp, Homo sapiens
cagtgttcattatcacagacaaatcagcatggtaaagatgatagattttcagaatagcatagggattcttttaataaccccctaataaatagatgcaaatagttttccaattgaacatacctttgaattattacccatattattgtcttaatttgttgaaattgttgtatttttgtaatgtgattgcaacattgcttttcaggaagaggagattatgattctgtatccccttttggtcctatttatcccttttaaatcagtttcacctctcatcttagacttatcgggatttttatgaatgtacctgactatccttggtacataaaaagaagactcttttcactttacttaatgctacaaaattttgagtgtagttcccagatggctaattatttatttggtgactaaaaatatagcttcttgttctccagtcacatatgtgattttkggatcttaagataaatttttatatctcatatgagtgatcgtagaatttccagccattatatttcttatcactatggctagcttgaatataataacatgattttaaaatatatataaccctgacatggtgatgtacttttgaaagctccttgtattagcaggttatttgtacagctg

SEQ ID NO: 253685 - DNA, 570 bp, Homo sapiens
gaagtaatggtggcaccccagggactgaaatgctgttcaggatgctctgggaacatagaagggcacttgagaggtgcaggcaagattttgcaggagaaagaactcttgagctgaatctcagagtactgggtaagagttagccagatgtactagatagagaatgccaagcaaatggattatcatatatgaagcttctaaaatttgaaagaaccagttgtatttagaggaaagcaaccagttcattcagtggcatgtctaggagaaaaaaaagtgagaggtgcagctgaagggagagatggggaaagkcctgatttttgaaaggccttgaatgccatactaaggaatatcaccattatcctgaaggcagagatagactgaaagattttaagtggaggaagaaatgataaagctgatgatggattttaagcagaggattggtatgatgagatgttaggaggtctgaaggtaaatttggtaagccaaggcaaggagacagggtgtctatgaggtgattgtggttgctttagttagagataacgaactgtggctgtgtctggaggatagtgactg

SEQ ID NO: 253686 - DNA, 575 bp, Homo sapiens
tttgtgtggagtatttgcttcttgtgtgagcatactctttatctgtgttattcagtctcaaacactcacctcacctttgtctttttgcctgtaaccattactagaatttcggtagcacttgagcaagaaaacatgcctatatctagaaatctgtatttatgtctatttaggtgaatctccactcttagatgaatagatctatcgatgtaaatctatcaatgtaaatatatatatagctatacagacttgtgagtctcagcactcacaagtacagaagaagtgctatctttgtttagaaataggagagttatttttctgtctggcacagatggakactctttgagttgtatactatttgagatggtatttcgagatgcatgtgtagagaagagagaaagatgtttccaggtagggacagtagaatgaacaaaaacgtggcaccaaaaagggaaatgcgaggtatgtttcaagaagagtgacagggagcccagtgtgttggcatatgcctgtaatgcagctactcaggaggctgaggtgggaggattgcttgaatccagcagtttgaggctgcagtg

SEQ ID NO: 253687 - DNA, 542 bp, Homo sapiens
tttgtttttgttttttttttgagacgggatcttggtctgtagcccaggctggagtgcagtgacccaatctcgtctcactgcaagctccgcctcccgggttcacaccattctcctgcctgagcctcccgagtagctgggactacaggcgcctgccaccacgcctggctaattttttgtatttttttagtagagacagggtttcmccgtgttagccaggatggtctcaatctcctgacctcatgatctgctcacctcggcctcccaaagtgctaggattataggcgtgagccatctcgcccggccttctctcctctcttgatttcctaacacaccatcccagttctcttctacctctccagtcttctgtatgtggacagacaaccaggactggtttcactacttttgctccaacctgaactaccacttccagagacatgaccttaacgtcagactctcctgggttttgaaaaatgtatccatcaatacctccttctcaaaaacctaagcggtattttcactccctgtgcagaaaagagttaaca

SEQ ID NO: 253688 - DNA, 537 bp, Homo sapiens
aaggaagctatgatgcccaacttcaattaccagcaggaaaccctctataccttttaggggcagacttacctttcaatgacttggctacctcacagggaatttgaaccagtaaactggcctttaaaagtcaaatcactgaattcacatgatgatcttgttagtactgaaaattttactttatatraaaaaatggtttcttagcatcagaaaaaataaaataatctgtcagtagattttttgattaataggcttgaggcatatattttatatacattttagctggtgacttggaggtatatataaaactaaaacaaaattagtaggagtttaaattataggtatacattaactattattacgttggaattgaatccttattgtgtttcttcatttaagagtaggatgggcacagtctcacacttttacctaaattgtacaatatgagactattcaacatgtggaaggcttgagcttttcaaagagaagttgtatatatggaagggagttttacttgttccagttgcctgcccttacctg

SEQ ID NO: 253689 - DNA, 619 bp, Homo sapiens
acaaaactctatatacttcatgttgcatgcagtgagctaaaggaagctttgcttactttcacagattacaggtttattttataatcatgccatgaacacaagtcagagtaatctgattctttgctgcagtggcattagagcactgatagcacactctcctttttcagggagaatgttgtgtgtctggttgactggataaactcttcagtcttataggatttgaaagaacataaaaggcaggcatttatttactataataaaacaatagacttkgcaatgaattctgtaataactgccttttaatcctcacagtcccccacacacacacacgagaactttataccccccaaaaaaaagttaaacgtcacacttactttattttatatctctgaagttggtcttcaatcaagcaaaaaaataagggataaagtgaaaggaaatttgagaaaagatcctgcaagaagcaagctgagactagaatttcataaaatccatttctagccctgtcagctgcctgcctcattaccttagactttcatataatcttttaagtctttagttcaatctttctactcagttatttttcttcagtttcttgtaaccttcaaaaatgctaaca

SEQ ID NO: 253690 - DNA, 530 bp, Homo sapiens
tctgagtcctctttttttgtgcctcatcacccctataccagaggttttcaaccttgactaaagattagaatcacttgggcaagctattttaaaaaccagatgcccaagccatacccaagaccaagtaaatcacaatctctgggctgcgggacccaagcaacagaaatttttggagtttcccatgtgatttaaatgtgcactcaagggccacaacctttgcgtttgccaacgtctattttaactggtcctactacacttttttgcaagctggaatcccatattggatgatgagttctatgaggacagagtcgatttcttcttagtttttstgtccctagtgcctaccacaatacctggtatttagaaggcatataagaactgaagtagagataaaaagaagccctcttcaatttcaaaagtctagataacttattacactaaaagcatcttaatggtttccgttttattctctgctctaaacaactttgatgagctgtcaagtcatttggtatttaaccaaatcaaagatc

SEQ ID NO: 253691 - DNA, 608 bp, Homo sapiens
tacagtacatgggaagctgaacttaaaagactttgaagttctcatccaacccacagaccctgtgatcctatgaccttataaaaatgaagagaccaattagttcaccatagaagtaatacgttattattagtatttccacacatggcttgcaagtgacttagctggttcttgttgaagctgccttcactatgtggcaatcatcsttcctccccgcccccccttcattatactaatatatataattgaacacagaattcatcgagaaaaatggaaaactgattttattgccttgtgatattgacttttctttataattgtaactcctcccagttatgccaagttgctggggcagagacaatagcagtgctttggctccataggagttaagaaaggaagaagaaacttttttgttcatttgatttttttttttccacttggaatagaaatccggttctgaaccttgtttcatggtttgatttataagtccttccttttagccaaggaatatctttttgctaaccttagagcaaattagccagatgcttatatatttgatagagcttttccttctgttattaataattaaagtaaaagcaatcataatgaaa

SEQ ID NO: 253692 - DNA, 584 bp, Homo sapiens
cataaaataaaatttaccttcttattcaattttaagtgtacaattcagtgacattaagcacattcattcacattgttgtgcaaccatcactgtccatccccagaactttttctttcctcttgcacaatcgaaactctatacccattaaataaatctctccatcccctgtcaaccatgttcctatttttggtctaagaatttgactactctaggtaccttatttaaatggaatcacacagtattcttttttgtaagtaagtttttttttttgtgactgacttccttcacttataatgtcctcaagataatgagaatttccttcctttttaaagstgaataacattctattgtatgtatctaccatattttgtttatctacttatccaacaatgggtatgtcagttgcttccacctttggctgttgtaaataaattcttctgtgagcctgggtattgagatatctctttaagatcctgcttccaattccactgatgtatacctagaagtggaattggtggatcatatagtaattctatttttaatttttttggaaagctaagcaatatttttgcatcatatttctg

SEQ ID NO: 253693 - DNA, 638 bp, Homo sapiens
ttgatacctgattttcttggaatgtttacttagccacaaaactgacaatttatatacacaagtgctatatccttgtgttatttagtcattggcgtgtattcctaaagaattattgtgttttttcttcatgattttcctttgacatcattatatacatccttgaggtcagctcaccattctaactttggcctttatttaatttacctaaacatatattttccttgtctgagtgacttcttgatgccagctcatgggcatgctggagaaatgggagtgctctgaattgtagtcaatgcaggatggcttttgtgttctggttttgctcacccaagcaatacctactccccagggaaataggagtttattggaactcttggcagggtgaatactttagtccccacttttattgattagatttccctggtattttggtgggtgcaggcattcaaaatctttatagacagagcaaatgtaatgtaaccttttgttttyatccatttcttaataatatccccttccccccactaattattcttagaagccattaagcaagtctcctttcttcatattcttgttcctctcatcatagtttcattactgctgttgttttaaagattgggtgacattgggtgtatttg

SEQ ID NO: 253694 - DNA, 560 bp, Homo sapiens
taaaatgatagtactaaagtggaaaaaatgttgattatcacacaaaaatgtttccttatagaaaatagacactgaatattaatctttttttccagtagaggaaatttcacaatgaggagaacagcaaacagagctttttaagtaaaatcgccacttctttttttattatgtttcatatttcagtagtgaaatcaacctgcctttaacagacaagttgctattattttttaccaattccttttttttttttttttttttttttttgagacagagtctcgctctgttgcccaggctggagagcagtggcacgatctcggctcactgcaccctccacctcctgggttcaagcgattcttgtgcctcagcctcccgagtagctgggactacaggcatgtaccaccacacccggctaatttttktgtgtgtgtgtagttttagtagagacagggtttcagcatattggccaggctggtctcaaactcttgacctcgtgatccacctgcctcggcctccaaaagtgctgggattacaggcatgagccaccgcccccggcctaccaa

SEQ ID NO: 253695 - DNA, 604 bp, Homo sapiens
taagaaggggaaagaagttgagttataaaaggcactaacagctcacaatcacagaatcatcatggatgctcattctaaatcaaatcactctcttagtgtaaaggcaaccacattttgataataatgttgtcctcagactgatctatacagaaccttgaggcaggaggagacaagaggaaaaaggaagggattttaaaaatcaaatctgagaatctctacttttgagtagagagatcattatgccaaagggtctcaaacccatctgatcttcaggatggccaagaatatggccgagaaatacgggtgggtgtcttggccacactcctggagattctgartcacttggttggagatgacttagatgttcccagagtctgatgatcatccagctttggtaagccatgacctagtttcatgtacccttcctaccccgccttttcccaaaattaaacagaaagcccacctgtgcccaaggcaccagtaacttttacaatctccttgaaaagttgttttccagcccctgcttactcatatgtgttttggcttacactgaatattcagatgcatatattaggcattctattttagtacaagaggcaggaca

SEQ ID NO: 253696 - DNA, 574 bp, Homo sapiens
atttctaggtggatataaaatatccaaacccaaatctcaacttactgaccagtgagagtgctgaaccctgggtgtgtaatgtatttgtgcagactctctgggtgtgtgcctcctgagaattcactcctggagctcactcactgaagtcaaaagcaggtctgccctagatgatgtcacatgggtttgtttctcggatttagtgctcattttaatcccaagactggccacaaagcttaacgcttaactgcaggttctttatcctcactgacatttattttttattgaacaaaactaccctgctttagaaaatgtgtcccccatcattctacgaatgaatcaggcttcccaaatatttcactaaattaaaataggtgaaacctataaatagctaatggaaaatgtagagcagaatattactggcaacatgctgccttgggtaatttatgctaaatagctcctccggttcctctttatcatcactgcgaacttaattggtttttttttttttttttttttttaaraaaaagctggaaaaggaggtttgaaaatgagtgttcaaaagactttaaatgct

SEQ ID NO: 253697 - DNA, 586 bp, Homo sapiens
ttaaatcaagaaaccaggcaatgggaaactcaactgtcttgatgtcatttctttatctgtaaactctaatgggatctagtcctgtttaaaatggtaaagtatgaaaattgtataatgacaataaaaacgatgctggttaacatttattaagtacatattatgtctccagcactgtgctgagtactatttttaaataataacctgctagagaaagagctcttattaaagtcccatttcattctgctggtaagctgagccaggatttgaattaaggcagtctgactgcagacagcatattcttaactacttctctaaactacctttagtaccaaagaatattgttggctctgaaaataaacaaatgaaagcacatactaagatggtttatgagagaaagcgggctggaatctaaacaacacgatcaaagcagcagcaaagaaaaccaacccaaatgactttatgtggatgctataataatcattaakcacaggacattcaaagtgtccaaccaacctggaagaggacagacccatggaccaggagcagccaaacttggctgggcgatccagagaagaaatgttggaat

SEQ ID NO: 253698 - DNA, 555 bp, Homo sapiens
taaagcttggtaggttttccatcacagctaactagtgcactttgttggctctgtagtctcactgaaatagaaccctatgtgggtgtggtcactggtagatggtaagcagggtgctcacacaggtgtttcaagaagggggttccaataggccaggtacggtggcttacacaagtaatyccagcactttggaaggccaaggtgggtagatcacctgaggtcaggagtttgagaccagcatggccaacatggcgaaaccccatctctacttaaaatacaaaaaaaaaaaaaaaaaaaaaaaattagctgggcatggtggcgggcacctgaaatcccagctactcaggaggctgaggcaggagaattgcttgaacccaggaggtggaggttgcagtgagctgagattgcaccactgtactccagcctgggtgacagagtgagactccatctggaaaaaaaagaaggaaagaaggggccccaagagctgcatgagaactttgtgtaagtccttctaaaagcaattcattctgaatttcttaggatgaaagcatcataccc

SEQ ID NO: 253699 - DNA, 555 bp, Homo sapiens
taaagcttggtaggttttccatcacagctaactagtgcactttgttggctctgtagtctcactgaaatagaaccctatgtgggtgtggtcactggtagatggtaagcagggtgctcacacaggtgtttcaagaagggggttccaataggccaggtacggtggcttacacaagtaattccagcactttggaaggccaaggtgggtagatcacctgaggtcaggagtttgagaccagcatggccaacatggcgaaaccccatctctacttaaaatmcaaaaaaaaaaaaaaaaaaaaaaaattagctgggcatggtggcgggcacctgaaatcccagctactcaggaggctgaggcaggagaattgcttgaacccaggaggtggaggttgcagtgagctgagattgcaccactgtactccagcctgggtgacagagtgagactccatctggaaaaaaaagaaggaaagaaggggccccaagagctgcatgagaactttgtgtaagtccttctaaaagcaattcattctgaatttcttaggatgaaagcatcataccc

SEQ ID NO: 253700 - DNA, 602 bp, Homo sapiens
ctgtgggctgtttgctgacttccgtttgccatgcaaaagctctttagtttaattaggtaccagcaatttatctttgtttttattgcatttgcttttgggttcttggtcatgaaacccttgcttaagccaatgtctagaagggtttttccaatgttatcttctagaatttttatagtttcaggtcttaggtttaagtccttaatccatcttcagttgatttttgtataaggtgagagatgacgatccagtttcattctcctacttgtggctattcaattatcccagcaccatttgytgaaaagggtgtccttttcccactttatgttttcatttgctttatcaaagatcagttggctgtaagtatttgagtttatttctgtgttctctattctgttccattggtctatgtgcctatttttgtaccagtaccatgctgttttggtgactgtgggcttatggtatagtttgaaatcaggtagtgtgatgcctccagatttgatctttttgcttattcttgctttggctatgcaggttcttttttggttccatatgaattttagaattgttttttctaattctgtgaagaatgatggtggtatttt

SEQ ID NO: 253701 - DNA, 602 bp, Homo sapiens
ctgtgggctgtttgctgacttccgtttgccatgcaaaagctctttagtttaattaggtaccagcaatttatctttgtttttattgcatttgcttttgggttcttggtcatgaaacccttgcttaagccaatgtctagaagggtttttccaatgttatcttctagaatttttatagtttcaggtcttaggtttaagtccttaatccatcttcagttgatttttgtataaggtgagagatgacgatccagtttcattctcctacttgtggctattcaattatcccagcaccatttgctgaaaagggtgtccttttcccactttatgttttcatttgctttatcaaagatcagttggctgtaagtatttgagtttatttctgtgttctctattctgttccattggtctatgtgcctatttttgtaccagtaccatgctgttttggtgactgtgggcttatggtatartttgaaatcaggtagtgtgatgcctccagatttgatctttttgcttattcttgctttggctatgcaggttcttttttggttccatatgaattttagaattgttttttctaattctgtgaagaatgatggtggtatttt

SEQ ID NO: 253702 - DNA, 594 bp, Homo sapiens
gtcatctgcaagtatgtatttcatatctttgtttaaataaaatagttacatagtagagggaaaaaaaatccatgtggattttgcatttcactcaattataaccttgatttttaatgctaaaaattatttttcctaaaatcttggggtaaaagtgttgctccaaagagcttttatcagattatgtttatcctgtagctgcctgtcccctgtgaccgatactggaaaccctcaggattacaaatgcytccgtttgcaagtaagagtgaaatacagcagaactgtgtcttctcctttgtcttgttccccatctctcttctgtgctttgtattgtttcctctcctgtcacctaaacaggcactctgaaagaaaactctccagtactggagaacttagcatattctaattcctaggttaaaaaaaaataataaatgactgaatgattttttttaaagaatattttccatcagaagaaatttggaagtattttgttgcagaattttaaaacatttgatctgggtctaattctgtcctgggactggtaatcatctttttttgaggctaaattttctcattttgatgaaaaagtcatcaata

SEQ ID NO: 253703 - DNA, 544 bp, Homo sapiens
ttggtttatgttttttactgtgaatgagccatacttctctatttcctggcatgccttgttattttttgtattggacacttgaatctaataatgtgataaatctaggaaaatcagatttctcccatccccagggtttgctgttttttgttattgwttttatttttattttttattattgttgtaagctgtctccatgccaaggatcagctgaggtgtaaacataagatcttcttaggtcttttctgagcctgcacccttccctggtcatgtgcagtcactttctaattttccctacacatgcagttgtttttgaatgtcccagcctttcacgtgtggctcccaaaaggaggaaaggagaaaaatgaagagggtgaaaaggtgctggccctttaattctcccagaagtcacttcagcctgagggagagtggctggcaacattgtgggggaggtgcaacaacaatggccatcaagcattttgtttgcacctctgtgatcagaagcagcagtgtcggaagcacagatcctcagaatttggagaacaca

SEQ ID NO: 253704 - DNA, 512 bp, Homo sapiens
agaatgaaagcagtcattgtaaataagacamcaggtaataggggcagactgagactctctctctggcacactggaatgatggcttgtattctgtaggcaacagagccccagctccaccaagaataaaatgtcatgactgcacccttgccccctgcacacatgaaagacagcagaatgtacacggaaagtgtagttacctgaggatgaagggataaacaaaatggtttaaacacaagatctaagaagtagacaagcagaatatttggtatatcacttcttaaatcaaaataattatttgggaaggacaacttttacagattctatctggtagagatttggtacgtattaggtatgtgttagcatagacaaagaaacataaaacaagatgaagcagtcccagcttcctttccaaggaaagaaagccatgactgcctcagaagaattgtactaatattagacttttattgagtgatttctttgtgacagtcattgcatcaagtacttcacacgta

SEQ ID NO: 253705 - DNA, 530 bp, Homo sapiens
gaagctgtagaataagaaagactgccacatacatcaatggcagtgggcgggctttgtttgaatccaactctagcatgcaaacatttgataaaaatttctttatttaaaaagaaaagtttacaaaacaatcagaaaaaataaaaaagattgaggatctcaggacaactactagcctagataatttataaagattagataactgactcatttttrttagtttctttcctaataaggcaatatgtattagatatatcagagtagaaggaaatatttttcttacatctatttggctttttaaatataaacatatataagtaaaaaccaaaatgatttataatcccaccatttatgtaactatcttattttcaaaaaaaattatgcaaatactagcatttgtgtgctttttttccttttgtgtttgtgtgtttatatcctttttaaatatatcctttttatgtacctaagcagctgtatactatactgcatactatagtgtgaactttgttcttttccttcgtctttacaacata

SEQ ID NO: 253706 - DNA, 513 bp, Homo sapiens
tacatttatttcctcagcaaataatttgtcacaaggaagtaatgtgcatccctgggcactgcttgcaggcacttaattcttgattcaaatgaaactttaaaatgttttatccatgatgttatgtctaaagaaacatgtcaaagaaacatgtcagagaacttgactttgaatagaaatcatggctgtgctttgagggaaacaaaataaatcacagaggtaggaatgcatagttacaagctactgtttgtacacagcagagaccaattctactctctgttctcatttcctcttctaattcctcatccctacactccttcctgtgtgaagcccatgtctgatcctgcctawttcagtgactgggggtcactgcagatgcgtgcacagggtcctgttatgggatccggattctgccgccttctccagacacaagtttcccctcatacctgttgttccagcaaatccaagctattctcctttccccacttgcactaggttctttccctagtctgtgct

SEQ ID NO: 253707 - DNA, 608 bp, Homo sapiens
agagtcaaaagccataaataatctaggcaattcaggacctatgtcaacatcattaaggcttttcaaggcagtgttttttggttttttattttttgtagagacagggtctccctatgttgcctaggctggccttgaactcctgggctcaagcaatcctcctgcctcagcctcccaaaactctgggattacaggtgtgagtcaccatgccyagcttcaaatagacattttaattctgacagtgttctgataaccaggattttctgctctcagaataccagatatcaatttgaaatggtgtcaaatagctttttaaaaagtgtacatggtaaaagaagcagtgatccctttgtttaaggaatttaaatgataataactttgtcaatctgagactaagaactcctgggccagagagtgcaaaaagcaatacagaagagatacaggcttctgaatactgtaattcttttttaaacctccttcttcaaaagaatcagcccgattcatgttgtacttgaattcaagataacaaaacaccttttagttacttagaaagattagattgtaaaatatgtgctgagttcctagaaattaaaagtgagaatgaaaaaaag

SEQ ID NO: 253708 - DNA, 608 bp, Homo sapiens
agagtcaaaagccataaataatctaggcaattcaggacctatgtcaacatcattaaggcttttcaaggcagtgttttttggttttttattttttgtagagacagggtctccctatgttgcctaggctggccttgaactcctgggctcaagcaatcctcctgcctcagcctcccaaaactctgggattacaggtgtgagtcaccatgcccagcttcaaatagacattttaattctgacagtgttctgataaccaggattttctgctctcagaataccagatatcaatttgaaatggtgtcaaatagctttttaaaaagtgtacatggtaaaagaagcagtgatccctttgtttaaggaatttaaatgataataactttgtcaatctgagactaagaactcctgggccagagagtgcaaaaagcaatacagaagagatacaggcttctgaatactgtaattcttttttaaacctccttcttcaaaagaatcagcccgattcatgttgtacttgaattcaagataacaaaacaccttttagttacttagaaagattagattgtaaaatatgtgctgagttcctagraattaaaagtgagaatgaaaaaaag

SEQ ID NO: 253709 - DNA, 557 bp, Homo sapiens
atatgatttccaaaaccttcagaaacttgtattcgagagtacttctcagaatccttttcatgaatttccttgaaggataagcaaattttggactgtagctgattataaaccactttttatgaagaatctaagtaaaataataattgtctgtagatgacaaaagacttaaagcagtcttagttaaagacacaattgaccaggaaatttggttatgcctgtagcatacaacaacttgacataacaatcgtaattattactgatcatatataccaaaacatattggaacttttggaatctcattcaattttggaacagatattaatcatattaatacatttatacaaatatattcaaagaaagttaaacatmatttcttatttgacaatgctttctgtatgatttaaacatatcaaataagcctgatctgcctctctgtaacttctaggggacctcatatctgaaaagttatttcgaggtaaaaaaaaaaaaaaaaaaaaaaaaaggactaaattttaatttgaaatatgattttggaaagtttgtcaaatatcaaaggt

SEQ ID NO: 253710 - DNA, 605 bp, Homo sapiens
ttgaggtttgggaacctctgcctggatttcagaggatgtatggaaatgcctagatgtcccgacagagttgtgctacatgggcagagcccttatggagaacctctgctagggcagcrtggaagggaaatatggggtgggaacccacacacagagttcccactagggcaccacctagtggagctgtgagaagaaggtcaccatcttccagacaccagaatggtagctccaccaacagtttgcaccatgtgcctggaaaagctgcagacatacaatgccagccaatgaacgcagccaggaagggggctgcaccctggaaagccacagaggtggagctgcccaaggttgtgggagcccacatgttacatcagcgtgacctggatgtgagacatggagtcaaagattattttggagctttaagattatactgccctgctggatttcagacttgcatgaggcctgtagccactttgttttggccaattcctcttatttggaatgagtgtatttacccactgcctgtaaccccattgtatctaagaagtaactaacttacttttgattttacaggctcataggcagaagggacttgccttgtcttagatgag

SEQ ID NO: 253711 - DNA, 613 bp, Homo sapiens
ccatacatccctatattgaagggtttggaattttgaagtggggggcagttgggggaaaagaatggtagcttgtatttatttgttttgagcaagggtctcttgctatatcaccgaggctggagtgcagtgactcttctcaggtgtggtcatagcacaatatagcctcgaactcctgtgctcaagagatcctactgtctcaggctcccaagtagctggcactacagatatgtgccactgcacccactatggaatagtaactttgagcatgggcagtttcccagaagcataggcctgtgtggctactgcttgggtgtgtgtggctgacagtggaaggaagatgaaaggaaagaaggtctgtttgtccagagggcagaatcagagctttaggtttctgggaagggagaaacagctgagagatggaggacagtgtccagggaagaagaaaaagacaaacccaatttcattgagagcaaattttgagtagcagaatctgagagagtcctaggaagcttgcagagaaactagaagcaaatcatagcgtggagggcrgagcaatcatgtctgtgggatgaacagaaggatttgaaaaatgcatgattaggtcaaagacagg

SEQ ID NO: 253712 - DNA, 550 bp, Homo sapiens
gagtagctgggactacaggcgcctaccaccacaccaggctaatttttttgtatttttagtagagacagggtttcaccatgttagccaggagagtctcgatctcttaaccttgtgatctgcctgcctcggactccgaaagtgctgggaatacaggtgtgagccaccgcgcctcgccgaaaatgtgagtttcaataaaataattatatatacatttagagctaatgtatatatctgcttgtatattttcaaaggttatttaaaattgccataaactactaaggcttacttaagtttaaacaaacccccaaacactttgtatttagaattatgaaataaagwtgaaaagttcctagagttagccagattggactaaaaaaccaataagaaggcttgaggaaggagaaagagaacaattttaaacaatgtagtgcagaatacatcggttgggtctttgaaacaaatttcattttattttcctctagttatgaatgatgcaaagatgttttctgttaaaggcaagaaagcttattctagactaatacaaaccccc

SEQ ID NO: 253713 - DNA, 620 bp, Homo sapiens
atctatttttctacatatagatatatgcacatattaacatatatttttatatatgatttatttgtatttatttayacaatgagtttgagaaggtgtaatgtcacttcgcttagagcagtgtatgtggactttgaaataactttgtagataaacctcgatctaacatttatcagtccagcaccttatgaaagttatttaacacttttgatcttcagcttccttatgtgtaacaaaatgcaattgtacctacctttctggactgtcttgaggatttaatacaataatataagtggatgttcctagcattgtgtctagcacatagttgtaattattaaaagttgcaggatccccaaaccaaccctttctgtagttaatcttgatttttaaatgtggtcatactgtggaaagctggaaaggttctgaagtgataatggaggtaaatccagccacagtggtcagatcacagacagggctgatgaggagaagccaagccaggacaagacagaatctcaatattgatggcaggggtacccaggtcctgcgttgattgacaaaatcccagctccaactagaaatgcccttaacttctaagagtcctgatataattttcacctctcctg

SEQ ID NO: 253714 - DNA, 620 bp, Homo sapiens
atctatttttctacatatagatatatgcacatattaacatatatttttatatatgatttatttgtatttatttacacaatgagtttgagaaggtgtaatgtcacttcgcttagagcagtgtatgtggactttgaaataactttgtrgataaacctcgatctaacatttatcagtccagcaccttatgaaagttatttaacacttttgatcttcagcttccttatgtgtaacaaaatgcaattgtacctacctttctggactgtcttgaggatttaatacaataatataagtggatgttcctagcattgtgtctagcacatagttgtaattattaaaagttgcaggatccccaaaccaaccctttctgtagttaatcttgatttttaaatgtggtcatactgtggaaagctggaaaggttctgaagtgataatggaggtaaatccagccacagtggtcagatcacagacagggctgatgaggagaagccaagccaggacaagacagaatctcaatattgatggcaggggtacccaggtcctgcgttgattgacaaaatcccagctccaactagaaatgcccttaacttctaagagtcctgatataattttcacctctcctg

SEQ ID NO: 253715 - DNA, 366 bp, Homo sapiens
agtaagcactaataaatgttagttgctattagtattcttattcctgctactatttctatggggcagggaaaagagtagcttttgggtaaatgaagtcttcatttattgtggcaggatatcaaaggagaatgtataaattaataaacgaagaaagagtgataaaagtatatttgagaaatgaaagtaaatgccaggaaaacyaaaatcagaaagagtcaaaagtgattgcctctgaaaaatgaggactccaggtgagagggatgttttagccaatactacttcatagtgtaagcccttttatattatttcaccttgtaaaactcatgttttttaaattatgagttatattttaattcattttttgaa

SEQ ID NO: 253716 - DNA, 659 bp, Homo sapiens
caaggttagtagcagcattattcacaatggccaaaaggtgcacacaacccggatgtccattgatatagatggacagataaacaaaatgtgttatatccatacaatgggatattatttagctataaaaagcaatgaaattctgacacatgctacaacatggatgaacgttgaagacactatgctgaatgaaataagccagacacaaaacgacaaatatgattccacttatacaaagtacttagagtagtcaaattcatagagacagtagaatttaacacctgttactgacagacacatgatttcctcatattcattactcactcaaagtctggaatgttcaaggccagccagagcctaagccaaagtaccagtgataattcttatgttttgcttaaacataaggtktgtatttgtttttctttgaaggatgaaaagctgccgtctgtaatcctagcactttgggaggctgaggcgggtgcatcacttgaggccaggaggtcgagactagcgtggccaacatggcaaaaccctgtctctactaaaaatacaaaaaaattagccaggcatggtagcgcacatctcatctactaggcgggctgagtcacaagaatcacttgaacccagaggcggaggttgcagtgaactgagatcgcactgct

SEQ ID NO: 253717 - DNA, 603 bp, Homo sapiens
agggaaccactgccaaatgtagccttactttgatatcttcttctggcctctcaacctctgtccttgcttcggacctgtctgacttaatgacttggctctatgctggtgacagagcaggagggtcagtgtgtgggttgaacaaggaagatcagtgttcagctcctacttggaaaaatgaaggcagataatcttgacccataagtcactgttgctcagataaaagagcacagttctgaaaaatttgcagacatacaaccaatgtaaattagaggttgaatatgcatatgaagttgaatatgcatgttttatgatttagtcattaaatatatattttaactaccaagcacctggatctggtattcygcagaaaacatttggaaatctcacttaggatctcctaacttcttctagctcttgttttggcgtctttgcaaatagcttctgatcccactctctcactctgactgcttggtttatcttgtctagggccccttgttgccctcaaccctccattcatcacaacatctggtaccctcagttggcaatagggggcacctatatgacagcacctatgtgctcttctgttctgccttaggagactca

SEQ ID NO: 253718 - DNA, 647 bp, Homo sapiens
ctgctctcccgttcttcctaattgagattttctcccattgactcggttgaagctcacagcctggccaggggcagctgcagctttgtttaatgggcctgggttctccctgtgcacagtctctgctattttaagggatggtttttcatttgcaagcctgagattctaagctctattgtgtgcgcttagtttattatgctgctagataaagtttcaagatagtgcttttactctagagtgacttcatttttcaaattagtttcttccattttggtaatctgaaagtatggcacaatcatctgatcttggcttataatgtcrattttgatagcgtctaaagtaacgccaatgctaggaacaaatattttgatggtttataaaagcgtcaatcatcagcgaagagatctgggcaactagtaattgttggggaggacttaattctcaccagccattaaatatgtgaaaatcatgggacctgctgttttttaggttgctaccgtgtgtttcacacgggaaactaaggtacctaataaagttgtttggaggaagacacttccaaaatccatgaaaatttcagcttaaagcctatttttgtcaaagttacatgggttactaattcagttcagaatttactgtgaaattcatagctt

SEQ ID NO: 253719 - DNA, 647 bp, Homo sapiens
ctgctctcccgttcttcctaattgagattttctcccattgactcggttgaagctcacagcctggccaggggcagctgcagctttgtttaatgggcctgggttctccctgtgcacagtctctgctattttaagggatggtttttcatttgcaagcctgagattctaagctctattgtgtgcgcttagtttattatgctgctagataaagtttcaagatagtgcttttactctagagtgacttcatttttcaaattagtttcttccattttggtaatctgaaagtatggcacaatcatctgatcttggcttataatgtcaattttgatagcgtctaaagtaacgccaatgctaggaacaaatattttgatggtttataaaagcgtcaatcatcagcgaagagatctgggcaactagtaattgttggggaggacttaattctcaccagccattaaatatgtgaaaatcatgggacctgctgwtttttaggttgctaccgtgtgtttcacacgggaaactaaggtacctaataaagttgtttggaggaagacacttccaaaatccatgaaaatttcagcttaaagcctatttttgtcaaagttacatgggttactaattcagttcagaatttactgtgaaattcatagctt

SEQ ID NO: 253720 - DNA, 520 bp, Homo sapiens
tgcctacctaacaattgagtagagcaatgaagcaggtaactagaagatggatagttttcttttccacattcagactatctgtaagctggcaaataaaaaatcttaatgaaacttataagatctactttgtctctgtctatatgtctttatgttatgtatatgtaatatttctatgtgatctaagataatgtttagtaaataaagctaactgtaaaattggtaaaataaaayagaaatgtctccaaattatcattattaaatataatttagacatttttgcctgtgtcttctggttagacaggtttatgcagtctctgctacatgttcttaggttataaaactattggttctgtaatatttttgatacctgcttgatttgttcatgagctaatgctgtcaaagatggctgctgggcacccccagagccttgcacacatcttactgtgagcttacgtctttagttttgagtctctagattctgaggtctggacaggtggccatggtgaggcttgagaacatg

SEQ ID NO: 253721 - DNA, 616 bp, Homo sapiens
atttacagttataagttttctaaagtaaatgctctaaggaaaatgaagtcagggctctagacacaggacaaaactgtctgaagtttgatcaagagaagggaaacagtaaggtcactttgattaccttctttggatcaccctrtgggaattggggcgtggggaaccagcaacagaaacaaaaattgatggtactctgattattgctgttgctatgagtaataaactgtatttcttctttgatctaggagtcatgtcttaatcaatatgcataaatttgtggcagtctaatttgtcagcttggtaatagggtaaaactcacagatgcttcagacttctttataatcaggcttcaaattgtacccttttaggaaatattcatcagaatttctgtacagctaaagagcacatcaatcaatatttacattatatttaaatatttagcaactgttgagcatttaagaaaatttatttatgaagatgtgagtttactagaaaagcaatgagtactagttatatatatcttcccatggatggctctctattaattgtatttaattgcttgtgtttagtaattttagctaataatatgaaagatgtcatattttctaagctttac

SEQ ID NO: 253722 - DNA, 421 bp, Homo sapiens
gaaaatttatttatgaagatgtgagtttactagaaaagcaatgagtactagttatatatatcttcccatggatggctctctattaattgtatttaattgcttgtgtttagtaattttagctaataatatgaaagatgtcatattttctaagctttacataagtttattttaacctttttgggaarccaaagcacagaaaatactattctgaaattcagattggtaatattacattgctttaaggtaacattgttgtaagtaacaaagtattttaaatagcagtgtagaaatgctctttaaaagtagaggcccaagacgtcttacctttgattcttagtatctgtttcttcatatggtcataaatatgggaattagtattattttataaagcatctaggtcataatactatttttggctccc

SEQ ID NO: 253723 - DNA, 491 bp, Homo sapiens
aatgagtgtgttctgacggattcaagaccaaaattgcatcaatttcatataacaaatttagtgaggcttctagtaagacagattaagctaaggggtatatatgccagcacagccagactcacttggtgaataaagaaaacacacacaaaaaaagtgaataaacgtcgatgtgtggtgcttggccaaatataacctcagattccccaaacaatatagacagacattagtggttatttttgtttcttctttggtagctgtcttggcttggttcttttgcactttacattctagctaagatgtctttttgtgatttttaaaaaattttcttagctcacaaacagatactgattctgcctgaacacatcttataagtaggcttgaattttaataaatatgtagtaccacccccttaagaatctgcaaaatgtataaaaacagagtttctttcatgatttactatgggaaartggattcattcattcattcattca

SEQ ID NO: 253724 - DNA, 574 bp, Homo sapiens
gtatcccaacttgtatctgggagaaaagcgagatgtttagctgatagcactgacagcagaaaaattttcctttttatgttaggaaaacacagtctgtatcctgattgaggcctgtaagtggtatagatggtagaaaaaggatattctttcccatttatgacatttttttctaaggatgagtaattatttttactgataagtccattggcaagagatggtttttggtaagcaggctgtgttcaaattggataaaacacagaaacaatgtttaccaatattgcyactctgtgaaatggactgtagctttatggctgtatacacattgagaaaggcattaagttcgctgcattttcactttaagattttctagtccacggaaatcaggaactacaggtgtcacaatgaagacagtggccagagtcctaataaataggtttatgcttttatactcacaaatgtgcaatcatttattttaaaaatgctgctaatagactgacaactgactcatttacattttctctgctaaattcttgagtaaacgaagagaagagatgaatatgatgagcctcctact

SEQ ID NO: 253725 - DNA, 556 bp, Homo sapiens
tgggagaaaagcgagatgtttagctgatagcactgacagcagaaaaattttcctttttatgttaggaaaacacagtctgtatcctgattgaggcctgtaagtggtatagatggtagaaaaaggatattctttcccatttatgacatttttttctaaggatgagtaattatttttactgataagtccattggcaagagatggtttttggtaagcaggctgtgttcaaattggataaaacacagaaacaatgtttaccaatattgccactctgtgaaatggactgtagctttatggctgtatacacattgagaaaggcattaagttcgctgcattttcactttaagattttctagtccacggaaatcaggaactacaggtgtcacaatgaagacagtggccagagtcctaataaataggtttatrcttttatactcacaaatgtgcaatcatttattttaaaaatgctgctaatagactgacaactgactcatttacattttctctgctaaattcttgagtaaacgaagagaagagatgaatatgatgagcctcctac

SEQ ID NO: 253726 - DNA, 644 bp, Homo sapiens
agcaactattgtttttcatgtatttggcactrtgctatacagagcttacagtattagaagaaagagacaaataaataagtaaatctttaagataccaaacaaaattggaatctaggcaacagatcagaaaatatgctcaaaggcatcagtcccactgctgagtaaaaatagatcagaaccacctttgccctcacatctgcatcccagtaatgagggctggtgaaagaagggtgtcaagataataggaaccttctataccagactttgtaatacccacttctgcatcttctaattcattcttcttacagttgccagagggatcatttcatattgcaaatttgaccagaaagaaaaattgagttttatttctctgtaccaattattaacattataattaaaactctttctacatcattttttttttcactaaactaggtgccatgtgctgatactgcccaagatagctttccacccatctctatattcttgtgcttggtacaatttctggcacagaataggcacataacaagaatgtattgaatcagtcagacactaagaaaaatgaacctcaatatttccacaaggaaaactttcttgagataaactgtaaataggttgttatacagacaaatgaattgatagag

SEQ ID NO: 253727 - DNA, 613 bp, Homo sapiens
gcaacacaataatagtagggaactttaatactccactgacagcactagaccgtcatcaagacagaaagtcaacaaagaaacaatggacttaaactataccctggaacaaatggacttaacagatatttagagaacattctacccaacagctgcagaatatacattctattcatcagcacatggaacattctccaagatagactgtatgacaacccacaaaacaagtcttatcaaatttaagaaaactgaaattatatcaagtactctctcagaccacagtggaataaaattggaaatcaactccaaaasaaaccctcaaaatcatgcacatagatggaagttaagtaatctgatcctgaatgattgttgggtcaacagtgaagtcaagatagaaattttaaaaattatataaactgaatgataatagtgaaacaacttattaaaacttttgggatacagcaaaatcaatgataaaaggaaagttcatagtactaaatgcctacatcaaaaagtctaaagagcacaaacagacaatcaaagatcacacttcaaggagctagagaaacaagaacaaatcaaacccaaacccagtagaagaaaaaaaaaataacaa

SEQ ID NO: 253728 - DNA, 496 bp, Homo sapiens
aggaacagtgaggtgaaaccagagagagagctaaaggaatacaaaagccagcatctcttgtggacagaggtttccaacaataagatctggagcatctgccttgggccaaacacaaggcrggagaacaaggaaccagagatgctgcattaagcctgaatggttaaagggggctgacatggctctaagttactgaggcctttggttctgggttgaagcagattcaggctcattagaggaaggcatctgcaaaatgtaggcccctaagaagtccctgagagtaaagaaaattaattatgactttaaaataatattacctgacacagaaggaatcaaacttctgttgtcagaaacaacaaacaacagatttagaacccaaccttttagatgttgaaattattagccccaggatataaaataaaatgtgtaattgttaagaaataatggacagaatgaaaaaaaataagtgaagaacattaaaattcataaataaatatat

SEQ ID NO: 253729 - DNA, 586 bp, Homo sapiens
attatatcatttattagaaacaaacatgaaaattacactttttgcatattatttttcttgtgtacttattcaggaaaattaagacagacataagaaaatctgaagaggacaaatttttggagatttttccaataactctaaaaacgtaagaataaaatcttcaaatgcatatgtttagtttttaaacaaataatttattttcttttgaaggactaaattagtaaacacaattaaacttataaattataactttcaccattcttatacttctttataattgtctatttatttatctggcttctacatgatattctcaacttctcaaagacagagattcttttcataattgagatcccagcaagaatttgccttgcatttcacatttcttrgcattgaaatagcattctcaatatatccaacaaattgtttggcttgtgttaagtgattcaaatctcttttttattttatatgaactcttgtacataagcacaagaaatgaataaggaacttaaagatgaataagaagcagacagcagctacaattaaggagatatttaatttctcccttaatcttaaattacaataa

SEQ ID NO: 253730 - DNA, 565 bp, Homo sapiens
acaaacaaaaacaaattaaaaaccaaagacacaaaaaaagaaataaatgaaggtccatgctgtgagaatggatagcctgcttcaaaagaatggcacatagatttcaagtacattaatcacaaaatctatatattaattaattttaagaaattagatgtgaattgagcaatcgagagtgacaatagtgttggctaaaaataaatacttttattttttcctgtaaagaaaaccaacatttaccaggtttcatgacattatcaaaagaaatgttcctagactttaaaaactatttatattctgaaaatataaaacaattaatttcaatacaaattatttgtttataactgcataacggtaataatgttcctaataaacattttcattcagatgtttttgtaygtatgcatttctaaaggatattagcaatgggatttctgggtcaaagagagtgtatactttgaagtgtggtaaatgttgacaattggtattacaaagaggctgtgttaatttacactccactcctaccatcagtgtaatgagcatgtcagttgttctacattctctc

SEQ ID NO: 253731 - DNA, 590 bp, Homo sapiens
taaatacatttgttaaaatattattcattgtaaataaccattaaatttgttacgataatacaccaaaatttacttgttgatggtttcatacattgaaccacatgatcaaaatagtcacatgtttagcaacattaaagcattgctgagtgttttaatcctgtgtgcacactcttcaaattgcagctttctaagagtattatatgattttatttgaaatgtttgtaataatacataaattatgctaaaggtatttcaaataatcttctgaaagtattgctttataaaaataggatgcatcattcaagtatctagattttgcagtgtttttgcaatctctcaaacaaaaaatagaatcaattttcatgtctttttaaaaaattgtcttctttctrtaaaaattatctaatgtgtcaagaaaaataccctcttgtctagaatccttgtcatgattctctgcactatattgcctgtatagatgctgcttgacattgtaaataacttttacaatactatcataagtaaacaaaacaagatacatgaatttattcttgctggatgacccacttttattacataaatgacatacactc

SEQ ID NO: 253732 - DNA, 571 bp, Homo sapiens
tttatttaaattttaggatcatatttccaatatacacacaaccacaatcaaactacatgaaacaattttaattttaaaaagactgcattaaatttataaattttstttgttttttgttttttttttttggggggggggttttgtttgtttgcttatttgtttttgagacaaggcctcagtatgtcacccagacagtggtgcaatcttggctcaccacgacctctagagatcaagagatcttgagcaccacaatctctggtgctcaagcaaaccttccaccttaacctccagagtagctgggactacaggcatgtgccaccatgcctagctaattttttatttttattattattgtttttaaattttagtgagatgagatctcactatgtcacccagtctggtcacaaattcctgggctcaagtgatccacctgacttggcttcccaaagagctggaattaaaggcataacccatcatgcccagcccaattaatttttttatattgactgagtatatagcaatcttattaattcaatctaacagtttctagtttgattcatatgaaattatt

SEQ ID NO: 253733 - DNA, 559 bp, Homo sapiens
ttcttctggactatcttttcaggaatgtttgaatactgtgcaactttggaagctagagatagtatcttcttctgaagcaaaggacagatttgtttattgttcagttgaaaaataaattttaaaaaaatcttccttcatttcaaagggcaggtatagtcactgcccattctaaaatattcaggttctctaagctcaagtttccttttttgtaatgcatcctgttacacatacaggtgtcacttggtcctcttcatgtcacaatgtggtaattggcatttgtggaactgaggaaaatgctgattttcttgctactactrttgccatgaataacacagtcttttgctctgatccaggagtcttctattttctgccagcatccattaaaccctggcaggttaattgttagcttgcaagcagggtaaaatcgcagatccttacaattctcaacactaccctcggtctcagcccttctcacgtgagtggataacagtatgttctgaattccagacattccaaacattttgctcatctgtctgttaaaaacttttatctgcaatca

SEQ ID NO: 253734 - DNA, 554 bp, Homo sapiens
ctcagaaatgtttagaaacaatacaaacagaaaccagttagatttgcaacaatcagaattttcttagctaaatttaaccaaggagaggaaaaacataaattagtaaatatgaccaataaaacattaatatgtcagtagaatgcrttttgcataggcaaatctagtgtcaacttcaggtaagtttaagctaagtgatcattatcacattgtaagcgtacaaaagcaaggactcacctcaggaataatagaagaaattacaacagaaaaactcaatctatcatctgaaggcctaaacaacaactatttagtatgataccatccctgacttattcacccgttacaaattcactcaattgttagggattagaaacaatcttatcattagtttgaagctatttagtgtgtttatatgtgtgatataaattttgacttaatgaaaggctcatccactaatagcagccacaaatattacacaaaatatatgttaagtgtctattaatcttcagtactacactaggtacaattgaagatatggagtggtagaatatatactt

SEQ ID NO: 253735 - DNA, 554 bp, Homo sapiens
ctcagaaatgtttagaaacaatacaaacagaaaccagttagatttgcaacaatcagaattttcttagctaaatttaaccaaggagaggaaaaacataaattagtaaatatgaccaataaaacattaatatgtcagtagaatgcgttttgcataggcaaatctagtgtcaacttcaggtaagtttaagctaagtgatcattatcacaytgtaagcgtacaaaagcaaggactcacctcaggaataatagaagaaattacaacagaaaaactcaatctatcatctgaaggcctaaacaacaactatttagtatgataccatccctgacttattcacccgttacaaattcactcaattgttagggattagaaacaatcttatcattagtttgaagctatttagtgtgtttatatgtgtgatataaattttgacttaatgaaaggctcatccactaatagcagccacaaatattacacaaaatatatgttaagtgtctattaatcttcagtactacactaggtacaattgaagatatggagtggtagaatatatactt

SEQ ID NO: 253736 - DNA, 554 bp, Homo sapiens
ctcagaaatgtttagaaacaatacaaacagaaaccagttagatttgcaacaatcagaattttcttagctaaatttaaccaaggagaggaaaaacataaattagtaaatatgaccaataaaacattaatatgtcagtagaatgcgttttgcataggcaaatctagtgtcaacttcaggtaagtttaagctaagtgatcattatcacattgtaagcgtacaaaagcaaggactcacctcaggaataatagaagaaattacaacagaaaaactcaatctatcatctgaaggcctaaacaacaactatttagtatgataccatccctgacttattcacccgttacaaattcactcaaytgttagggattagaaacaatcttatcattagtttgaagctatttagtgtgtttatatgtgtgatataaattttgacttaatgaaaggctcatccactaatagcagccacaaatattacacaaaatatatgttaagtgtctattaatcttcagtactacactaggtacaattgaagatatggagtggtagaatatatactt

SEQ ID NO: 253737 - DNA, 560 bp, Homo sapiens
atatactttctatacacaagatatgaaaaatctcaatgttcaaaaaagcaatttcagaacaaacaagtagaaaacaaacaagtatgagcatgacaagtattcttgtattaagcatgtgtgactgactcaatttctaatggtaagattctcagaaaaaagagaatgttagtggcattgtaagatagttgcctcttttttaaaaaaygagcaaatttgtctgcatgatctatgaataatatagcataaaattttagcatgtatttaaaaatgaataagttgaagggaatgtttatagattcatgaatccaaagtcttaaatatgagtctgactataatccttttaagcttaataaacatgaacaagttattcagtttcattagttttaattcctttatgtataatataattttattttattcctcaaaacattatattaaaatgagatcaaatatttaaaaatattttgtacatgtttaaatcatgtatcattgtttaaaaatattgttcaaagtttacaaattctatttaagatgaacaataatagataataaaaacaatg

SEQ ID NO: 253738 - DNA, 583 bp, Homo sapiens
tcaatctccctgtgaatgtacagcaaatgataataaacatatctttcctccacactaaatctcctttagtagatccatggggtaataagtctgagtgtgtttagcatatatttcatgaatacctgatcttaattctccagtgtgtggctattctctggaaaagakaaatagtctccctagggcaaaattaaattacttctatgatacagacttgcagagaataagtaaaagatttagagataaatagaagtcacctaatgtggcactaatgtaatcttgcattttaaaatgagtaaatctcaatgaatcacagaaagccttcaattagagtatcttagtgaggttgggtgctcatttatgaaaaaggaaaacatgtattttttacaggcttatagtttaggtggagatcactggaacctcatattcttttactacatgtctgcaaagacattttatgacttctttttttgccatacaatcaggaatactagaacctaattgtcatgattgccatctttttctttcattccagtgtctacattttcaacgaaagctagaaaaattcacatattatatggaagac

SEQ ID NO: 253739 - DNA, 603 bp, Homo sapiens
ttttaagtagacaaaaatataataattaaaatgactatgaaatcactttgtaaattgtaaagtcctatatacctattataaagaacaatttaataaagactaacagttcttgaatttacactttgtcttatgaggattgtaaggagaagtacaaattactttcttttaaagatctgaaatatgccagcaaattgactaagtgcttcctttcctatatttagaacatamatgttagacagataacagagtttaattgcaaatccacagatttagacattcacaggtaagcaaaattaatacttgttcaatgttcatgttcccagcactgtattttgcattcatgtctactccaccatcaatccaaagtaaaatttaaagaaattaaatatacacagattgatgggggaagagagagaaaaggaaagagagagagaaggaaagatgactgacaatgcccttgtagaagactgcctttgatttacacgccaataaaaggttcagtcagttaaagccaggttgatgggggcacaagatatctgtgttctccgatgaggcagagtgcttcctttataatcagtcttattcctttatgatcagttgaat

SEQ ID NO: 253740 - DNA, 603 bp, Homo sapiens
ttttaagtagacaaaaatataataattaaaatgactatgaaatcactttgtaaattgtaaagtcctatatacctattataaagaacaatttaataaagactaacagttcttgaatttacactttgtcttatgaggattgtaaggagaagtacaaattactttcttttaaagatctgaaatatgccagcaaattgactaagtgcttcctttcctatatttagaacatacatgttagacagataacagagtttaattgcaaatccacagatttagacattcacaggtaagcaaaattaatacttgttcaatgttcatgttcccagcactgtattttgcattcatgtctactccaccatcaatccaaagtaaaatttaaagaaattaaatatacacagattgwtgggggaagagagagaaaaggaaagagagagagaaggaaagatgactgacaatgcccttgtagaagactgcctttgatttacacgccaataaaaggttcagtcagttaaagccaggttgatgggggcacaagatatctgtgttctccgatgaggcagagtgcttcctttataatcagtcttattcctttatgatcagttgaat

SEQ ID NO: 253741 - DNA, 585 bp, Homo sapiens
tttctaatctatgttcatgaagatttatgcctgtgttgtctttttaaagttttagatttcaaacatttaaggtcttaaattaagaaatatgatccgtgctttgagttawttttgtatttgtcatgagatagcagttctacttcattcttttgcatgctgtccttgcttcttttgttgaaaagacctttctttcccactgaattcttggcacccttgtcaaaaatcaattggccataactgtgagggtttatttttgtatttttcaattctattacattagtctatgtgtatatctttatgccattcccacattttcttgtttactgaagctttgtagtagtttttaaaatcatgtagtgtgatcacactgtctttggtttttattttaagaatttttggatattctgggtcccttgtatttccatatttttttaaaaaagatcagtttatcaatttctacaaaagggtacctgggatttaaatattgattgcattgaatctccagatcaatttgtgagtattgccacgtaaaaaaaaataaatcttccaatcttgtatatgagatgtcattctgttgagttaggt

SEQ ID NO: 253742 - DNA, 585 bp, Homo sapiens
tttctaatctatgttcatgaagatttatgcctgtgttgtctttttaaagttttagatttcaaacatttaaggtcttaaattaagaaatatgatccgtgctttgagttatttttgtatttgtcatgagatagcagttctacttcattcttttgcatgctgtccttgcttcttttgttgaaaagacctttctttcccactgaattcttggcacccttgtcaaaaatcaattggccataactgtgagggtttatttttgtatttttcaattctattacattagtctatgtgtatatctttatgccattcccacattttcttgtttactgaagctttgtagtagtttttaaaatcatgtagtgtgatcacactgtctttrgtttttattttaagaatttttggatattctgggtcccttgtatttccatatttttttaaaaaagatcagtttatcaatttctacaaaagggtacctgggatttaaatattgattgcattgaatctccagatcaatttgtgagtattgccacgtaaaaaaaaataaatcttccaatcttgtatatgagatgtcattctgttgagttaggt

SEQ ID NO: 253743 - DNA, 541 bp, Homo sapiens
cagagccatgcaagtgcccaccctgctcttgcatgaccccaaaagagtgcctccttgcttgtctcccccagccctgaccacagtatgacacaattaaaatgttaactgatagatcattaaagacaccttttgatcttatatcagtttgtaatttttgttgtgtaactcagaagaggttcaaaggaatgactaccattgctcaatttctatctttaggaatagacttcttctggcatatatgtatatccattttatgcygactttccatatgtgtgtgtgtgtgtgtgtgtgtgtgtgtgtgtgtgtgtgtacttcatataaattgagttatatattatatatataatttatgtatataaattgaaaagtaggcataaaatgaatgctcaatcctttcttattctagtaataaatcataatcatccaaagaaaaagacatacttttatgtaattgtttgtattagtttcttatagctgctgtaacaaattactgcaagcttctttgcttaaaacagcagaaactcaacatcttacagttctg

SEQ ID NO: 253744 - DNA, 451 bp, Homo sapiens
gctttttcacttgcacctgccaccccatttcctggtaggttcttctctgtatagcaggaacctaagtcagagttaaagcatagtctctatagttgatggctttggttttcatcaagtgcaattatttgtaattttaaaaaataaatcccttaaacctcaaaaaaagtaatttggatacacttgtactttgcttgtaatatgkcctctagagtaagacatgtttccgaactcattctaagaactatactgttggcttcaacttttaccaacagtctcacctaaacttatttcttttcctattatgtctgaggaaaaggttaacatctacttgtcagacaagtagcagtttacaacaactccggaggaggaaaaaaaatgccttaaattgtcagttccaagaacctcattggactatactttttcaaaggatggagtcttaggaagaatgtaa

SEQ ID NO: 253745 - DNA, 621 bp, Homo sapiens
aggtttagttatgtgggggcttggtaggagcagaaaccacagttattctgcagtgggaaggtgttgaggagyttatggaatatgaagtgatcatttaggaggtggcagcacttgaagtattctacgaattctctgtgtaaactctgaagtaggagagggaaaccaaagcttaggggactttaaataggctcatctaaaagtaggacccagctaggagccccagtccaagatcaaaatgttagggccagctctgaaagtagaatatctcctagaatatggctataaatctttttctgaaggagaaatatggcaaggtaactagattagccttatttaacacaactgtactaaaacaactatttacctcacagaattttgaatcagtatactaaagggtgagacttgaacataatatgtgcattgttttaatttttttttaaattatattacttgacttcaaattttacaaggctatagtaacctaaacagcatagtattggcataaaaatacacacacaaatgaatggaatagtatagagaacctggaaataaagccacatacctaaagtcaactgaccttcaacaaagttgacaaagacaaaaacatatactgggggaaca

SEQ ID NO: 253746 - DNA, 621 bp, Homo sapiens
aggtttagttatgtgggggcttggtaggagcagaaaccacagttattctgcagtgggaaggtgttgaggagcttatggaatatgaagtgatcatttaggaggtggcagcacttgaagtattctrcgaattctctgtgtaaactctgaagtaggagagggaaaccaaagcttaggggactttaaataggctcatctaaaagtaggacccagctaggagccccagtccaagatcaaaatgttagggccagctctgaaagtagaatatctcctagaatatggctataaatctttttctgaaggagaaatatggcaaggtaactagattagccttatttaacacaactgtactaaaacaactatttacctcacagaattttgaatcagtatactaaagggtgagacttgaacataatatgtgcattgttttaatttttttttaaattatattacttgacttcaaattttacaaggctatagtaacctaaacagcatagtattggcataaaaatacacacacaaatgaatggaatagtatagagaacctggaaataaagccacatacctaaagtcaactgaccttcaacaaagttgacaaagacaaaaacatatactgggggaaca

SEQ ID NO: 253747 - DNA, 559 bp, Homo sapiens
atagtattggcataaaaatacacacacaaatgaatggaatagtatagagaacctggaaataaagccacatacctaaagtcaactgaccttcaacaaagttgacaaagacaaaaacatatactgggggaacagacaccctataaatagtgctagggaaattggatagtcatatgcagaagaataaaactgggtccctatcactcaccatatataagtactaactcatgatggattaaagacttaaatataagactggaaactattaaaaaatactagaatacatgctttgaaatgtgattcatcacataaacagaactaaagataaaaaaaatgattacctcaatagattcagaaaaggcttttgataaaattcaacatccctacatgttaaaaactctcaataaactaggtattgaaagaacatacctcaaaatagtaagagccawcaatgacaaacttacagccaacaccatactgaatggacaaaagctggaagcattccccttaaaaactggcacaagacaagtatgccctctctcactacttctattcaacataa

SEQ ID NO: 253748 - DNA, 618 bp, Homo sapiens
ggttatgcaaggattagtgattcaagaaaggaattggttaatgagatggtgctttacagtggaattttctcctagtatgtaagcaaayaggtatcaaaaaccaaagggaacatgatgatttttagtggaggattcaaaaaaaaaggtagctgaaaactggttaggcagtttaaggcaattacacttcttatccacattaagcagatataaatgggctaaagatgagaatgaaagcagaagttgtaaaggggattttgaggaaggccactgaagtacattgagttctcctactcatctcaagggaaaagggaatttatggctgctttttaccctgagcctatgagaaggatttcactggggccactcagagttgatgtacacactagtgtctaatttctgcctgagaatagagtaagacatagtctgagtagctgcagacaaaagaggcctaggcatggctacactaggaggactgtgcacccaacattcactagggggaaaggaagcatgaccatttctcatggaccagtgatagaccaggtataagatagagctgtgtatgagccagagggttgcctgaagaggcaaagcaatatctgcagagataaaccaaagagc

SEQ ID NO: 253749 - DNA, 633 bp, Homo sapiens
ctggttaggcagtttaaggcaattacacttcttatccacattaagcagatataaatgggctaaagatgagaatgaaagcagaagttgtaaaggggattttgaggaaggccactgaagtacattgagttmtcctactcatctcaagggaaaagggaatttatggctgctttttaccctgagcctatgagaaggatttcactggggccactcagagttgatgtacacactagtgtctaatttctgcctgagaatagagtaagacatagtctgagtagctgcagacaaaagaggcctaggcatggctacactaggaggactgtgcacccaacattcactagggggaaaggaagcatgaccatttctcatggaccagtgatagaccaggtataagatagagctgtgtatgagccagagggttgcctgaagaggcaaagcaatatctgcagagataaaccaaagagcctgattttcagcacctgagaatggagcgagtgaccaaactcactagaacagagatcagaggaactgcaggtgaacactcctgagcatggctccaggttctgtgggagcatcaaaggaagcatcactctaaacattcgccaggtccagaaaaagccattattgatgtaagga

SEQ ID NO: 253750 - DNA, 606 bp, Homo sapiens
tttgaggaaggccactgaagtacattgagttctcctactcatctcaagggaaaagggaatttatggctgctttttaccytgagcctatgagaaggatttcactggggccactcagagttgatgtacacactagtgtctaatttctgcctgagaatagagtaagacatagtctgagtagctgcagacaaaagaggcctaggcatggctacactaggaggactgtgcacccaacattcactagggggaaaggaagcatgaccatttctcatggaccagtgatagaccaggtataagatagagctgtgtatgagccagagggttgcctgaagaggcaaagcaatatctgcagagataaaccaaagagcctgattttcagcacctgagaatggagcgagtgaccaaactcactagaacagagatcagaggaactgcaggtgaacactcctgagcatggctccaggttctgtgggagcatcaaaggaagcatcactctaaacattcgccaggtccagaaaaagccattattgatgtaaggactttccttaacctttttttcctctttatttctcatgtttcaacccagagtggccagaaactaacaaaatg

SEQ ID NO: 253751 - DNA, 606 bp, Homo sapiens
tttgaggaaggccactgaagtacattgagttctcctactcatctcaagggaaaagggaatttatggctgctttttaccctgagcctatgagaaggatttcactggggccactcagagttgatgtacacactagtgtctaatttctgcctgagaatagagtaagacatagtctgagtagctgcagacaaaagaggcctaggcatggctacactaggaggactgtgcacccaacattcactagggggaaaggaagcatgaccatttctcatggaccagtgatrgaccaggtataagatagagctgtgtatgagccagagggttgcctgaagaggcaaagcaatatctgcagagataaaccaaagagcctgattttcagcacctgagaatggagcgagtgaccaaactcactagaacagagatcagaggaactgcaggtgaacactcctgagcatggctccaggttctgtgggagcatcaaaggaagcatcactctaaacattcgccaggtccagaaaaagccattattgatgtaaggactttccttaacctttttttcctctttatttctcatgtttcaacccagagtggccagaaactaacaaaatg

SEQ ID NO: 253752 - DNA, 515 bp, Homo sapiens
cattattgatgtaaggactttccttaacctttttttcctctttatttctcatgtttcaacccagagtggccagaaactaacaaaatgcagctaaaaggtggaacaatggtgagtaaggagaaaagaagccacctataccttcttccttcactacaggcttcttttaacaatagttcagagctggcagggaggtgtgggggagtggagaggcagcagatgccttacttttgaggctgtttggagtactgaacatatgtagaatgggacatatcaattcttaaattgaaagtaaattaagtatacatgtgccatgytggtgtgctgcacccatgaactcgtcatttaacattaggtatacctcatgtacacatatgtaactaacctgcatgttgtgcacatgttccctaaaatttaaagtataataataaaaaaaaaagagcttatttcgaagcactcttgtgagatgtaagtgtaaagtcacacagttcctgacaaagtaaatgtttgctgttatt

SEQ ID NO: 253753 - DNA, 654 bp, Homo sapiens
ataaaatggaccagtgtaaggaaaggagaggcaatgttcgatgctgtagacaagattatgctgtagggattacgagtttatataaccctgagctagtgcagtgaacaaggctgaccttgccaactgaaaggaaattaattttagtggtcaatgctattaaattttaagtatcattcaccagaacaatagctgggtaccaggtactgggaatatgtttacctactcgaatagctgcaattgtgtctatcaccaagttaagtttacagtaattctctgttaatttttaaaaatccrtctgtcttctgcacaggtcagataggcaagtggaattgacatgttgtctggattaccactccattttatatcacctttacagtggcaatgatatttctaatttctccaagagtatgattgcattggtttactattttggtaaacagagtccattctaatggcttctgtgtgacttttcctataataatagacttcaccttatatgtctggaaaccagtgtggagactgccagtttctgagctaccaacttttcactatggaatagagaagataaacataggttgggggtggagatccatagcactgattgtgaaatagacataggtcaaaacttcataaccatatgacccccatatgccc

SEQ ID NO: 253754 - DNA, 654 bp, Homo sapiens
ataaaatggaccagtgtaaggaaaggagaggcaatgttcgatgctgtagacaagattatgctgtagggattacgagtttatataaccctgagctagtgcagtgaacaaggctgaccttgccaactgaaaggaaattaattttagtggtcaatgctattaaattttaagtatcattcaccagaacaatagctgggtaccaggtactgggaatatgtttacctactcgaatagctgcaattgtgtctatcaccaagttaagtttacagtaattctctgttaatttttaaaaatccatctgtcttctgcacaggtcagataggcaagtggaattgacatgttgtctggattaccactccattttatatcacctttacagtggcaatgatatttctaatttctccaagagtatgattgcattggtttactattttggtaaacagagtccattctaatggcttctgtgtgacttttcctataataatagacttcaccttatatgtctggaaacsagtgtggagactgccagtttctgagctaccaacttttcactatggaatagagaagataaacataggttgggggtggagatccatagcactgattgtgaaatagacataggtcaaaacttcataaccatatgacccccatatgccc

SEQ ID NO: 253755 - DNA, 596 bp, Homo sapiens
tgccagtaccaacatcccctttctggttagctgttcgtgctttgtaaatcgaaacttgggttatgrtctcaaacctacttcagcaaatagatgcaataagaaaaataaagaaagtttaggtgatagagaatgagatgggttggagtgtgtagtcagggaaggcaactctgataaggtatcatttaacaggaaacttgaaagaagcaaagagcaagtcaccaagatatctaacagaaatgctattaacggcagaggcaataccaatgcaaatgctcccaggcagaagcatgcttggggtgctccagggtcactggggaggccaaacaggctgaagtgcagtgcataaggaaaagcaggacaaggttacgtagggcctttcgtgtgtggtagccaaaagcccgttatttgcaacagtcctggtttatgtctattttccaaacaaattaatagcacctttttatcctggtgtagtgacacatgcctgtaatcccagctactctggaggctgaggccaaaagaccccttgagcccgggaggtcattactgcagtgagcaatgatcaaacctctgcattccagcttggttgacagaataag

SEQ ID NO: 253756 - DNA, 590 bp, Homo sapiens
caccacagttttgactaaattgtatgcaaaccattttgaagctttcaaagttctcattatgccagtaccaacatcccctttctggttagctgttcgtgctttgtaaatcgaaacttgggttatgatctcaaacctacttcagcaaatagatgcaataagaaaaataaagaaagtttaggtgatagagaatgagatgggttggagtgtgtagtcagggaaggcaactctgataaggtatcatttaacaggaaacttgaaagaagcaaagagcaagtcaccaagatatctaacagaaatgctattaacggcagaggcaataccaatgcaaatgctcccaggcagaagcatgcttggggtgctccagggycactggggaggccaaacaggctgaagtgcagtgcataaggaaaagcaggacaaggttacgtagggcctttcgtgtgtggtagccaaaagcccgttatttgcaacagtcctggtttatgtctattttccaaacaaattaatagcacctttttatcctggtgtagtgacacatgcctgtaatcccagctactctggaggctgaggccaaaagaccccttgagccc

SEQ ID NO: 253757 - DNA, 557 bp, Homo sapiens
gcacatagaacagccagcatgcatagtagctagagaatgcgtttaacaacctggtaaagagagtctgggtggttcatcaataaaccccaataaatctaggggccctctctggttatggayttgcctgtatctccttttagtgaactcaatgtttatattatattttttgaaagcatgttattagtacatacaaatgtagaattgttctattttccaaataattattttatcattaagaaatgcctttgctatgctttttttcttaaatatatattgtctgatatattagtaaagccattgaggatttatttctgttagtgacttgatggaatcacttttccattgttttacttccagccattctatattgtgacttttaaattatgtttattataggctgcatatacttgggttttactatctagtctgaaaatctttttctcttaattgaaataagtgtgtacttaaatattttattgagtgagattcacaacataaaatttaccattttaaagtgtacaattaaatgcatttaatacattcacaaagttgtacag

SEQ ID NO: 253758 - DNA, 556 bp, Homo sapiens
aaactttttttttcaaaaagaaagatgattgtttgattttctatccatcccaaaaagaatgtgrggaagtttgtaaagatacagaatatgagttaacatcattaaggacacaaattaaagaaaagaaaaataagataacatcaggtcaagggtagggactgaatacctcccatgagttgacaagatttagccagaggtggggaaagaatccacatataaatacagtgcagatgctctctaactggatggaaatggaataattatgttaatttgtccctttttatactcagagatggcttttaattcttttcaaggattcagaattagaatatgtccacattatttggcccttgcctcaatctctcctttcaggacaaaacaaccctctagtgtgaccttcacgcagtatagattactctcctgaagatcaggttagcaggttgtcttgcttttacaccattcacatgtgcccacctggctgttgggcagatgttctcctgtagggtacaaaaatctcccaacattaagttttaattgcatctccataattgttgtt

SEQ ID NO: 253759 - DNA, 576 bp, Homo sapiens
ctctctctctctttgcacagctttcattgcttaaacaaaagctactctgatttgtttgggaatcaatttgatttgagaaggcactggggctctgtcagtaagcaacraacaaagtacaatttccttttaatggaattgggattatgctttgaggacattgctttttcccttcttaagggaatcgggagaatgaagttgggaactctttgccagtggcaaaacataggagccagttgatcagaacctctggtgctttttttcaaactgcttgggcaatagaaatgagagaaagattcccagttctcaagaatgtgattaatgaaagcattagagagatcatttaatggcatggagtgggtttgaaaatttggtgtcaaatggtttggttctgatatagatttagcacggatatggatctaaccaaaactgttatgtgattttgtttaaccccaggtgtgttccaaatcttaaattatttttgcagtaaaaacttgatataagtaattcattttctatagggtcattttagggattaagtgggaaaatatgttttaaaattttgtagatgattaagag

SEQ ID NO: 253760 - DNA, 576 bp, Homo sapiens
ctctctctctctttgcacagctttcattgcttaaacaaaagctactctgatttgtttgggaatcaatttgatttgagaaggcactggggctctgtcagtaagcaacgaacaaagtacaatttccttttaatggaattgggattatgctttgaggasattgctttttcccttcttaagggaatcgggagaatgaagttgggaactctttgccagtggcaaaacataggagccagttgatcagaacctctggtgctttttttcaaactgcttgggcaatagaaatgagagaaagattcccagttctcaagaatgtgattaatgaaagcattagagagatcatttaatggcatggagtgggtttgaaaatttggtgtcaaatggtttggttctgatatagatttagcacggatatggatctaaccaaaactgttatgtgattttgtttaaccccaggtgtgttccaaatcttaaattatttttgcagtaaaaacttgatataagtaattcattttctatagggtcattttagggattaagtgggaaaatatgttttaaaattttgtagatgattaagag

SEQ ID NO: 253761 - DNA, 576 bp, Homo sapiens
ctctctctctctttgcacagctttcattgcttaaacaaaagctactctgatttgtttgggaatcaatttgatttgagaaggcactggggctctgtcagtaagcaacgaacaaagtacaatttccttttaatggaattgggattatgctttgaggacattgctttttcccttcttaagggaatcgggagaatgaagttgggaactctttgccagtggcaaaacataggagccagttgatcagaacctctggtgctttttttcaaactgcttgggcaatagaaatgagagaaagattcccagttctcaagaatgtgattaatgaaagcattagagagatcatttaatggcatggagtgggtttgaaaatttggtgtcaaatggtttggttctgatatagatttagcacggatatggatctaaccaaaactgttatgtgattttgtttaaccccaggtgtgttccaaatcttaaattatttttgcagyaaaaacttgatataagtaattcattttctatagggtcattttagggattaagtgggaaaatatgttttaaaattttgtagatgattaagag

SEQ ID NO: 253762 - DNA, 564 bp, Homo sapiens
cacaggccactgatgacctgtccagttctaaagcaagtgaggctattgaagctggcatttccctgatcccttcatgggactcataaaggggatgccctgtttactgagcccacagctctcgactccttgcaggaggtagcacgtgagcaaatgaggtgagtactggrgcatacaagtgctggagtgagctggccatgctggcactggcaggagtgaactcctctcacttggactcattacgttccatccctcatgagaagggggggcacgcaggtgagcaggtgcaggagcttgggcgagtgctttttggcaccagcaggagccaattctgtgctgggcctgtgacagcatcttgcagggggtgtctccaactccctgaagccccagaagcagtgttacagtgctcttgtcattctgccatctgcagatggcttaggcattaacagctcagtggaccctcttccttttcatgtgaggtgactgccttctgccagtgagggcaaagcgtcatttacatccacgctcatggctcttgagttcttgttgggcatccagaaggaatga

SEQ ID NO: 253763 - DNA, 635 bp, Homo sapiens
cttataaataaccttaaagctctagaattaaaaaatcaagcaaataaaaaataaaaatccctctctgaaattcatatttatcttcaattgccaccccatctctctcattttccctttattcttattacagtatattatttcccttattcttattacagtatattattataattatattttatacccattcttcaactgtgattttatccttaattcagtgtagcctgatacctaccctcatcattccgttaaaaaccattctcattctaccacctgtgatttccatactattaatctcctttaaccccattaattttcaggacttgaattatttgatctttcagaagctctgacagtgttattaaaacactctttcctttgatttccatgatgcttcatgattatgatttttattctgyttctctggctgattatcattcttcttcgcagactcatcctcatctatgtagtaattaatggaattcctcaagctttactcctatgccctctttccccttactcaatgatctctttgtagatgatattctccacctgcattagtctattcttgcaatgctataaagaaacacccgaggctgggtaatttataaagaaaagagatttagctgacccac

SEQ ID NO: 253764 - DNA, 635 bp, Homo sapiens
cttataaataaccttaaagctctagaattaaaaaatcaagcaaataaaaaataaaaatccctctctgaaattcatatttatcttcaattgccaccccatctctctcattttccctttattcttattacagtatattatttcccttattcttattacagtatattattataattatattttatacccattcttcaactgtgattttatccttaattcagtgtagcctgatacctaccctcatcattccgttaaaaaccattctcattctaccacctgtgatttccatactattaatctcctttaaccccattaattttcaggacttgaattatttgatctttcagaagctctgacagtgttattaaaacactctttcctttgatttccatgatgcttcatgattatgatttttattctgcttctctggctgattatcattcttcttcrcagactcatcctcatctatgtagtaattaatggaattcctcaagctttactcctatgccctctttccccttactcaatgatctctttgtagatgatattctccacctgcattagtctattcttgcaatgctataaagaaacacccgaggctgggtaatttataaagaaaagagatttagctgacccac

SEQ ID NO: 253765 - DNA, 671 bp, Homo sapiens
ttgcttttcttcatttcattcagaaagccatgctttttataagttgcttctgatttcaacttaggtgataacttttatcatccaggcattatatgatatattatacaaaacattttgtttcaaaatagatggctatttatgtggtgatctggggaaacattatttcacctgaattaggccacaagcatatcactgtcactaatgtaatgatgagaatacacaaccgatgcaaatttgaagacaaggaagccaggaagggtgtatcaatttgaaagatgtgttattttgtattggatgttagagaaaagaagaaaagggacaaataggtggcaaagactgcttataagctgctatgagatttttgctgtatttgaagggagtgcaggaagagctttttggctgaacaactgtccatgtgggtagagtcaggagtggttagttttgaagcatcttagttctaaggcacctacacataaatctgtctcgttcttcttaccagtgactgaattcacttctgttktatttcagccaaagaaaattttaaatctatagtggattgagtagtggctcaatagagttctgtccaaatccttatcctcagtactgtgaatgtgagcttatttagaaatggggtgatatggtttggctgtgttcccaccccaaatttcatc

SEQ ID NO: 253766 - DNA, 529 bp, Homo sapiens
agaacaactcaattaggtaaacatcttttgaatattatgtatgctgactagatgagcgaaagggatagagaaggatcaggtggtgtggagataaataagatatacagtgagtgcttaggagatattaagataatagaaaggatgattwtatattttaaactccaagatggtgaacaaaaacaaaatgtggtgaatttcagagtgatccaaacatggaaatgggcctaggtatgtgattaatgacaaagaacaggtaggcaaattactagttattaaaagtcatattttactcatgatctatgttggaatgcaaagtattacacgattttcagcagtaatttgttatattgataatgcatgccatggaagaagctgggtagcacttggtaatacaaagttttcaaaatacaaagtggtaagtagtagattcagttaattagtaatggataatccatgtacaattcctgccttccagaaggcaacagttggagataacaatgacaatactaaaggtattaaaaagaatata

SEQ ID NO: 253767 - DNA, 587 bp, Homo sapiens
taccctattgatcagttctgtgtcaatgtaaaggagtactaaagaaaaatacaaatattagaagacaaaagtcattgaagtccatcttggagggtgcctatcacaaattaatatctggaataatttttaaaataatatgtatgtacatatgttgtgagttctgtcatctgctttatgagttttcttctaactctgaattatgttgtttatacctatctatttcttaatgtctgttaacatttgtcaatataaaaagttattgttttgatctgtcctttgagcaagtatttctggtgtgttttgttatgtataaaaatgttttttttgttcagtagtctattttcttttatgacaattgttataacatttgacattaatatttttctattacttatttttatattgtgagttyctattacttattttatatagtgagtatttattgcctgttttgagattccactcttctctggtgcattagatgtcctattgcagccccgtgctctcttaaaaacagagatggttactatgcacataaaatggctgttggttgtctttaccacttgtgctttggagctcaggaggtt

SEQ ID NO: 253768 - DNA, 605 bp, Homo sapiens
tgtaatccaataagaatggtgtcttcataaaaagataaaagacacagacttaaacaggggaatgccacatgacaacagaggtagagattgaaattatgyatctgtagttcaacgaatgccaaggaaacaggaacataaaacaaatacaggagaaataatacacaatggaatcagacccacaggactcatgttaaaatcattattcctatatgtctggtaaagatggcatttgtgaatttactgttgagtcttcagctcttcttcagcataaaccgatgatagttaaaacatgaaaagagaacatttaaaattaagataaatatcttcatggaccaaaaagtacatggaaagaaagtggtgaccagaagataaactatagtattggtcacatcaaagtccaaaaatagcgaaagggggctgaggctgtgagtatgactcctagagaaattaccagaaaagaacaacaaaaatacctggcacaaagtgggggtcctgagtcaggccaactgcttaaagcaggggatggagtgggggtccctgtcaaccactgcctgtggctgcagtttatataaagatctctgccaataaaggcagaggacaaagag

SEQ ID NO: 253769 - DNA, 638 bp, Homo sapiens
cttcccattttgacctactaaataaatcttatgaattatcctctatacctctatacttttttccttgactaggatggctaatacccaggacaactctgaaagccatatactgaaaatatgacaggcataattcaatgattccccacatgattttctgcccccttgtgttgacccagtgattcaatcaaatgtcagtataggtgctgctgtgaagagcttttaccaatgtaattagggcmctacatcagttgaccttaagacagaaagattatctttggtcagtctgacctaatcagatgaaaccttaaaaagaattgggttcttaatggagatttgaagtttgagaggaatttgacctgagagatattatcagttgctggctttgaagagggagggggcaagaaatgaaggtggcctctgtgagctgacaaagacctggctgacagccagcaaatactggaatctcagttcctcagcatggaagagaattctgccatcctcctgaatgagcttggaagtaaaatccctagagcctccagaaagaaacacagccaggccaacaccttgattctctcattggaaaacaaagagcagagaatttagtcacgttgtatctccacttcggacctccagatctc

SEQ ID NO: 253770 - DNA, 443 bp, Homo sapiens
ctttggcactgtaaaattgccacctccttgggattttgcactgtgtgcaataactccatgatatccttgtggtatttaatgggggttcccctttctgtaaaggaactccctttctttccatatcacagcatggacatgtaggattagataagcatgcttgctacctgtatacacatttattcttttttccyttcccggttctaaggcttgggtaagcgccactagttctgctatctgggtgctggtccctgcgggaagtggcctactttcaagtagttacatcactaactatggcataacctgctcttcatatcccattctccacaaataaacttccactggtatataggttaaggtcaggattagctaaggggacttctaagagatcctctcgggtggcataagtctgggccacaatttgttggcagtcatgctctattggt

SEQ ID NO: 253771 - DNA, 504 bp, Homo sapiens
tactttattctaagttttattatttaccataccagtaaaattttggaatcaaattaagtataagtagaaaaatatatatatttgctgagctccaagcatgtgaatgaactatgcaattggtccacctatcatttgaaatatttatcactctcccaattagaaatatgaggaatttgagacctcgagattttagtaattttctgaagattactgaagcgagagcataggtagaattgaaattctgtgctgactccatagctcaagtgacctctatcacaccatgctgctgctaccttractggtccagatagtgcgaaaagtggagcttgcttctatgggtagtatttgatgtaaagcacctgtcatctgtgttgcttacatgacacctcaaagtcatagttgttatcatgacttgttcttgcaaaagtctgtcttgtttctcatgcatggctagctcaaaagtggctatgtacaacagtcaattctacctttcttaacctttat

SEQ ID NO: 253772 - DNA, 397 bp, Homo sapiens
gaaggaggaaatatagctaatttcacaaatatttattgagtatctactatgtacatccatatccacacatggatacagacaaaaggctatttctctccaaacactcaagggatccacaacctaagatagttgcagaataaataaattacaacatgaagggacatttataactctataactgcatgaagtttaaagttattaaaggagggtgtgctacatgaagcatcrtgggaatttttctagaatggaagtttctgaaatgtgattggacagtatcagcatcagcaataagaaggtaggaagacaaagggcattttagacggacaggggtacagaaatacaactaacatgagtataactgggaatctaccatcactttggtattactggaatgtat

SEQ ID NO: 253773 - DNA, 557 bp, Homo sapiens
tgtattgtattaattagctcaattttaaaacagtaataacagctctttagaattcaggcaaagtaaatgctatatatctatttttaagtaatggagccaaatctgttgatgtttackttccaagttagcataaggcaagcaatttgagagaaaagagacattgcccttattctcactaaagtgcttgatctcctccactactactgactatgcactagtaggccaaaacagacacagactgaaatatgagcaaatggtattggttgaaaatcatgattctaccccactcccactgacctggcaaactgatggattgggatcatagtggaaaggaattaagttgtgttctatatgattactacaaatcttcaatatatgccttactctgtttatctatagaatgagagtaataacaatggcgccagcttctaggcttcttatgagtattgaataaaataatgcctgtataaacctcagtatattgccctgactcaataaatggttggtgatgattataatgacaatgatgtcaacaactgagtgtatttggcctatta

SEQ ID NO: 253774 - DNA, 607 bp, Homo sapiens
cttgaaagtaaaatgtgtgttagcttcactcccatgctaacaatatgggattgcccttaatctgagtcaggaggaattttttgaagtggagacagtgatagcatagggcctaccacactctttttttttttttctctttctgtttgagggtactcttttactatttaataaaaacctcrgattctttatttagacttcttccttcagaataagatggaaatagatttaaatctcagcttcattttgtaatatcatgttcatttgtcagtttactccaccttcgtgagcctccactttctgccatgtaagatcatgatgctaactcttacctgctagtgacattgaacaaattgaacaatattgtgtatacgaaatttctgtcatattagacctccaataaatgtgatgtctttttgttggaacccattcttgggaagatctgaggaactttcagtaagacaattgcctctctcagagacattttcctgtgatcccaggtaagaaaattaacctttggaaagcaggttctttaagggtaatattgctacttttctgggatgatttctggattaggagtagcatatgtaatgtcccttggacttagtaa

SEQ ID NO: 253775 - DNA, 589 bp, Homo sapiens
gatgtcttacaataatgacattcttaagaacaaattcagttaataagggctagcattgacttcaaaccaccaaggctttcctgccccttccagaaaaatagaccaatttcacttctggaaagtggctaaaatgagggaggcgagaatttattgctacctgtcctcttacttcctccttcttttccagctccctttctttttcccctcactaaataaacaaggaaacccattctttcgccttctactctcctttactctgaagtttagatcaatagtcttttatatgtagcagtttcttattgagctcaaaagtatttttgacccattctttgacccatgtgtggacaaagactgtgtgtgaaaggaaggaggatggagagaaaatagactataaagaggtgggagcagaggacttcctaatggaaagttggagcaaaaaccagtcaacactgttatgaacyccaaagaacacagtgtatttttccctataaagggaagtctcagcttagcactgagaaatgatgcttttcagaggtgatgggaacactcagaaatcctcatcacagctacagagcaaactgctcctaaa

SEQ ID NO: 253776 - DNA, 565 bp, Homo sapiens
gggagagacccagacatggcagcattcaccacaattggactgaagagtccctgggccttgagtgaacatggatgatagccaggcagtacttttcacaagcatgctgtggtggcagcaatggcaagagattcctctgcttgaggaaaggagagggaagagtgggaaggactttgtcttatgtcctggttgcagctcagctgcaatagaatagaacaccatgtagattactaaggtttctgactccaggtcctggctcctggacagcatctcaggacccactcaaggctggggggatctcttcaccctgaagggaatgacccaacggtggctggattcatcacctgctgattatagagctcttgggccttgaataaacagaagcagtagccaggcagtggtcaccgtgggccttgggtgagacccagtgctgtgcttgcatcaggtatgacccagcacagtcctggtggtggtgaccatagaggtamttgtgtcacccctagccctagctcctggaagttcagcacagagacagagactccttttgtctgggacaaagtaagggaag

SEQ ID NO: 253777 - DNA, 535 bp, Homo sapiens
ggcactggccaggtagagaacccatctgcataatcaaatgttagggtgcggtggccaaattctttggatgctatgcaaatggcacacctggttagaccaatcttttgtgccctaggtaaatctgatatcaccccctcaagctcatctayaaaaccttctgcatttcactgtggaagcagtgacccgttttctccaggacccttctctgctcagagagctctttctttctttctcctattaaacttctgctcttaacctccctctggtgtgtctgtgtcctagttttccatggctgtgagacaatgaacctcgcgtattaccccagacagtgacgccgcttcaatagtgagtaagttcttgtgagatctggttgtttaaaagtgtatagcatcccctctctcactctcttgctcctgccatgggagatgctcgctccccctttgccttctgccatgattggaagcttcccgaggttctcctcagaaacagaagcagctgtgcttcctttacagcctgcagaactgtgagtcaatta

SEQ ID NO: 253778 - DNA, 565 bp, Homo sapiens
gttcagcatggaggctccatcttcccttttctttgtcaccatgtgtacagtaaagaaacaggcaacatggcactggccaggtagagaacccatctgcataatcaaatgttagggtgcggtggccaaattctttggatgctatgcaaatggcacacctggttagaccaatcttttgtgccctaggtaaatctgatatcaccccctcaagctcatctacaaaaccttctgcatttcactgtggaagcagtgacccgttttctccaggacccttctctgctcagagagctctttctttctttctcctattaaacttctgctcttaacctccctctggtgtgtctgtgtcctagttttccatggctgtgagacaatgaacctcgcgtattaccccagacagtgacgccrcttcaatagtgagtaagttcttgtgagatctggttgtttaaaagtgtatagcatcccctctctcactctcttgctcctgccatgggagatgctcgctccccctttgccttctgccatgattggaagcttcccgaggttctcctcagaaacagaagcagct

SEQ ID NO: 253779 - DNA, 521 bp, Homo sapiens
agttacctacttttcatgctagctgctcaatgggtgttcatgctgcattgaacagaaaaaagtattcttcaagaagagcccacccttagaaggcttactatgcatgcatgaataaatttttccatatgccctccccatcactgttgtttgccataaccagaagtcctcttacctcaacaatatctttttttagacaaatggttgaattccactcacagaaccacactaaacatttccctggactgccctgatccaagyattatgctatttgtattcattaaaactgattaaggttttctttatatttatcaccagtttgactttcatagctgaggcttactctgctatcagcaggattcctggtctcccttggatgttttcaaagtgaaagtccaagaacacaaatgaattctggcagccacaagtcccaatttagtgtatgagttccagtgagatgagaggagctgtattttaggataacacaattaaataactctgaattaaacctatggtgtactcat

SEQ ID NO: 253780 - DNA, 567 bp, Homo sapiens
agatgaattctctagacagtagaactggagaagactgcatttgcctttcaactcattagctatccttttctctttttctttttaaaattctgaactacattaaacatttagcagtattggaaataatataacacttactactcaggattaatacatcttaactacttgtcatattcatatcatgttttaaataattttcatgttgtcaaaatgtacaattattatttgtaatagctctgtgatatacaagttgatcaaagtgatgtaccataatttacctaagcatttctctattgttagatatacaagctactagtcgtttttgayatatcttgctctgagagaaaaactctgcaatgaacagcttcaacatagttgtgtccttgagtaagatcactacctcttcttctttattgctcatttagtctcatatttgttgggattggcatctgggaaaagattgttgacctataattggtataaacatataggttattccttagtggaaggctgtgaaagatgtggttgtgtctaaatggcctgggaagcatcccaggaacagtagca

SEQ ID NO: 253781 - DNA, 623 bp, Homo sapiens
tttgatgacctcagtcaccacatagtctaacagtgtgatttacaatgggggcttttggtggaagtagtcatttcagttttgcctttgaatgaactggagtctagaagtatcagcctgacctctgaaaagtctggagactacaggtcagccatgtaggctgtataaaatctctggacactgaggctttggtcagcttcacttgcaatactctgtgtgtgtcacacattgtggccagaaggagttaaagagttaacactgtccatgactccatggggagaggatgactgtaaactgaacagttrgattccacctggactctgtccttgattttaatctgtattttttccctgtaataaactgtaactgtttacagtaagttctttggatgtttctagtgaattatctaagagtggttctggggacccctaagcttgcaactgattgcagaagtgaagttagtcttatgtggaggactatttcctctaatgctcacagttggtgaaaactcctcacagcgtaacttattctattcattaaaccgccctccataggacattgtattgtcagatgccttgtctaccctaaaggatatacagtggttctcaaagtgcagtccatagacc

SEQ ID NO: 253782 - DNA, 587 bp, Homo sapiens
tttaagagatgggaattttctggaatataccaggaccatttgaatgtgttttttttaaaataaattagttcataaatactatcctagcagcttgatattaccaaatgatgggaaaaatttttttaaatatttttttctgaaataaatggaaaatttttcactgcacaattgttttgtaggactcactcaatatttgatcwttgttgcttgtaacctttcaattgcctttggttgtgcttagaaacccagtttccagccttcctactccacacctcccccagctctcctagccaactaagcttcagccatggtggcctactttctgctactctataaggctacttctggcctcaggatcttagcactggctccttgcctctgcctgaaaagctcttctgcagattcttgtgtggctggtatcttcttatgatttttttacagtgcctcttctacagagatatcttctcagatcactttctattcaaggttctccaaacactctcctgttactctgattttcttcacagtacctacaactacctgaagttaactcagttgtttatttactgcctgtctcacctattaga

SEQ ID NO: 253783 - DNA, 331 bp, Homo sapiens
gtataaggaactttctgtaccgtttatttacttatcaggaaaaacatatggtaaacagaaattggctcttcaaaatgcaactgaccaccctcctcyaccccaattctaccccgttaatactttctgcccctatacaggatactcttctcatgcatctagcttcatttctaattatttacatttcttatttcataggaacatttggctaataagattataccagatcatccaccaatgtgccatcctaactatgtaaatgacagagatctgaagatcattttgttttctatatgacaaagtgaaagttatttacctctatactaaacatgta

SEQ ID NO: 253784 - DNA, 561 bp, Homo sapiens
tttataaaatagttccataatgtgctagcctctttcttggtcattgcgatgtgattactttgtcttgttagggaaatatttctgattctcagcgagtctgattccagggacagaaactaagtgcaaaagcatttttctagaccaggagccactggcttcattagtttggctgccctctcagctccagacttgtgctttatacacttctcacagctctgacacctctgttcaacatgtcttgtcattctcagctaataaaattggtcttgcgccaagtcaaccattccctcaaatcctgggtgtcccatctcatcatgttttccttttatcactgaataaagcacagtactgtttgactaatttgtgtgtgtgtgtgtgtgtgygtgtgtgtgtgtgtgtgtgtgtgtgttgccctgtcctaaaattacaaacctcttccaacataagactgggccattttctcaactatgattttgtttctttttacttttctacagctaaggtagggtctaaggatgtgattttttgagatgtgtggctctttgttctttttgaacatgt

SEQ ID NO: 253785 - DNA, 648 bp, Homo sapiens
cagggatgctaagaaactcacacaggccacaaagaaaacaaaggtctgaatcaggatatgcaacaaggtccatatgacatatgactcatttttgttttcattcaacaagaattaattcagtgcctactctaggctagtttgtgtgccatgtgttcaatgcgtgtttcttctacaatacttggtgatatgttttggctctttgtctgcacccatcatgttgaattgtagtccccagtgttgtggggggtacctgatgggaggtgatttttgcttttctagtgatagtgagtgagttatcacaagatctrgtggtttgaaagtgtgtggcactacccccttcactctctctctctcctgctttgccattgtgaagatgtcttccccttcctcttcccttttgccttccgccatgattgtaagtttcctgaggctccccagttatgcttgccttttaagcttatggaactgggagtcaattaaacctcttttctttataaattacccagtctcaggtagttctttatagccatgtgagaatggactaatacacctggccacctctttgcttttctcccttttgaataaaattaaatgtcttatagtggttccatctacatattcaaatggggaacagggaaagtactaact

SEQ ID NO: 253786 - DNA, 599 bp, Homo sapiens
tcacattaggagtatttcagtctgttacagatcaagatgttcagtatctcactccacttcccccactaccctgtgagccagaaaatctgtattgtttagtgcctttattcatattgcccattggattttttagattaaatttccattagatatatgtataaaatgttaaatgtgatatcatgtttttttgttgttgtttttggttaattgtgtgcagatttcttgttctttttctgttttgctcagctmccctctcccttgttctacatgccattgtttccaccacattattccccttcacccagcttctgcatagctctttcagcaacacagtatctatccttctatatttcctcatgtttatgtaatggtatacaaacatgaatgcacatctataaatatacagaaatggaggttgtgttagccaaggtttcagcgggaaacagatggcaagttccaatgaagatcatttaaagagaacctaataatgggattgtttatgaaagtgcagagacgttattgaaaagtggaaggagtgtagctataccccagtgctttaatatttttaaggataaaaggaaaagggatcaggggagtgg

SEQ ID NO: 253787 - DNA, 599 bp, Homo sapiens
tcacattaggagtatttcagtctgttacagatcaagatgttcagtatctcactccacttcccccactaccctgtgagccagaaaatctgtattgtttagtgcctttattcatattgcccattggattttttagattaaatttccattagatatatgtataaaatgttaaatgtgatatcatgtttttttgttgttgtttttggttaattgtgtgcagatttcttgttctttttctgttttgctcagctcccctctcccttgttctacatgccattgtttccaccacattattccccttcacccagcttctgcatagctctttcagcaacacagtatctatccttctatatttcctcatgtttatgtaatggtatacaaacatgaatgcacatctataaatatacagaaatrgaggttgtgttagccaaggtttcagcgggaaacagatggcaagttccaatgaagatcatttaaagagaacctaataatgggattgtttatgaaagtgcagagacgttattgaaaagtggaaggagtgtagctataccccagtgctttaatatttttaaggataaaaggaaaagggatcaggggagtgg

SEQ ID NO: 253788 - DNA, 569 bp, Homo sapiens
atggcaggaatgcctctccaggtgggagggcatgacatttctgccacgcgccacctcagcccctccttacctcccccacaaaggagtattttaatagaaggttaatggagggcacacagaacaaaaagaaaaccctgtcatcgttattccatgttttactgtaatagaggtcagctctcccacattctttctagtatccatcttcaaaatgaattgtttagcctatgaaaacaaaactagtytatttatgatgacagagaagctgtaaatgtgctcctgatctgtgcattgactaattagattaattaagcctgcatgcatttcagaacaggcaggcaggtggtaaaaaacatttgagatgatttatatgatatattccatcaagcttacacttgataaataatatcacattcattccattaagatatcgaagtggaagaagaaaacagtgcatttttggctccgtgctcctaccaaaagagcaactgttgaggttaaaacactaggcataatttactctcctcgaaacagtgaaggaaaaaaaaccacacaagccaaatctcaaactc

SEQ ID NO: 253789 - DNA, 489 bp, Homo sapiens
  misc_feature (1)...(489): n = A,T,C or G
atgaggagaatcaattaatcaacccaatgaggctagtttttccnatagattgtggctttggctgacttggccttattctttgcctgttggaattgttcctgcctctacatgcagccctgcttcttaacccatcataagtttgagcaggaagaataaaagaatgaaacttagtggaccccacttttaagatgccaaatacactttcctttctttgtaggattggatataggaaaacattatttgtatacccctaaattttaaagaacttcttgggtgagaagccttgctcatgccttatattttcagatcagatcttttcagactttcttttaaaaaatgcagtcattaaaatrttcacttttggtccctgttttcttccttatgacacctgctacatgattataaaaccccacacctctgaggaattcacttttaaggaaataagtattaataaaaattgtaactgtatgtcagagaaaacattttctg

SEQ ID NO: 253790 - DNA, 531 bp, Homo sapiens
gtagcacatttgaaatgccttacttcataaagcattgctgttaagatgttctttgtcaagctataatttcaagattatacacagttaagcagttttcctttagaaacaagtgtcttgtgggaacccagctcttgagcggtctgcccatctgtagcttcatcctaacagtggcttgctgtatcctggacctgtctggcagtagagagaggaaaactgaatcagcaataarcttggacaggtgtgtgtgtgtgtgtgtgtgtgtgtgtgaatggcacatgattttgtcctatcctttcaattgctaaccttaattaggcttctatatccttatgactgttacatatgttttaggtttcattttatgctttgccagtttttaaaaaggctcttaaatgtcttacaataaaagacacacgaaaggtttgtttattaaacataaatagagaatgtcaactgtacctaaagaaagtgcattgctaatccaaagggcactcatttttactgcaattgagcattaaattttactataaa

SEQ ID NO: 253791 - DNA, 602 bp, Homo sapiens
agagatatgttactcttcctttcacttgaacacttagaggacattgtagggttattagctaacctaacttcaatattgttgtgtctcagggagtaggaaggcctgaggaacytgagacagatggaggaacagccggtgggtggagcagtcagaacacacaacatacttatacattgagtttgctatcttacgtgggcatggctcattgtaccccaaaacaattaaaataggaacatcaaagatcactgatcatagatggatatgctttgggtgtccccacctgaatctcatcttgaattgtagttcccataatttccatgttttgtgggaaggacctggtgggagataattgaatcatgggagaggtttcccccataccattctcgtcatagtgaataagtctcatgagatctgatggttttataaggggtttctcctttcacttggctctcattctctcttgtctgccaccatgtaagatgtgacctttgccttccaccatgaatgtgaggcctccccagccacttggaactgagagcccattaaacctctttttctttataaattacccagtctcaagtatgtctttatcagcagtgtga

SEQ ID NO: 253792 - DNA, 598 bp, Homo sapiens
gcatggctcattgtaccccaaaacaattaaaataggaacatcaaagatcactgatcatagatggatatgctttgggtgtccccacctgaatctcatcttgaattgtagttcccataatttccatgttttgtgggaaggacctggtgggagataattgaatcatgggagaggtttcccccataccattctcgtcatagtgaataagtctcatgagatctgatggttttataaggggtttctcctttcacttggctctcattctctcttgtctgccaccatgtaagatgtgacctttgccttccaccatgaatgtgaggcctccccagccacttggaactgagagcccattaaacctctttttctttataaattacccagtctcaagtatgtctttatcarcagtgtgaaaacagactaatacatagatctctataacaaataaaataataatgaaaaagtatgaaatattgtgagaattaccaaaacgtgagacagagacacaaagtgagcacagactgttacaaaatagcactgatagtcttgctcaataaattgccacaaacttgcaatttcaatgtctaagaaacacgataaagtg

SEQ ID NO: 253793 - DNA, 573 bp, Homo sapiens
ttattttgtttctcaccagagaatgaagtgcccacccaagagagttgggggaaaacaaggactggaagaaagacatgaggttctggaaacgtctctctacctggcttgggagcacagctaggaaaaaagaaggcaggaagtgaaacattgaaaattgaggtgaattgaatgaatgaatgtcactcatacttaaatacatacttaccaacatatgggatatcaaactctatgtggaaaatatggtttttttttttttttttttaccactaagctctctttaactatgtgtgttattctgaaaacctgctaggtgtaggaagccagatgmaagtaaaagagaagagacgaagtcaattctcactccaaatttttgtaattctgcaaaagtgtttccaagatctggttattgaaggactcctcaagaggtggctatggaaaatatctagtagcagaaagccagagagctttctttgtgaagtgtgcagggcctgttttaccaccgtcccacctctgtggctccataagtagaatgtattttttttccactatggcagctttggaagcctcaagcaa

SEQ ID NO: 253794 - DNA, 597 bp, Homo sapiens
ggtgaattgaatgaatgaatgtcactcatacttaaatacatacttaccaacatatgggatatcaaactctatgtggaaaatatggtttttttttttttttttttaccactaagctctctttaactatgtgtgttattctgaaaacctgctaggtgtaggaagccagatgaaagtaaaagagaagagacgaagtcaattctcactccaaatttttgtaattctgcaaaagtgtttccaagatctggttattgaaggactcctcaagaggtggctatggaaaatatctagtagcagaaagccagagagctttctttgtgaagtgtrcagggcctgttttaccaccgtcccacctctgtggctccataagtagaatgtattttttttccactatggcagctttggaagcctcaagcaactctaagcccaaaccaagtctaatggatgtgggatattaaaagcaggataagaaaaagaagtggtgtatttttatccaaaccacagatgcctcaccatctcctgcaattcattggtaaataaagccacagtgctgtttaatattctggggattataggcctgttatttgatactcatgaccc

SEQ ID NO: 253795 - DNA, 597 bp, Homo sapiens
gcctgtttttgcccaattgccagatcctccaaacaccaggagtggacccatcaggcagaaatcttatttccttagagtaaggaaaccagagaaaactgaaaatgttttcagtgatttttaaagacatgagtgaatgtcttttaaaattactatttttttcccttgttgaaaatatgcaattttttactatggaaagcaaataaaaccctgctttgtatttcagaatttatgaggtagatttcacatagtatcatgttttggaaagctaagacttttttccccttctttgggcattgtaagattaggcgtaggggtagatagtgcagattttctggtttcctttaagcatacactctttggatgaaatgcgtctgattagggcattatattggagagtcagaaaggaacaggagatattagacaccaagacaagaagtctgagcagatggcaaaagagaggagaatgtggatagagagawtaacactaaggataacccatccaagttgccattttgcttcagctaggctctggcatggaggtatcagagaagtaactctatgagccatcaataatacagcccagggaaaattgccttg

SEQ ID NO: 253796 - DNA, 525 bp, Homo sapiens
tttgtatttcagaatttatgaggtagatttcacatagtatcatgttttggaaagctaagacttttttccccttctttgggcattgtaagattaggcgtaggggtagatagtgcagattttctggtttcctttaagcatacactctttggatgaaatgcgtctgattagggcattatattggagagtcagaaaggaacaggagatattagacaccaagacaagaagtctgagcagatggcaaaagagaggagaatgtggatagagagattaacactaaggataacccatccaagttgccattttgcttcagctaggctctggcatggaggtatcagagaagtaactctatgagccatcaataatacagcccagggaaaattgccttgagataattaacccaaaattgagtctccaaattgtttattgccatccaygcacacaaataagccaaagaccacatatcttcagaaatgagagatggccccttgttgaaatctctaatgctctgcttgttgcaaactcaag

SEQ ID NO: 253797 - DNA, 586 bp, Homo sapiens
ttgactcatttaaaagagtctaaagtcaagttttcaaaatggctttttgaagtttttcatcttttgagatttaaattttaaatttatgtctttgctactccaggccttcttctttcctaatttgtttttcacttrcttcaagccataaacacattcctgccatcgggtttgatttatattgcctaggaaataatccaatcatgaatatttcttgagaatgcgagcatggcatgagagagacctcactctcatgatctttctcgagtagaaaacaaaaggcacaaaagttggtgggactttaaaaattctatcaagcaaacccggtaagcctacagtaatataagaaacttggctcttccctgaatccaaaattacaagtaacaatgcttctatcagtctttgctcttgacttttcacacacaggaactgaaattgaccagctaatgttataaataagatcccaagtaaccacagccttggtctcacatgcatctccacccaaggtcttacaagcatctccactaaactcaggcactggcattttacctgactggcaaacatctgatcctttatcttatgtcccaca

SEQ ID NO: 253798 - DNA, 586 bp, Homo sapiens
ttgactcatttaaaagagtctaaagtcaagttttcaaaatggctttttgaagtttttcatcttttgagatttaaattttaaatttatgtctttgctactccaggccttcttctttcctaatttgtttttcacttgcttcaagccatmaacacattcctgccatcgggtttgatttatattgcctaggaaataatccaatcatgaatatttcttgagaatgcgagcatggcatgagagagacctcactctcatgatctttctcgagtagaaaacaaaaggcacaaaagttggtgggactttaaaaattctatcaagcaaacccggtaagcctacagtaatataagaaacttggctcttccctgaatccaaaattacaagtaacaatgcttctatcagtctttgctcttgacttttcacacacaggaactgaaattgaccagctaatgttataaataagatcccaagtaaccacagccttggtctcacatgcatctccacccaaggtcttacaagcatctccactaaactcaggcactggcattttacctgactggcaaacatctgatcctttatcttatgtcccaca

SEQ ID NO: 253799 - DNA, 477 bp, Homo sapiens
gcatctccactaaactcaggcactggcattttacctgactggcaaacatctgatcctttatcttatgtcccacagctacatgagcatggatactcctgacccaaagggtgtttgcgttggtctttgtgttgccagttacagaaacccatgctaatgattcaaataaaggggatatttattgtgactactgtggtatatgccgyagtgaaggtacgatgaagccttagctagggcagtaaacaaggaggccccagggacaccagttgtaagattttatagaccttctaattattgttctatacttaagctaactgggattcaaaaactctcatatttggtgtctctttgttctactgttagattcacaggacaaaatatcccattattgcagcttaagccaagtgactatcctgggttccatcgtcttgctcagggtccctcagtacacatttagccactaagtgtcaaaccttgggt

SEQ ID NO: 253800 - DNA, 553 bp, Homo sapiens
ggcacatttttccaccaaacaaaattggggtactgttaatgaagaagaagagatactgcttaggagattagcagtgcctgcacatgcagatattactatccctattttcatatgaggagaatgagatttcaggaggttaaataatttgtcaatgtcacattgctaataggtggatatcagagaatgaagccagtcctgtctggggtctcaaaactggtatgttttcccttcagaagacagcctctgtgggtggagaacagaggtaaccaggaaacatcatttaaacatagctatcttataaaagacctacagaatttagacagggaatgtctgtagattctgctcataaaaggaaaggagagyaaaggtctaaagtgcttgtttatgcaatgtatgcagccaacaaaataagctgtaagctggcaaacaagcatcatttgtctttgcctctattagaataaacgtttgggttgcaaggagaatagccacttctaaaagtcttctggtccctctgacatttttattaagatgcctttctctaatccctttatgt

SEQ ID NO: 253801 - DNA, 553 bp, Homo sapiens
ggcacatttttccaccaaacaaaattggggtactgttaatgaagaagaagagatactgcttaggagattagcagtgcctgcacatgcagatattactatccctattttcatatgaggagaatgagatttcaggaggttaaataatttgtcaatgtcacattgctaataggtggatatcagagaatgaagccagtcctgtctggggtctcaaaactggtatgttttcccttcagaagacagcctctgtgggtggagaacagaggtaaccaggaaacatcatttaaacatagctatcttataaaagacctacagaatttagacagggaatgtctgtagattctgctcataaaaggaaaggagagtaaaggtctaaagtgcttgtttatgcaatgtatgcagccaacaaaataagctgtaagctggcaaacaagcatcatttgyctttgcctctattagaataaacgtttgggttgcaaggagaatagccacttctaaaagtcttctggtccctctgacatttttattaagatgcctttctctaatccctttatgt

SEQ ID NO: 253802 - DNA, 582 bp, Homo sapiens
ctattggcacatcattctatattctctaaagagcgagttaaaaaggaaggcagagagggaaagaatgagaccaaatgccagaacttaacctgaagctccagctgattgagatatgtggaacaatcgttaccactcacccaccagatacctcaattgtccccatggagaagtgaataagggatggagtatgcctggactgtgactctagggaagtttctcttcatggaattatgaggagctgaggatccacatcaaactcatccctataaactaagccctagatgatctgaagccatttacctctctgacttgatatcttcctactccctcctttgcagcctctcaacactctaccacaatagacagaacttgtgcagtgactctccwcacccattctcctctccaggtcacatatgtcttcccctctactcagagaatcgtatttcttccccttacctgggtaattcctgctcatccttccaatctcagcttagacctcactcctccaagattcttccctgtcctaccaattaagtggcataatatgaccttcatatgtgatactctgccaaagtatacctt

SEQ ID NO: 253803 - DNA, 590 bp, Homo sapiens
aaagcattatatcatataccataaatatatataattttattgtcaataataaattaataaagctgaaattttaattagattacatttttaatgaaattaataactcagtaaatgggctattattaatagcagattaaacacaacagaggrgagaattcgtaaactgggagatagttcagtacaaaatatctagatcgaaacatagagaaaaagatttgatggaaaacaccaaaaagaatgtaagagacatacagaccgaggagaaaacgtctagcacacatgtagttggagtcccaagagaagagaaaagagaaaatgggtgtaatcagtatttagaaatattgaccaaaaatattttaaaactgataagtcatcacactacagactcacgaatctctacaaaccccaaataggttaaatacaaaggaaactacaactaggtgtattgtagtaaacctgctgaaactaaaaacaaagaatatttccaaagtcccaaattaatagaattataaagaaaacaggcaaatccacagttatagttggaggggttttgtttgttttttggagttttttttccagtgttttttttt

SEQ ID NO: 253804 - DNA, 574 bp, Homo sapiens
caaggtgatagattatcactctcatgattacctttgctaacagattttctctgacacagtcttacctctgatggctttgaagaagcaatctgtgaactgcctatggagaagtccacatggcaaagagctgtgggcagcacctgggagctgagagtgactgccagccaacagccagtgagaaactgacactgtcagtcattcctacaaccacagaaacctaaatcctgccaatagttatgtgagtgaggaagtgcattctttcccagtccagcctctaacgagacaccagtcccagtctacacctcaattactgccttgcagtgaacccacctaaactgcaccccaacttctgacccacagacactgtgagataggaaataagtgctcttttcagccttaaagtttgtgrtaatttgttacacagcaataaaaatacaggagacagctacctattgttttagccccaaaaggtgagccatttaaaaatatacccctttagtttctctctgtaaccaatcaaatggaaatgaagatttcagttttgatctattatgttttcgccaatgacagtgaa

SEQ ID NO: 253805 - DNA, 304 bp, Homo sapiens
ttggcatgccagtcaagcaacaggctgtcaccaacccaaacaatgcattctatgctaccaaatgtctcattgtccagctatcctgaagtacagaaagacattaaaaatattccctttaaaattgtctgtgcctccaatggtgatgcctgggttgaggctcatgggaaactgtattctccaagtcagatcggagcrtttgtgtcgatgaagatgaaagagactgcagaaaattacttggggcacacagcaaaaaatgctgtgatcgcagtcccagcttatttcaatgacttgcagaggcaggcca

SEQ ID NO: 253806 - DNA, 443 bp, Homo sapiens
gaaaatatgttttatattttaattttttctattatttcataggggcttttttcatttaaactttatcttatcgtctctttatattgttctagtatttttagttctctggggactttttctcgtgtgttgtacgtacagacatcctctttctctctcatggtgatttctctcttcttgtggtttgtaattttttagtgtgagctcatctttggtagaattgggccccagtttatgaaagcagacccatagagtgcttttgcatccgtctcatctgaacttccygggattctgcattcatatgtatattaattaattcttgtttgggaatctcataccacatggggagtgtaaattaatatctcataaagtagcatagcagaggggtttcagtttctcctggtagatcttttcctctccactgaaagtctgtagaagacagtgaa

SEQ ID NO: 253807 - DNA, 588 bp, Homo sapiens
aaaagaaatatgaaataattatactttttcacatttttaaaatattctgttggacatattttattgtttcaacaataaacaacagtaaaattactgaaatggacttttgacacataaagggtagaatcctctaagttggattttaacatgatttttaacttagtacacacatatgttgaacttttatttgcaaggtgttatgttaggtatgcggaagtttataaagatgtgcaagagattgtcccctgctttcagagactggtccataragggaaattttaaaaatccttctcaactaaaatttaatgttgaataaggaaaatgacaactgatgtgtccatggatgcaaagtgaagaaagggtgcttcttattgaactaagtaagaaagacaacatgcaggagggacatctgccttcgtgtgagaagctgcttgaggattttaataaaaataagagaaagatattctaggcagagggcaggagcaaggggtcagaaagaaatgtgccacaaatttttctgctatatacccaaataccactgtaaatttctccttcacagtactcattacaactgtaattaattaatca

SEQ ID NO: 253808 - DNA, 588 bp, Homo sapiens
aaaagaaatatgaaataattatactttttcacatttttaaaatattctgttggacatattttattgtttcaacaataaacaacagtaaaattactgaaatggacttttgacacataaagggtagaatcctctaagttggattttaacatgatttttaacttagtacacacatatgttgaacttttatttgcaaggtgttatgttaggtatgcggaagtttataaagatgtgcaagagattgtcccctgctttcagagactggtccatagagggaaattttaaaaatccttctcaactaaaatttaatgttgaataaggaaaatgacaactgatgtgtccatggatgcaaagtgaagaaagggtgcttcttattgaactaagtaagaaagacaacatgcaggagggacatytgccttcgtgtgagaagctgcttgaggattttaataaaaataagagaaagatattctaggcagagggcaggagcaaggggtcagaaagaaatgtgccacaaatttttctgctatatacccaaataccactgtaaatttctccttcacagtactcattacaactgtaattaattaatca

SEQ ID NO: 253809 - DNA, 529 bp, Homo sapiens
tactcatgaccacagctctattgcacccgattcttgctttgacaggaatgctccaaaatgggaagaagtttgattcatccagagacagaaacaaacctttcaagttcagaattggcaaacaggaagtcatcaaaggttttgaagagggtgcagcccaggtaggatgaggattcgcattaaaggggatctggggagttggggatctgggatcagcactctgccctccacctccaccttcacccactcacagaccactactgctttgactctacagccagggcatggcaacgccatctggtgtcccctcctggctttgcgtccccacccytctccttgccagcatacctcttttgtgtccctgggggctctcatcccaagcacatccccctaggcttgctcagaactagctgagagagccaggcacggtggctcacacctgtaatcccagcactttgggaggccgaatggggtggatcagttgaggccaggagttcaagactagcctcaccaacatggtgtaaccccgtcc

SEQ ID NO: 253810 - DNA, 619 bp, Homo sapiens
gccgatcatctgaaaaaccacgttgggacccatcagggcagtagaggaacacagagtgcagaaaggagtgaagccaggcaccagctgtttgggctcagcatggagccaggagaacctctccagcacaggacagggtgagtgagtgagagcccccagggtgattcatgctctccacagggacctgtgcaagactgggaataggagaatcccactgggccccacacccacccatcgtgtttctagactgaggcagagagccactcagacgtwttatagggccaactctcgagtccaaggggacctctataagccttgggccctggggcagaccagccagcgccgaagccccagcaaaggctgcagttgccatgcatgggagcagtaaggttgctccacccacccatgctgggtaggactcaacaccagcctctagcccagtagtctcacttcagcctgaactcggccagccactccacccacccccaccactggtagccaggcgggcaacacctgctagagcttccagcctaatagccctgcttctgtgtgaactcagctagagggtgcagctttctgttgtcctgggaaacacccgaacagcagagtaagtgactctacc

SEQ ID NO: 253811 - DNA, 619 bp, Homo sapiens
gccgatcatctgaaaaaccacgttgggacccatcagggcagtagaggaacacagagtgcagaaaggagtgaagccaggcaccagctgtttgggctcagcatggagccaggagaacctctccagcacaggacagggtgagtgagtgagagcccccagggtgattcatgctctccacagggacctgtgcaagactgggaataggagaatcccactgggccccacacccacccatcgtgtttctagactgaggcagagagccactcagacgtattayagggccaactctcgagtccaaggggacctctataagccttgggccctggggcagaccagccagcgccgaagccccagcaaaggctgcagttgccatgcatgggagcagtaaggttgctccacccacccatgctgggtaggactcaacaccagcctctagcccagtagtctcacttcagcctgaactcggccagccactccacccacccccaccactggtagccaggcgggcaacacctgctagagcttccagcctaatagccctgcttctgtgtgaactcagctagagggtgcagctttctgttgtcctgggaaacacccgaacagcagagtaagtgactctacc

SEQ ID NO: 253812 - DNA, 594 bp, Homo sapiens
tgtgctatggccagaggttagggagggactcggcctagcagacctctcagggttcttaatattttatttatttcattttgaatttcacgctcttcctagtagtcacatgactttatttgctatatgaaaggtgaatgagaaggtttagtgagaatgaattagtttgtagcctaatcaagcatcatctttgcaggctacttgccacttggattaggttatgccacacttctgcctctttactcttgcctttttttttttytgaaggtcagttatagtgaagggttttttttttttttttttccaaagaatgtttttcttcctctttttctgccatcccttctcttcctggataacccttcttttttttttttttttttttttttttgagacagggtctcactctgtcacccaggctagagtgcagtggcacaattacagctctctgcagccttggcctcctgggctcaagtgattctcctgcctcagcctcccaattagttgggattacaggtgtgagccacggagcctagctaagttttaatttttttttgaaacggagtcttacttctttgcccaggctggagtgcaatggta

SEQ ID NO: 253813 - DNA, 594 bp, Homo sapiens
tgtgctatggccagaggttagggagggactcggcctagcagacctctcagggttcttaatattttatttatttcattttgaatttcacgctcttcctagtagtcacatgactttatttgctatatgaaaggtgaatgagaaggtttagtgagaatgaattagtttgtagcctaatcaagcatcatctttgcaggctacttgccacttggattaggttatgccacacttctgcctctttactcttgcctttttttttttctgaaggtcagttrtagtgaagggttttttttttttttttttccaaagaatgtttttcttcctctttttctgccatcccttctcttcctggataacccttcttttttttttttttttttttttttttgagacagggtctcactctgtcacccaggctagagtgcagtggcacaattacagctctctgcagccttggcctcctgggctcaagtgattctcctgcctcagcctcccaattagttgggattacaggtgtgagccacggagcctagctaagttttaatttttttttgaaacggagtcttacttctttgcccaggctggagtgcaatggta

SEQ ID NO: 253814 - DNA, 594 bp, Homo sapiens
tgtgctatggccagaggttagggagggactcggcctagcagacctctcagggttcttaatattttatttatttcattttgaatttcacgctcttcctagtagtcacatgactttatttgctatatgaaaggtgaatgagaaggtttagtgagaatgaattagtttgtagcctaatcaagcatcatctttgcaggctacttgccacttggattaggttatgccacacttctgcctctttactcttgcctttttttttttctgaaggtcagttatagtgaagggttttttttttttttttttccawagaatgtttttcttcctctttttctgccatcccttctcttcctggataacccttcttttttttttttttttttttttttttgagacagggtctcactctgtcacccaggctagagtgcagtggcacaattacagctctctgcagccttggcctcctgggctcaagtgattctcctgcctcagcctcccaattagttgggattacaggtgtgagccacggagcctagctaagttttaatttttttttgaaacggagtcttacttctttgcccaggctggagtgcaatggta

SEQ ID NO: 253815 - DNA, 528 bp, Homo sapiens
gcaagctggaagtgaaagtcagagtgtgatttccaatggtagctctgttttgtgattacaagatgaaaatgtagtttttcttggggtggccttctaagacaagggtgggccaggtgcagtggctcacacctgtaatttcagtaatttgagaggttgaggcaggcagatcacctgaggtcagaagtttaagaccagcctggccaacacggtgaaaccccatctcyattaaaaacacaaaaaaattagccagacatggtggcatgcgcctgtaattccagctactcgggaggctgaggcacgagaattgcttgaacctaagaggtggaagttacagtgagccaagatcatgccactgcactccagcctgcccaacagagtgagactctgtctcaaaaaaaaaaaaaggtgggagaaaatcctccttgtaggcagtgggttaggtatgacacttgatcatccactttgtggggaaagagaaagggcttgactcataggcagtggtgaatggtctggcgtgctggagggaga

SEQ ID NO: 253816 - DNA, 583 bp, Homo sapiens
aatattttccattaaattgggactcaaaattttaattatatatgaatttagtcccattaaatagaaaggaatgccttggcaggaagtcaagccagaacacttagtctgaactataatgtgcctgaaaaaaaaaatcccttaatactttttcaacttaacctcccactgtagacctttgatttccgccaccaactaccagattgtacctttcacgcttttacatccaagcccttgcccatggtatgcctcactcctggcgtccattttctcttcttctctcctcttatttaaaccatggctagcctgcaaggctagaatgattttcatttcaaatataagctcttccttcaccackatggcccacggagatctgtcctgcctcagagagtctaagattatgccagtatcaagtgtttgtgatgtggctttggtgggcagctatctcttcacgtaacaggacaaagagagctaaacacaggagtacatctgagcagtgcaaggaatggactgtatcaaatgttggtgccttcctcatagccctttgactgactttggaggtcactttcagcttgacaggccagtt

SEQ ID NO: 253817 - DNA, 566 bp, Homo sapiens
acttctcaaaagaagacatgcaagtgtccaagaaacttacgaaaaaatgctcatcatcactaatcatcagagaaatgcaaatcaaaaccacagtgagacaccatctcacaccagacagaacagcttatcattaaaaagtcaaatgatggccaggtgcagtggcttgcacctataatyccacaacactttgggaggccaaggcgggtggatcacctgaggtcaggagttcgagactagcccagccaacatggggaaaccctgtctgtactaaaaatacaacaaattagtgggtgtggtggcaggtgcctataatcccagctattcaggaggctgaggcagcagaatcgcttgaacccgggagacggaggttgcggtgagccaagatcgtgccattgaactccggcctgggcaacaagagtgagactttgtctcaaaaaaaaaaagtcaaaagataacagatgctggcatgtctacgaagacaagagaatgcttttatactgttggtgaaagtgtaaattagttcagacactctggaaagcagtgtggagatttctcaaagaacttaa

SEQ ID NO: 253818 - DNA, 339 bp, Homo sapiens
tgcatggcatttgctttcttagaatgctaaaatgcactgcattgggctmctgtaacttctctctaggaaacatcgggaaaacacacacactataatttacacacagcaaagttcacagtgaaacccaagaaacgcaacaactaaaatgcttaagccacaatttaggttggaggttatggaggagcacgcatggcattacagaaagagactgtagtacaaggaggcagcattttgacaaccctgagcccagggcctggtacatcgtaagccctcaatgcatgccagctctctgtctctccttcaccgtagggagcctgactttctcagccagcaaccagt

SEQ ID NO: 253819 - DNA, 339 bp, Homo sapiens
tgcatggcatttgctttcttagaatgctaaaatgcactgcattgggctactgtaacttctctctaggaaacatcgggaaaacacacacactataatttacacacagcaaagttcacagtgaaacccaagaaacgcaacaactaaaatgcttaagccacaatttaggttggaggttatggaggagcacgcatggcattacagaaagagaytgtagtacaaggaggcagcattttgacaaccctgagcccagggcctggtacatcgtaagccctcaatgcatgccagctctctgtctctccttcaccgtagggagcctgactttctcagccagcaaccagt

SEQ ID NO: 253820 - DNA, 634 bp, Homo sapiens
tggccagtctttcctcagcatcatgtcatctctctaatgctcactccaatcaccctggcctccttgctgtttctgcctyaggacattggcacttgctctttcttcagtctgcaatgatttttctttcattctaccttttgctttcgagccgctgctttctctttcttcatagcatttaacattacctatgtatatatgtaatgcttaatataggtaacatgtaacttatttatttttcataagatccatggggggaggaggaacactttttataccactgtattcccagcacataaaacagtaattgtcacataggaagcactcagttacaaggtgaccaaagaatctataaatgattgaaacaagatgagaatagaaacaatatcatcagaaggaggagcagcaaaattttttaacaatgtaaaagataaatatttattctcagagccaataaaaaggtgaaaggaaactggtacaagttagaaataaaacactagaggaaaaactgcaaagaaaagaagagttcattttgaaatatagatgtttaagaattgaaaagcttttaacatcagaaaggagtagtaaaatattctacatttcagctcaatgtctaggagtgtttccaaggtgttta

SEQ ID NO: 253821 - DNA, 536 bp, Homo sapiens
ttatggaaaattgaggaattgtcaccaaatagctgaatagaattttgaaagtcaaatgagagaagagtcatagcctaactctgatggaagaatatacataaaaggacaaaaacagaaaatcatatatctatatatatgtgtgtatatatatgtgtgtgtagatatttctgtgtgtatccacacacacatcactaaattatagaattctataatttttacacaggtttcaaaatattttctcctttgcatgrtattctctcagatacaagaactgctgagtatgtgcatctctacccagaatattacacaatggcaatcaataattaccaaacacaatttttactcatgtttactatggtcacattttagagcactacggttttgaagtactgaagttattcaaagtaaaatctaaacattttaaagatatggcattttcaaaggaaaataagtttaacatgattcaataacatcgacaataatgaccatgcttcatcaattttagaaaaagctttttttcacattgtaatacatcg

SEQ ID NO: 253822 - DNA, 601 bp, Homo sapiens
taaaaaaaaatacaattcccattaacgtgcaaacaccagctgtgttgggcctaacactcttttacactttaattaaaaggaacccctctaatcagatgatttgattgccttgctacttaaagtgtggtccaggaaggaccagtagcatcagcagcacctggaaatttatgagaaatgcagtctgtcccgcacaccccacacccactgatgcggaatctgtggtttawcaagacccccaggtgattcacatgcacagtgacgatcaatcaactgacactgctctcagctgttgtaaagtggcagccttgactggtacagacaaaaaatcattttggttcccaaaggtctttaaagaaggtgtgggcagggagcccttcagagcattggagaaggtgccaaagaccaatttgccttcttagctttttcctaaggatccaggggcctgcaaaactctacctccaccaaaatcacctgagtatgcaatggattgctaaggcctgtgaggttcatctgactgtgttgaaatatagatgatgtacacacagaacatgtacaagaattaatgtaactgaaacccctgtgattgactgatcaactgtag

SEQ ID NO: 253823 - DNA, 551 bp, Homo sapiens
gggttctgtcctactcctacccttctcattccttgtgccttttctgtctaaccttattcacattcctggctttagctaccaactgtgtgccagtgagagttaaatytttatcacaagcctagttgtgtgtatccaaacacctactggttcactgtgaaggaagaagggttcttttaaaaagaagaaagaaagaaaaacatccatgggatatttctacatgaatgaccctcaggaatctcaaactcaataaaacctgcttttcctcttctttcttcatctctataatccatcaatcacaacagacagaatctggaacccatcacagcaagcccagtgttcctgtccactcccactcctctgcactcaagtcattcaagttcctttataccactctgcttttagaactcagggacttccaatcaagaaagcacagtgattaaggatgtagactacctgggtttgaattccagttctactccaccacttgttaatgatgtgatctaaggtcatatactcattgtaccttagctttcccatcagtaagatgaagg

SEQ ID NO: 253824 - DNA, 509 bp, Homo sapiens
cttgtggttcagctgttcctccaattctgcaactcttccactcagtcaatattcactcacaaattcccccatttcacttgatttggagttgaatttctgcctctgggaaccaatgaaggtctgacaaaaagcatgatccatcatgtgttaggatgmctgagatcaccttatccaaggtgctatgctcttttctactcatgtaaatataaataacttagcacaccactcctgcccttcccagctacacaatagaagtgagatagcgatctctcctctgaatcactgggaaatcttggagagatttctttaacggaaaaatgcaacaaagcagaacactctagggcacaatagagaacaagtaaattgctctaggagataaaacaagtctcctgacatcaggagaggagtcctttaatttgcatcataaaggatgagtaaaagtttggtttgcaaggcagagagcaatctagatggaggaaaacaaacttgtaaaagcttaaaagtatgtt

SEQ ID NO: 253825 - DNA, 556 bp, Homo sapiens
gtgttgaatcatgtgctcccaaaagatgttgaagtactaagcaccagtacctatgaagatgatcttatttgaaagtaggttctttacaaatgattaagtgaagatgaagtcattagcatgggtcctgattcaatrtgattcctgtctttgtaaaaaggagaaatttggacacagacacagacatgggggaatgccatctacaagccaagaaacacctaagactgccagaagctgagagagagaactggaacagattctccctcatgggcctcaggaaggtcctccctcaggccctcttgccggcactttgaattcaaacctgtcgccttcagaactgggagacaataaatgtcttgtttaagccagacagtgtgtgatactttgttacagcaaccccagaaaacaaataaaacgtgtaattcgtttattatttttaatcaatgtattaaaatatatttaatttatccactttaatttctaatatgacaaatactaacagatttaaggcacataaagaaaagctctttgggtccttaataattgataagagtaaaaa

SEQ ID NO: 253826 - DNA, 652 bp, Homo sapiens
taaagttcctcttaggacacttctaaaaaattaatgcacatttttgtatgcatgatgccatacaacaatgtagcacatcagctcctctttagggaataatgttgattcaagttcatcttaatcaactcatacttccaacacaactgattcatttatttgtaacggaaactattggctcacaaaactcaaagttgaggaaagtggaaaacttcaggagcagtttgatcaaggcctcagccccatttttctgcagttgtcaagactctgcctcctttatttgctggctctgtcttcaggttatctttcttcattgtagcaaaatggccactatacatccagcctcaggttaaatcacatcacccagaagtgagaacttatgtcttcccaccattgaacaaaagtcaccagcttctcccttaatgtactcattctaattgtgtgcccatttctgaaataatcactgtgrccagaaaattatatgctttgattagcttagtcctggttggattagattaaaactggcttcctctttcacggtagcaaaatgactgcagcaattactatgactatagcaattccggcctcacattcatatatcacattatttagaagagacagcacttctaatttggcaatgattctacaaaagacc

SEQ ID NO: 253827 - DNA, 536 bp, Homo sapiens
ccatttctgaaataatcactgtggccagaaaattatatgctttgattagcttagtcctggttggattagattaaaactggcttcctctttcacggtagcaaaatgactgcagcaattactatgactatagcaattccggcctcacattcatatatcacattatttagaagagacagcacttctaatttggcaatgattctacaaaagacctgtgcttccctctattggtcacctgyccacctatgaaccactcaccatagcagccagtggggcagaactactctggggtcaattcctttggggtccacataggaagctattgctagggatgaatgctactcaaaccaaatgcaattatggaatggggaagaggagagatgggtgtcagggagggagccaacaaacaataccctctgcactgatggccaccacagttaatttacaaatctcagaagtggacgacaccttcttccttctccctcctctattccaaatctatctctcccaaagatgcatgcttccttgaagaacacaga

SEQ ID NO: 253828 - DNA, 584 bp, Homo sapiens
ataattttgcaacaaaaagaggaatccagagaatccagatttttgactctttcacaatcagttccactgaaggagcttccgactagggtctccctagccccacctcacagatatatattaaatttttaaattaaacttgagatgagtctttaaaaacataatggggaaaaagcacattggcaggccatgcctgtatcccactagctgagtgtgaaagagaggaggtcttttggaacgccttctatgccaaccagatgactggaattgattacgtgtatctaagtctcacctcctttgtttttagacagatgctgatagtaacccaatggagcactgataaagaggaccaagatgggtattgagaaaactgtattctttccactaacttttcactaacttgaacaaataatttaaactccctggccytcctttttcattgttcaaatactaactaggtccacaggaagcagcttggaagaattctcctttacaaatatgttaatatcactagtcataattaattattaatgttatctatgctaaagtatatttaaaagatgttgggttaaggagctaacaagttg

SEQ ID NO: 253829 - DNA, 546 bp, Homo sapiens
aattattttgaatatgaatttctgtcacttccagtctaaacaatcgaagtacaacaaactttaaatatcaggcagacaagggacgtaaaggaagaggaaagagacataaaacgtaagactaccttaatacccaatgcctctcaggatgctgttaaggagactgtaaatgtaattaaaaatttctcagaaatcactcaaacagaagaaaaataaatattagaatcaggaaaacatcaggtatgggtgaacatctaaacyggcacatctagacatgtgcctggcccctgtaccagaatgcctggtttcttatctcagacccacttttcatgcccaagtcacattacatagagcattttgtacctcagtcaaactgttgaataagcaataatacaaaagatagaggtgctgagaaagagctacagaaaatctgggaaaaaaatgtttgcaaattaaaaaggagtagaacaagaaaattattgattgaatggatttaaaagtaggattttgacaagttttaaaatattttttaaattttgaagagtaatt

SEQ ID NO: 253830 - DNA, 379 bp, Homo sapiens
attattcccaaataagaaaaaggaagcattttaatttattggaggtttcagagtatcattatatcattctacaggtgccctgagaaacaggcaaggaaatgatttttaaagtttacaaataaagatagaagatttacaatgattcttttcactgttttattgaaaacataaagttaagtcaatcttcttaaacatwctatgttaattatcgtgattagtcaaagaaaaaatgctctgttacacagtgaatcaggcttaggggtggacatggttctctgcaagtatgcggtaatcgaaaaaatactaaacttgaagccatggtactttcactcaatattgttttggacaacatgtcaatagatacatacttgaagccata

SEQ ID NO: 253831 - DNA, 379 bp, Homo sapiens
attattcccaaataagaaaaaggaagcattttaatttattggaggtttcagagtatcattatatcattctacaggtgccctgagaaacaggcaaggaaatgatttttaaagtttacaaataaagatagaagatttacaatgattcttttcactgttttattgaaaacataaagttaagtcaatcttcttaaacattctatgttaattatcrtgattagtcaaagaaaaaatgctctgttacacagtgaatcaggcttaggggtggacatggttctctgcaagtatgcggtaatcgaaaaaatactaaacttgaagccatggtactttcactcaatattgttttggacaacatgtcaatagatacatacttgaagccata

SEQ ID NO: 253832 - DNA, 620 bp, Homo sapiens
gatcaaaattagtcactgcctgggaacaaagaaagggccagatgtgtagcagggtctgccctgccagagctcttaaactgagaatttataaccaaaggcaatccttagaatggctcaatgcacatagcatatgcataaggatataaccaaaatttaccaagcattcaaattaagcatatacaactcattacaaatctcttatacaaccatatgtacaaataaactatgtatacgtgagtttcatctagattaaccatacttcccccaactcggaattagaaacagagttgatacaggtctttgttcagttcccagctaagctcacaggagtctagctcagttgaatgtcaggttcagtcaccgcacactttatacttaagacacaagcaaaatgtttctttcatcaagccatataacaaatatgtgagtaaaaagaattacaaacagcaatatagtgaacatgacctatcattcataaaaatgtttggcatttgagacatgcacaatacttatatttggaaaacacggaaaattctcataaacccaaattacagaatcatttagaacggcctgaactttgrtgggctacagctaaagctttgcattttgtaacacccttt

SEQ ID NO: 253833 - DNA, 458 bp, Homo sapiens
ttaagtctacatgtcagaaactaaagatacttccaagtaatkacagtggagactctgctgaaaatggagccatgaaactgatttcccccaggaagtcaagttgcaccagagaaacttcgtgtctcattttgcttttgtcaacaagatgaagcccaggttcatgagtatctccctactcaatagggcatgttacttccaggcctgagtagaccaagaatctaggtcttctgatttactgagtcaagcatgctgttaacttacctgaacacctggtgctttaaaatgaaaacacacacacacacacacacacaccagtcatatcttaggtacctaggcacatatcagatgattgaatgaaattagataaattaaaataataaaataaaattaaaaagtacaagaccacaagtcttctttttcaaatctacttgttcacatttttaaaatttagtttttgc

SEQ ID NO: 253834 - DNA, 483 bp, Homo sapiens
tcacatttttaaaatttagtttttgcgctgaaaaactatttttacgtttctgttattgttcagtttaaaagctaataaaataaagatcctaattccacaagggtggaatcaacacatcaactctgccrattacatcatgggtttattccatcttcccaaggcttgcattctttctattgagtttgatgtgccaggacccaaaattgggaattgcatcaagacaaatatttttaaaataaagtaagtattgttggtttcaaatatgattgtctcaaatataaacaactacacaaatttgaaacatgttggatgaaatggtagaaggaaaacagaggaagagccgaagtaaaaatagaagtgatatacatgagggcatagtgtacgaagcagagggtttattctagaattatatgaagccagtgaaaaagagatcatttggaacatagtattgtgcaattctagtcaatgtaagaggcaatcaaa

SEQ ID NO: 253835 - DNA, 483 bp, Homo sapiens
tcacatttttaaaatttagtttttgcgctgaaaaactatttttacgtttctgttattgttcagtttaaaagctaataaaataaagatcctaattccacaagggtggaatcaacacatcaactctgccgattacatcatgggtttattccatcttcccaaggcttgcattctttctattgagtttgatgtgccaggwcccaaaattgggaattgcatcaagacaaatatttttaaaataaagtaagtattgttggtttcaaatatgattgtctcaaatataaacaactacacaaatttgaaacatgttggatgaaatggtagaaggaaaacagaggaagagccgaagtaaaaatagaagtgatatacatgagggcatagtgtacgaagcagagggtttattctagaattatatgaagccagtgaaaaagagatcatttggaacatagtattgtgcaattctagtcaatgtaagaggcaatcaaa

SEQ ID NO: 253836 - DNA, 603 bp, Homo sapiens
tacatatatacatgaacttctgtattaatcagggttctctagagggacagagctaatargatagatgtatatatgaaggggagtttattaggagaattgactcagatggtcacaaggtgaagttccacgataggctgtctgcaagccgaggagcaagaaagccagtctgaatcccaaaacctcaaaagtagggaagccaacagtgcagccttcagtctgtggccaaagacccaagagctcctggcaaatcactgatgtcaatccaagaatccaaaagctgaagaacttgtagtctgatgatcgagggcaggaagcatccagtgcgggagaaagacggaagctagaagacttagcaagtccactttttccaacttctgcctgctttattctagccacaccagcagctgattagatggtgcccacacagattgagttggtgggcaccagtgcagctttattttagcctcactggcagctgagtatatggtgcccacccggattgagtgggtggtgtactcattagatggtgggcaccatctaatcagctaccagtgtggctagaataaaacagacagaagaagtaggtctgcctctcccagtcca

SEQ ID NO: 253837 - DNA, 603 bp, Homo sapiens
tacatatatacatgaacttctgtattaatcagggttctctagagggacagagctaataggatagatgtatatatgaaggggagtttattargagaattgactcagatggtcacaaggtgaagttccacgataggctgtctgcaagccgaggagcaagaaagccagtctgaatcccaaaacctcaaaagtagggaagccaacagtgcagccttcagtctgtggccaaagacccaagagctcctggcaaatcactgatgtcaatccaagaatccaaaagctgaagaacttgtagtctgatgatcgagggcaggaagcatccagtgcgggagaaagacggaagctagaagacttagcaagtccactttttccaacttctgcctgctttattctagccacaccagcagctgattagatggtgcccacacagattgagttggtgggcaccagtgcagctttattttagcctcactggcagctgagtatatggtgcccacccggattgagtgggtggtgtactcattagatggtgggcaccatctaatcagctaccagtgtggctagaataaaacagacagaagaagtaggtctgcctctcccagtcca

SEQ ID NO: 253838 - DNA, 603 bp, Homo sapiens
tacatatatacatgaacttctgtattaatcagggttctctagagggacagagctaataggatagatgtatatatgaaggggagtttattaggagaattgactcagatggtcacaargtgaagttccacgataggctgtctgcaagccgaggagcaagaaagccagtctgaatcccaaaacctcaaaagtagggaagccaacagtgcagccttcagtctgtggccaaagacccaagagctcctggcaaatcactgatgtcaatccaagaatccaaaagctgaagaacttgtagtctgatgatcgagggcaggaagcatccagtgcgggagaaagacggaagctagaagacttagcaagtccactttttccaacttctgcctgctttattctagccacaccagcagctgattagatggtgcccacacagattgagttggtgggcaccagtgcagctttattttagcctcactggcagctgagtatatggtgcccacccggattgagtgggtggtgtactcattagatggtgggcaccatctaatcagctaccagtgtggctagaataaaacagacagaagaagtaggtctgcctctcccagtcca

SEQ ID NO: 253839 - DNA, 603 bp, Homo sapiens
tacatatatacatgaacttctgtattaatcagggttctctagagggacagagctaataggatagatgtatatatgaaggggagtttattaggagaattgactcagatggtcacaaggtgaagttccacgataggctgtctgcaagccgaggagcaagaaagccagtctgaatcccaaaacctcaaaagtagggaagccaacagtgcagccttcagtctgtggccaaagacccaagagctcctggcaaatcactgatgtcaatccaagaatccaaaagctgaagaacttgtagtctgatgatcgarggcaggaagcatccagtgcgggagaaagacggaagctagaagacttagcaagtccactttttccaacttctgcctgctttattctagccacaccagcagctgattagatggtgcccacacagattgagttggtgggcaccagtgcagctttattttagcctcactggcagctgagtatatggtgcccacccggattgagtgggtggtgtactcattagatggtgggcaccatctaatcagctaccagtgtggctagaataaaacagacagaagaagtaggtctgcctctcccagtcca

SEQ ID NO: 253840 - DNA, 558 bp, Homo sapiens
ttctctgaagaactgagtaaacatgactctaaggatcacccattacttgcagagcaatgagaggcacagaagacgctttgcctgcccttggaagtttaaatttgtattgtgggagacagaagggctaaaaaataaatcacaaatgtagaaygtgatgtgccatttaaaaaagcagcaaagataaatgtactgaacaaagagatatgaaactatgttctgaggaagtactgaagtggcttcttgaggactttagaaaagcactttccccagaaacacatcagggagaaaagtcagagatttgtatgatatcactatgataaaggaatttctagaacaatttttatagtaatagtttaggccacattggactgatttgtatttatcaagctaaaataaagttatcacttttatatttccagtagattaatactctataggagttcagatggccagaaattgaagaggtgctctctatggcagtcttcctctatgtggggtctaaacaagaccacctattgtggaataaagaaagaatactagatctttcaaaattttttt

SEQ ID NO: 253841 - DNA, 591 bp, Homo sapiens
ctgtacaattggtcagagcaatacaaattgtggttgctggcattatgaagactgaatatgcagaactgaatattagatgctttttgggaactggaatcaaaggcattattagacttaccattgacttccacaaccttttcagctggagtctcagtgtttagtatcagtggcctggagataaataagtgtcttggtcctgggaacmaatggtccttctctaatggaccatcagtccaaaggaatgtttgtcatttggggtccacagtaaacgttaactggcaaatgctttttaataattctacagagagagatacggcaatggaaaatgttcatgaatacactccccatctctcaaataactgtttccacctcaatccatttgtcttaggtacagtagatcgcaagatttctagtaaattaatttaggtgagagcaaaatccattgttcataaatttttccctcagggaaaaatgcttttcaaatcaccatctgcttatctgccactttgtgtttgctactcttcaaatccaacaggagggcagagggctcagagctaggtaggtgtttgacagctgtcatggaccaggaca

SEQ ID NO: 253842 - DNA, 591 bp, Homo sapiens
ctgtacaattggtcagagcaatacaaattgtggttgctggcattatgaagactgaatatgcagaactgaatattagatgctttttgggaactggaatcaaaggcattattagacttaccattgacttccacaaccttttcagctggagtctcagtgtttagtatcagtggcctggagataaataagtgtcttggtcctgggaaccaatggtccttctctaatggaccatcagtccaaaggaatgtttgtcatttggggtccacagtaaacgttaactggcaaatgctttttaataattctacagagagagatacggcaatggaaaatgttcatgaatacactccccatctctcaaataactgtttccacctcaatccatttgtcttaggtacagtagatcgcaagatttctagtaaattaatttaggtgagagcaaaatccattgttcataamtttttccctcagggaaaaatgcttttcaaatcaccatctgcttatctgccactttgtgtttgctactcttcaaatccaacaggagggcagagggctcagagctaggtaggtgtttgacagctgtcatggaccaggaca

SEQ ID NO: 253843 - DNA, 503 bp, Homo sapiens
gctcagggctgtggtgggaggccaacttgggtgtcaaaagaaagatatgactgagttcaacaagcaacccagggaaaattcttggagctgcatccctcttctgtgaagtcttttggtcctgcactcatccacaatgagcctatagaccatgaggtatatcagtggtgatccccatccctttccctcctctcatctccagcaccagaaaagccaaaggagttctgaaatgaggactgaagggccactcaccaactctggctccttagctgccatctgtaaccacatatccagcctgtgttggaaaaacagagcaaagggttggaarttgactagaaccaagtcttaatatctgagagtagactattttaataattgaaatgattaaaagtatggtattatattaatatgaccttagaagtactttttacccagtgggaaaggtggattaaacaaagactattgcaggcaattattaagggggacaaacatttcatgctttacct

SEQ ID NO: 253844 - DNA, 564 bp, Homo sapiens
cctagcaagtaaccctgaaactaaagttttgtgtaatagtacttattcttcctaagtactgtatactcagatagtttctattctatttcatcttaaaaaaaaatactggttgcaatttactcaattgattttttgacccactaacaagtcaaaacttgtagtttgtaaaacactattgaaagtctaaaatctatttatatcctttaatacaagacaaattaacctcaggtcataygtatttccctctcccaataaatatgtgcgcacatattctcaaaaactatttgttcttttcagagtaaataatattaattcaagattattggtcactttcctgattagccttatggtactcaagacagaataaagctgcacattagatgagctactcacattcattctccatatgtcacattattttaggaatacaaaaaccagaaaacatgaggcttctgaaaattatgcatatttacatgtacttctggttaaaaaatcttgaacaggcagatttttctcttgagattttggatgggttcatttcttaacagaaaatgcaaacatgca

SEQ ID NO: 253845 - DNA, 559 bp, Homo sapiens
tattgacgttccacaccagagtggtacatttgtcaccactgatgagcctacattgacacatcatcatccaaagcctgtagtttatattagggtttactcttggtgttctacattctgtagacttggacaaatgtatagtgatgtatccactatagtcatgtcatacaaaacagtttcactgccctaaaattaatgttttgggggcactaaacctctgtgctctgcctattcatttcttcctctaactcacaccttgcaaacactgatctttttactatctccataggtttgccttcttcagaatgtcatatggttggaatcacacagtacagaacctttttagattggcttctttcatatagtaatrtgcatttaagtctccttcatgtcttttcattacttgatagctcatttcttttcagcactaaatcatattccattatctggatgtaccacaatttctatattcacctatggaaggacatcttggttgcttccaagtttagcaattatgaatcaagctgctataaatacgataaacatgcatgtacaggttttt

SEQ ID NO: 253846 - DNA, 623 bp, Homo sapiens
gaaggcagaggttttactggctcagaatataactgtgcttagaactactgaatggaattcaaaaattgagtttgctcatcagaacataaaaataaaataggagccatctttttaatataggtgagtccttataactcttttttaatactctataaaattatcatcctttcagttccaggtctaggagatttttcccttttaaaattcttccgcaaaaaaaaaagtcacaaatctaatargacaggaactcttaaaaccacagatatgattaaggctcagttccctaataaatgtgcaatgaaacacttgtcagcccttgaaataatgagctgtgatctatgataaatgtgccaataacacattttccagggcagcatatttcagatgggtaggaaatagttgaatcacagcaggatcttatttttacacaaattacttctaaactccaaacatatctaaaattaatttctttcatcacattaacactgggctgttaatcaccggaatgtgtgctcatatttgacagacataaaaactgatttacatttggaagaggaggaggacatgcataaaagaagcatgttcctcatgtgaaataaagttttgcatatcctgtttcataa

SEQ ID NO: 253847 - DNA, 623 bp, Homo sapiens
gaaggcagaggttttactggctcagaatataactgtgcttagaactactgaatggaattcaaaaattgagtttgctcatcagaacataaaaataaaataggagccatctttttaatataggtgagtccttataactcttttttaatactctataaaattatcatcctttcagttccaggtctaggagatttttcccttttaaaattcttccgcaaaaaaaaaagtcacaaatctaataggacaggaactcttaaaaccacagatatgattaaggctcagttccctaataaatgtgcaatgaaacacttgtcagcccttgaaataatgagctgtgatctatgataaatgtgccaataacacattttccagggcagcatatttcagatgggtaggaaatagttgaatcacagcaggatcttatttttacacaaattacttctaaactccaaacayatctaaaattaatttctttcatcacattaacactgggctgttaatcaccggaatgtgtgctcatatttgacagacataaaaactgatttacatttggaagaggaggaggacatgcataaaagaagcatgttcctcatgtgaaataaagttttgcatatcctgtttcataa

SEQ ID NO: 253848 - DNA, 596 bp, Homo sapiens
tggggttatttgaaggctgctgtattcgttgcttccttttcaaggccagggtgttgaaacttgatccaggcagggggatctgccttttatagctcaggttctctggaggcctacacagttctaacattctgacagtttgtttcatctgtttttcagaattatatatttaaatataaacaagaaatcatcaacacttttcactgctaagatactttcaaacacttttctctctggcttcccctggttggctttgtagccatgtagaaaatgtaacattttctccttcaaatatgcaggctkttgagcaacaaaaaggaaattaggaatagagatgttcactttctttattctttcatttatttattttttgtttttatggttttgcagaactttcattgaactgcctaataaaataactaagtatggtaacaaaatagatgactacatggggtgggggatggataaagtacaaccaggataaagtagtatcaatagctgaatcaattatgccttcaatatcaaagttcctgcttgatatttgtggaaactgaacaaacatctactaaaatattggtacactctcacctgtgtaatat

SEQ ID NO: 253849 - DNA, 544 bp, Homo sapiens
tgagagcactttgaaagctggaggatggcacaggtaaagagattaggggaagatgaagagcatgaygattaatctgctctgtactggatgtcgtgtagtgcctaggtatcaatgataaaataataaatataatctgagtgtgctttccttcctggagcttacatttcactgagggagtgatgaagttaataatcattgtaataatttgactacttgatgcagtgttcaaggcactgtaaagagctcaatatcagaagagtttctggctatccaaactacaagttaaaaagtcttttctataagaaacctatttaccaacactggaaataatagaataaaacacgttagaattagcagggcacggtgtcagtagattccaattctgatgcaaggtgccacattatctgtaaattagccctgcctatgattttcctattaaacttgctgcgttacacgttgtggttctacagtccgagatcttcccaaatctctttcatatctcatcccttgatttctttatcactgggggtctgaaacctaaaat

SEQ ID NO: 253850 - DNA, 535 bp, Homo sapiens
ctatattatgcagattgatttttccttttactrtatttttactctatatactattttatatactattctatttctttcctcttcctcacacccaatcttggtgaaatgtctcatctccagtgtctgaaaaggtttataccaaccttcaaatttgaactagaatacatatcacgccatttatccaataaactagaattaatttggttagcttgtgtgggcttctctatttgcaattcctattatatcaattatatcaaaccccctctctactaaaaatgcaagaaaaaaactagccagcgacagagccagactcctttcaaaaaaaataaataaataaagataaaacttctgttctgaagaaacttaatcatctatgttaacacccacctacgccctgtgaaatgcaatcaattggaagaaaggggtgtggtcttcagagatttataaaccgacacttcaggagccaagctcattcttctccagagcccacagagtagctttgcaactggctttggggacttccgaaagctaccag

SEQ ID NO: 253851 - DNA, 535 bp, Homo sapiens
ctatattatgcagattgatttttccttttactatatttttactctatatactattttatatactattctatttctttcctcttcctyacacccaatcttggtgaaatgtctcatctccagtgtctgaaaaggtttataccaaccttcaaatttgaactagaatacatatcacgccatttatccaataaactagaattaatttggttagcttgtgtgggcttctctatttgcaattcctattatatcaattatatcaaaccccctctctactaaaaatgcaagaaaaaaactagccagcgacagagccagactcctttcaaaaaaaataaataaataaagataaaacttctgttctgaagaaacttaatcatctatgttaacacccacctacgccctgtgaaatgcaatcaattggaagaaaggggtgtggtcttcagagatttataaaccgacacttcaggagccaagctcattcttctccagagcccacagagtagctttgcaactggctttggggacttccgaaagctaccag

SEQ ID NO: 253852 - DNA, 535 bp, Homo sapiens
ctatattatgcagattgatttttccttttactatatttttactctatatactattttatatactattctatttctttcctcttcctcacacccaatcttggtgaaatgtctcatctccagtgtctgaaaaggtttataccaaccttcaaatttgaactagaatacatatcaygccatttatccaataaactagaattaatttggttagcttgtgtgggcttctctatttgcaattcctattatatcaattatatcaaaccccctctctactaaaaatgcaagaaaaaaactagccagcgacagagccagactcctttcaaaaaaaataaataaataaagataaaacttctgttctgaagaaacttaatcatctatgttaacacccacctacgccctgtgaaatgcaatcaattggaagaaaggggtgtggtcttcagagatttataaaccgacacttcaggagccaagctcattcttctccagagcccacagagtagctttgcaactggctttggggacttccgaaagctaccag

SEQ ID NO: 253853 - DNA, 535 bp, Homo sapiens
ctatattatgcagattgatttttccttttactatatttttactctatatactattttatatactattctatttctttcctcttcctcacacccaatcttggtgaaatgtctcatctccagtgtctgaaaaggtttataccaaccttcaaatttgaactagaatacatatcacrccatttatccaataaactagaattaatttggttagcttgtgtgggcttctctatttgcaattcctattatatcaattatatcaaaccccctctctactaaaaatgcaagaaaaaaactagccagcgacagagccagactcctttcaaaaaaaataaataaataaagataaaacttctgttctgaagaaacttaatcatctatgttaacacccacctacgccctgtgaaatgcaatcaattggaagaaaggggtgtggtcttcagagatttataaaccgacacttcaggagccaagctcattcttctccagagcccacagagtagctttgcaactggctttggggacttccgaaagctaccag

SEQ ID NO: 253854 - DNA, 380 bp, Homo sapiens
actcttttcctgactgtgtgaaagagtaatgataatgcttcaattatcattatctttttgtaaattgaattaattgtcttttaaggatgttgtaatattaacyagtatatccccaaattaacagactgtccaggaacagtaaacatgccagaaagtttttgttgattaaattaacatagtagcctagaaaaacaatgattcttagctttaccttggagaggtgccttaccttgatttgactgtttttccttggagagtaaaggctagctttttctgatttgggtcaaagtatgagttctgctctaacattttcaagcaatgtccttctggaaaagtcattatggatggttgttatagttaaataaaataatgagagtaga

SEQ ID NO: 253855 - DNA, 380 bp, Homo sapiens
actcttttcctgactgtgtgaaagagtaatgataatgcttcaattatcattatctttttgtaaattgaattaattgtcttttaaggatgttgtaatattaactagtatatccccaaattaacagactgtccaggaacagkaaacatgccagaaagtttttgttgattaaattaacatagtagcctagaaaaacaatgattcttagctttaccttggagaggtgccttaccttgatttgactgtttttccttggagagtaaaggctagctttttctgatttgggtcaaagtatgagttctgctctaacattttcaagcaatgtccttctggaaaagtcattatggatggttgttatagttaaataaaataatgagagtaga

SEQ ID NO: 253856 - DNA, 380 bp, Homo sapiens
actcttttcctgactgtgtgaaagagtaatgataatgcttcaattatcattatctttttgtaaattgaattaattgtcttttaaggatgttgtaatattaactagtatatccccaaattaacagactgtccaggaacagtaaacatgccagaaagtttttgttgattaaattaacatagyagcctagaaaaacaatgattcttagctttaccttggagaggtgccttaccttgatttgactgtttttccttggagagtaaaggctagctttttctgatttgggtcaaagtatgagttctgctctaacattttcaagcaatgtccttctggaaaagtcattatggatggttgttatagttaaataaaataatgagagtaga

SEQ ID NO: 253857 - DNA, 408 bp, Homo sapiens
tctttaggactttaggaaccattctctgatacaatttcatgtatacaattattacatgaagtatacagaactgaattcaggacatttcaatttcaaattcagtgcagttaacgactgatttgagtgacagcgtttttttwaaaaaaatacatttttaggtgatgtttcatagcatttataattttaatcatgtttttaatcaactaaagcatacatgagtaacttatataacaatgcaaaaactgagaatctgtcaacaataggaacatgatttggtggttgatgaggtcttagatagaactccaggatagatcatgacaaatccagcagaataaaagaagtctgtgcctgaatctggcatgaaagtcagataatttttgcaaggaatcagcacttttcagaaggcag

SEQ ID NO: 253858 - DNA, 408 bp, Homo sapiens
tctttaggactttaggaaccattctctgatacaatttcatgtatacaattattacatgaagtatacagaactgaattcaggacatttcaatttcaaattcagtgcagttaacgactgatttgagtgacagcgtttttttaaaaaaaatacatttttaggtgatgtttcatagcatttataattttaatcatgtttttaatcaactaaagcatacatgagtaacttatataacaatgcaaaaactgagaatctgtcaacaataggaacatgatttggtggttgatgaggtcttagatagaactccaggatagatyatgacaaatccagcagaataaaagaagtctgtgcctgaatctggcatgaaagtcagataatttttgcaaggaatcagcacttttcagaaggcag

SEQ ID NO: 253859 - DNA, 430 bp, Homo sapiens
tatctgaacataagaatttacaaactgattttcactggaacattctcttttttctacagtggaaatttccttccattttgaagtaaccaatcacaatatcaggctctttgaggatgtgagaagttggatgtttagacgtggacctttgaattctgacagatctgactattttgctgcatggggagccagggtcttctcctttgggaaacactactgggagctggatgtggacaactcttgtgactgggctctgggagtctgtaacractcctggataaggaagaatagcacaatggttaactctgaggacatatttcttcttttgtgtctgaaggtggataatcatttcaatctcttgaccacctccccagtgtttcctcactacatagagaaacctctgggccgggttggtgtgtttcttgattttgaa

SEQ ID NO: 253860 - DNA, 430 bp, Homo sapiens
tatctgaacataagaatttacaaactgattttcactggaacattctcttttttctacagtggaaatttccttccattttgaagtaaccaatcacaatatcaggctctttgaggatgtgagaagttggatgtttagacgtggacctttgaattctgacagatctgactattttgctgcatggggagccagggtcttctcctttgggaaacactactgggagctggatgtggacaactcttgtgactgggctctgggagtctgtaacaactcctggataaggaagaatagcacaatggttaactctgaggacatatttcttcttttgtgtctgaaggtggataatcatttcartctcttgaccacctccccagtgtttcctcactacatagagaaacctctgggccgggttggtgtgtttcttgattttgaa

SEQ ID NO: 253861 - DNA, 691 bp, Homo sapiens
atttccttccattttgaagtaaccaatcacaatatcaggctctttgaggatgtgagaagttggatgtttagacgtggacctttgaattctgacagatctgactattttgctgcatggggagccagggtcttctcctttgggaaacactactgggagctggatgtggacaactcttgtgactgggctctgggagtctgtaacaactcctggataaggaagaatagcacaatggttaactctgaggacatatttcttcttttgtgtctgaaggtggataatcatttcaatctcttgaccacctccccagtgtttcctcactayatagagaaacctctgggccgggttggtgtgtttcttgattttgaaagtggaagtgtgagttttttgaatgtcaccaagagttccctcatatggagttacccagctggctccttaacttttcctgtcaggcctttcttttacactggccacagatgatcaggattaagaaaacttactgtttgggaactccatatacaagggagcccttcactgttgatacaaagaaatcatactgttcaggcttttttgtactttagtgtcacttcattttattgctattaaataaaaaatttgtaaaaggcaaaactttttgtacattttcttacaattaaaataatctcttatggaccattacctaaaatacgtattg

SEQ ID NO: 253862 - DNA, 604 bp, Homo sapiens
caaaatgtagacatatactcccttctttctattctcatttcaccatcatacaatatccccttggtttttgttttaataattgttctgccacagttaattacacattcactagtgtgtttccactatcaaacgtacttcttcrgtatactgtggaaattaacaaacgcttgttaacagaaaaaaaacaaaacctaaagcttggtcaacatcactgtcttccataccggggaatgagtgttgctgtggggtcttgaacaagtctcctcaaggtaggaggctaaacttgactttcgaggtagggctcagacaccaaaccaagttgaggttagctaaaacagggaccaggcagaagcagctttccaaaagacacgcccaccagtgtgccagagcaggttaccattgccatggcaacacccaggagttatcacccattccatggcaatgacttgacatcccaaattaccctttctctagaaatttctgcataaaccccttagtctacatgctattaaaagtaggtgtaaccatgactgcaaaactgctgtgagctgctaatctctgcccatggagtagccctgctctgtgggagcagccacaaagctgt

SEQ ID NO: 253863 - DNA, 604 bp, Homo sapiens
caaaatgtagacatatactcccttctttctattctcatttcaccatcatacaatatccccttggtttttgttttaataattgttctgccacagttaattacacattcactagtgtgtttccactatcaaacgtacttcttcggtatactgtggaaattaacaaaygcttgttaacagaaaaaaaacaaaacctaaagcttggtcaacatcactgtcttccataccggggaatgagtgttgctgtggggtcttgaacaagtctcctcaaggtaggaggctaaacttgactttcgaggtagggctcagacaccaaaccaagttgaggttagctaaaacagggaccaggcagaagcagctttccaaaagacacgcccaccagtgtgccagagcaggttaccattgccatggcaacacccaggagttatcacccattccatggcaatgacttgacatcccaaattaccctttctctagaaatttctgcataaaccccttagtctacatgctattaaaagtaggtgtaaccatgactgcaaaactgctgtgagctgctaatctctgcccatggagtagccctgctctgtgggagcagccacaaagctgt

SEQ ID NO: 253864 - DNA, 604 bp, Homo sapiens
caaaatgtagacatatactcccttctttctattctcatttcaccatcatacaatatccccttggtttttgttttaataattgttctgccacagttaattacacattcactagtgtgtttccactatcaaacgtacttcttcggtatactgtggaaattaacaaacgcttgttaacagaaaaaaaacaaaacctaaagcttggtcaacatcactgtcttccataccggggaatgagtgttgctgtggggtcttgaacaagtctcctcaaggtaggaggctaaacttgactttcgaggtagggctcagacaccaaaccaagttgaggttagctaaaacagggaccaggcagaagcarctttccaaaagacacgcccaccagtgtgccagagcaggttaccattgccatggcaacacccaggagttatcacccattccatggcaatgacttgacatcccaaattaccctttctctagaaatttctgcataaaccccttagtctacatgctattaaaagtaggtgtaaccatgactgcaaaactgctgtgagctgctaatctctgcccatggagtagccctgctctgtgggagcagccacaaagctgt

SEQ ID NO: 253865 - DNA, 604 bp, Homo sapiens
caaaatgtagacatatactcccttctttctattctcatttcaccatcatacaatatccccttggtttttgttttaataattgttctgccacagttaattacacattcactagtgtgtttccactatcaaacgtacttcttcggtatactgtggaaattaacaaacgcttgttaacagaaaaaaaacaaaacctaaagcttggtcaacatcactgtcttccataccggggaatgagtgttgctgtggggtcttgaacaagtctcctcaaggtaggaggctaaacttgactttcgaggtagggctcagacaccaaaccaagttgaggttagctaaaacagggaccaggcagaagcagctttccaaaagacacgcccaccagtgygccagagcaggttaccattgccatggcaacacccaggagttatcacccattccatggcaatgacttgacatcccaaattaccctttctctagaaatttctgcataaaccccttagtctacatgctattaaaagtaggtgtaaccatgactgcaaaactgctgtgagctgctaatctctgcccatggagtagccctgctctgtgggagcagccacaaagctgt

SEQ ID NO: 253866 - DNA, 459 bp, Homo sapiens
gtgtattgcagagtttgtcatttgctttatgaggaagaggaatgtcacttggagagactggaataggaaagcaaagagaagtaaagacagtaaagacagaatgaaatgaaaggagaaagccgtaggaggaatgtataagaaactgaaggaaatgtaccataaaccagacctggagctgctccagattaggactgagaacaagagagtccactgggaaaaatgacctcattctctttgccttctgtgatgtgtttggaatgatgctttcatgatgcttgaaagtgaattgcttgtctagtaacaaaaragacaaagtcagtttttcttgatccaggagcaaaacacaaacaaacaaaaacagtagaaaacaccccagaaaaaaatttcctttcaaaattcattcaattgctgaaaaactgcagtaaaaaagtttatttgaagctttttgaatttgtattt

SEQ ID NO: 253867 - DNA, 531 bp, Homo sapiens
ctgtcattggaatacagatcctgtcaccttggtagtcagcatagtacccaataggtagtttttaaaaaatatattatcatcattattatcatttattaatgtggagaatagccttccaaagacagctgcaaatgtccttgtcacacagaggtagcagtcatcaggaactctgctgaccgatgctttaggtgcctgtttacaaggaagacattctggaaaaaaaaagtcaggaaacttcagggtaaaaaaaaacaacaacaacaacaaaaaacacacctttcttccaaartaagtattttctgacactcacaccttcaggctgttgcccctgttggaagtgagagagtgactagttactggcagtgtgacaccatgagcacgctcctaggctaatggagctgactgaagagctccctccaagacaggttccctgcagccctcccctttctttcttctgaaaatgtgtatctttcttttcaagccacgacttaaagtcttattttgttcctactcttagaagcagtcaaaaag

SEQ ID NO: 253868 - DNA, 571 bp, Homo sapiens
ggaccgttgaagggaccagggactctgcaggtttgagtggggcaagggaatgaggttgaggcatagagaagattcaagagatctaactggccttttgcttaccccaggagggcttctggcacattctgagtggagcaaacttgggtgcttcacccactccttcatggggctaggctcactacagggctgtgtcctcytgtgtcatgttgtggaccacacagcgcctgccttccctgcatctgaaggagcagcctggagggcttagggatctggaaccccattttcctctctatgcttcagtggctatccttgctgcttgtggcccccacaccagggtggacataccattaccccgagggaatgctaagcatggtatttccttctaacaacaacagctactactactgtaatttactaagtattacttaatgccaggaactgtggagtgccttctacacagccccatttatctttcacaacacccagtgaagccagggctttgaggcaactgtgccgcagagggtgctctgggtcacccatttgctgagcagcagaaccaggatctgaactc

SEQ ID NO: 253869 - DNA, 571 bp, Homo sapiens
ggaccgttgaagggaccagggactctgcaggtttgagtggggcaagggaatgaggttgaggcatagagaagattcaagagatctaactggccttttgcttaccccaggagggcttctggcacattctgagtggagcaaacttgggtgcttcacccactccttcatggggctaggctcactacagggctgtgtcctcttgtgtcatgttgtggaccacacagcgcctgccttccctgcatctgaaggagcagcctggagggcttagggrtctggaaccccattttcctctctatgcttcagtggctatccttgctgcttgtggcccccacaccagggtggacataccattaccccgagggaatgctaagcatggtatttccttctaacaacaacagctactactactgtaatttactaagtattacttaatgccaggaactgtggagtgccttctacacagccccatttatctttcacaacacccagtgaagccagggctttgaggcaactgtgccgcagagggtgctctgggtcacccatttgctgagcagcagaaccaggatctgaactc

SEQ ID NO: 253870 - DNA, 571 bp, Homo sapiens
ggaccgttgaagggaccagggactctgcaggtttgagtggggcaagggaatgaggttgaggcatagagaagattcaagagatctaactggccttttgcttaccccaggagggcttctggcacattctgagtggagcaaacttgggtgcttcacccactccttcatggggctaggctcactacagggctgtgtcctcttgtgtcatgttgtggaccacacagcgcctgccttccctgcatctgaaggagcagcctggagggcttagggatctggaaccccattttcctctctatgcttcagtggctatccttgctgcttrtggcccccacaccagggtggacataccattaccccgagggaatgctaagcatggtatttccttctaacaacaacagctactactactgtaatttactaagtattacttaatgccaggaactgtggagtgccttctacacagccccatttatctttcacaacacccagtgaagccagggctttgaggcaactgtgccgcagagggtgctctgggtcacccatttgctgagcagcagaaccaggatctgaactc

SEQ ID NO: 253871 - DNA, 530 bp, Homo sapiens
gggtagtatgtagtgccctgtgagttatgcatgaacccaacaattttacctacagatctgagagctctctttgtacctcargttctatttttgtcttatacaaaataaagcttattctactctagacagaagtttatcattgagttacaacctgagtcaaattttgctttggtctgtgtttctccagggcataagatgaagaagtttgaatgatacctttcctaatttccttccttcaggaaaatggtctcagagatcacacaagccttccagaaagagcccatctgtctcttctgtctgaactaactcgtagatcccatcaccacaggctgtgtccccagcttctgtagaccctgtctctgcctttcctgggaagaagccaaaattcctacctgctgcccacattcagggaaccatcacagcaggaggacatcaaaaccaatattcttctgaagaatctagtgtgcattaccaggaaaaccagtctctggcaattcctgagctctaatgaacaaatgtgtggaacccac

SEQ ID NO: 253872 - DNA, 520 bp, Homo sapiens
cctaaactttcttgaaacatgatgagatttttgtttgtcattttattaaagctcttcagctatagttaatgttagtgtatttcatgtgtggcccaagacaatgcttttttctaatgaggcccagggaagccaaaagattgcacaccactggcttaggtgatattatttattcaacaccatagatgtgtgtgtgtatatatatgtatatgtgtgtatgcatatatatatatatatatatatatatgtatatgtgtgtatrtatatatatatatatatatatatatatatatatatatataaaatatttagctcctgctgctaagatggaggatcttttccaaatagaaataacatagacaaaatgtaattcttttcctaaccatgaacaagcaagcttgtggaatttttaagtggatataattttctattcccatttatcaaaattggccacagagaatattaccctctagtaaacttcttttgtagcttgcttttcaaaaacagaaaaaaattaacttat

SEQ ID NO: 253873 - DNA, 552 bp, Homo sapiens
tgtttttaaatcctgtgatgaaatagttggtattagaaagcgcaattgtattttcctctttaaaggagtgagtcagagcagtggcacatgccccagtgtgtgagctcagagatccgtgctcaacccatccactggactaatggacagattccaccacctccaggtgagtgtcaacctgctgaagtgatgagcacacagtgcccttcaggcatggtctttctttctttgctttcttttttttctttcctttctttcctttctctttatttttatttatttrttattttttttttgtttttatttatttatttatttatttttctgtggagtcttgctcagtcccccaggatggagcgcaatggtgccatctcggctcactgcaacctctgcctcccaggttcaagcgattctcctctctcagccacccaagtagctggaataacatgcacccaccatcatgccagctaattttttttttttttttgtatttttgtagagctggggtttctccaagttggccaggctggtcttgaactcctgaccttgggtgat

SEQ ID NO: 253874 - DNA, 548 bp, Homo sapiens
ccagactttgttccttcagatatgtccggagtttcttccttctggcaggttcattgtcttgctcatttcaagaatgaaactgcagaccttagtggtgagtgttacagcacttaaaggtgttatgtccagagtttgttccttctgatgtgtccagagtgtcttccttctggcagcttcatggtcttgctcacttcactaatgaagctgcagaccttactggtgagtgttacagcacttaaaggtgttatgtccagagtttgttccttctgatgtgtccagggtttctgtcttctggcaggttcatgttcttgctcacttcaagaatgaagctgcagaccttagtggtgactgttacagcacttaaargtgttatgtccagcgtttttccttcagatgtgtccagcgtttcttccttctggcaggttcatggtcttgctcacttcaagatgaagctgcagaccttactattgagtgttaaagcacttaaaggtgttatatccagagtttgttccttcagatgtgtccagagtttcttccttgtggcaggt

SEQ ID NO: 253875 - DNA, 548 bp, Homo sapiens
ccagactttgttccttcagatatgtccggagtttcttccttctggcaggttcattgtcttgctcatttcaagaatgaaactgcagaccttagtggtgagtgttacagcacttaaaggtgttatgtccagagtttgttccttctgatgtgtccagagtgtcttccttctggcagcttcatggtcttgctcacttcactaatgaagctgcagaccttactggtgagtgttacagcacttaaaggtgttatgtccagagtttgttccttctgatgtgtccagggtttctgtcttctggcaggttcatgttcttgctcacttcaagaatgaagctgcagaccttagtggtgactgttacagcacttaaaggtgttatgtccagcgtttttccttcagatgtgtccagcgtttcttccttctggcaggttcatggtcttgctcacttcaagatgaagctgcagaccttactattsagtgttaaagcacttaaaggtgttatatccagagtttgttccttcagatgtgtccagagtttcttccttgtggcaggt

SEQ ID NO: 253876 - DNA, 545 bp, Homo sapiens
agtttgttccttcagatgtgtccagagtgtcttccttctggcatgtgcacggtcttgctcayttcactaatgaagctgcagaccttactggtgagtgttacagcacttaaaggtgttatgtccagagtttgttccttctgatgtgtccagagtgtcttccttctggcagcttcatggtcttgctcacttcactaatgaagctgcagaccttactggtgagtgttacagcacttaaaggtgttatgtccagagtttgttccttctgatgtgtccagggtttctgtcttctggcaggttcatgttcttgctcacttcaagaatgaagctgcagaccttagtggtgactgttacagcacttaaaagtgttatgtccagagtttttccttcagatgtgtccagcgtttcttccttctggcaggttcatggtcttgctcacttcaagaatgaagctgcagaccttactattcagtgttaaagcacttaaaggtgttatatccagagtttgatccttcagatgtgtccagagtttcttccttcttgcagtt

SEQ ID NO: 253877 - DNA, 545 bp, Homo sapiens
agtttgttccttcagatgtgtccagagtgtcttccttctggcatgtgcacggtcttgctcacttcactaatgaarctgcagaccttactggtgagtgttacagcacttaaaggtgttatgtccagagtttgttccttctgatgtgtccagagtgtcttccttctggcagcttcatggtcttgctcacttcactaatgaagctgcagaccttactggtgagtgttacagcacttaaaggtgttatgtccagagtttgttccttctgatgtgtccagggtttctgtcttctggcaggttcatgttcttgctcacttcaagaatgaagctgcagaccttagtggtgactgttacagcacttaaaagtgttatgtccagagtttttccttcagatgtgtccagcgtttcttccttctggcaggttcatggtcttgctcacttcaagaatgaagctgcagaccttactattcagtgttaaagcacttaaaggtgttatatccagagtttgatccttcagatgtgtccagagtttcttccttcttgcagtt

SEQ ID NO: 253878 - DNA, 528 bp, Homo sapiens
gttacagcagttaacgttgttatgtccacaatttgttccttcagatgtgtccagtgtttcttccttctggcagtttcgtggtcttcctcacttcaagaatgaagctgcagaccttagtgttgagtgttacagcacttaaatgtgttatgtccagagttttttccttcagatatgtccagcgtttcttccttctgacaagttcatggtgttgctcacttcaagagtgaagctgcagaccttactgttgagttttaaagcacttaaagctgttatgtccagagtttgttccttcagatgtgtccagagtttcttccttctggcaggttcgtggtcttgctcacttctttaatgaagctgcagtccttactggtgagtkttacagcacttaaaggtgttatgtccagagtttgtttcttcagatgtgtccagagtttcttccttctggcagtttcgtggtcttcctcacttcaagaacgaagctgcagaccttactggtgagtgttacagcacttaaagttgttatgtcca

SEQ ID NO: 253879 - DNA, 528 bp, Homo sapiens
gttacagcagttaacgttgttatgtccacaatttgttccttcagatgtgtccagtgtttcttccttctggcagtttcgtggtcttcctcacttcaagaatgaagctgcagaccttagtgttgagtgttacagcacttaaatgtgttatgtccagagttttttccttcagatatgtccagcgtttcttccttctgacaagttcatggtgttgctcacttcaagagtgaagctgcagaccttactgttgagttttaaagcacttaaagctgttatgtccagagtttgttccttcagatgtgtccagagtttcttccttctggcaggttcgtggtcttgctcacttctttaatgaagctgcagtccttactggtgagtgwtacagcacttaaaggtgttatgtccagagtttgtttcttcagatgtgtccagagtttcttccttctggcagtttcgtggtcttcctcacttcaagaacgaagctgcagaccttactggtgagtgttacagcacttaaagttgttatgtcca

SEQ ID NO: 253880 - DNA, 420 bp, Homo sapiens
gaaagtgccagaatgaagaaactctggaaacatctgaaggaacaaatactggacataacacctttaagtgctgtaacactcaacactaaggactgcagcttcattcttgaagtgagcaacacgatgaacctgccagaagacagaaacyctggacacatctgaaggaacaatctctggatataacacctttaagtgctgtaacactcaccagtaaggtctgcagcttcattagtgaagtgaacaacaccatgaatctgccagaaggaagacactctggacacatctggaggaacaaactctggacataacacctttaagtgctgtaaaactcaccagtaaggtctgcagcttcattaaggaagtgagcaagaccaggaacctgcaagaaggaagaaactctggacacatctgaaggaacag

SEQ ID NO: 253881 - DNA, 420 bp, Homo sapiens
gaaagtgccagaatgaagaaactctggaaacatctgaaggaacaaatactggacataacacctttaagtgctgtaacactcaacactaaggactgcagcttcattcttgaagtgagcaacacgatgaacctgccagaagacagaaactctggacacatctgaaggaacaatctctggatataacacctttaagtgctgtaacactcaccagtaaggtctgcagcttcattagtgaagtgaacaasaccatgaatctgccagaaggaagacactctggacacatctggaggaacaaactctggacataacacctttaagtgctgtaaaactcaccagtaaggtctgcagcttcattaaggaagtgagcaagaccaggaacctgcaagaaggaagaaactctggacacatctgaaggaacag

SEQ ID NO: 253882 - DNA, 420 bp, Homo sapiens
gaaagtgccagaatgaagaaactctggaaacatctgaaggaacaaatactggacataacacctttaagtgctgtaacactcaacactaaggactgcagcttcattcttgaagtgagcaacacgatgaacctgccagaagacagaaactctggacacatctgaaggaacaatctctggatataacacctttaagtgctgtaacactcaccagtaaggtctgcagcttcattagtgaagtgaacaacaccatgaatctgccagaaggaagacamtctggacacatctggaggaacaaactctggacataacacctttaagtgctgtaaaactcaccagtaaggtctgcagcttcattaaggaagtgagcaagaccaggaacctgcaagaaggaagaaactctggacacatctgaaggaacag

SEQ ID NO: 253883 - DNA, 592 bp, Homo sapiens
gagtcccaggaatctgtactttgtaaaaatgcatctcagatattactattctagsttttcaatagctctcactttgagctatagtactttagctggtcactagacattagtccaacatttattactgaaacaaatgcgtgcgcgtgtgtgtgtgtgtgtgtgtgtgtgtacacacatatgttactgagcatttcacagtcagctttggaaggagaatgagaacccttggtatagcctggaagatttatagttgcccccttaagttcacaagtaattactgagtcctacaacaaggcaggagatgttaatatcggtagtaaaagacctttggtattaacactcttaaaaaacaaaacaaaactatgattctctttttctgacatcctcaaatataatttttgcctcctgtatatttctattgttgatttagaaaaaagggactgataagcgtgctatattttatctttttaattattagagaggtttcattcaattaatacatttatatatggtctgaaaagctttggagtttatgtactgtgtggtgttgggaataatttcaaaaggtgaataaggtcttttcttggtgaaa

SEQ ID NO: 253884 - DNA, 539 bp, Homo sapiens
gtcattggtgtgagacagtatacgtgaatttcttttgaaaccatggagctaytaaatgtttggtattagtattataaagtaggaatgcagctgaagttgaaatttagaggaatggactgaacctggatataacctgggagccactttacaagttagatcctctttatcagttttattctaattttataaaaagaaagagaagagttaaaatgtgggatacatgagggttctagttgggaatatatagggaatattccctgaaaatttccctctatattgtttgaaaaatttctaaataaaagtttgatgagcctaacttcttgataagcagtttttattttacctacttctgttgcccatatgcatatgtaattttactgttggtttagtattttaaagctaacattatatcatgtacatttccaatgttatactgttgtcataacttataatggattcagaaagcccactgactagtaacctttttcagtatttatttaccaatacccataattactatctaaaatattagaaatttg

SEQ ID NO: 253885 - DNA, 513 bp, Homo sapiens
gctagattcagaaagcactgaaactagactaacaattcatcagcagttaagtaagcactttactgtttcccttatatttccttcctcctcctctctctcaacccaatttaatggggtctgagactgaggctagcctagagaagaaaaggggtgaaggaatactgaggagaaagagggaagctgaccactctccttccatgactgcagggctggggcaggcccctgttggaggagggaagaaagctcaattctaaatcaactccagtgtttttgctagtacataatgctggacgtttcaggtactgaattatctggtgtttttaacctgaatgttttgttttgttttgttttttaattgcctaagagtgaccrgaattgccagggaaggacatgtcccactgtgcaggtttaaagaataaatggagggagaaggcaaagctgtttgatgatggcatcctacgagttgagcatggtcatctcaagtgctacattttaatcatagcagtgattcct

SEQ ID NO: 253886 - DNA, 629 bp, Homo sapiens
tttaatatagttaaactgtcaaaaaccgaatcagacagaatcttgagatcagcaagagaaaaataatatgccagcaatcttcaataacactaacagctgacttatcctaaaacatggaagccagagtcagaaggaatgacatatttaaaaggctggtagaaagggactgtcagcaagaagaccaaatctagcaaaactattcttcaaattttatgagaaattaagacattcccagataatcaaacactgagagaacccatcataagaagatccatcctacaagaaatactaaaaagaacccttctgctaaaatgaaggaacactttacagtaacttgagtatccatggagaaataaagaccaccaataaaggtaaccacataggtaaatatgaaggacagtattaataagttttgtttataattcttctatcagatttaaatggaaacagcataaaccaataattataagataatgttgatatagttataatgtgtaaagaggtcattgatatgacaataattacacaaaagagaaggaaacasagctgtatatgaactaagtttttgaaaactattaaaattaagttgatattaacctgaactacattgttttaggatttcaaatgta

SEQ ID NO: 253887 - DNA, 592 bp, Homo sapiens
cagtgatctaagtgctgatgccctttctgtagaacaagtgtcagcactctgcaatttttcattctgcaaagtgttttgttctatactgtctaatacaatcttgtacttctcttcctatcactcttatgcactgatttgtcattttcacttcaggagcctgggaaacttttgatgaagcatgactcatggctcaggaagagaaaagaaggaagtaccagctgatgctaagaggctggaaggtcaaatattatactttcttgctccctggagttggaaatgggatcggctttcctgaatctcattagctrctagaaagagaaaaaaaagatcaaggtttcaaaaggaaggagcaaggggaaatggatttcataaaacaactgtgtcctttacatcattacatagctataaagtatagtgcaaaaataaacaacaaaagcattagttcattagatgtaggaccagaaagcttgggaccctccagtttctaaccatgtgattttgaaaaattaaacatcaggtttcagtcctcagtctcactctccacagaataaataataattcggagtgacctgatagtaagtggcattatcac

SEQ ID NO: 253888 - DNA, 609 bp, Homo sapiens
tgatatttaacgtgattgcttcatatgatctgttctcatgagatccctaggggaactgactaatgacaaccacacatgamcccctgtgccaagatggcaaaaagcagtctctgttctccacgagaatgaaataaaatgcactgcaaaaggcatggcactggctaaacagggcataaaaccttacacaagtcagctacctgcatgtgttaaatctccctctaaagagtcttaaaaaggaggcaggaattcagacgtcctggattataaatataacaatacttaaatggcagggttgatctggtgacaggtgtctgtgtgtgtatgtgtctctctctcaacaagcacctcattgaactcattcattcattcaatgttaagtaacacagggtaactattcagttcaatcacttatcctcagtgtggggaatacaggagaggacaacaagggcagagttcctgagctaaatggagcttatgctgtagtgttggagacagataaataagcgagcaatttttaaaagtatgatagctagtaagtggtgtgtgctgtaaaaggttgacagaatggtgaaggagcaagaggggagggagagcctgactgtcagctag

SEQ ID NO: 253889 - DNA, 601 bp, Homo sapiens
acactgacagaataaatgaatgaataaatgaataaatgtacataaaaataaatgtcaccaaacgacagtgattctggctggaattttatttcaggtttccagtgcccataatcaggttgggaaacagtgatctttctacttcaatttcattacttttgcatccttttatattttatctagaccagaaaaagaaacagttgctaatttgggaactgttgccaatttgggaacaaatttaattccattacgtatctgctcacaggtattctacagtattaaatgttgccaccagagagctgtagaacaggaaaaggtcacgtggtttagttttagccctgaagcttgggaacaaactctcctacagctgttctagggttttggaagtcattgcctggctttcagtaccctccaatatcagtccccaaatatcaatccacatggcagcaggaggtcccggctttgcaggacagttttagttttacatagatgccytaatgtcccataagctagggtgatgcagttctggtttatccctaatgttacggcatcattattaacagcagccactttcaccctcaaaagtgtcttggtttagacaatg

SEQ ID NO: 253890 - DNA, 490 bp, Homo sapiens
aaaactctccaaatgaaatttataaacaaggagttaaaacagctaaagcaacaaaaaaggtcttggttctgggactttgtgcttttaggcagcctggttaaaatcgttgggggctatacatatccttctataagctttgatggaaactcgatttattccatattggttattaacaaacacatattcatctgcaatttcaaggccctacatcttgctgcaaatatttctttcacataataaacaaatatttttttaaaaaagaaaaaagcattctataaattctggtgctaatttccccaaataagaaggaatacatcttttatctcttctttactatcctaagcttcccattactgtctgtttggaccaatcatttaaaactacacacaaactttaagttcaatttctcaacactrtggttttgatatctccacaatgcactacttggcaaccacacttacctcacaacataaagagaattttaaccctc

SEQ ID NO: 253891 - DNA, 416 bp, Homo sapiens
catcttactaattcagtaaggtcttcacccaattacttctcaatttttcaaactaaatgttattgcttctaaaaatattcatatactttggatggggaacagagctgctagaatgtatgacctgatgagcaacaaccctattttccagaaatgtgtagtgcggtattggggaaagggggaagcaaactgtttttttttttttttaatcgtaygatgaatagaattccatattccttcttatgggactctatcttggaaattatagatttatatattaattgtatattttgctcatttgcttaaaaggagctctgagctgttagggaaagtattgtattagattaaccataaagaaacaagactaagtctccatggcttacaggaaaattactcttgtttttattttattcatcaga

SEQ ID NO: 253892 - DNA, 528 bp, Homo sapiens
tctgttgtgactgccccacagttcaacacctccctctacccagtcctggtgcttttacttccttaccggtgtcacttctgagatcactcaataaacttcatacacataaatctcaactccragtccgtttcttgggaaccctgagctaaaataatggtttggatctgaaaaggtaataatatgcctatctttttattggagaagaccatgaaaaaggaaacattttccatgtaaaaggaaaactgtcctctcaacaataccacttgcctagtagatatcaaaatggaatgctgtgtttaaaccaaaattgcttttaaccagctgaaactaataaagaagaattacacctgtttactagactttcatcaaaataaaaaactttcctaaccaactgctaaaccaacttgaaggtacttttagacttacctgacttgtttaatcaactgtggatgtacttttggattaatcctgccctatagggagtgaaagctccaattattaatcagcagaaccttgatttttgcttct

SEQ ID NO: 253893 - DNA, 550 bp, Homo sapiens
cttttacccactttctttctgattggaaacagactctcagacagaagttttcaagaggtttactgaagaatgcttgtcagggattaaaggaggcaggattagcagagtgagaagctggactatgagatagttgtaacggaagcctcagttggcctcacaagaagttctggagctggattgccccaatttaaggtaaaagaacaagactctcaaactttacatcaaccagtctttgagtacaggcagcccctggggagagtataaccatggcagagatcttcttgtgtcagagacaatacctsggaaggggctcagatgtggaccagcagcagccaacactcccagcagcggtgaaatgagtaccttggttctgagaagccctgtgggcagcaaaccacagcacacctcaaatatgcatagcaagtttatgaaatggatcgttttgctatgcccattttatgaatgggacgattgatattagaaagtttaagtaatttaggtaagccatacagtgaatcagtgataaaaccaagactggagcccagatgtc

SEQ ID NO: 253894 - DNA, 646 bp, Homo sapiens
tacaacaaatgttcccacaataattgcttatccttatagaaaaattaaataaaattgtatttatacctcgaagcatatatacatttgatcccaggtagattaaaaatggaaatgtgaaatacaaaactatgtaagttttagaagataatacaggaaagtatctttttaaaatcaaagtgaacagaagtatttaataaatagaacacacacacacaaaaatctagaaatcctagaaggaaaatatttataaattcaattgaattaaataattctgttcatcaaaaacaccatgaagaaggtaaaaagattagccacaaaataaaagatgttttctacaactaatagatactaataagaaaaagataaacatcctcccccamaaagtgaaccaaagatttgaacaggtagtttacaaaaggagaaaccaaatattaacagtaaaaaaagaaaaacatgttcagatccatcagataactggaaattcatccccgtcctcctcctcccccttttcttctttcctcctcatcattcctctaccactttaaactaaacagactgacaaaaattttaaagtgtgacaatattacctcttggcaagatatagagcttacatactgtcacaaggaggacaacatggttcatcact

SEQ ID NO: 253895 - DNA, 364 bp, Homo sapiens
gttttctacaactaatagatactaataagaaaaagataaacatcctcccccaaaaagtgaaccaaagatttgaacaggtagtttacaaaaggagaaaccaaatattaayagtaaaaaaagaaaaacatgttcagatccatcagataactggaaattcatccccgtcctcctcctcccccttttcttctttcctcctcatcattcctctaccactttaaactaaacagactgacaaaaattttaaagtgtgacaatattacctcttggcaagatatagagcttacatactgtcacaaggaggacaacatggttcatcactatggaaaacagcttgctgttctataggaatattgaaggtgcacat

SEQ ID NO: 253896 - DNA, 572 bp, Homo sapiens
aaaggctggtagaccagcagctgggaaaccatcccagatggctctaaggctcaggtagtcttgtcccacacttcaggtcaggaaactacccagaaataagggcatctgctttgtgcccaaaagtctcctagcaaagagactccaaggatattcctatatttaagaaataaatgtgacaatctataaaaactaaataactctttgatttgtaaagaaatttataaaaagaacacagactttttcaataaaattcctacttcttcacttccaagttgtgcttccggggagcacagtcctcactttcatccctggatccactataatttgacctytaccctctcatgccatagaaaccacactccacaaagtcattattaaccttctaatggccaaaaacaatggatatgtttcagttcttataagagtgaggtctgtatcttactctgtctttttcttgaaattttcttggccttcaagacatgattatctcctgggcctctactaactttttcaaacactccttcatctccttaatggttccatgttcactactaaaatcaggggtggaaaag

SEQ ID NO: 253897 - DNA, 570 bp, Homo sapiens
tggctcacacctgtaattctagcactttgggagaccaaggcaggtggatccttttgagctcaggagtttgagaccagtctggacaacatggaaaaactccatctctacraaaaacaatgcaaaaaattagctggatgtggtggcaggcacctatggtcccatctattcgggaggctgaagcaggaggattgaggatcaattgagcctgggaggttgaggttgcagtgagccataatgatgctacttcactccagcctgggtaacagagcaagttcctgtctcaaaataacaacaaacaaacaaaaaccaaaacaactacagagtgtatgaaatagacctttgcctcatgttcatgtcatagtctgtgatccatatagaatctgcagagaactgagttttggggagtagaatcatctcttttctgcttattttgtcactgttttaatagggacaggttctttgatcttgagtcatgtggctgttccatgactccatgtggccaccttgctcatagtcagtgacacaaatctctccctttaagaccttacctctctttcctcctcctcttct

SEQ ID NO: 253898 - DNA, 534 bp, Homo sapiens
ttctgtaaacctccttctgcttgggtttggacctccaagattttatcctggaaactccttgtgcatgatgagttcagcacataggattaaaaaaaataataaaagattaattggtaaatttggtcattaatattaatttggtcaaatttggtcattaatatcaattcaattaacataagaaggaaagagaaaaaacattttgagaaagaaacagcatcaaatatccccagagaaattaagcagggtgaaggtggaagtctactataaagaggccagttgtttctgatactccatcctgacttggactaatcagtcattcaagagggtgatggtaatcrtaagtgattctatctttgtgctttgaatacagcaagatttgaaatatcttcctgtgaagaaaggaaacgtcaagtgctatcaatccatgtgccaggggtcagaaatgtaaattaattcagatattaagcagcaaaaataaatacatggagtggtcaggccaggtatattagtgttaggacctatggtgaacaggag

SEQ ID NO: 253899 - DNA, 586 bp, Homo sapiens
aaatttcaagcaactatctgaggctctaggagtgaagtgggtggttctcaaacgctccccagaaaaatgctgtgaatctcccatctgccccctgtcagtctgtaactgtctgcagaggataatggcttcatcttttttcttgccttcttaatcttgtgtgtttctctcattagaaaattctaaactgggaccattcaagcaaggagattacaaaagctatagttcccatctttttctcagcaatgcagagggcatattccaaggagatggtcrtgatgtctggctgattatatataattcagcaaaaataggtattgatgagtggagagagtcaaaatttctgttttattcatactaatgaagattcataagactggaggtcaagagtgaagctgagctaaatatacacatttaagtcatcagcacatagatggtattcatgttggtctgctcttgccatgtaacaaattacttcaattgaatggtgaacttgttcttagtcctctaggtcagaatgacacagtgtggctgagttttctgcttggggtttcataggttgaaatcaagttgtcatctgagcttagtt

SEQ ID NO: 253900 - DNA, 586 bp, Homo sapiens
aaatttcaagcaactatctgaggctctaggagtgaagtgggtggttctcaaacgctccccagaaaaatgctgtgaatctcccatctgccccctgtcagtctgtaactgtctgcagaggataatggcttcatcttttttcttgccttcttaatcttgtgtgtttctctcattagaaaattctaaactgggaccattcaagcaaggagattacaaaagctatagttcccatctttttctcagcaatgcagagggcatattccaaggagatggtcatgatgtctggytgattatatataattcagcaaaaataggtattgatgagtggagagagtcaaaatttctgttttattcatactaatgaagattcataagactggaggtcaagagtgaagctgagctaaatatacacatttaagtcatcagcacatagatggtattcatgttggtctgctcttgccatgtaacaaattacttcaattgaatggtgaacttgttcttagtcctctaggtcagaatgacacagtgtggctgagttttctgcttggggtttcataggttgaaatcaagttgtcatctgagcttagtt

SEQ ID NO: 253901 - DNA, 548 bp, Homo sapiens
ttaagcaaaaaaaaaaaaaaaagacaaagagttgtctgaaataaatgaaaaatataaagctacagattccagaatctctttaaacccaaccaggataaatacaccraggcacctcataataacattgctaaattcaaaagaaaaagaaaaaaatcttaaaagcagccaggtaagaaagacgcatgacttctgagagcagcaataagactaacatttgaatttttaatagaaacaacagaagccaccagacaagataatgacatggttacagaatagaaataaattttttttgttcagcaaaaactaaagccattcattgcagtagaagtgtaccaaaagaaatattaaaaggagcttatcaagcaagctaaggcagaatggaatgggtgtcacaagcacaggaggaacgtgggcagattgaataaatatattttcagtgataataataataatatcttgtgagggcttaaataaatgtagaattaaaagacatgactataatagcacaaaatgtcagaaaggatcaaagagttgtgagctccttgcat

SEQ ID NO: 253902 - DNA, 663 bp, Homo sapiens
ttctaatggaatatagtgaaaatgtctaaaatgtataattgaaatctaagaagtgaagagataattaagcaaaaaaaaaaaaaaaagacaaagagttgtctgaaataaatgaaaaatataaagctacagattccagaatctctttaaacccaaccaggataaatacaccgaggcacctcataataacattgctaaattcaaaagaaaaagaaaaaaatcttaaaagcagccaggtaagaaagacgcatgacttctgagagcagcaataagactaacatttgaatttttaatagaaamaacagaagccaccagacaagataatgacatggttacagaatagaaataaattttttttgttcagcaaaaactaaagccattcattgcagtagaagtgtaccaaaagaaatattaaaaggagcttatcaagcaagctaaggcagaatggaatgggtgtcacaagcacaggaggaacgtgggcagattgaataaatatattttcagtgataataataataatatcttgtgagggcttaaataaatgtagaattaaaagacatgactataatagcacaaaatgtcagaaaggatcaaagagttgtgagctccttgcattacctggaaaatggtaaaggcgctaatttaaggtggattctcttaagtcaa

SEQ ID NO: 253903 - DNA, 609 bp, Homo sapiens
atactcattaaactgctataattttagttcaacctcagtgactcaacacacacagtgataatcttctatgtttagttcagtccctagkgcacggatttcccagtgattacaatgccttttttgaaatttgtctagttggaatcccaaagaaaggtcataatgtgctaactctttcaaaatgggttttaacattgcgttattgtgatacctaacctccttgttcttttaaatattgtggcatagacaccttttttatcctgggctataatgggaaatatttttggagttaggctaggctggccaaccctcatattaaagcttaaagacaatgtaagtttaaaggaatgtaagcattaaggaaatataagccaagtccctcagctcatgccacaggagcattttccttccggtgctgtttcagttccttgagaagttaaacgtgctttgtttcaatattgtgatgtaaccttgtcatcagtaaaagcaatctttgatgtcagctcagtattccacatatctcatagtgctgaaaatgtccttggtgagcagctccccaggcctctgtgtggagtccctgagggatggaatgactgccatgcataaattggc

SEQ ID NO: 253904 - DNA, 343 bp, Homo sapiens
ccaccctgcctagtgagaaacacccactgtggggcagagaaatagcaataggggtgagtgatggtttccactgcacccaatttgcatggatacttttgcattttgagagatctgctgccctgtcatcagggtctctcctctcctccccaggacctgggtcaastgtaaaagcacagagaacttttcttggtcagtcagattccctaagaaagatggactgctcagaagaaagatggggacatagaatatgaaaaaaaaagtatggaaaacttctcagcagagagtagacagtaacttttgggatttggcaatggtggaatggctgacatcagttctatggagt

SEQ ID NO: 253905 - DNA, 705 bp, Homo sapiens
ctctaggaaattgtcattgttcttcacctttttcgcccattttctgttgggttcttctattttttatggacttcacttattgtatgtttttctttcatctgcttgataagagtcaatggcatgcttttccaggtcctacagaagtgagcccagtccttgaattcatagagcttttatctcagaggagtcaggcaataaacaaagaaataaacatttaaattcagaaagtggaaattgctataaagaaaaataaaagcaggaaaacaggatgcgtcaagatcgatgctattttacgtgctgatcagggaagttcttcctaaaggaaatgagatttcgggggaagctggtattcacgtgattgctggggaggccagtgtggctgcagcagaggtgcttggcagggaggggtgggaaaggccagaaaggtgagccagggccagagcaccaggcctgcctcctagaatagggaagagatggcctgttctaaaggaattcccccsaacactgtgattcttcttcctcctttttaattccaaaaatatagtttacctatcttaaatataaaagcaggtctttgccagttagctctagaagtttcttacaatggcacattcaggtattagctattgtgttgtttccttggcaagtattttttggcgggtggagacaaatgtctttgaactctatgttgtctttaaagcagca

SEQ ID NO: 253906 - DNA, 705 bp, Homo sapiens
ctctaggaaattgtcattgttcttcacctttttcgcccattttctgttgggttcttctattttttatggacttcacttattgtatgtttttctttcatctgcttgataagagtcaatggcatgcttttccaggtcctacagaagtgagcccagtccttgaattcatagagcttttatctcagaggagtcaggcaataaacaaagaaataaacatttaaattcagaaagtggaaattgctataaagaaaaataaaagcaggaaaacaggatgcgtcaagatcgatgctattttacgtgctgatcagggaagttcttcctaaaggaaatgagatttcgggggaagctggtattcacgtgattgctggggaggccagtgtggctgcagcagaggtgcttggcagggaggggtgggaaaggccagaaaggtgagccagggccagagcaccaggcctgcctcctagaatagggaagagatggcctgttctaaaggaattcccccgaacactgtgattcttcttcctcctttttaattccaaaaatatagtttacctatcttaaatataaaagcaggtctttgccagttagctctagaagtttcttacaatggyacattcaggtattagctattgtgttgtttccttggcaagtattttttggcgggtggagacaaatgtctttgaactctatgttgtctttaaagcagca

SEQ ID NO: 253907 - DNA, 581 bp, Homo sapiens
atttatcagttgcattcttcagaaaataagagtttttcctcaccaagtgtaaataaactgtgttacaaaactcaggatgaaaatgtaatcattcgtacttaactgtcagtttttggaatgggagtagacataataattgcctgcagtggtagtctgtgaagggcttttattcttttttctttcagttcttaattttttaaaaataattgtattagctgggcgtggtgggcatgcacctgcagacctagctactgaagaggctgaggcaggaggatcacttgagcctaggagttcgaagctacactgagctatgatcacaccactgcactccagcctgggcaacagaacgagaacctgtctataaataaataaacartaattctagactcatgaattttatttactcgaagttttataatcactatttttaaaataatcaaattgtcccaaattggactagcaagagctccagcaaactgacctctgtgtccttttgattcatttcagttctttttgagcactttcttccctttggcacatccagaaaggcaagttcacccgtcctttctctgccccagtcc

SEQ ID NO: 253908 - DNA, 581 bp, Homo sapiens
atttatcagttgcattcttcagaaaataagagtttttcctcaccaagtgtaaataaactgtgttacaaaactcaggatgaaaatgtaatcattcgtacttaactgtcagtttttggaatgggagtagacataataattgcctgcagtggtagtctgtgaagggcttttattcttttttctttcagttcttaattttttaaaaataattgtattagctgggcgtggtgggcatgcacctgcagacctagctactgaagaggctgaggcaggaggatcacttgagcctaggagttcgaagctacactgagctatgatcacaccactgcactccagcctgggcaacagaacgagaacctgtctataaataaataaacaataattctagactcatgaattttatttactcsaagttttataatcactatttttaaaataatcaaattgtcccaaattggactagcaagagctccagcaaactgacctctgtgtccttttgattcatttcagttctttttgagcactttcttccctttggcacatccagaaaggcaagttcacccgtcctttctctgccccagtcc

SEQ ID NO: 253909 - DNA, 618 bp, Homo sapiens
ttcacgtgtgtctccgtctgactcctattcccctccttcttgtttgtatctttccttttcctctccagattttgactggtgtgtgcattttaaaccttgatcatattcatatccctatgccatatattaatattaatagaagacttctcaaaccccagaatggacaggaaaaggtatattgaagaattcagatctgtcatgaccactagcaattatattttgataagatcagaagatacaaaaacttggtgaaaaaaataattagcttaatcatgagaaggatttacaaattaatgaatttttaagggaaatttaataatttttttcaacaaagagacctgtcaatattttaaacaaagacattaygggaaaattaacagtcctatcctaattaaaaggaaaagcaaaaacattaaacttgtaaaatgtgttgtcttttacaatttcatcttgctaaaagcttggagtttaaaggaaataatgagagatttaattgtgagttaagctaatgtcattggttagggttacaagatttaaaaagttgactatacagagcttttggcataatttagagtcaaatttagttattaatgcagatgtttataaattatattttaa

SEQ ID NO: 253910 - DNA, 618 bp, Homo sapiens
ttcacgtgtgtctccgtctgactcctattcccctccttcttgtttgtatctttccttttcctctccagattttgactggtgtgtgcattttaaaccttgatcatattcatatccctatgccatatattaatattaatagaagacttctcaaaccccagaatggacaggaaaaggtatattgaagaattcagatctgtcatgaccactagcaattatattttgataagatcagaagatacaaaaacttggtgaaaaaaataattagcttaatcatgagaaggatttacaaattaatgaatttttaagggaaatttaataatttttttcaacaaagagacctgtcaatattttaaacaaagacattacgggaaaattaacagtcctatcctaattaaaaggaaaagcaaaaacattaaacttgtaaaatgtgttgtcttttacaatttcatcttgctaaaagctyggagtttaaaggaaataatgagagatttaattgtgagttaagctaatgtcattggttagggttacaagatttaaaaagttgactatacagagcttttggcataatttagagtcaaatttagttattaatgcagatgtttataaattatattttaa

SEQ ID NO: 253911 - DNA, 434 bp, Homo sapiens
ggtctcctgttcccctggcctgctcaagagctacttctgtaagtgacagctgccacttttcctgggcacctcagttttccactgggcgctcctgctgcctgtaagctggtggccgcaaggtgctgaagtttagctatgctctgggcatgagggggtaaggtttctccatccaggcttcagttartacctttccagatggtaccaaagcatgttacttttgctccaaagtcttaagctgttttgaaaggggaatgaccacttccattttttaccaacaatccctattgaccagcagccagcccgtacttcctccctgcccatcccctaccccttgcctagtccttagagcatgaatagctttaaaaaaaaaatccacacaaggaatcagtcctcccttccaatttctggttgatatctctgggccctgtacccct

SEQ ID NO: 253912 - DNA, 434 bp, Homo sapiens
ggtctcctgttcccctggcctgctcaagagctacttctgtaagtgacagctgccacttttcctgggcacctcagttttccactgggcgctcctgctgcctgtaagctggtggccgcaaggtgctgaagtttagctatgctctgggcatgagggggtaaggtttctccatccaggcttcagttagtacctttccagatggtaccaaagcatgttacttttgctccaaagtcttaagctgttttgaaaggggaatgaccacttccattttttaccaacaatccctattgaccagcagccagcccgtacttcctccctgcccatcccctaccccttgcctagtccttasagcatgaatagctttaaaaaaaaaatccacacaaggaatcagtcctcccttccaatttctggttgatatctctgggccctgtacccct

SEQ ID NO: 253913 - DNA, 586 bp, Homo sapiens
attaatcccccttccaaatactttgagaagagaaaacaaactaaaaaacaaaacaaaaaaataaggcaccaatcatagaatgtataaggtaccctaaagtaaacagggtccgtatttcctccaagaaagggtgcccttatggaagtaaggactctataaacatgggccaaacttaaaaatagttaaggagaacccctcttctcycacctctgtcccacttgcctttttccaccatattgaaatcttgaaataaatctgaagacagtagctatgaaaaaccaatacaattacttgcaagtggctatcatgaactacccagaataaagagttccttctttttgtaagcataaaactagtaaagatgttaaaagaaagcaatttgagaccgtcttcctcttcagctaaatgttagacaaggacatgaagagtggttagctcccttctgacactaacaccgaacccctgcccttcagaatgatgataatgctctgctggatggcacagttactcagtgttggcatgccactcgatgcagtctatttaaaacgtttttaggagcttggattttcccttccctgtaatttag

SEQ ID NO: 253914 - DNA, 586 bp, Homo sapiens
attaatcccccttccaaatactttgagaagagaaaacaaactaaaaaacaaaacaaaaaaataaggcaccaatcatagaatgtataaggtaccctaaagtaaacagggtccgtatttcctccaagaaagggtgcccttatggaagtaaggactctataaacatgggccaaacttaaaaatagttaaggagaacccctcttctctcacctctgtcccacttgcctttttccaccatattgaaatcttgaaataaatctgragacagtagctatgaaaaaccaatacaattacttgcaagtggctatcatgaactacccagaataaagagttccttctttttgtaagcataaaactagtaaagatgttaaaagaaagcaatttgagaccgtcttcctcttcagctaaatgttagacaaggacatgaagagtggttagctcccttctgacactaacaccgaacccctgcccttcagaatgatgataatgctctgctggatggcacagttactcagtgttggcatgccactcgatgcagtctatttaaaacgtttttaggagcttggattttcccttccctgtaatttag

SEQ ID NO: 253915 - DNA, 586 bp, Homo sapiens
attaatcccccttccaaatactttgagaagagaaaacaaactaaaaaacaaaacaaaaaaataaggcaccaatcatagaatgtataaggtaccctaaagtaaacagggtccgtatttcctccaagaaagggtgcccttatggaagtaaggactctataaacatgggccaaacttaaaaatagttaaggagaacccctcttctctcacctctgtcccacttgcctttttccaccatattgaaatcttgaaataaatctgaagacagtagctatgaaaaaccaatacaattacttgcaagtggctatcatgaactacccagaataaagagttccttctttttgtaagcakaaaactagtaaagatgttaaaagaaagcaatttgagaccgtcttcctcttcagctaaatgttagacaaggacatgaagagtggttagctcccttctgacactaacaccgaacccctgcccttcagaatgatgataatgctctgctggatggcacagttactcagtgttggcatgccactcgatgcagtctatttaaaacgtttttaggagcttggattttcccttccctgtaatttag

SEQ ID NO: 253916 - DNA, 604 bp, Homo sapiens
tatgtcctaacaactttgtagaaccctcttaaaataaaatgtaatttgaaatcctcaggttttagcaattcagttacccaatttttcttctcaaaatatgtttggggctatagcggttttcctaaatttcattcccatctctccattagcccagaagttatatttaacaggtaggactgataggcaagttctatgaaccttttttggtgtttctgctcttttggccatgctgtttctatgactcagtttatatttcttagcatggtttatccaaaactaaatgtattaattcattagtagcaaccaattgggatttcagtcttagcttatccatctcctctctcttttttggttgcaatggcaagatttacagcatttaaactttcttgctactaaaccctcctcaccctactcctcgcttctaaaatgattcttttggccaatcrctttgttgtcagtatagttaccatcatagaaaataaggatttgatttcagaaagtttagaaatacaaagctcggcttctaggtatgtaaaatttgatgcttcagaccatcagcaagatcaatgaatttgatacattgatcatctcctctgcctgggag

SEQ ID NO: 253917 - DNA, 247 bp, Homo sapiens
ttttcagtcttttggctaagaccaggtgaaaaagagcacgggtttagaatcaaggagcttagstttgaattctgacagtttcacacatgttgtgagagggactttaactcactacacttctgtatttgtaatttagagtgagtatatttacattatagtgctttgtaagattaaatgagatatgtttataagtgtacagtactgtgatgatagcaaaatcaaatgttcaacacaaatattaatattg

SEQ ID NO: 253918 - DNA, 601 bp, Homo sapiens
ataaaaaggaacatgattgaaggtgtgtacacacttgtgcacagctaaacctgccatcattctttcctctcccacctttcaccagcatgttgtctttgaaaactgaaatctggctttttaaaatcgttgttgctacttttctgttttgttagtgatgagtagtttctaactcctgactgtatcattcttggggtttggtgtggttatttaaaattaagtgtgtgtgtgtgtgtgtgtgtgtgtgtgtgwgagagagagagaaacttggtgccaaatgaaatcattcaaattatagtcactcagttgtcattccaaatggtgtattttaaatttcgttgttgcttcatattttatatgtccccatatacaaattctattgctaagaagtggagctgacatttcatgttttttgtcacttacagagaaaactagctatttctgatctcttccactcaaataggcttagtttaagagaagaaacagaaccaacagccttactgtataatgatcctaagttattcatttagtgagtaattttttttattcagcaaactaagagttgggtttcagcaatgatatggataaaaaataatgttttatc

SEQ ID NO: 253919 - DNA, 629 bp, Homo sapiens
acttcacattactttccccactgccttcttgtcacccctactcagaaaatcaccttttctggataaaaagtcagccttctctgatgctactttttgcccccaaattgatgctgtagaaatataccattcatgcaattttctttctttctttctttctttctttyttttttttgagacagattctcactctcacacccgggctgaagtgcagtggcatatctgctcactgcaaccttcccctcccaggttcaagtgcctcagcctcccgagtagctgggattacaggtgcgcatgcctggctaatttttgtatttctagtacagacagggttttgccatgctggccagactcatctcaaactcctgacctcaagtgatctgcctgcctcattctcccaaagtgctgggattacaggcataagccactgtgcccaccccattcatgcaaattagaacaactgcaaagtcatgctctccagcctcaactgacccctgggagatgctcaggagtcagcattgatatctattctcttccaaagctcatttgctcaagcagcaactttggtgtcatccttgactctgctttctgtcctgcaacacatctcatctgtcaattttactgtacaagca

SEQ ID NO: 253920 - DNA, 256 bp, Homo sapiens
tgtgaggatgtggagaaaagggaaccctcgtacactgttggtggaaatgtaaattagtmcaatcactatagagagtagcttaaaggttcctcaaagaactagaaatagagctaccatatgatttagcaatcccacttgtaggtatctacccaaaagaaagcaaatcaggataccaaggagatatctgcactcccatgtttactgcagcactgttcacaatacccaggatatggaaacaatctaagtgtctatcaac

SEQ ID NO: 253921 - DNA, 536 bp, Homo sapiens
gtccccttggcttcagccccctttccaggggagtaaacaattctgtctcgctggaattccaggcactactggggtatgaaataaaaattcctgaagcccccatttttgtgcttgaaacccagggccctggtggtgtaggcactggagggaatctcctggtctgtgggtttcaaagactrtgggaacagcatggtatctgggcccagtgcaccgttcctcactgcttcccttgggtaggggagggaatttcctgattccttgcacttcctgggtgaggtgatgccccaccctgctttggctcaccctgcgtgggctgcacccactgtccaaccagtcccaatgcaatgaactgggtacctcagttggaaatgcagaaatcacccaccttctgtgttgatctcactgggagctggagactggagctgttcctattcggccatcttgccagcaatcctctatttaatcattcttaggataatgtaccttaagaacaaaaagaactgctcttaaaatatgttatataatattattaattt

SEQ ID NO: 253922 - DNA, 489 bp, Homo sapiens
cgcacacacaataaggtgactcttttgattatgtgagaaatacatagaagctacattgtcctgcattttattgtgaacattcwgtgttgcaatccctaaggcagtgctttaaaacagactattttcagagaaaagtctccttaggaattttttaaattaatgtcttctgcataattggtttcatttcagaaaaacattacaaattgtttaatatatctatttttacaaatttacgttgtctacaaagtagcaaaatagagcagaaaaaaatcactgggttggttttaaactggcttattccatgcatttctaaatttaatattcatttgttgagtacctttttgtgtgttaaatctgtcttcaggaagtacacaatctaatggaagatactcattcaacagtggatctaatccacaactatttattctgtgtgtagaacatgccttgtatattctacacacataaacaatgaactgtaataaatattat

SEQ ID NO: 253923 - DNA, 597 bp, Homo sapiens
ttgacaccattatcagacatagatcacagaaggaggaatttcctttactcagtcgcatatcattcttctacaaaaggagaaatctaatagcattatattttaagtgttagcattcactataaattaaacaaacctacatttttattcttaatttgtttggcatgttcaagcagtagtgttggtgtttgtgggtttgtaatagagagtgatgaggtattctgaacagctgtcaataatgtcacaccgttaaccatatacacagtgactagagggaaaaataatcagaattcatattttatatccacattttatttttgaacagcaataagataggctatctcaggaaattcagcataactgaagtcagtataacttcagtctggtgtcttaataccatctgaaatgcactaaagatagctgcttcagaacgataaggcttgaaatatggttsctggcttgaacttaatgtatgaagaataataaaaccatttcacaaagaaaataatgtaacataaagtgagataagaaaagaatatcaatgtgtctagcacttagactccacatgtcaggacattattattagaacaatttactatt

SEQ ID NO: 253924 - DNA, 557 bp, Homo sapiens
cagcataactgaagtcagtataacttcagtctggtgtcttaataccatctgaaatgcactaaagatagctgcttcagaacgataaggcttgaaatatggttgctggcttgaacttaatgtatgaagaataataaaaccatttcacaaagaaaataatgtaacataaagtgagataagaaaagaatatcaatgtgtctagcacttagactccacatgtcaggacattattattagaacaatttactattatatcttatttaaataccacattatttccaatgtagttaccaccagatatgattttcacttttatactgactctattccaagacttcaaaagactttagaactgttttatagagttatcttcttygagaattagaaaacgaggcatggaaaggttaggctgctcaggaggcagtgttatagattggtaaagggctccacagccctcctttcccttgcaaaagaagcctcagtttcttggggttcactcaattgagtcctcattttagtgaaatctgattctattatacatggtttggagaaagtagtat

SEQ ID NO: 253925 - DNA, 579 bp, Homo sapiens
aactggagggaaagcacaggtctgaagaatggagtctcttaaaatcaggttaagaaatttgtatattttcttgtggcttgttaagagaaactaatgatggatttttsatatgctcaaaaacatttacacaaatttaatgtattgttgatattctgaaaggctgagtgtgtcaaagctgacgttcactacattattttgaagggtatttgtacgtaattcctttatgaaataatgagagtgaaagagaagaatggtagagttgactgaatctctgcttttgagaaagtcagaaggttcaaggactccaccactcatcggttgagtggctttagggtagtcactagccttctccaagtctctgttaacctatctgtaaattagagaaaacaatacctgtttcattacattgtgatgagcattaaatgggataacataaagttctaaattcatgggaaaactaacaaactctaaacagggaaggagaggatgttagggaacatttaaagaagcagtgaaatgagaattggactatggaggtgagcagacttttaataattgggctgtccttactgcagtgtg

SEQ ID NO: 253926 - DNA, 615 bp, Homo sapiens
tgtcataacttaatctctctagggtaaaaatatttgacgtttgaaaatacaagaaagttatacacaatttcctcattttggacattggttttatggcagcccagactggtgtcatttcaaaggcttcctcactcacatgactggcattaatgctggctgtcatttggtacctcagctgaaaatttgactggaacatctacatgtggttcatgcatgtggcctgggctccgaggaaacagctggtttccatgaataaagctctgagagaaacagatggaagctgtattgcctttaataatctagccttggaagtcccataacatcatttctacmatagtcataggacttcctagattcaagaggaaggaaagctcttcatttttctttctttctttctttcttttttaatatctccagcacacagctttgaggaaagcacttcttaatagaaatgagtcaatgccacattattagatgagtgtacaagataagaaagcttgttgcagacatcttggaaaatacaatctgcctcagtttggcatggtaagtaatattagtgtattttctctgagtgtaaaatataaaattcttggaatattgtaagaacctaataca

SEQ ID NO: 253927 - DNA, 549 bp, Homo sapiens
ctcacatgactggcattaatgctggctgtcatttggtacctcagctgaaaatttgactggaacatctacatgtggttcatgcatgtggcctgggctccgaggaaacagctggtttccatgaataaagctctgagagaaacagatggaagctgtattgcctttaataatctagccttggaagtcccataacatcatttctaccatagtcataggacttcctagattcaagaggaargaaagctcttcatttttctttctttctttctttcttttttaatatctccagcacacagctttgaggaaagcacttcttaatagaaatgagtcaatgccacattattagatgagtgtacaagataagaaagcttgttgcagacatcttggaaaatacaatctgcctcagtttggcatggtaagtaatattagtgtattttctctgagtgtaaaatataaaattcttggaatattgtaagaacctaatacatatcaatcaccttatatatttaatacgcaataaagtaatcatttgtgcattgtgtactcatattt

SEQ ID NO: 253928 - DNA, 607 bp, Homo sapiens
tacacaatttcctcattttggacattggttttatggcagcccagactggtgtcatttcaaaggcttcctcactcacatgactggcattaatgctggctgtcatttggtacctcagctgaaaatttgactggaacatctacatgtggttcatgcatgtggcctgggctccgaggaaacagctggtttccatgaataaagctctgagagaaacagatggaagctgtattgcctttaataatctagccttggaagtcccataacatcatttctaccatagtcataggacttcctagattcaagaggaaggaaagctcttcatttttctttctttctttctttcttttttaatatctccagcacacagctttgaggaaagcacttcttaatagaaatgagtcaatgccacattattagatgagtgtacaagataagaaagcttgttgcagacatcttggaaaatacaatctgcctcagtttggcatggtaagtaatattagtgtattttctctgagtgtaaaatataaaattcttggaayattgtaagaacctaatacatatcaatcaccttatatatttaatacgcaataaagtaatcatttgtgcattg

SEQ ID NO: 253929 - DNA, 542 bp, Homo sapiens
attagacatatttaagtgtgtgaaattgccaaaatgatgtacmttctttttaggttatatttttgtgaataatgctaatatacgttccaaaatttactgggatttctaaaattctaatgtctaagtatatgctatcaatcataattaaggttgttatgttaagttattgttaactacaaaggtaatgagacttctttgtcaattatgtttctaactgtaactaccctggacattttgttattcacagacaattgttgtcttgttttaatccttttcaaaagatggtttatattaagctataggactctgacaggcactctcaaatacacgttctgataactttgaaaactgtgatattggaataaagaaaaatgtaaaggactcatgaatagctaaaatgttcatgaatagcaagcaaaacaatggttaactaaataaactgaactcaggaaactgaagcaattctttttaatctttgcttagattatttctgattcttgttttgtttttcagaatcaaggaaacttattttgaactgttta

SEQ ID NO: 253930 - DNA, 542 bp, Homo sapiens
attagacatatttaagtgtgtgaaattgccaaaatgatgtaccktctttttaggttatatttttgtgaataatgctaatatacgttccaaaatttactgggatttctaaaattctaatgtctaagtatatgctatcaatcataattaaggttgttatgttaagttattgttaactacaaaggtaatgagacttctttgtcaattatgtttctaactgtaactaccctggacattttgttattcacagacaattgttgtcttgttttaatccttttcaaaagatggtttatattaagctataggactctgacaggcactctcaaatacacgttctgataactttgaaaactgtgatattggaataaagaaaaatgtaaaggactcatgaatagctaaaatgttcatgaatagcaagcaaaacaatggttaactaaataaactgaactcaggaaactgaagcaattctttttaatctttgcttagattatttctgattcttgttttgtttttcagaatcaaggaaacttattttgaactgttta

SEQ ID NO: 253931 - DNA, 542 bp, Homo sapiens
attagacatatttaagtgtgtgaaattgccaaaatgatgtaccttctttttaggttatatttttgtgaataatgctaatatacgttccaaaatttactgggatttctaaaattctaatgtctaagtatatgctatcaatcataattaaggttgttatgttaagttattgttaactacaaaggtaatgagacttctttgtcaattatgtttctaactgtaactaccctggacattttgttattcacagacaattgttgtcttgttttaatccttttcaaaagatggtttatattaagctataggactctgacaggcactctcaaatacacgttctgataactttgaaaaytgtgatattggaataaagaaaaatgtaaaggactcatgaatagctaaaatgttcatgaatagcaagcaaaacaatggttaactaaataaactgaactcaggaaactgaagcaattctttttaatctttgcttagattatttctgattcttgttttgtttttcagaatcaaggaaacttattttgaactgttta

SEQ ID NO: 253932 - DNA, 577 bp, Homo sapiens
tgacaggcactctcaaatacacgttctgataactttgaaaactgtgatattggaataaagaaaaatgtaaaggactcatgaatagctaaaatgttcatgaatagcaagcaaaacaatggttaactaaataaactgaactcaggaaactgaagcaattctttttaatctttgcttagattatttctgattcttgttttgtttttcagaatcaaggaaacttattttgaactgtttatggcctttaataattgagtaaggtatactcttgtgagcatgatttggagtatatttgtttttctctgcctagtttctctagaatttggaaactatctgtgagtattcttaacttatagcaatatggttgtttgcatcartgcaataaaaatttatttgtcttttgcaacaggacacaattggagaaattgtttattttaccaaggctttaactggaagggtttactttcctttaaggagtcaatcttgacttgcagagatgttaaaagccccatgggagactggcctcatatttttgcctaagcagtcccagtacagggtttctgatctgtggtcagtaaag

SEQ ID NO: 253933 - DNA, 618 bp, Homo sapiens
cattaatacataaatggagtaatccattcatgaactctctccctcacaattcaatcacctattaaaagccccatctctcaayactggcacatggggattaagttttaataggagttttggagacacattcaaaccatagcatcaggtaagatacttaaatcccctaaacccttgtttccctaatgatgagagatgaggtgagaattaaatgtgataaagcttttttcatggttaacgtagtaatgagcacaacataaacaattaacagatgttccccatcattactaattgttaaataatatatttgtatttaataaccctgaacatctcttttttagaactgaagtaatggatattatgttacttattcatttttcgtgactcatcacccttttgtataacaattagataataacttgtattaacataaagtaccacaaaagaaattactacaaataactgtatattcaaagaatggtttggaaaatatcaaattattattgcaaattttgtgtaattgactatgccttctatttccttttagagtcctttcatcacctgtaagctttaatgttaatatacactgtgtaccacagaaatctaaaattgtgttacata

SEQ ID NO: 253934 - DNA, 521 bp, Homo sapiens
tagtatcatgcttgaagttcttcattagcgcctgtagctatcaagtaataggaacactgtaatggtgttctgagcttagttactatgatctctggggagttcaaagtaatttgcaggtggaaaattaaatgatgcagttcaggataaaattgaatcccaaataattgttagagaattaaaatgcaatcgaaccagaaatcctaatcaggtttgaatcaaagcatgttcatactgaactgtgatgaaaacaatcaatgtatactttggatgtcatttttgtcctataagagcctcatgacatgtatttatagcttgtctcattgcaataattttggaatgcggcartagaatgaaaagcagaaaaggcttttcgactgattagttctgtaaatcttcagactgccttttcctcattggggccgaatccttacacattaccacccatcctttactctgtgatataatttttttttttttgagatggagtttcagtcttgtcacacaggctgaagtgcaatggt

SEQ ID NO: 253935 - DNA, 563 bp, Homo sapiens
atgaatttaagtgggataaggaaataagtgaagatatgagagaagatgaggggcagtaaaaagatattgggatcacaggactacagattttttcagggcagaaggattattgaccttcttgagaaagtgtgagttggagaggtgggaagtggtggctgtagattagaatgtttgacgttgagatttggtggggcagggggttgcrgatgacggtaatgatatagtcttatataaaaatacgggtgtgcctggctgtgagttggtgtggagacctcgtctttggagtttttagtttacatttccttagttattactgaggttgaacatctttgtatttgtggtgcttgctttctttgtgaactgctgctcacattctttgaccatttggctattttgtttcttattgatttgtgggttaaaaaaaaagtagtcttgatacttatcttttgatatttgtgtttgcaggtatctcctgatatgagattcacttctatagtgtgtctttcagtgcattgttttaaattttagttgaatttatcaattttctatcctactgtttatgc

SEQ ID NO: 253936 - DNA, 559 bp, Homo sapiens
aatatctcccccagggttgcttctacttactcaaggaacttactcttactgaaaaaggaacactgagctgagggcatgcactcagctcagtgttcctttctggtaacaaaggaacactcagctcagtgttccttccctgtaayaaagcccacagcatgtacaggactctttgaattaccactctgagacgggggcaatgaggaaccaacaaaaattaacatgaagtttgactactccttttgccagagacaccttttgtctctggcccaggtgtctcatgtcttctgctagcacccatgaaacagtaacaggctaacctgttagcttacagataaggtggaatctcagaccctgcatagttattggcaaatatctcttgtgaggtgatatagatgtgaggaaaccaacaaatacagttcagtgtgacaggtacagagtgctgtgggatacagaatgctgtgggataacccaggaaaggttcagctggtcaaggtcaaggaggcttttctgattccactgctcttgaggtgaaaatattggttggttcatctcttgaggg

SEQ ID NO: 253937 - DNA, 559 bp, Homo sapiens
aatatctcccccagggttgcttctacttactcaaggaacttactcttactgaaaaaggaacactgagctgagggcatgcactcagctcagtgttcctttctggtaacaaaggaacactcagctcagtgttccttccctgtaataaagcccacagcatgtacaggactctttgaattaccactctgagacgggggcaatgaggaaccaacaaaaattaacatgaagtttgactactccttttgccagagacaccttttgtctctggcccaggtgtctcatgtcttctgctagcacccatgaaacagtaacaggctaacctgttagcttacagataaggtggaatctcagaccctgcatagttattggcaaatatctcttgtgaggtgatatagatgtgaggaaaccaacaaatayagttcagtgtgacaggtacagagtgctgtgggatacagaatgctgtgggataacccaggaaaggttcagctggtcaaggtcaaggaggcttttctgattccactgctcttgaggtgaaaatattggttggttcatctcttgaggg

SEQ ID NO: 253938 - DNA, 559 bp, Homo sapiens
aatatctcccccagggttgcttctacttactcaaggaacttactcttactgaaaaaggaacactgagctgagggcatgcactcagctcagtgttcctttctggtaacaaaggaacactcagctcagtgttccttccctgtaataaagcccacagcatgtacaggactctttgaattaccactctgagacgggggcaatgaggaaccaacaaaaattaacatgaagtttgactactccttttgccagagacaccttttgtctctggcccaggtgtctcatgtcttctgctagcacccatgaaacagtaacaggctaacctgttagcttacagataaggtggaatctcagaccctgcatagttattggcaaatatctcttgtgaggtgatatagatgtgaggaaaccaacaaatacagttcagtgtgrcaggtacagagtgctgtgggatacagaatgctgtgggataacccaggaaaggttcagctggtcaaggtcaaggaggcttttctgattccactgctcttgaggtgaaaatattggttggttcatctcttgaggg

SEQ ID NO: 253939 - DNA, 507 bp, Homo sapiens
aaataatacaaaaataatacatgaacctccagaaactcattaccaagattcaacaattgtcagattcaattctttgctaaaatattttaaagcaaatctcatttcacctatttgtactttagtatgtatatttttaaagtatggacactttttcacatgaccctgtgccattatcacacctaacacattggctataatcctctggagtcatataatatccagttcattttaaattccttgtgtctcagaaactatgtctttatgtaggttttttctgagtgagaatccagacaaagtatacactttaattgttagccaatagaattttaaacactgacagatgaacatgtatgagaaagaagtgaattttagttttatagtggtctttgacacacatttgtaataggaatatttatgcaagagaacatatctttagaatattttcttgaacttttcccacttaacattgcrtgatactgaaaaggattgtaatttcatatggtaatg

SEQ ID NO: 253940 - DNA, 583 bp, Homo sapiens
aggtatgctaaacataagatgcatggtgtttcagtgcatttggttgaattgggtgggtgtctgggagtgaattttacctttttttttttttttttctttcccgaaacaaggtctcaatttgtcatacaggctggagtgcaatggcacggtcttggctcactgcaacttccacctctggagctcaagcaaacctcccacttcagcctcctctgggaccacaggtgcatgccagcactcctggctaattttttgtattttttgtagagaaggggyttcgccatgtttcccaggctgatataaactcctgagctcaagcaataggcccacctcggcctcccaaaatgctgggattccaggtgtgaaccctggcgtccagccaattttatcttcctttggaagaaaataatccctggagaagattagtttggtttggcattgagggataggcagattgtgagggctggactttcaaagtttattgagcatctaatacatgtcagatactgggcaagctcttttatgtatattatctctcaccctacagatagccttatagaatgggtgttattatccttatttttcc

SEQ ID NO: 253941 - DNA, 570 bp, Homo sapiens
agccaaatctaaaagtgtgatttgaaatctgaaagggtatgggaaaagcacactgattttggaactatagaagtcatggttgggcttttgaacacttaagacatttactgtctctggggccttggcttttcttatctgctaaatggagatgataattttagtttactagggttgattgggactttagtgcctggtacagggtaggtgttcagtagttattgatttccttttttgcctcaaaggcaaagagaactggacagagaacaaaagaaacatgctttccctcaaaagtataattttaaatgtttcttgtatatcatgtgttttgggaagattttataactctgctctcctaatgaagttagcacagaagggagaaggaaatttggaatgcaactggaaaataagtgatgtattatgcagtactgctttcctttctctcttttttctttctttagaaaaatcttaactaatgtagtatgccatatttacttttttttttcctttytgtagcatgcagcagattggaataaatatgatgaccgattgatgaaagcagcagaaaggggg

SEQ ID NO: 253942 - DNA, 599 bp, Homo sapiens
atactttatgcccaatgaagtccttcctatttcaccccctactttcctatcctccagattaccaacaggaaacagggtaaattctcatggattcctgaagtgtagtatgtaggtcagtatagatcaggaataagaatgtataaaatttgcttgtaagagcttaatcaattcttaatacattcttgttaaaatgaagtgaaatatgtttgggaaagccacctttctcactctctctttttttaaggataggtaggcctctatctgaaggtatgctttctcagtttatgatcttttccttctttctgctgaaaaattgaaatgcaagaggattctggcttggcagrtgaggcctgccacactggggtcaggaagatcttgttttcctgaaagcttttatttcctaaactggaaagtatgggtttctgtacacaaaaagactctacttatttaaaaacacttcacaattatcaatatataattcagatttcaaaaagagaaatgcaggctgaattgaagaacacatttaacagaaaaaaaaatgttactttcaggtataaaagaaaaaggggccatctgctacgtagaggtgcttgtcagta

SEQ ID NO: 253943 - DNA, 599 bp, Homo sapiens
atactttatgcccaatgaagtccttcctatttcaccccctactttcctatcctccagattaccaacaggaaacagggtaaattctcatggattcctgaagtgtagtatgtaggtcagtatagatcaggaataagaatgtataaaatttgcttgtaagagcttaatcaattcttaatacattcttgttaaaatgaagtgaaatatgtttgggaaagccacctttctcactctctctttttttaaggataggtaggcctctatctgaaggtatgctttctcagtttatgatcttttccttctttctgctgaaaaattgaaatgcaagaggattctggcttggcaggtgaggcctgccacactggggtcaggaagatcttgttttcctgaaagcttttatttcctaaactggaaagtatgggtttctgtacacaaaaagactctacttatttaaaaacacttcacaattatcaatatataattcagatttcaaaaagagaaatgcaggctgaattgaagaacacatttaacagaaaaaaaaatgttactttcaggtatraaagaaaaaggggccatctgctacgtagaggtgcttgtcagta

SEQ ID NO: 253944 - DNA, 502 bp, Homo sapiens
tttaggcctgtgctatgtacctcaataaagtattacaatttttctcatagagggcctgcgttttttggttaatttaatttctaggttacatatatgtatgtctaaagtaaatggaayactttttcattatatttaattgggatatttagtatttcttacattaaagccatcaatatttgtatattttgggaccagccaccttactaagaggccttagtagtttttctagttttcttcttgagatttccaagcgggcagcagcatttttcttgtgatgtattatattagattttcattcttcctttccttgaataagccaggttctttagtttacaattatgattatttaaagcaaaacagagttcatttacagcatcaaagactagagataggccaggaccatgatgagtcaagtgaagcagtttcctcagatgccaaatttaagggatgtcaaaaagctcactaatcaagataaataatgttttaatgcaatagtttgtgt

SEQ ID NO: 253945 - DNA, 638 bp, Homo sapiens
ttgttttatactaagacataagtgacctgattcagkctgtattataatacatatttctaaactacatcttttgcacctacaaaaaatagggagaatgtgaatacctagcagagtactaatgtggattgtgataaaaattaaatgaaataatccatgtaaaagcatttggcacagggcttggcattcatcacctccaccacttactaggtatgtgacctcaagacagtttcttaacctctcaatgcctcagatttatcatccctagtatacgaattatcatagtacttacctcagagatttaatataaagaccttagagcaaagcatggtataacttaagttcccagtaaatgtgagctactattagtatttcaatgcaggaaggaccgcatttatactctggcagaaaccatcagaaaatagtgttctttttggacacaaatcaagaaaacaatagttataatgtggcccaaagcagggagatgggattggggcagaagactggtgtgcagtctgggcctactccttgcctgtggaaacttgggtagtcttcagtttctcattttgtatcacagggaaaaacacctaatgcagatttgatatgcaaaacttaagagttactgtgtatgaaaatgttct

SEQ ID NO: 253946 - DNA, 638 bp, Homo sapiens
ttgttttatactaagacataagtgacctgattcaggctgtattataatacatatttctaaactacatcttttgcacctacaaaaaatagggagaatgtgaatacctagcagagtactaatgtggattgtgataaaaattaaatgaaataatccatgtaaaagcatttggcacagggcttggcattcatcacctccaccacttactaggtatgtgacctcaagacagtttcttaacctctcaatgcctcagatttatcatccctagtatacgaattatcatagtacttacctcagagatttaatataaagaccttagagcaaagcatggtataacttaagttcccagtaaatgtgagctactattagtatttcaatgcaggaaggaccgcatttatactctggcagaaaccatcagaaaakagtgttctttttggacacaaatcaagaaaacaatagttataatgtggcccaaagcagggagatgggattggggcagaagactggtgtgcagtctgggcctactccttgcctgtggaaacttgggtagtcttcagtttctcattttgtatcacagggaaaaacacctaatgcagatttgatatgcaaaacttaagagttactgtgtatgaaaatgttct

SEQ ID NO: 253947 - DNA, 638 bp, Homo sapiens
ttgttttatactaagacataagtgacctgattcaggctgtattataatacatatttctaaactacatcttttgcacctacaaaaaatagggagaatgtgaatacctagcagagtactaatgtggattgtgataaaaattaaatgaaataatccatgtaaaagcatttggcacagggcttggcattcatcacctccaccacttactaggtatgtgacctcaagacagtttcttaacctctcaatgcctcagatttatcatccctagtatacgaattatcatagtacttacctcagagatttaatataaagaccttagagcaaagcatggtataacttaagttcccagtaaatgtgagctactattagtatttcaatgcaggaaggaccgcatttatactctggcagaaaccatcagaaaatagtgttctttttggacacaaatcaagaaaacaatagttataatgtggcccaaagcagggagatgggattggggcagaagactggtgtgcagtctgggcctactccttgcctgyggaaacttgggtagtcttcagtttctcattttgtatcacagggaaaaacacctaatgcagatttgatatgcaaaacttaagagttactgtgtatgaaaatgttct

SEQ ID NO: 253948 - DNA, 603 bp, Homo sapiens
tattctttatctatgaagatatcattttttgaataagtcccccaaatatggagttagatgactcatcagagcagggtgtgagtgttcaggaaagcctgtgyatacttaggtcatctatatgagttaggaatgcagatgcataataaattggttgggatttattaatacatgcacctgcatttctgcttaagaagctattgtttgatctaacgatgtcctatagaacaagcccaaaacaaaccaaagatattttcaaggctcaagtatatcgggcatatgggaagcatgtaaatgttcaaagaggatgtccagtaatgaggaatccaacatttatcccaatagcaacatgttaaatgctcccactcccttctgaccattgctgctcaagtgtttccttctgagataattccttgaaagtgtgtgtacatgaccagtctccatggctaacacatacacatgcatggaacctagaagcattaaggaacaactctgaggtcattagaagctaaaaatactgaaccttcacacttgcccttgagcaagtattctttagcagaaaagccaaagggattataataaaatgaacaaacaacaagcctactc

SEQ ID NO: 253949 - DNA, 596 bp, Homo sapiens
gggtgtgagtgttcaggaaagcctgtgcatacttaggtcatctatatgagttaggaatgcagatgcataataaattggttgggatttattaatacatgcacctgcatttctgcttaagaagctattgtttgatctaacgatgtcctrtagaacaagcccaaaacaaaccaaagatattttcaaggctcaagtatatcgggcatatgggaagcatgtaaatgttcaaagaggatgtccagtaatgaggaatccaacatttatcccaatagcaacatgttaaatgctcccactcccttctgaccattgctgctcaagtgtttccttctgagataattccttgaaagtgtgtgtacatgaccagtctccatggctaacacatacacatgcatggaacctagaagcattaaggaacaactctgaggtcattagaagctaaaaatactgaaccttcacacttgcccttgagcaagtattctttagcagaaaagccaaagggattataataaaatgaacaaacaacaagcctactcataaagcatgttatgctttatggatagcgcccccccattaaaaaaaaacaaaaacaacaaaaaagc

SEQ ID NO: 253950 - DNA, 596 bp, Homo sapiens
gggtgtgagtgttcaggaaagcctgtgcatacttaggtcatctatatgagttaggaatgcagatgcataataaattggttgggatttattaatacatgcacctgcatttctgcttaagaagctattgtttgatctaacgatgtcctatagaacaagcccaaaacaaaccaaagatattttcaaggctcaagtatatcgggcatatgggaagcatgtaaatgttcaaagaggatgtccagtaatgaggaatccaacatttatcccaatagcaacatgttaaatgctcccactcccttctgaccattgctgctcaagtgtttccttctgagrtaattccttgaaagtgtgtgtacatgaccagtctccatggctaacacatacacatgcatggaacctagaagcattaaggaacaactctgaggtcattagaagctaaaaatactgaaccttcacacttgcccttgagcaagtattctttagcagaaaagccaaagggattataataaaatgaacaaacaacaagcctactcataaagcatgttatgctttatggatagcgcccccccattaaaaaaaaacaaaaacaacaaaaaagc

SEQ ID NO: 253951 - DNA, 596 bp, Homo sapiens
gggtgtgagtgttcaggaaagcctgtgcatacttaggtcatctatatgagttaggaatgcagatgcataataaattggttgggatttattaatacatgcacctgcatttctgcttaagaagctattgtttgatctaacgatgtcctatagaacaagcccaaaacaaaccaaagatattttcaaggctcaagtatatcgggcatatgggaagcatgtaaatgttcaaagaggatgtccagtaatgaggaatccaacatttatcccaatagcaacatgttaaatgctcccactcccttctgaccattgctgctcaagtgtttccttctgagataattccttgaaagtgtgtgtacatgaccagtctccatggctaacacatacacatgcatggaacctagaagcattaaggaacaactctgaggtcattagaagctaaaaatactgaaccttcacacttgcccttgagcaagtattctttagcagaaaagccaaagggattataataaaatgaacaaacarcaagcctactcataaagcatgttatgctttatggatagcgcccccccattaaaaaaaaacaaaaacaacaaaaaagc

SEQ ID NO: 253952 - DNA, 574 bp, Homo sapiens
agggttaatcccttcccaagccattaacaatctctgttggtctgtgaatatcgctccaccgacccccaatttctccacctgtactttaataataataaatcttattttacagtgttttataaaaattaaatgagaagaatgcatgtgaaaatgcctaacatggtgtttggcactgtatcagtctgttttcacgctgttgataaagacatacccaagactgagcaatttacaaaagaagaaagtttaactggactcacagttccacgtggctggggaggcctcacaatcatggcagaaggcgatggacgagcaagtcacatcttaagtggatggcagcaggcagagrgagctcatgcagagaaactcctgttttcaaaaaccatcagatcttgtgagacccatttactatcagaagaccagcacaggaaagaccagcccccatgattcaatcatctcccaccgggtccctcccacaaaacctgggaattatgggtgctacaagatgagatttgggtggggacatagagccaaaccatatcaggcacatagctgatacactccttctttaagaggg

SEQ ID NO: 253953 - DNA, 481 bp, Homo sapiens
tggtgcaagctgtcagtggatctaccattgtggagcctggaggatggtggctctattctcacagctccacttggcagtaccccagtgggaactctctgtaggggctccaaccccacatttgtcttctgcactgccctaccagaggttcttcatgaaggctctgcccctgtggcaaacttctgcctggacatccaggcatttccatacatcctctgaaagctaggcagaagtttgcaaacctcaattcctgcaggaccaacaccacatggaagctgccaaggcttgggacttgcaacctctgaagcaatggctcaagctgtatgttggcccattttagccatcgctggatctgaagcagcagggacacggggcaccatgtcctgaggctgcacagagcagaggggccctaggcccagtacacaaaagcattttytcctcctaggtctccaggcctgtggtggaaggggctgctatgaaggtg

SEQ ID NO: 253954 - DNA, 585 bp, Homo sapiens
agcttaaaaaaaattagactgacttgcaattgctatttttttgttataccatataagaatattaaactagaagaaatcaccaaataccatcaccactgatacttaaagataaatttaaaaataaaaagcaagcagtatatacatttacacacacacacacacacacacacacacacayacgcacgcacacaccacacaaaatcaactaaatgagctctaggaaaatcctaatttatattgtccttatttccctaagttcactgtagaaaaacaagccctggttcaagaaatggccaatagttgcatgcctctgagcagcaccctggaggcagaggtctctcactttgagattaaccagatgatacacaaaggtttagctttcttcttttcagacacaccttttctggagaccaacgacaactaccatcactgatccaagggctgagaaagattttgtttatgtaaacacgttgtcatgctggactgattagggactgaactggcttggtgttcttaacagaaacttccacacccaaaggcaaaaccatgagcatattacacaatgccctggggtcaaggctgtag

SEQ ID NO: 253955 - DNA, 585 bp, Homo sapiens
agcttaaaaaaaattagactgacttgcaattgctatttttttgttataccatataagaatattaaactagaagaaatcaccaaataccatcaccactgatacttaaagataaatttaaaaataaaaagcaagcagtatatacatttacacacacacacacacacacacacacacacatacgcacgcacacaccacacaaaatcaactaaatgagctctaggaaaatcctaatttatattgtccttatttccctaagttcactgtagaaaaacaagccctggttcaagaaatggccaatagttgcatgcctctgagcagcaccctggaggcagaggtctctcactttgagattaaccagatgatacacaaaggtttagctttcttcttttcagacacaccttttctggagaccracgacaactaccatcactgatccaagggctgagaaagattttgtttatgtaaacacgttgtcatgctggactgattagggactgaactggcttggtgttcttaacagaaacttccacacccaaaggcaaaaccatgagcatattacacaatgccctggggtcaaggctgtag

SEQ ID NO: 253956 - DNA, 645 bp, Homo sapiens
tctgaaattatcagtagcacgatatccagaccacagtcttcataactccttaagtctccaaatctcttccaagtatactgccaatccttcagtgctcctctgttcttcaggggagcctgcttacaaaatggcagacatgctcacatgtctgtcagtgtttagagttgataatgcaagcacagcatttcaccacagccctggtggctgagttgcaaaattatttatggctttcccatttatggcatgctgctcagtttcccatgagttgctaggaaaaattcctgatagctactatgagccattgaaacctatgagacttcatttattatggcataatatacacattacctcacttgtgttagaccatatggagagctctctgttgaatttggcatagttmctggggtgaaacgggaacggattctgttcctagtcctcttcaattatgctgtatgttggatcaggcagccaacttcaacagatcatctgggcatagcaatcagtcctcaggacaacatcactggcttcacctatgccaatgaagaataataaatgtgacattgaagagtgtctgagtggcagagaatagcaagatcccaagagtggatcaatagggtgccctgctgaaagtgagtttgtgtgtgg

SEQ ID NO: 253957 - DNA, 559 bp, Homo sapiens
aaagaaaaaaaggaaagcaagaaaagaaatgtctgccgggctgttcccaacctaacccctctacacaatgcttagtttggtagcatgctaaggtttaatttaaagttcttgtcattttatcattcagttgcataaaatgttgaaaataaccattatcttcaaaaagaagccagtaatgcaattcttatccaaagttctgagaaaatattttctgaggaggactttaatgagaccagttccaaggaaggacaacyatcctgtctcaacctccgtggttctcctttgttttttacatatttgacatatatcctagttattcccccaactctttcttatttcaatcatccagtgaactttggtgagccctgcaaaaaacattcccatcacagaggattgattgaggtaaatgttgctgaaacttacggtgttccttgccatttgcttatcaacctcatgtatatgaattatgtgatcgcaaactgtgagttctgtttctggcacagcacaaattacacactttcactccttaaagaatttataaagttgctgaggattttga

SEQ ID NO: 253958 - DNA, 592 bp, Homo sapiens
ggtttgaactcagttcttctgttacatagtccatgttcatgctattgctttttaagaaaacaggtaacacctcataaaaatagaaagaaagatcaagaaatagaaagctgatggttttgcaagaactgtcaggggccaataccttaatataagacctgccattacttctttctttgagggtcatccatttgaaatgtgacagtctttccagaatcatgaagttagaccatgttgaagcaaagaaaagagttgtgtttatgaaagacaatttttctggtgacatggtctccattttgccagttctgagcctagacaagctggaacagaaagcctaggagtctttttctgggttctcttagtttgctccctcttttgtaaagctcatatttgagattagatgttagaatttaatgctaggggcaaggaggacagatagacactattattatagagaccttgttatctctccaataatattgtgaaattgaggaaatacgtctcattaaaatcattagcttcagcccattctattaacawcatcagaattcgtctaccaattaaaatgacaaaaattttatcttacaacgtctgg

SEQ ID NO: 253959 - DNA, 575 bp, Homo sapiens
attacttacagttttaaaatttactaagcctttataaatggctcaaagtgtggtttattttggtaaatgttctatctgcatttgaaaagtgtctttgctgttgttgaatggtacattttatatatgtctattaaatcaaattagttaatagtattgttcaagtctcctatattcttagtgatattctgtctatattttctttcaattaatgggagaggggtgttcaaaactccaaatgtaattgtggatttgtcaaaatctcaytgaagttctgtctgtttttgcttcatgtgttttgaatctctattagcgggacataaacatttaggactgtatgtcttcttgatgactttactgctatttccttatgaaatgaccatctttgtctcttttagtaatatttcctctgaaatctatttagccagataataatataggcactccatatttctttacttttgattagtgttagcatagtctatatattttaatccttctacttttaacctagttaagtctttatatttaaagcttagctcctttaggcaacatatggttgggtcttgctttttata

SEQ ID NO: 253960 - DNA, 536 bp, Homo sapiens
tgaacctgtggctatctgacttcaaagcctgtattctttccacaatgccagtctcctctcacaactgaccccttaactttggtcatttaaatggcataattatgaattgagaccatgtcccactccctccctttacccctgtatargagctacagtgcaatgttggcctgctgttctgaaatctggcaaaagctgaaactgaggacagaaagtgaaaagttctttacagcctatgaggcaggagctcaggctcctgggactgctctgtctgcacagccttattttttagagactgtgtcatgctctgttgctgaggctgatatgcagtagcacaatcatagctcactgcagtcttaaacccctgggctcaagcaatccacccacctcaacctctcaagtagctgggctacaggtacgcaccaccacacccagctattaaaaaaagaaaaatttgtagaaatgggggtcttgctatgttgcccaggctggtctcaaattcctggcctcaagtgatctttccatctcatcctcccaaa

SEQ ID NO: 253961 - DNA, 648 bp, Homo sapiens
atgagactcaatttagaaatatgatttatattaatttcctggggctgttgtaacaaagtactataaattgagtggtttaaaccacaataatttttgactgttttggaggttagatgcctaaaatcaaggtgttggcagggttggttctttctgaggattgtgaggggttatctgcttcatgcctctcctaggttgtggtagattcagacaccctttggtttgtggatggtgtttctctgtatctgcacatcatcttccttctctatgtgtctgtgtcatttccccttttaataaggccatcagtcatactgggctagggttcaccgtaatgatctcatyttaatttgcttacctctgtaaagacccgacttccaaataatgtcacattctgacgtattagtgggtaggactaaacatgtctttcttacctgtggacacaattcgactcactgcggagtctatgcagatccagttaagataaggtcataatggattaaagtgggctataaattcaatgtaactagtgtccttataagaggaggcagagaagaaagacacaaaaacatgcagagagtaatgccaagtgaagacaatggcagagattggagtgaggcatctgacaagccaagaattaccagcaaccacaga

SEQ ID NO: 253962 - DNA, 474 bp, Homo sapiens
accaccttttaacatcttttaattttgtttcatatataatgcccatagtttttagctgtacttaccaggacaaacagggagaggtgtgtttattccatcttgtctggaaccatgactctccctttttacttaacattgttaagtattttaatgttcccaaggttgggacatatcttagagttgctgtgtacatataatgcrgagtctccttttatgagctctgtagcacaccttatcaccatgattgtttacaaagggacttcaccattaccttccatgttggttttctatggctgctataacacgttaccaaaagcttcgtggcttaaaacaacacaaacgtattatcctgcagttcttgaggctaggagtccgacatgggctaaaagtaagagggctctgttcctctcagtaggttcaaggggaaaacctgtcctttccctttccagcttctggaggttgcctgcatgcttt

SEQ ID NO: 253963 - DNA, 482 bp, Homo sapiens
gtaagtgctagtggcaccccatagccgttgtgacaaccacaaaattttaaaaatgaaaaacctcttaagtttattggaaaatgacagtatattaattaggcagtatttttagaaacctatttattatagctaaaacaaatagggatttatttttcttacataagtctagaggtaagtaaattcagtggcatagtgatgtcagggataacgttgttgtaatattcttagcttttccttgtggccayaaggtggttgctgcagctttatcgcatcccaactccaggcagaaagaaaagggaaagaggaatggtacactaccacatgtgttgctctttattagcaaagtaaaaggtttttctggaacccccttagcaggctctgcttatgtcttatggaccagaacatcccatggtgacccccagctgcaaaggaagctgggaaagcaagtctttggttttctagtcgttagagtgtgagatggc

SEQ ID NO: 253964 - DNA, 577 bp, Homo sapiens
gaaaatcaaggccacgtgtaataatttatcagataccttagtaaattgagaactatagacaatgttctttggataccgtgattaaaaatagtctgtattaaagttgatttgctataatctgtgatagaaaaggtagaaaagtagcaatgttttttatgttttttcataggctcgtatattcaatgaaactccaatcaatccaagaagatgtttgcatattcttacaaagattctttacttactgaaccaggtatattatttttattttcctcagataagtgtgtcctggaatagaaatactgaagattcagtgaaatactttctggaaagtatatttatttattttaaattcacttaattttaacatatacaacgtttggttaacaaaataatatgtaaaacttgagtacgaggactatgacatatacaggttgagtataccttctttgcaatgctyggaaccagaagtgttttggatttcagatttttttggattttggaatatttgcagaatacatactcactgactattgctaatctgagtatctgaaatccagaatgctctgatgagtgtctc

SEQ ID NO: 253965 - DNA, 604 bp, Homo sapiens
ttattaaatgctttttctaaaaacattgagatgattacaggttttatctttgctgtgttaaagtgacaggtcacattgatagatatttctaatgtgaacctacccttgcattcctgagttaaaccctgctttgccttgatgtactgttagttattaatacagtgcttcatgyattttattttagcatcgatgttcataagtgacattggtttaaaactttcctttcttgcactttgtgcaagaaggaaaatgcatttggaaatttccttctttttctatattctgtgacggtttggatgagataggtatgatttgttccttgactatttggtaagtctcgtctgtgaaactatcatattttgaaaattcaatttaatttctttaatgattgttggtttctttggggtttctatttcttcagtcaattttgatcattcacttttttctgcctaaaaaattagatactacatttaaacctttaaaatgttggtatatggttcatggtattctctttaaacattctttacggtgtctgtagttataccctatttttcattatttgtatcatatatttgtgaattctctattttttcttttttgtctt

SEQ ID NO: 253966 - DNA, 604 bp, Homo sapiens
ttattaaatgctttttctaaaaacattgagatgattacaggttttatctttgctgtgttaaagtgacaggtcacattgatagatatttctaatgtgaacctacccttgcattcctgagttaaaccctgctttgccttgatgtactgttagttattaatacagtgcttcatgtattttattttagcatcgatgttcataagtgacattggtttaaaactttcctttcttgcactttgtgcaagaaggaaaatgcatttggaaatttccttctttttctatattctgtgacggtttggatgagataggtatgatttgttccttgactatttggtaagtctcgtctgtgaaactatcatattttgaaaattcaatttaatttctttaatgattgttggtttctttggggtttctatttcttcagtcaattttgatcattcacttttttctgcctaaaaaattagatactacatttaaacctttaaaatgttggtatatggttcatggtattctctttaaacattctttacggtgtctgtagttataccctatttttcattatttrtatcatatatttgtgaattctctattttttcttttttgtctt

SEQ ID NO: 253967 - DNA, 547 bp, Homo sapiens
aacccctgggctcaagcggtcctcccaagtagttggaactacaggcattagccactgtgcccagctcagattggatttcttaaaaaagccaaatccaactttatgctgcctataaaaacataccttaaatataaagaaacaaatagattagaagtaaaaagatgaagcaagatataccatgctaactgtaatcacaagaagctgtatgtcttcagataatgtagactccagawtaaataatattactagggataaaggggtcagcttaccaagaggacaaagtaatattgtttatggagctaataacagagtttcacagtgcttgaaacaaaaattggtagaattgaaaggagaaatcaacagatccacaattaaagctggaaatttcagtactcatctctcaaaaacatagagcaagtatacagaaaaattattaaggaaaaacaatttgaacaagaaaactgagactctttgctgatgacattgtctatgtagaaaatttgtggaatccaacaaaagctacaggaagtaataagtgagcttagca

SEQ ID NO: 253968 - DNA, 532 bp, Homo sapiens
taaacaggtatctctcaatattttcttgggcctgagatcctgagtgaagacagacattcatgtaaagcttgcgtccattcttttgttagatctcttagggttctaatcacctcctctaacctactaataattaaaatgccactctcctttataattccatgtttaagattgttggctactggtctttcttatttttcttttcacatcatcaatactgtcctctgaaaacacaacctttcttctaaataaatccttctcttctttcagcttaatcaaaccatcatcctttcttcagttttcacccttgtactgcttctattttgatttcaagatttaaatatatatatttgaaacaaatatggctcccattttatttcctgaatagaccctgattcctagggagagaaggattcaggcaaaagcctttttaatacttttcctgccttygggattatggtatacaatgcttttctcttcctcaaacccctatataacaaaaacttccattcctctttatgtatttgtgataaaa

SEQ ID NO: 253969 - DNA, 589 bp, Homo sapiens
attccactgtcagggcttatatagtaaacacatctggcaccaacttggaatataaatagaaggtgattctggatatcccatatgaattaaaggatttggagcctcccattggcctctccttagccctattaaagggtgcatttcaaatccagataatggggaaactgatctgataccacctgatacttcccagaataatttaagagctagaatgtccctaacctgtgctcttacatatacatggaacttatgccactgaccttagaatcctcaactgcaattctggctgagcataaaggcagcacaaattgatctattgaatagcgccttccctttctgcagtgatcctgtctcagttacatctatgtgaatcaaaatcagccacagtgttctgtacagctcacttttgccaaagtctatgctcagtgactctaawaaattagtggcttgtgtgaggacacttgcgatcataggctgctaagatttgaaatgactaaagaactgaaaggctgaagatcattaaagcattaaagccctgtactctggcattacagacatccaatctccacacatcttattttgattccct

SEQ ID NO: 253970 - DNA, 570 bp, Homo sapiens
accatcccagtcctggacatttccaagactgccacccctgacaccctctccaaggtccgcctggtggatgggtgagacaccagagtcctttgagactgggagctcctcaggcatctgagaattccagtttcacatccctggttccagggaggggagaatcttcagtactctggagagtacgggagttcatcccttcttatcagttcctgggggctgtcttgaggcaacccccacttttaggatgatatacacgttgcaagaattcccgctattttccggcccccagtacctccccagagtccacatgtctgcctggacccaccctcagagcagaggaaccagtctgtgccttggtgtaatgactctgggaaagaargatgggcagagagaaagcagggacaacggcctgggggatcatccttgagggtaagactgacagcaatgactgtcctacaggcaggtggtgaagctgggcgccgggccgggaccggagccggaggcggagctttccacctcgctggtgagtggcgggtcgatgcggggagttcgacgacgtccccggtactcgat

SEQ ID NO: 253971 - DNA, 570 bp, Homo sapiens
accatcccagtcctggacatttccaagactgccacccctgacaccctctccaaggtccgcctggtggatgggtgagacaccagagtcctttgagactgggagctcctcaggcatctgagaattccagtttcacatccctggttccagggaggggagaatcttcagtactctggagagtacgggagttcatcccttcttatcagttcctgggggctgtcttgaggcaacccccacttttaggatgatatacacgttgcaagaattcccgctattttccggcccccagtacctccccagagtccacatgtctgcctggacccaccctcagagcagaggaaccagtctgtgccttggtgtaatgactctgggaaagaaggatgggcagagagaaagcagggacaacggcctgggggatcatccttgagggtaagactgacagcaatgactgtcctacaggcaggtggtgaagctgggcgccgggccgggaccsgagccggaggcggagctttccacctcgctggtgagtggcgggtcgatgcggggagttcgacgacgtccccggtactcgat

SEQ ID NO: 253972 - DNA, 577 bp, Homo sapiens
gccatcaccaattagtgccattcactcctgcatcctagctctggatgattgattcaaaggtggccaaccaggttatactaagaatttgaaagtttgctaatgacccacagagctgtaagatgattgcacctgagccacctcatgtggtatcccaggctggaagactctgagctctgagctctacctgctgaggtccccggagctgccccagatctagtccttcctaaagcaagactacacaattttctcttcagttctgtgagctttcctaatattctttcaaataaatcctttattttcttagggttcatttctgcagtttatgaccaaaaaaaaaaaaaaaaaamacctaatatgggctctgaagcagggtgtccaatcttttggcttccctgggccacgttggaagaattgtattggaccacacataaaatactctaacgctaacaatagctgatgagctaaaacaaatcacacaaaaaaaactcataatgttttaagaaagtttttgaatttgtgttgggctgcattcaaagccatcctgggccacgtgtggcccatgggccatgggttggac

SEQ ID NO: 253973 - DNA, 482 bp, Homo sapiens
tgtttttttgaacagttttgtcctcttttctcatttctaactgtttataaaatagaaacggctacctttatggaagtattggtatggaaagtaaggaagtgtggaaagaagcatctacccttcatgaaaaaaggtagtggcacagaatgccaagcaagggtagtttgccccattttgtcttctttcattctttctttttctttctttctttcttcttctttctttctttctttctttctttcyttctttctttctttctttccttctttctttctttctttctttctttctttccttctctctctctctctctctctctctctctctctctctttctttctgtctttctttcttgcattttcagacagggtctcattctgttacccaggctgaagtgcagtggcatcatcataggtcactgcagcttcaaactcctgggctcaggcacccacccacctcagcctcctgagtagctgggacta

SEQ ID NO: 253974 - DNA, 482 bp, Homo sapiens
tgtttttttgaacagttttgtcctcttttctcatttctaactgtttataaaatagaaacggctacctttatggaagtattggtatggaaagtaaggaagtgtggaaagaagcatctacccttcatgaaaaaaggtagtggcacagaatgccaagcaagggtagtttgccccattttgtcttctttcattctttctttttctttctttctttcttcttctttctttctttctttctttctttctttctttctttctttctttcyttctttctttctttctttctttctttctttccttctctctctctctctctctctctctctctctctctctttctttctgtctttctttcttgcattttcagacagggtctcattctgttacccaggctgaagtgcagtggcatcatcataggtcactgcagcttcaaactcctgggctcaggcacccacccacctcagcctcctgagtagctgggacta

SEQ ID NO: 253975 - DNA, 605 bp, Homo sapiens
tccacatccagctcttcttctcaactgccagcactgctgactaacagcaatcccaggcccaccagaaacttgactaagaactgacaaatgtggtagctatgtgcactgacttctttatcagtccaccttcacagtgtcatgccagaagctaggtattaacagtctttatgacttcacggtagatctgcagggaaaagttttacactgcatactttaattcttccattttcacgtcttataatgaatatttataagttttatargcagttaaataatttaaaacatttcaagcaatgctccctaatttagaacactcttagttccctggggaaaataaataaaaggaggtttttcatcgtaaaaaaaatttaaaaagacttacatcattagattgaaacaatcgcgtcattgcaaagaaggcttctgtagcttccgttgttccaaagtgttcaccctaagtaaaatttaaaacaatttttaaattttaaaaagtgtatattcatatatatgtacatatacacacacaggattttctatttctgcaaaaatcctttagaactcaagaaaaaagaatctctttgtaaacattctgcctctgcaatttt

SEQ ID NO: 253976 - DNA, 585 bp, Homo sapiens
tttaaaatcaatcatttatttttccatgtttcttcccagttctaatcctaatactttcattatttttatgtggttgtaacccaatcaaaaattgtggcagattatgttttctaaaactggccatagcagtatttccagtcctgtatgcttttccagaaacttgttgctctcccatcataaggtggcatctcttttctttccctttgaaactgacaagattttgtgactcaatgaatggaaatggaaatgacactgcaaaatttctaagactaggtcatatatgattaactgacttctacctggctttctcgccggggtcttttgtccttggaacccagccaccatgttctgaggaagcccaagccaaacagaggtgtcctggccaacagagccagctaaggcctcaccagatgaccaacrtcaactgatgttgaatgaccctcatgtgaatccagcccctgacattgtgggcccagataagccatactgctgtaagccgtctgaatttctgatctgtaaaaaatggttgtttcatcccactaagtttttgggtaatctttatgcagctatagtcactgaaataca

SEQ ID NO: 253977 - DNA, 474 bp, Homo sapiens
tattcccttgtctatacgtgccacattttctttatccaatcatccatcgataggcacttaggttgatttcatatcgttgctattgtgaatagtgctgcaacaaacatatggtgtaggtatttttttgatataatgatttcttttccttatacccagtcgtgggattgctagattgaatgttactctatttttagttgcgaaatctctgtactgttttccataggggttgtactaatttacattcccaacgacagagtatagtacgtttttttgtatgaaacttttatttcaatgtaagtttgtattgggttgtgataccctccttcttagcggagatgcaacaaagatgttcttaaaagatgtgtcttataaagcatatttattaacccctttttatatcgatgtaaacatctcccagsctgtagcttccctttttgtattgaattatttttcttttgcactattttaattttt

SEQ ID NO: 253978 - DNA, 591 bp, Homo sapiens
ttgttttcctgcaactagacggtcccatctgggagtgatgggagacagtgataggtcatcaggcgttagattctcataaggagcgcgcagcctagatccctcgcatgcgcagttcacagtagggttcatgctcctatgagacgctaatgccgctgctgacccgacaggaagcggagctcaggcggtaatgcgagaggggagtggctgtaaaaacagatgaagctctgctcgctcgcccatcgcacgcctcctgctgtgcggccccgttcctaacaggccatggactggtaccggtctgtggccccgggagttggrgacccctggctttgaggattaaatgagacagtgtatgtaaagggctttttactgcacctattggattgtaccacttccatcaatagctctggcaacagtatcattgtcgtcgctgttactaggaaggtccacttcccagcagtaagcagggcctcccaccagggattaccaaaaatcattgttgaccatttgtggccagaagggggaagcatacaccacactataagctcaggaggctaaggacggggagtggcgagtgtggatggggacttcctt

SEQ ID NO: 253979 - DNA, 476 bp, Homo sapiens
ctgcgctcccacaccttgccgacggctccacgtccctgtctgcgcccgaggtccaccggtctgtgaagcccactttccccgcctccctctcgcgttgtgccgcttggggcgcccgctaggacccaaaatgcggactggtgggccgcccatcaagggttgcccgcggtagggcgggggctcccgtgagctgctcccaaaccccactcgcaggatgctgccctgacgcccagggccaacccggggagccaaggcccccggtctctgcaaggccgaccccagcccgctggggaccctgcaagcccgcgcgtggctcccagcacgccgggcgtccgcggggcgagctgctcagggtcactcggggtccctcgccaayacaggccgcgcggagagtgtgaggcgagccccgggcccgcgcccccacgagcacctaccttccaggtacccaaccccaggatgggcatcttggcgccgttgtt

SEQ ID NO: 253980 - DNA, 532 bp, Homo sapiens
aacttactctgctttattttctttattttaccattacttaacaggatattaattatctttctatattttcgtttttattgcctaactcttccactcagtggtaaactctgggaagccagagactttgtgtgaacctccagcacctagaacagtgcctggtacatagtagcactcaatatatacttgtcaaatgaacaaacacctttactatatatgtcaatgttctttaagataactgacatatattgmacagcaatcccatgcctgatattttgccagatgtttttcattatagtatctcatatattactttgccacagccctatgggagaggtgtattattttattttcattttacagacacagataaggaaatcgagttcagagaggttaaagaacaggctccaggcagctggtggctgagcaggatctggaccacagagtctgacttggagtccatgctcttttccactgtgagtttgtcctgggagttcattctttcaggcttatttttcttgcagtgctaaagtct

SEQ ID NO: 253981 - DNA, 550 bp, Homo sapiens
catttgcagcaaaattatatttgacatgtacaccagatgtcacagtcatttgtccattctgaacatgcccaggaaataatgccagagactgaaaatagcagagtgtgtgcagttttttgagcaaagggtggattaatgattttaattaagttgggtttgcatgatttttttctgtgaaaatgattttttaaaattttattatagttttaattgacaagaaataatggtatatatcatggctacaatgtgacgttttggtatatgtttacattgtggaatgattaaatcaagctaattaacatatctatcacctcacatatatgtcaattgaaaatgatttgcrgggtctctctattaaaccttaatttaggaatgtgtagagtttgtctataagatacatgaggttttaattttaatgtaaaaccctgaagatgggaaagattatgtagaattatgggaaaagtagatattttggaatcagatggatcttcctttaaattctgactctgcttcttcttcttagctgttgagacctatgcaagttgttttt

SEQ ID NO: 253982 - DNA, 587 bp, Homo sapiens
gagacataccttaaataaaatagcccagctaaattcaggtgctgggagtagtcattattcatttaatacattggacactggtggaacacttcgctttcatttgctcacttaaactttgcaacagtcttgcatttctctccatttcagagaggaagaaagcaaggcttagcgggggcttggtaatgtgtaaaatccctggctgtgcagtggcraagctggtggtgggtaaaagcccgggtctgtctggctccagagtccaggctgttgctcatcttcccgaaaccctcttcctcctttgttatggagcatgctgtgtctttggacagcagctgtccttactgctatgccaccaactctgtgctctggctttgggagtctccctagcacctcccaagcaccgagctttcacatagtgggtgcttggtaatgtttgtagagcaagtgagttccctgagtagcacacatcacatgaagccacatgatgcacctgtgctaagcacaggcttttaaattcaggaggctgcataagagcatgctgctgggttcacagttactctctcaagtgaacaattcatggattaattatt

SEQ ID NO: 253983 - DNA, 587 bp, Homo sapiens
gagacataccttaaataaaatagcccagctaaattcaggtgctgggagtagtcattattcatttaatacattggacactggtggaacacttcgctttcatttgctcacttaaactttgcaacagtcttgcatttctctccatttcagagaggaagaaagcaaggcttagcgggggcttggtaatgtgtaaaatccctggctgtgcagtggcaaagctggtggtgggtaaaagcccgggtctgtctggctccagagtccaggctgttgctcatcttcccgaaaccctcttcctcctttgttatggagcatgctgtgtctttggacagcagctgtccttactgctatgccaccaactctgtgctctggctttgggagtctccctagcacctcccaagcaccgagctttcacatagtgggtgcttggtaatgtttgtagagcaagtgagttccctgagtagcacacatcacatgaagccacaygatgcacctgtgctaagcacaggcttttaaattcaggaggctgcataagagcatgctgctgggttcacagttactctctcaagtgaacaattcatggattaattatt

SEQ ID NO: 253984 - DNA, 596 bp, Homo sapiens
ggattgtggctgtgggtcagagcaaggccaaggctctgactggctcagacacctgtcatttaacagcagagttaaatataagccctggaacatgctttctgtctttgcagctgcagcacatgcagaaactgtccagggcaatgatgaatttcaagtttcttcctttgaaggacagggcccggctaatgtgacacatccttcctgaaaatgatgtgtttctaggtttctggcttaagggtatgtgatttctgaagggtaaacatggccttaaaaggggaaaatttgttctgcttaactatgcagagaattcccagtagtttctttaatttggttttctgaatagggcacatttgcattcactgacttgtggctttttagactagcaaatgcatctctctcttctctgtgttttattaaatsattaggtggtctccaagctacactaacattagccagtacccttgagatttggaggcaagtccatctagccagtttgtttctttttctttatattttccctcccacatcttttttcattttaaatcctttctgtcaagtaaggactggggctcacaaatgtgtgtgtgcacatgtgt

SEQ ID NO: 253985 - DNA, 386 bp, Homo sapiens
tccctttcctctgatagtgagccccccactttcctatctgcaatgcagtttcttctaaatgaaatagtgtgatgattttaaaaattcaggcctgggaggccaaggcggatagatcacttaagccaaggagtttgagaccagcctgggcaacatggtgaaaccttatctcaaaaaaaaaaaagaaaagaaaattagcygggcttgatggcacacacctgtagcctgtagcctcacctacttgagagtccgaggcataagaatcacttgagcccaggaggcagaggttgcagtgagcagagatagtgccattgcacccagtctgggtgactgcagtaaaaccctgtctcaataataaataaataataataaaaaaattttaggtctgt

SEQ ID NO: 253986 - DNA, 597 bp, Homo sapiens
agataaacatctgaagacatttcccttttgtatctggaaagcagggatggcaggtctgagatgtcagctccctgaacttggttccttttgctccccaggctatgatgggattctggtctctatattgtggctgggcccttaaaagcagaaagaattcacttcttgcaatgctgatccctgrcaatgggaattccctacctgaagttagtgtttagatctactgtttgaacttaactgctttatgagggatgcatttccttcctctctccatgttttcctgctgctaaccagagccttaagcatttggctttggctttcttgccatttttgctgaggtctattgctttctaatcaggaaaattttttcaagaaaatgacagctcctcagagacccacaatacctcagctcttctgtggttcatgcagacctgagcagcagaaacatactgtaaacatagattgtgttctgttcactcaacagatatgcattccttgtgtaccatatgccagacctgcaaaaggcatggaggatatagttagggtgacacagttcctgccctcaaggagcttagtacctgggggaaagactgccaatta

SEQ ID NO: 253987 - DNA, 581 bp, Homo sapiens
catccagtcctgctggtttctctctggaagaaagcagagaattttataatgtgtttcagaaaggtgtcaacattctcatcaatatcaaggaaaaattatttttctatttttagatgactggcaattatcagatcctgggagaaggacaaggcaagatgcctgcctggggaagctgggcttttgtaggaagaaaaaggaattaaaaatgcaagttggcttctgataagtgccaaataaatgatttagggggtaattgccttggaattgaaagaaatgaaaataattagggctcccytaaccacccgctcccaacattgtatgaccaacttcctagggagggaaaatatatttactggaaacatgatagaactgtcagaaacccaagaaatcaattacataaattgtgaagcataagtcacaatgctatttgttctacaagagtgtagaatttgcaatttttcattaagatagaaaataagaacgcaccactgcttcatccaagagaatcaggcgccctccccgccccatggtcttccttgtttcaatcatgctatatctgtgcaggtgtttttgttactaac

SEQ ID NO: 253988 - DNA, 581 bp, Homo sapiens
catccagtcctgctggtttctctctggaagaaagcagagaattttataatgtgtttcagaaaggtgtcaacattctcatcaatatcaaggaaaaattatttttctatttttagatgactggcaattatcagatcctgggagaaggacaaggcaagatgcctgcctggggaagctgggcttttgtaggaagaaaaaggaattaaaaatgcaagttggcttctgataagtgccaaataaatgatttagggggtaattgccttggaattgaaagaaatgaaaataattagggctcccttaaccacccgctcccaacattgtatgaccaacttcctagggagggaaaatatatttaytggaaacatgatagaactgtcagaaacccaagaaatcaattacataaattgtgaagcataagtcacaatgctatttgttctacaagagtgtagaatttgcaatttttcattaagatagaaaataagaacgcaccactgcttcatccaagagaatcaggcgccctccccgccccatggtcttccttgtttcaatcatgctatatctgtgcaggtgtttttgttactaac

SEQ ID NO: 253989 - DNA, 581 bp, Homo sapiens
catccagtcctgctggtttctctctggaagaaagcagagaattttataatgtgtttcagaaaggtgtcaacattctcatcaatatcaaggaaaaattatttttctatttttagatgactggcaattatcagatcctgggagaaggacaaggcaagatgcctgcctggggaagctgggcttttgtaggaagaaaaaggaattaaaaatgcaagttggcttctgataagtgccaaataaatgatttagggggtaattgccttggaattgaaagaaatgaaaataattagggctcccttaaccacccgctcccaacattgtatgaccaacttcctagggagggaaaatatatttactggaaacatgatagaactgtcagaaacccaagaaatcaattacataaattgtgaagcataagtcacaatgctatttgttctacaagagtgtagaatttgcaatttttcattaagatagaaaataagaacgcaccactgcttcatccaagagaatcakgcgccctccccgccccatggtcttccttgtttcaatcatgctatatctgtgcaggtgtttttgttactaac

SEQ ID NO: 253990 - DNA, 534 bp, Homo sapiens
ctgcaggtgacctccaggtgggcagaggagatacgggtgggccaccatcaaccttccgccatgcgttcttcctgcatccaaggaaatgtctaagaagaaaacattggttctggtatccccagtggcccctttctccctgcttctgtgctcatgtgtttcccttcccatcccacccaccagaacccctgatccctgtatctttccaagtaattgggtcagggtgagggctcaaaggaagcttttgctgtataccaggtgaccaagcaagggatgtttaattatggaatttcagctgattgagaaataggttttgggggagacagagaccaacccagaagtttggaatcacagttaccttccaggawtctgccagatgtcaggtaactcactgccctggggaaactggtgggttttgttcatgaacacataggaccattttatcttctaaaaggctgaaatccgggagacattctcctgtcgacattcagaattgccacaactgtaagcgacagtgactttagatgggtatctcta

SEQ ID NO: 253991 - DNA, 515 bp, Homo sapiens
taagctgaacactggttccatctggaaaaggcgagacaactcgaagcaaaggcaggacaactctaagcggggaaggggcttccaggtcataggtagataagagacaaatggctgcattcttttgagtttctgattagcctctccaaaggaggcaatcacaagcatttatcccagtgagcagaggggtgactttgaataaaatgggaggcaggttagccttaagcagttcccagcttcactttaccctttagcttagtgaatttggcaccccaagattaatttacctttcacaagctgtaggccttgtttggagccaggggaagggtgtcactgtcccctttccctaaggcacacaccatggtcttggccatctgagtagtagcactcagaacctttcttctgagggactgargcagatctggtcccagctacacacttgatgcatctcctacacagggcactggcctggtccttgaatgctcccaaaggcagggtccttctaggaggggtagctc

SEQ ID NO: 253992 - DNA, 498 bp, Homo sapiens
gttgataagcatttggtttagcctcttaaacaagagttccagtcatgcatatgttctcatgaaggtaccatcctttgtgtagaaaaaagacttggccttcaattatttttgtttattaaatgggcaaatgtctgtggagacattcatgtccacatgtctgtttcccttttgttcagtaatatgcatttgctggctagccaggctgaactagaagcaccattgcccagagagaaggaaggtagcccctagaggaatcagattgctatcctgtgctttgtgcatgaacccctayaggacccttggatattggactgcttcttttgtgtgtgaccatgtgatgagaattaacacataattctgtgtcccagctttattgctgaggtccataatgagccagtataattaagcaccatttgcctggttagttagttcaggtgtctaaatctgtcacaataaagtatgtgacgttaaacatgtttggattagaaccttctggag

SEQ ID NO: 253993 - DNA, 473 bp, Homo sapiens
gggatgctgatacagcttctatgtttgtccctccaagctacatgttggaatttgatccccagtgttggaagtgggacctaatgggaggtatttcggttgtgggggtggatcccttgtaaatggcttagcactgtgctggctctaatgggtgagttcttgttctgttagttctcagaagatctgcctgcaccccctcccctctctcttcgttccttccttaccacgtgatgcctgctcccyttgtcctcccaccatgaatggaagcttcctgaagcccttactaggatcagatgctggcacctgcttcttatacagcctgcagaatcaggagccaaataatcctcttttctttataaatcgctcaggccttcctttataacaacacaaacagactaagacaggtgctaatgtagaaattgcaaacatggtggcaaaaaagtgtgggaaacatttgagggaggcagattctcttg

SEQ ID NO: 253994 - DNA, 473 bp, Homo sapiens
gggatgctgatacagcttctatgtttgtccctccaagctacatgttggaatttgatccccagtgttggaagtgggacctaatgggaggtatttcggttgtgggggtggatcccttgtaaatggcttagcactgtgctggctctaatgggtgagttcttgttctgttagttctcagaagatctgcctgcaccccctcccctctctcttcgttccttccttaccacgtgatgcctgctccccttgtcctcccaccatgaatggaagcttcctgaagcccttactaggakcagatgctggcacctgcttcttatacagcctgcagaatcaggagccaaataatcctcttttctttataaatcgctcaggccttcctttataacaacacaaacagactaagacaggtgctaatgtagaaattgcaaacatggtggcaaaaaagtgtgggaaacatttgagggaggcagattctcttg

SEQ ID NO: 253995 - DNA, 579 bp, Homo sapiens
gtaagtgctactccagtaaacacacaaatggcaagaaagtgaaacagccttattgttgagagggagaaagtttgagtggtttgcatagatgatcaaaccagccacaacatttctttaagccaaaaccgaatccagagcaaggccctaactcttttcaattctatgatggctgatagaggtgaggaagctgcagaagaaaactttcaagatagcagaggttggttcatgaggtttgagaaaagaagcmgtctccataacataaaagtgcaaggtgaaacagcaagtgctgacctagaagctacagcaagtgatccaggagatctagctaagatcattaatggaggtgactacactaaacaacagagtttcaatgcaggtgaaacagccttctattggaagaagatgtcatctaggactttcatgactagagacaaggagtcaatccctaccttcagacttacaaaaaaataggctgactctttcgtcgggcactaattcaggtgctgactttagttgaagttgaagccagtgctcactgaccattctgaaaatcctaggacccttaagaattatgctaaa

SEQ ID NO: 253996 - DNA, 610 bp, Homo sapiens
ataattacaaaacaaggagaaagtaaaacaaatcactatatatgaagtctaatggaaggcagccaaagttctgctaataggcaaactcacagacttcaacagctttcttattttggaagaggaaaatagtaagaataaaacaaatctraaaaagaaaaaaaatggaagaaacaaaatggcaggagtaaaagcagaaatcacttaaaattaaagccagcagaaaaatagcataatttgggaggtaaaacagcaaaatacactcactacttataaatttaagttttaaaaatgtggaggcctaggctgtgtataacaaaactgaatgctgtaaaaatgtcagttcttctcaacttagtttattcatttttcaaaatgcaatcaatattctgatgagactggggtttttttttttttttttttttttggaacctggcaatataattataaggtttttctggagaataggtgagaatagctaagaacatgttgaaaacattctcatcatattaaattcatctaaatagtctagattcagaagaaaatttattttgagagcaaactgacatcaaaataaaaagaaccttagtcgacctgatacctattgaaatac

SEQ ID NO: 253997 - DNA, 537 bp, Homo sapiens
tttcagacttctgacctacttaactgtgagagaatacatttctgttgttttcagccacaaatttgtggttctttgttaaggtagccctaggaaactgatacagggtgggaactcctattttagtcgtgtgaagagtgaatggtctggaaaaacacaatgatgyattcatgtggctagggagactaagaccacctgtagtccctgaaactttgggggtaatctccttcaagttccctttagaaaaatatggctcctcttccagaaaccacatatcctgatagtctgaaatatctgtagttatttttaggccattgttccatttccatggaagtgtttgcaaaattagccggacatggtggcacgcagtagtcccagctactggggaggctgaggcgggaggatcacttgtgcccaggagttcatggttgcagtgagctctgatcacgccactgtactccagcctgagtgacagagtgagaccgtgtcccaggaaaaaaaaaaagaaaaaaagaaagagtttgcaaatattttgtttcc

SEQ ID NO: 253998 - DNA, 537 bp, Homo sapiens
tttcagacttctgacctacttaactgtgagagaatacatttctgttgttttcagccacaaatttgtggttctttgttaaggtagccctaggaaactgatacagggtgggaactcctattttagtcgtgtgaagagtgaatggtctggaaaaacacaatgatgtattcatgtggctagggagactaagaccacctgtagtccctgaaactttgggggtaatctccttcaagttccctttagaaaaatatggctcctcttccagaaaccacatatcctgatagtctgaaatatctgtagttatttttaggccattgttccatttccatggaagtgtttgcaaaattagccggacatggtggcacgcagtagtcccagctactggggaggctgaggcgggaggatcacttgtgcccaggagttcatggttgcagtgagctctgatcaygccactgtactccagcctgagtgacagagtgagaccgtgtcccaggaaaaaaaaaaagaaaaaaagaaagagtttgcaaatattttgtttcc

SEQ ID NO: 253999 - DNA, 546 bp, Homo sapiens
tgaactaccaaaaccctttcctctattttctcttcttgcctagctctttacttgggtgccaccacatgctctttataccactgtgtttcaagctatgggttacaatccacttatgagttatacaatcaacttaatggccacaatcagcatttttgaaattaaatttattagattagaaaatatcagtggacaacactcataaggttagggcaagttatttcatgaaattcctgtttcagtcataaatatatgtgtgtacactgtgtggaaatgtaaaacatttttttactgtggatcagtcaagagtacttgagagcagatggctttygtaggtcctcagagggacttggacatgctttaactctgattaccccttcctcaacttgtgtgttcatggtgtgcacgattttattcttatttttaagtcgacacaaatgagatgttattataatcatttattctcataatatacaatgtacaatgtctgtatttacctacatgtttgctaatttctttgcatctgtgaaattttttaatgtggtaact

SEQ ID NO: 254000 - DNA, 602 bp, Homo sapiens
gctggtcagtcaagcagtcagaacacacacatttatcaattaactttgatgtagtatatgggtgtagttcattgcacaccaaagcaatacaatagtaacattaaagacaactcatcacagatcgccataacatatataataatgaaaaagtttgaaatgtcctgagaattatcaaaatgtggaagagatacaaagtgagcagatgctgttggaaaaaaatggcgccaatggacttgcttgacaaagggctgctacaaaccttcaatttgtgaaaaatgcagtatctgcagcatgaagtaaagtgaagagcaataaaatggggtatctgtacagatattaaactgaattaaatatttccatttggttcaatgacagtaacttataagaatggtygattagagattgctgggagataattgctgggcaccaagccactttttagtaatagtttcaaaatttacagtgattggaatagtgagtttatatttggtggtgcatgaaaaaacaaggagatacatcataaaaaccttggaaacaatagaatcattatcttttatagcttataaaatggtgggctgagcttctgagtctacaaaattgag

SEQ ID NO: 254001 - DNA, 598 bp, Homo sapiens
aaatgatcatagggagaaggaagggtcactataaggagcaatgggaagccactgttctaagctggggagtggtagggggtgacttgtgacacaatcactaaggtattctaccatatcacccacccctggctgcctagaagagagtaaaagtggattcagaaagacttgttaggaggctactgagaaaatgccggcaagaggtgatggtagcttgggctaaggtgttggtagtgtgttaggggtgtggtgtgtctgtgaataggatgaggaggatggaaaaaaatatttgaaacatawaccttgattgatactgatttggattagattgtgtaaagaggctttaatgagacattctagaaattacacttccacgtaagtgtcactgccttctaagtgttatattatgaggttacacacccatttcaaagatgcttcatgggtgtcaacaattctgagaagcttctttcagaacttacgtcagaaccagtgtataaaccatagcagaaaaataggcttattgctatatagaaaatatttcataaatccccaaagctaaggaaacaaatatgtgtgtaatgttcttaagttgatgcagggt

SEQ ID NO: 254002 - DNA, 598 bp, Homo sapiens
aaatgatcatagggagaaggaagggtcactataaggagcaatgggaagccactgttctaagctggggagtggtagggggtgacttgtgacacaatcactaaggtattctaccatatcacccacccctggctgcctagaagagagtaaaagtggattcagaaagacttgttaggaggctactgagaaaatgccggcaagaggtgatggtagcttgggctaaggtgttggtagtgtgttaggggtgtggtgtgtctgtgaataggatgaggaggatggaaaaaaatatttgaaacataaaccttgattgatactgatttggattagattgtgtaaagaggctttaatgagacattctagaaattacacttccacgtaagtgtcactgccttctaagtgttatattatgagkttacacacccatttcaaagatgcttcatgggtgtcaacaattctgagaagcttctttcagaacttacgtcagaaccagtgtataaaccatagcagaaaaataggcttattgctatatagaaaatatttcataaatccccaaagctaaggaaacaaatatgtgtgtaatgttcttaagttgatgcagggt

SEQ ID NO: 254003 - DNA, 598 bp, Homo sapiens
aaatgatcatagggagaaggaagggtcactataaggagcaatgggaagccactgttctaagctggggagtggtagggggtgacttgtgacacaatcactaaggtattctaccatatcacccacccctggctgcctagaagagagtaaaagtggattcagaaagacttgttaggaggctactgagaaaatgccggcaagaggtgatggtagcttgggctaaggtgttggtagtgtgttaggggtgtggtgtgtctgtgaataggatgaggaggatggaaaaaaatatttgaaacataaaccttgattgatactgatttggattagattgtgtaaagaggctttaatgagacattctagaaattacacttccacgtaagtgtcactgccttctaagtgttatattatgaggttacacacccatttcaaagatgcttcatgggtgtcaacaattctgagaagcttctttcagaayttacgtcagaaccagtgtataaaccatagcagaaaaataggcttattgctatatagaaaatatttcataaatccccaaagctaaggaaacaaatatgtgtgtaatgttcttaagttgatgcagggt

SEQ ID NO: 254004 - DNA, 540 bp, Homo sapiens
agtatatatactaagagtccaggtttttttttaagtaattgatttatgggaaaaataggatatacaaaatgttaaaaataaattctggagggtgggattataggtattttaagttttttcttttctaaaccttatacaataaacattttaaaacataaatttataattaataaatataagctttaaaaaaaactccatagggcagagtttgtgtttaccagcatataaacaasaagcatttaaagaaacatgggtttttccttagtggagtagagaatttgtaaaagaggaaagcacctctcttgattcctcatgtttctacctttttcccctatccttgtcccagatctgaaagtagtggggaaaaaaaatcaacctggctcttttcctatgccaaggtgcttagtcaatgtttagttttactgtaggggaatttcacatagatcaggcttcccaataccagaggttcctggctctgccactgggtctgtaccctctttggcattcacttcctgcccattacctccctgggtagctgca

SEQ ID NO: 254005 - DNA, 529 bp, Homo sapiens
cccactagagagagaagcagtgtcacctgggaagaggtcgttttcagttcagatctttttcagtgcaattgacactcaaagctgagtgggagtttgaggacagagctaggaattctgcagggcaccagcaaatggtttggtgagggagggctgtaaaggtgggtcagggagaaggaagcccagagcattatggggattagagggtctgtcctttgaaaggctgtgttgggcaataacaggaaagctggttaagtggtccagacgcttgggttctgaccgtctcctggggtatagtggctgtaccatttatctgtggcctaggggaggtttccctttaagtcagaggtcataagctagcagccacgatctagcctgcagaagaaatgttttgtttcactcacattttacaaatatacattagttgctaatatttaaatcagatatcagataaaaatacacrttttcattttttttttaattggaagatctagaaacctcagttgctcagtatcacagggcaatgggctgg

SEQ ID NO: 254006 - DNA, 598 bp, Homo sapiens
actatataaaaggttctattyttgttcagaataattagatctttaacttcattattagtgatatataacttcatcattaatggaccatagtattttattgtttgaagaagagttgaggcttctactagacaacaacaaactgaaattcagaatttcagagtttctgccagaggtgtattctattcaaccgtgccaactcctttttcagagctgggtctcagatttattgtggccaggctcccttctctcaagaaaacaccactatctcctttaggatcatctttctccaccttcttagcttggaagtcccccttttaaaaaagtttcctactgtttaataccattgactcttcacctatcttcaaatttattatagatctctttaaaacgattctacagcccaaccacagctcattgtacacatcccctcctgctagtgcattgatgatttaactattttttactgttctttttgagggaaatcggaaagtttaacaaatgatggtaaagaagactataaccatggtgggggcaaagagagaattacatgtagaggttgtgtttagacatagcaaaacttacttttctacatttgagg

SEQ ID NO: 254007 - DNA, 499 bp, Homo sapiens
tttcaaaatatttcataataaaaagatttttgaaaaattaaaaaacaaaactttggtgctctcaaataaaataaaaaatgttaacatgcacaggggattcagattttgtgatcctgaagttgtacgatcggggttttcttttaaagaatacaaaattaagaattcaatgttaggtacaaagcctaagatggtgctcatgcaagtgaaggcaactgaaggtmaagttttgttaccttcatggtaaatccaactccatgatcacagctttgcagctcctgaccctctggtacctgcatatcagtctagctttaactctgctgggcaccctgtaagtctactctctgagcgtccccacactggcttcctcccgttcttccaatgtatcttagtcgcttccaccccttggctcacactgttctgcccagaaacttctctgcactcccacaattcttggaattgttctttttcctccctgtttcagatatattagttgctgctt

SEQ ID NO: 254008 - DNA, 568 bp, Homo sapiens
taagaatcccagaaaaagggagcacattgtatacatttacatcctgacaacttctgrgcaggatctggaacatgtaatagatggctactaaatacatattgcactggaggctgctgctaacatgtatggtatctttgggcaagtttggaaaatgcccaatataggctaaaaattatacaaagattcccttccttgcgtgtccatgcagtttctgtaccaggaagcatggctggatatgcaaacagtgggtcaggcttcagtcccacacaactccatggccgggtgcccctatcagggtgtaatctgaatgcatgaccttcctgcaaaccaaagcatgcttagtgtgggagagagggactcaggacccacaagtgaggcttctccgtatgctgcagcctcttcctgactaacacagcttgcccaggtttgggtgtgcaatgcacacacacaacagcagctccctgctatcatttggattcattaaaaattaaatcatctcataagcttacaaatgttgatttttatttactttttatttttttgcattacaaaactttcatatttcccc

SEQ ID NO: 254009 - DNA, 620 bp, Homo sapiens
acggtcatctatgtgccaggcattttctaggtgcttaggttatcatactgtacaaagttgctgcctccataggcttagggagggagggaagaagagacaacagaaataaatcaactcaaaatatagatgtcagacagcaacaaatgctagacagaaaaataaagtagggcaaagtggataggaagcggtgggtggtagtgggactgatcctttatacagggtgtgtaaagggaggctttgctgtgagggatataccatatgcatatttgggggaagagcattcttggcggtgataacagcaggtgcaaagtccctgaggtgggattgtgtttagaacattcaagcaagaaggccagggaggctggattaaatcatctccaaatgcctcttaaaggaggtggtgctaactttacttaaaatcttagataagtggtgaaaaaaagctttcactctggctgggcaggcattctaaatcatctctttacaagcwatactttctgaataatgtatctaattaaatgtatcaaaaagagttgtctggcatttattactgccagatctgtaattcaatgaggatttgaatctctttcaatgtttctatagccaaaaacgatttttca

SEQ ID NO: 254010 - DNA, 508 bp, Homo sapiens
cctggcgatcttccacactgcatcgtggatcttaatcagctttgttatagatggcctgagccaggttagatgaggatgcaaatcaaaaagcagggacaatgagtataatgtggcccttccttttcccagtattactagctcattgctacactctttgcaggtgtggcccactttctttgagagaccccttgtgaggaaagcctttgagaagaccctcaaggacctgaagctgagctatctggacgtctatcttattcactggccacagggattcaaggtttgagtgactccctttctcagcctctagtttctgagctgttgcaggaattcagggacccccaacagagagactggctgaagccatggcagaagaacataaattgtgaagatttcatggacatttcttaattccccacattaatrtttttataatttcttacgcctgtctttactgcaatctctgaacataaattgtgaagatttcatgaacatttatcacttccccaat

SEQ ID NO: 254011 - DNA, 639 bp, Homo sapiens
tgttccttcaacaaacaaaaaaactatgaaatttaatttcatcatggaaaatagaaaaataaaacatttctgttttcattgttactatcttatgataccagaagggtaccagcacccaataccaattcatttacttgttctaaaataggtacattaattcccagcagtgctaatttctctctaaacaaattcctgtctgtctctatacacatgactcatactctttccttcctctagtgatccaagaaacatgtttattctattcttttgcatctacatctgggaatcttattagcagaagtaaaaataaatagcttagcttaaatagctcagcttagtgaatctgcctttcccagcaaattcacacttactaacatcctgaaaatgctttgtagttatttaaaagactttgaaaattttggaaattttaattctcattttatttaaacatctattatcaaactggagcaaaaayctcaacaacaatggtataaggaaggctgcaagtgtcccattaatatcctctcatccttaaccacttctgtgtatgtggcccaggcttccagctcccaatacttgggtttccttccctgacagctttttatagccattttgcaacaggtcaaaagtgccaggagc

SEQ ID NO: 254012 - DNA, 631 bp, Homo sapiens
gggaaaaaaataataaataaataaataataatttttaatagctacaagtactctgaagaaaattcaacaggtaatgtgatgaaaaatgagggagaggcatttaacaagtgtttgttgaatgaataagcaaacatttagtttctctctcagagacatagaaccattatcaaactaaataaaaatgagaaaatgattgtgttaacattttgcttaaattaacatattaaawttagatcacgtgtttcaaagtgaattctgtgctaacataaattctatgttaatcacggaacagaggatatgatttattttatttgccactgataaattttatcacagatactgatagattctgtcacagcactaacattactcatagctcatagaattgcagaagtaattttttgtacactgttactgttcatacaatttttattatgatataaaagactatcatagacatagttagccaattctggtcaaagatacacattccaaaccattttaaaattgaaattaatccaataaattataatagcattgaagattttagttcctgaaatagtttattgttgagtgtttacggtataacatgagttatcacaaaataaataggatcttttaaaaattagtg

SEQ ID NO: 254013 - DNA, 539 bp, Homo sapiens
gccaagttttaaccttttcttcccacaccccagtatatcactcacaaagcccttgagtggttctcaccctactttggagaccactggctaatgtattacattcaaatatctcagctggacatgcaaggactttcctggtcaccctgagcaatctctcaattcctcaaagcctactcatcagccacgttgaacatttcatcatcctcgaatctggttatagctttgtctttcacattttctatctagaatactcttacccacacactgccttatccaaaaacatcttcacctagtacactcttcttcatccttcaagacatgcacaaattagagcactttgatgttctttctgcctgcccagkgttctgggcactctgttcacaccttttaatgccccttgagccacactatggacacatatgtctctccctatgctggaagccccttggagccaaagaccatttgagtaatcacagagcctaacacagagacttcccaatagacagcaccacaaaaaatattttcgggatattacaact

SEQ ID NO: 254014 - DNA, 586 bp, Homo sapiens
agagaaaatatttgccaaatattcatwtaacggggactaatatctagaatacataaggaactcaaacaactcaacaggaaaaaacaacccattaaaaagtgggcaaaggacatcagtagacctttctcaaaagaagactacaaataaccaacaggcttatggaaaaaatgtccaacattattaataatcaaagaaactcatatcaaaaccacaatgagatatcatccatcataccccagccagaatggctattattaaagagacaaaaaaataacaaatgttggctgggatgtgcagaagagaactctttaatacactgttagtgggaatataaagttgtatagccactgtataaaacagcatggcaatttctcaagaaaactataaataggattaccatctgatccagcaatcctgctattgggcatctacccaaaggaaaatacatcaatatatcagagatacctgaactgccatgtttattgcagcactattcacaatttcaaagatagggaatcaacataagtatctatcaacagatgaaaagataaagaaaatgtagtgtatatacagaatggaatatgat

SEQ ID NO: 254015 - DNA, 586 bp, Homo sapiens
agagaaaatatttgccaaatattcatataacggggactaatatctagaatacataaggaactcaaacaactcaacaggaaaaaacaacccattaaaaagtgggcaaaggacatcmgtagacctttctcaaaagaagactacaaataaccaacaggcttatggaaaaaatgtccaacattattaataatcaaagaaactcatatcaaaaccacaatgagatatcatccatcataccccagccagaatggctattattaaagagacaaaaaaataacaaatgttggctgggatgtgcagaagagaactctttaatacactgttagtgggaatataaagttgtatagccactgtataaaacagcatggcaatttctcaagaaaactataaataggattaccatctgatccagcaatcctgctattgggcatctacccaaaggaaaatacatcaatatatcagagatacctgaactgccatgtttattgcagcactattcacaatttcaaagatagggaatcaacataagtatctatcaacagatgaaaagataaagaaaatgtagtgtatatacagaatggaatatgat

SEQ ID NO: 254016 - DNA, 586 bp, Homo sapiens
agagaaaatatttgccaaatattcatataacggggactaatatctagaatacataaggaactcaaacaactcaacaggaaaaaacaacccattaaaaagtgggcaaaggacatcagtagacctttctcaaaagaagactacaaataaccaacaggcttatggaaaaaatgtccaacattaytaataatcaaagaaactcatatcaaaaccacaatgagatatcatccatcataccccagccagaatggctattattaaagagacaaaaaaataacaaatgttggctgggatgtgcagaagagaactctttaatacactgttagtgggaatataaagttgtatagccactgtataaaacagcatggcaatttctcaagaaaactataaataggattaccatctgatccagcaatcctgctattgggcatctacccaaaggaaaatacatcaatatatcagagatacctgaactgccatgtttattgcagcactattcacaatttcaaagatagggaatcaacataagtatctatcaacagatgaaaagataaagaaaatgtagtgtatatacagaatggaatatgat

SEQ ID NO: 254017 - DNA, 608 bp, Homo sapiens
atagaacccaaatatcaacagcatcaacaagcagatttgaaaccccccaaaaacacgctattattaaattgttaattgtattagaattgcctagtttaattagtaatattcatgacaaaactagtttgccccttatcatcaatcgtgctccaggtaggagtacaaacactgggtgtaaaaagcagatgcaccccagttggtgtgcaagcccccgtttgcaggtaattaattcacagtgtggcggcgccttttcaagccccctctgcaagccgcgccggcctcctccctctcgagcggggtcaaaccacttagtttatttcacccgctggcactttcttccctgtcacgaattcagcctggcttcctttggcctgagacagcgtcttcaggcgggtcggctcgsacctgcccagtggggcgcccacctgcacccgcacccgcacccgcacccgcgggaaggggcggcgctggccggactctctcgggtggactcccggagcggcggcggcggcggcggtggcagactgcgagtcacgtgcgacagaggaggcggagcacggcggccgggtgggtggagaaaacaaagcccccagctgtcagcagaggaa

SEQ ID NO: 254018 - DNA, 608 bp, Homo sapiens
atagaacccaaatatcaacagcatcaacaagcagatttgaaaccccccaaaaacacgctattattaaattgttaattgtattagaattgcctagtttaattagtaatattcatgacaaaactagtttgccccttatcatcaatcgtgctccaggtaggagtacaaacactgggtgtaaaaagcagatgcaccccagttggtgtgcaagcccccgtttgcaggtaattaattcacagtgtggcggcgccttttcaagccccctctgcaagccgcgccggcctcctccctctcgagcggggtcaaaccacttagtttatttcacccgctggcactttcttccctgtcacgaattcagcctggcttcctttggcctgagacagcgtcttcaggcgggtcggctcggacctgcccagtggggcgcccacctgcacccgcacccgcacccgcacccgcgggaaggggcggcgctggccggactctctcgggtggactcccggagcggcggcggcggcggcggtggcagactgcgagtcacgtgcgacagaggaggcggagcrcggcggccgggtgggtggagaaaacaaagcccccagctgtcagcagaggaa

SEQ ID NO: 254019 - DNA, 601 bp, Homo sapiens
tccttgattaacctgtaaattaggtggatcayaattcctggcactcagatcaccagcaaatctcttttgtttttcattttattattgtaacttacagaacagtatttatataccaataccacatattcatatacttgtatccccagattcctctaaaactggacaaaaggagatccagttgggtctatgggagattccaaactattcttgtgaaatttaaagtttttaaaagtaacaaaaagagtccatagataattctttttgagttctaaaacctcacttctttatgtctgctttcctgtcttttagaaattatagtattgtatcatagaatgaattctgaaattggagcaagaatgccaagtagcttgagttttaaaactggttctgctgctaactgggtgactttagagatgttattaacatccttcatcaacatccttcaaattgagttttttcatctgtcaaatagagaaagcgaagtctgacaagagttacaagatcagataacatctgtgtacatctttatgactgtaggacgtacagtgatgtcctaagacttgtttaatgatctgcttcatatagggctgcagttgactat

SEQ ID NO: 254020 - DNA, 601 bp, Homo sapiens
tccttgattaacctgtaaattaggtggatcataattcctggcactcagatcaccagcaaatctcttttgtttttcattttattattgtaacttacagaacagtatttatataccaataccacatattcatatacttgtayccccagattcctctaaaactggacaaaaggagatccagttgggtctatgggagattccaaactattcttgtgaaatttaaagtttttaaaagtaacaaaaagagtccatagataattctttttgagttctaaaacctcacttctttatgtctgctttcctgtcttttagaaattatagtattgtatcatagaatgaattctgaaattggagcaagaatgccaagtagcttgagttttaaaactggttctgctgctaactgggtgactttagagatgttattaacatccttcatcaacatccttcaaattgagttttttcatctgtcaaatagagaaagcgaagtctgacaagagttacaagatcagataacatctgtgtacatctttatgactgtaggacgtacagtgatgtcctaagacttgtttaatgatctgcttcatatagggctgcagttgactat

SEQ ID NO: 254021 - DNA, 681 bp, Homo sapiens
tgcctggcccaggcactgatacagcacctgcctgaggcactagatcatgcaagaacaagaagaaaatagacttaaaacacagggagtgaaccaactataacaaccttttctttgagcctaatcaaagggacttcccctttttaagactgtagttgagtcatgcttgtgagtatagaaagaccatacatcaacagttgtgaacagaagtcggaatcatttcttctcttatggccctggcacctaaaagttaatgccaaatgatgcccaaagaggggtctgtgatgagcaaagccttctcctggccaggccgtggtgttactgtactctggaccagaggtacagctccatgacactttctcactcctgatgggaacaaatgaagctagttgtgttctacccattttgaatgtctggcataatcagagggttgacagagagggtctcacaaaatcagtacataattcttgaaatatatgcccttcattatttatgycgaataacaaattaaatgaatcctagtgttttagagctgagagcaaccttggagatgatctcatttaatgccattttatagaggaaaaactgaggcatggattttctttttttttttttttttttttactgaaaccactagtaattgcaaagttttaaatgtttatagcacatcatttgcttttgaca

SEQ ID NO: 254022 - DNA, 657 bp, Homo sapiens
gcaccaaggatggacttcacatccttagttttgcttgcttgggggtaaggtctaagctatatgtttgtgtccattgtttggtagtaaggtctaagctatacattagtttatctcagttgggatcatgtgagtgaatggctcctttaccaagcgcatgttaatctgtcaccatagcagattctagaaagagcctgaagcacagagagtgtgtgtgtgtgccttgcaactcaaggtgtggtctttagaccagcagcatcacctagaagattttagaaaggcggattctcacacccctcaacggctagacgtactgaatcataacctgcattgtaacaaaattcccaggtgattcataaagtcaggaaagcgctgtcacagatgaacctgatagttaaaatgcttgttttcctctaattttcagaatgagaaaaacaaatgatcttcaaactctatatgctccccaagaaaacagcrgtcaggaatttttccacccctgctgtcaatatcattgccttcacagccctgtgatatgattattttgtgtttattacctcggcggtcctaaacctttttggcaccagggaccagttttgtggaagacaatttttccatagactgggggtagggtggaggatgagggatggtttcgggatgaaa

SEQ ID NO: 254023 - DNA, 518 bp, Homo sapiens
tgtttttaaacaaactggcatttttaaattttagctattcgaattaaataaaaaggagatgagtttttatgaggttaaattgctattccatatgatagaaaatttgggtatattagatccttttgtaaaacataccagattaccactcttattttctgaactatcttgcctcttttttttttcttcataacaacaaaataaatgtccttccaggaagtaccataatttttagggtttttttgaggcaaacacttgactgstatattaatctattctcatgctgctaataaagacatatctgagactgggtaatttataaaagcaagaggtttaattgactcacagctcagcatgactggagaggcctcaggaaacgtccaaccatgatggaaggggaagcaaacacttctttcttcacatggcagcaggcgacagaagaatgaaaaaccaagtgcaggggaagccccttataaaaccatcagatctcctgagaactcactatcacaagaatagcatgg

SEQ ID NO: 254024 - DNA, 551 bp, Homo sapiens
atgagcaggcagtgtagagtcagggctgctcccaccactatgaatgtgttccacccctccagtgggtgatggatgaggccagcactctccctccattcactcaacgtccaggtgaaggaactcctgatgtcactgttgttacaaagcacacagtctacaccaacattacattgctaaaatgtgttacaggccatcgttcctttagatcaggaaagtaggaggccattagcaaccttggtgaaagtagtttcaaaaattagttgagaggaaagatagtctgttcaacaaatggtgtcagaacattggacaatcataggaaaaaaccttgacctaaacttcatgtaggaaaaaaaaaacytcatgacttggagttaggcaaagagttattagacatgacatggaagacatgatccctaagagaaaaaaatcaatgaattgaactttaacaaaattaaaaactgtaactctgagagcaatcctgttaagaggataaaaagacaagccacgaaagggagaaaatatttgcaaatcatataacttatatggaactt

SEQ ID NO: 254025 - DNA, 551 bp, Homo sapiens
atgagcaggcagtgtagagtcagggctgctcccaccactatgaatgtgttccacccctccagtgggtgatggatgaggccagcactctccctccattcactcaacgtccaggtgaaggaactcctgatgtcactgttgttacaaagcacacagtctacaccaacattacattgctaaaatgtgttacaggccatcgttcctttagatcaggaaagtaggaggccattagcaaccttggtgaaagtagtttcaaaaattagttgagaggaaagatagtctgttcaacaaatggtgtcagaacattggacaatcataggaaaaaaccttgacctaaacttcatgtaggaaaaaaaaaacctcatgacttggagttaggcaaagagttattagacatgacayggaagacatgatccctaagagaaaaaaatcaatgaattgaactttaacaaaattaaaaactgtaactctgagagcaatcctgttaagaggataaaaagacaagccacgaaagggagaaaatatttgcaaatcatataacttatatggaactt

SEQ ID NO: 254026 - DNA, 507 bp, Homo sapiens
aaattttgataagacatgtcaacctcagagtaattttagtgacattttggctagcaaaaatgactgttacttaactagatcctggtactccatgcaaaaggcaaaaatctatggcaatgccatggatttacaacgtggtaaaggtgcactaagcatagtgtagatgtatttgtatatgcaacacagtgcttgtccctggggccacagtacccttaaaagggaatacaagtttgtgaggggggatgtaacaccatcaaactgcycagtaagttgttctaagtttcactctgatcaatgatcaattgataattaaggttggtccccaataatctctgtagtcaacagagggccctggagagttagttacaatctctgtaccaataacaaactcattataaaccaaacaatttgcaactcttaacccagtcatttggctcttacaacattgtaaagagaaagaaataaagcattagtccatttaaaaataaatgtgtcaccctcatgatc

SEQ ID NO: 254027 - DNA, 612 bp, Homo sapiens
ggggcctgagcccaagttttcatctagggagtttactaagctgtctttggatctccagaataagctgtatcctgaattccaaactccccatggccactttgagatattgaatcccttcagttgtagatcacattctttagtgtgggaggtccatagctttctaggaataaagcagcttgcagcattagcagaaggtcacaggccattaatcctgaggtggagcctactagatattaatctttcagagagctctgcctccgccgccacgcactgcctcaattaatggtcttgggttgggctcagggccttctctaggggcagcagaggggaggcccagactgcctcccctctcctgtgcaacttccccagggcaagactgccaggaagcacagagctgagcacacaacagggaaaccaaaaaccaaatgagcgtatctggcwagtaaaggaggtcagattacactgaatcttgggttaagtctggtacaactcattcttctccttcagaaagacaaactaccaaatgacccatattgtatatttaaggacttcaaaaaaattatagctcactgctaaatggatttgggtggtatatattaagaatggtaatga

SEQ ID NO: 254028 - DNA, 586 bp, Homo sapiens
tcatgcttcagtttggaaagagaaaaaagtcatactaatttgcttctttttcaatgtagtgcttgaattgagatatataaatttagcattttttataactatcactactatycgcatcaaaagaagaactatgacatcttttagaaaagggaacgaattgtcatttattggaaacattttagatccccagaggtataagtttcaaaccagtcttagcttttcaagttgttgatcagacccttctcttaatagagagataccacagtcactagagataccctgaggttcatgtcatcccaaaacccacagcactcagaagctaacctctacacccactcacactgtgagtattcagttcggtttcattttactgaaaacctgtgaaacctctttttataaaaatcaggcaattaaatcccttttcatcacacaattattgagccttgttccccatggctcaccaaaatgtgctcaattttgtgagagaaagactgtactccataactgactattcacgtcccatctttttggctcttccccaaagcagaatccttactgttggttgacagtaatctctttttaaaaa

SEQ ID NO: 254029 - DNA, 586 bp, Homo sapiens
tcatgcttcagtttggaaagagaaaaaagtcatactaatttgcttctttttcaatgtagtgcttgaattgagatatataaatttagcattttttataactatcactactattcrcatcaaaagaagaactatgacatcttttagaaaagggaacgaattgtcatttattggaaacattttagatccccagaggtataagtttcaaaccagtcttagcttttcaagttgttgatcagacccttctcttaatagagagataccacagtcactagagataccctgaggttcatgtcatcccaaaacccacagcactcagaagctaacctctacacccactcacactgtgagtattcagttcggtttcattttactgaaaacctgtgaaacctctttttataaaaatcaggcaattaaatcccttttcatcacacaattattgagccttgttccccatggctcaccaaaatgtgctcaattttgtgagagaaagactgtactccataactgactattcacgtcccatctttttggctcttccccaaagcagaatccttactgttggttgacagtaatctctttttaaaaa

SEQ ID NO: 254030 - DNA, 586 bp, Homo sapiens
tcatgcttcagtttggaaagagaaaaaagtcatactaatttgcttctttttcaatgtagtgcttgaattgagatatataaatttagcattttttataactatcactactattcgcatcaaaagaagaactatgacatcttttagaaaagggaacgaattgtcatttattggaaacattttagatccccagaggtataagtttcaaaccagtcttagcttttcaagttgttgatcagacccttctcttaayagagagataccacagtcactagagataccctgaggttcatgtcatcccaaaacccacagcactcagaagctaacctctacacccactcacactgtgagtattcagttcggtttcattttactgaaaacctgtgaaacctctttttataaaaatcaggcaattaaatcccttttcatcacacaattattgagccttgttccccatggctcaccaaaatgtgctcaattttgtgagagaaagactgtactccataactgactattcacgtcccatctttttggctcttccccaaagcagaatccttactgttggttgacagtaatctctttttaaaaa

SEQ ID NO: 254031 - DNA, 570 bp, Homo sapiens
tatcatttaatgggaccattcttttattcagaggaagggtcctgggatgcatctttcaattattagagcattgggatgtttggattctgtctggtcttgctctgtctgtgtttatgacagtatacttgcaagctaatttctcctctctaggaagtaggtaactatgccccagagagttaacaatgtaagtaaatcgatacatctattgtgattatttttctttatgaatraggcagaaaatatattgcctaagctccttcttagaagaatctgaatcaaagctgatgggatttgcatatcagactccagataatctaggaatcaggtagagagtgggcacttcagtccccagctggtgtattgcagcaatatcttgggacttatgggtgtaattaaaccatccctattagtaattacaaaaaaggactcactgcccttaaacgtgactgtaacatatcacatctttgtaaaagcatgaagctatttatttaatcagcaaagtccatgtagaaaatgttttattaatattccaattttctgattcaaccctttgtgtaataaaatatggtg

SEQ ID NO: 254032 - DNA, 636 bp, Homo sapiens
ggttgtcttgttcttgttgagttgtaagaatactttatatattctggatattaaccccttataatatatgatttgcaaatattttttcttaccacttattactctkttgatcatgtcctttgatgcatagatgttttaaattttgatatagtgtgatttacgcatttttacttttgttgtttgtgcttttggtatcatatccaaaaaattgttgctaaattcagtattgtgaaacttttcctttgtgttttctttccaaaggttttgtagttgtaagtttcatggttaggtctttgagccattttgaggtaatttttgtaaatggagttaggtaagggtccaatttcattcttttgcatctagatattcagttttcccaacactgtttgctaaagacactgtcttttccccactgaatttaacccttgtcaaaaatcatttgaccttctatgtgaggttttatttcttggctttctgttctcttctattggtctctatgtctgtctttatgccagcaccacactgttttcattacacttactgatcttgattctccaaatagtatgagattccaggggcaagtgccagtgaacccatgaaaacgttgaggttcaaagaaggaaaatgacagctcca

SEQ ID NO: 254033 - DNA, 585 bp, Homo sapiens
ctctgtacatggcagactagctgaggcagatggcgtgtgcaggagaaaatggtgaggagactggtttcctcacaacaaatttccattgaaagttttgttaggatgtgacggggctgcttcccggacctgaacaaaatagagatcatccatatgaaaagagagagaacacagcaagcattctgcatgagtaatgcatgcaactctgtgataccaggctgtatttattctatagacattgcacatcatcagtattttaagagcaacatcttctatataaaaatactcaagagccttatgctttatactgtggactccaatgtaattacactctcttgttgactagatgtaagaagcttgagttgattacccaaggcttgttccctrcatttctgtttctctctcatttgacaggtaccatatccatttgttctattatcttctaagtttgaattggaaaaataaggtaaatcagagcagtctttcttaagttataaaaccaaccatgtgaagatgctttgaatgctgttctgcttgtatataactaagaactagcgcctcacggtaattttgcaggtgattagcctg

SEQ ID NO: 254034 - DNA, 541 bp, Homo sapiens
cacataacttcaatgtacgaaataggaaaagatggtgggggagggggtttcttagctggtagcccctccttactacccgcttctttctaatctttaggarctcttatgatagaccttgagataactgtaaagaaccaccctaggtttacccacagcacagttaaagacttcaagttagttctagtccccaagaactaacagagacagaggtagcatctagaagctaggtcttttgacatttgctccagtgctcttttcactccactacaattaatttactttagaagagaagctaatcaaaggtaggaaatgtttggagtagcaacagtttttttagtaagcagtgacatcctcaatattctccttttgggtccatgaaaaagatggttaaacatatgttcttaacccccctccaagtcgctgaggcattctgtgctgcactgccaaattttgtacattctagtgactccttcttctccctaatgcattgctaaaaataagaaaactcacacaaaggcatatgttgtggtttgtctttgat

SEQ ID NO: 254035 - DNA, 596 bp, Homo sapiens
tctggcctctggttcatttggccagcaggggaacatttgcaggaggcctctggtagggcatgagtgaagctgatgagtgaagtttatttcccatctcccacatttcaggattgctgaagtctagccatcttcctccaccagasgtcacagtcctgtagaaggaccctttccacccagcctctatttttagattctataactgctccttcctcctgtccctcaggccttggagtggtaacagctcccccagggttactagccctgcaatactacaccatcccctgcagcttccccataactctgcccacgcctttgcagacggtccctttatgaaacctaaggttactcagctggaggatgccatctgtgtcttgctggggccctgatagaagtttcttaggtgacatgtagtaattataatgccttacattttgagcctttcaggtagtaagagggaggacttaactggaaaaagtcctctgcattgcctaatttgtagttctgtttgactttcaaatatacccttggccacagtagcaggagctgaagactatatacatatgcctatgattctcaatgtttatgtgcataagaat

SEQ ID NO: 254036 - DNA, 644 bp, Homo sapiens
aatattttataacaaagaaacttgtgccttggggtccttattgtaggaattggtgttgattttataatcccataatgtgtgaacatgatctatagacatgtttctctctgagcaagagatccatgcattgtagtatgtgcatggataggtttatatagaatctttgattctcctgaaatagtaggcaagacttgggggaatgcatgtctatatggagaagatctattttttcattaatgctctatgaccttacaaaattcaagaagttagtgtgcataataatcttgtagatgtacatgaggctattagtgaacataaacaaaaaatctggttgccagtgtctgttagtcagttttcacactgctgtaaagaatacctgcaactgggtaatttatgaaggaaagaagttaattgactcacagttctgcatggctggggaggtctcaggaaacttcttagaatcatggcataaggcaaaggggaagcaggcaccttctgggaccttgctggcaccccccataatacagtcctctcccactaggtccttcccttgacacaattcgagatragatttgggtgggaatacagagccaaaccctatcacagtacttaaggaataaagccatttgttatcggatataaca

SEQ ID NO: 254037 - DNA, 576 bp, Homo sapiens
taatatataaatatatatttatatatattctttatataatacataaatatatgtttatgtattctttatataatatataaatatatatttatatatattctttatataatatataaatatgtttatatatttttatataacataaatatatatttatatatttatatatattctttatatataaagaagatatatattttctgtacttcataataaaaaatatatattcttatatatattctatatatacaaagtatatattcatacgtatatattctttatatatatatataaagtctatgatagcgtatgtggatgatttatgaacaataataataaaaatcccagtgcccatttctcaagccaagaaatagaatgtcatgagactctagaagctacctaaggcctttccttcatagcatcctgataccccttccccaggtaacttctaacctgaattttgtgttatttccttaaggtctttctctctctmtctatatatatatacatatatatatatccctaaacaatttattatttcttttcattttgcctgattttgaactttatataagt

SEQ ID NO: 254038 - DNA, 576 bp, Homo sapiens
taatatataaatatatatttatatatattctttatataatacataaatatatgtttatgtattctttatataatatataaatatatatttatatatattctttatataatatataaatatgtttatatatttttatataacataaatatatatttatatatttatatatattctttatatataaagaagatatatattttctgtacttcataataaaaaatatatattcttatatatattctatatatacaaagtatatattcatacgtatatattctttatatatatatataaagtctatgatagcgtatgtggatgatttatgaacaataataataaaaatcccagtgcccatttctcaagccaagaaatagaatgtcatgagactctagaagctacctaaggcctttccttcatagcatcctgataccccttccccaggtaacttctaacctgaattttgtgttatttccttaaggtctttctctctctctmtatatatatatacatatatatatatccctaaacaatttattatttcttttcattttgcctgattttgaactttatataagt

SEQ ID NO: 254039 - DNA, 574 bp, Homo sapiens
ggaataggggttgagtataagcaaactcctttcctgtcattttcagtgatcaaacgagaggaaattctgatgtgtttatgttaaattgtcaattcagtaatcattgtttggacacctattatgtgctagagtgtattggtgataaaatataacatgtgttgaacrtgtactgtgtgccaggcactgttctaatgacttcacaggatgaacttagttaatccatgcagtgaccctataggatagggtcattattgtttccaatgtatagttgaagcacaaagggattaaagtaagtctcttaaagccacatggcttaaaagtggcagagtggcacatcacaagctgttaaccactacccagtactgcttctccggtggtggctttcttctcttaagatgcatgtggtctattgcgagaggcagttaatttccaagcagtattataagttgctgtggtagctgtaggatggtatcagtcccccaaagaagtaaggacacatggctttaggaccttcatttggccacagctgagctttgttcctacaaactgcatcgtttgaaaagcacattatatt

SEQ ID NO: 254040 - DNA, 574 bp, Homo sapiens
ggaataggggttgagtataagcaaactcctttcctgtcattttcagtgatcaaacgagaggaaattctgatgtgtttatgttaaattgtcaattcagtaatcattgtttggacacctattatgtgctagagtgtattggtgataaaatataacatgtgttgaacatgtactgtgtgccaggcactgttctaatgacttcacaggatraacttagttaatccatgcagtgaccctataggatagggtcattattgtttccaatgtatagttgaagcacaaagggattaaagtaagtctcttaaagccacatggcttaaaagtggcagagtggcacatcacaagctgttaaccactacccagtactgcttctccggtggtggctttcttctcttaagatgcatgtggtctattgcgagaggcagttaatttccaagcagtattataagttgctgtggtagctgtaggatggtatcagtcccccaaagaagtaaggacacatggctttaggaccttcatttggccacagctgagctttgttcctacaaactgcatcgtttgaaaagcacattatatt

SEQ ID NO: 254041 - DNA, 537 bp, Homo sapiens
aggaagagggaaagagggaaggaagaaatcaaaggtttttgaccaagattgtatcttagagacattaatttaagcatcatgcaaaagaacgtgtagttgtttcatcctggtgtgcctctacctcactttaggagatcttctaaagtttctktctttgggccaagaagacactcagttttgggtggcccttaggaattcactctgctaatcgtggagaagacagggctgatggaggaaaatgcctgtacacatttctctcatggcaccccttttcccagtagcatgataaatcctggaagtcctgatgggatattttaatcacagcttgcagtccttcagatcccaaccattgacagttgattcactccttttcatgcctgctgcctgtctccagttatggtagctcttatgcatgagtctaacattagcagacaaagcatgatggattgctcagggttcccttcatctacagaactagagattgcttcctttttcagactctcaggacccatgtggaacaccatcatgaatgaaaga

SEQ ID NO: 254042 - DNA, 537 bp, Homo sapiens
aggaagagggaaagagggaaggaagaaatcaaaggtttttgaccaagattgtatcttagagacattaatttaagcatcatgcaaaagaacgtgtagttgtttcatcctggtgtgcctctacctcactttaggagatcttctaaagtttctttctttgggccaagaagacaytcagttttgggtggcccttaggaattcactctgctaatcgtggagaagacagggctgatggaggaaaatgcctgtacacatttctctcatggcaccccttttcccagtagcatgataaatcctggaagtcctgatgggatattttaatcacagcttgcagtccttcagatcccaaccattgacagttgattcactccttttcatgcctgctgcctgtctccagttatggtagctcttatgcatgagtctaacattagcagacaaagcatgatggattgctcagggttcccttcatctacagaactagagattgcttcctttttcagactctcaggacccatgtggaacaccatcatgaatgaaaga

SEQ ID NO: 254043 - DNA, 537 bp, Homo sapiens
aggaagagggaaagagggaaggaagaaatcaaaggtttttgaccaagattgtatcttagagacattaatttaagcatcatgcaaaagaacgtgtagttgtttcatcctggtgtgcctctacctcactttaggagatcttctaaagtttctttctttgggccaagaagacactcagttttgggtggcccttaggaattcactctgctaatcgtggagaagacagggctgatggaggaaaatgcctgtacacatttctctcatggcaccccttttcccagtagcatgataaatcctggaagtcctgatggratattttaatcacagcttgcagtccttcagatcccaaccattgacagttgattcactccttttcatgcctgctgcctgtctccagttatggtagctcttatgcatgagtctaacattagcagacaaagcatgatggattgctcagggttcccttcatctacagaactagagattgcttcctttttcagactctcaggacccatgtggaacaccatcatgaatgaaaga

SEQ ID NO: 254044 - DNA, 588 bp, Homo sapiens
gagttccagttctgtcactccctagtttttgaaacttgaacaagtgactcaaygatttgaaccacaattttctcatttgtagactgcagataatagtgcatctcttcataacattaagtggataatggacatgaaacaagtggcacagtgcccagcccatggctagtatgtaagaagtgagttgctggtgtgactacctcaatgtgtctctctcttctgtttcattcgaaccctttgaggtcaggggcctcttcttatttatttctaaatttgtagctcctaacactgcgtgctcagtatatctctggtaaattctgtatgagccagatatatagactcatcttacaaacgcacaggctgtggttagcaaagttcaccgtagtctttcattaagcagacattcattttatcttagtgtttgggcatgtgacttgaatagctattttttttttgaagacacttgaagccagctgttgtgactttgtgtgaatccaactggaaattggcatttacttctctttcattctcaagctctttgtccctttttggtgccagtcagaggtatgggcatgcttttgattgggtcag

SEQ ID NO: 254045 - DNA, 588 bp, Homo sapiens
gagttccagttctgtcactccctagtttttgaaacttgaacaagtgactcaacgatttgaaccacaattttctcatttgtagactgcagataatagtgcatctcttcataacattaagtggataatggacatgaaacaagtggcacagtgcccagcccatggctagtatgtaagaagtgagttgctggtgtgactacctcaatgtgtctctctcttctgtttcattcgaaccctttgaggtcaggggcctcttcttatttatttctaaatttgtagctcctaacactgcgtgctcagtatatctctggtaaattctgtatgagccagatatatagactcatcttacaaacgcacaggctgtggttagcaaagttcacygtagtctttcattaagcagacattcattttatcttagtgtttgggcatgtgacttgaatagctattttttttttgaagacacttgaagccagctgttgtgactttgtgtgaatccaactggaaattggcatttacttctctttcattctcaagctctttgtccctttttggtgccagtcagaggtatgggcatgcttttgattgggtcag

SEQ ID NO: 254046 - DNA, 588 bp, Homo sapiens
gagttccagttctgtcactccctagtttttgaaacttgaacaagtgactcaacgatttgaaccacaattttctcatttgtagactgcagataatagtgcatctcttcataacattaagtggataatggacatgaaacaagtggcacagtgcccagcccatggctagtatgtaagaagtgagttgctggtgtgactacctcaatgtgtctctctcttctgtttcattcgaaccctttgaggtcaggggcctcttcttatttatttctaaatttgtagctcctaacactgcgtgctcagtatatctctggtaaattctgtatgagccagatatatagactcatcttacaaacgcacaggctgtggttagcaaagttcaccgtagtctttcattaagcagacattcattttatcttagtgtttgggcatgtgacttgaatagctattttttttttgaagacacttgaagccagctgttgtgactttgtgtgaakccaactggaaattggcatttacttctctttcattctcaagctctttgtccctttttggtgccagtcagaggtatgggcatgcttttgattgggtcag

SEQ ID NO: 254047 - DNA, 523 bp, Homo sapiens
ttttaaaaagaacaaaaaatgaggataaaaattgtgtctgcattataaatcacttgaagatgaaatgacttggtacatatttaacttatcacagagctcagcatgtggtacattctctattaaggatagttgatcagagcaacttttcaggatgatgtgccagcatgggctagtaggaagaaccctgggctattggcaatgtggccatttgagaaatcaaatctatttataaatatctgtgccaattgcaatgctttactgcyatagaaatgaagtagtttgtgcttctcatttcttgcccaggaataaatgtgtctatgtcaggatggccacttgatggtgagattctgcagacataattattgaggtaaagaggaggctacaatcagtattttagtcacataaaaagatattcttttgtagctatccttggacaaactgccaatgagtataattagtttctgtccggatctttattttgatttcccccgctaggaggggaaattctcactgtcatgtgtac

SEQ ID NO: 254048 - DNA, 547 bp, Homo sapiens
gccatttcagtctttcattagtgctgataattagcagaatttaggatgggcatttaaattatggcttggacaacaaaacatctctaggaatgaaattaccattcaacttacattttcaatgagatcttgaaatcacttaaatataaatgaggctgaagagtgctttgatgctgggggctctgaaccctggaaccaaagtggatcattggaataatgataaaagtcacaattgtgctgaccattatctcatacatttgtgcagcaaattagagtttacagagctctttcataccattagaatcttagcaaattagaacgggaagagatcatagaaatcctgtaataccaccccttaatatattgggtgagaaaaatgggatatttygctgctggtcacagcaggcctattttgcaaggtaggcagggcaagtattattattcttactgcataaagtgaggaagctgaagattgcagatgagaaatgtttgggccgtgagaaatgttttgccccatttggggcaggactttgccactgccctgctgacc

SEQ ID NO: 254049 - DNA, 608 bp, Homo sapiens
agagcaaagataagaattgggattccattttatagcgggtggccaggaaggtctcctgagaattgtcatatcactatttaatgaatgaatacttagtctttgtgtttgttgaaagaatgaatgtttaaaaattctgccttcacatcaaaatctctttgaggaatcttcaagtaaaatgtgtagaaggcttgtaagctctgacctacgaagtcaagttgaagctgaaatattaactaccatgtaggatcctcctccgtcttctcactcctcctcacccctttttcctctgaaattagtaagaactgccacactggggctgattacaatgaagctgagattcattgctcagcccagttaagccgttttgtagcgtagtgaaagaccacagcagctgccactgaatagctttaagttccaacctcactmacctcttccgttttctagctctctgaccttggacaggtttcttctctcgatctcagggttttcgtttttaaatgatgacgataatatccacataagccatgtttctaaactgcctactaattcctgatgcacaccagtaacttgacacctgttaattccttcttctgttttgtatgttgtac

SEQ ID NO: 254050 - DNA, 600 bp, Homo sapiens
atctgtggttccatatttttctgtgggattcaaaatgcatgtcttattcctatttgtaaccagggaatatttgcagtcaaacataattcctgtgtacttgatttagttctgggccagattgactaaaaggttttaaaatggtgcccatgcttttggtatctacactatgtggattctcgaccttttaatcctcattttcgttaatacaaataaaagagagtttatcagttgattcagatgagcaggggtatgccatgtaaatttcaaggaattatgcactaaattacaggacccatttggggrcttaaatattattctccactacacaaaactggcatggattttattttaactgaaatggcacacagtggcaggcaattatttttgttattgtatttcctatcgtggcctccagaatctaaggacaatgaaaggggatgttcatttataatttgacctcctgaattgttcttgaaatgcaatttaatcctcatatcaagcaaaatctaatgctgtatttgccagtaaaatagtcatttgcattttttattgacaatacaaattgtgtttaatcaggcagtcagcatgttagcatttcca

SEQ ID NO: 254051 - DNA, 600 bp, Homo sapiens
atctgtggttccatatttttctgtgggattcaaaatgcatgtcttattcctatttgtaaccagggaatatttgcagtcaaacataattcctgtgtacttgatttagttctgggccagattgactaaaaggttttaaaatggtgcccatgcttttggtatctacactatgtggattctcgaccttttaatcctcattttcgttaatacaaataaaagagagtttatcagttgattcagatgagcaggggtatgccatgtaaatttcaaggaattatgcactaaattacaggacccatttgggggcttaaatattattctccactacacaaaactggcatggattttattttaactgaaatggcacacagtggcaggcaattatttttgttattgtatttcctatcgtggcctccagaatctaaggacaatgaaaggggatgttcatttataatttgacctcctgaattgttcttgaaatgcaatttaatcctcatatcaagcaaaatctaatgctgtatttgccagtaaaatagtcatttgcattttttattgacaatamaaattgtgtttaatcaggcagtcagcatgttagcatttcca

SEQ ID NO: 254052 - DNA, 512 bp, Homo sapiens
tcacatatatttttaaatagtwattttgtgtgtttcgtattcataatataataatgtaatggctcttcattattctccagataagatccaaaacttttctcataatatacaaagtttttctgcatatgccttctatgcatccctccagcaacatctctgcctaaccaccccccttccccatccctgtttaccctccagatattctgtagttcatcatcgcctgtaccagtggttgtcaaactccggctggacccgaatcactgggagggcttgataaagccttcatttctgagtctcatctcaaagtgtcagattcagtaagtctagggtaggacccaagactctgcatttaaaacaggttcccaggtgatgccagtcttgctggtccagagaccctactttaagaaccactggactcttaatccagcccgaaatccttttctgttgctcttcatttttttttttttcctgaactgactcctgcttattcactaggtttgagtttaggggag

SEQ ID NO: 254053 - DNA, 506 bp, Homo sapiens
gttattttgtgtgtttcgtattcataatataataatgtaatggctcttcattattctccagataagatccaaaacttttctcataatatacaaagtttttctgcatatgccttctatgcatccctccagcaacatctctgcctaaccaccccccttccccatccctgtttaccctccagatattctgtagttcatcatcgcctgtaccagtggttgtcaaactccggctggacccgaatcactgggagggcttgataaagccttcatttctgagtctcatctcaaagtgtcagattcagtaartctagggtaggacccaagactctgcatttaaaacaggttcccaggtgatgccagtcttgctggtccagagaccctactttaagaaccactggactcttaatccagcccgaaatccttttctgttgctcttcatttttttttttttcctgaactgactcctgcttattcactaggtttgagtttaggggagcctcctgggggag

SEQ ID NO: 254054 - DNA, 511 bp, Homo sapiens
accatcacctccttattttctagaaacacctggaaatagtgaaacttttttacttcccttatatttcatattagtgctatacccagggatcatcarttaaccacaatgacagtgacaaaaagctgccttcatattttctcccaggagaattttggctccaagaatcaaggctttaatgggattcagaagtcagtgatcacagggcagatgcctcaggtttgaagtcacatcaaaccgagtgtgaaccttctgtaactcgcagctgtgctaacttttggaggtttcttgaaaaattctagtcagtttgggttaaagaatggtttcagtaatgtcacactcagggtcatgactgctcaactggtcattagccctgggaagtaacttccgctaacattggcttacctcataggagcttataaattgccatcatattgattatctcattaggtcatcaggatcctgagagaatgatcttttaagaaaacaatctttttatcaggcttatttatca

SEQ ID NO: 254055 - DNA, 511 bp, Homo sapiens
accatcacctccttattttctagaaacacctggaaatagtgaaacttttttacttcccttatatttcatattagtgctatacccagggatcatcaattaaccacaatgacagtgacaaaaagctgccttcatattttctcccaggagaattttggctccaagaatcaaggctttaatgggattcagaagtcagtgatcacagggcagatgcctcaggtttraagtcacatcaaaccgagtgtgaaccttctgtaactcgcagctgtgctaacttttggaggtttcttgaaaaattctagtcagtttgggttaaagaatggtttcagtaatgtcacactcagggtcatgactgctcaactggtcattagccctgggaagtaacttccgctaacattggcttacctcataggagcttataaattgccatcatattgattatctcattaggtcatcaggatcctgagagaatgatcttttaagaaaacaatctttttatcaggcttatttatca

SEQ ID NO: 254056 - DNA, 511 bp, Homo sapiens
accatcacctccttattttctagaaacacctggaaatagtgaaacttttttacttcccttatatttcatattagtgctatacccagggatcatcaattaaccacaatgacagtgacaaaaagctgccttcatattttctcccaggagaattttggctccaagaatcaaggctttaatgggattcagaagtcagtgatcacagggcagatgcctcaggtttgaagtcacatcaaaccgagtgtgaaccttctgtaactcgcarctgtgctaacttttggaggtttcttgaaaaattctagtcagtttgggttaaagaatggtttcagtaatgtcacactcagggtcatgactgctcaactggtcattagccctgggaagtaacttccgctaacattggcttacctcataggagcttataaattgccatcatattgattatctcattaggtcatcaggatcctgagagaatgatcttttaagaaaacaatctttttatcaggcttatttatca

SEQ ID NO: 254057 - DNA, 589 bp, Homo sapiens
ccttgttctaactggttcccttgctagaagtcaggctttctccaaactcacctacatagctcttttcctccttgaacttgtactgtaaccctggcagcatacaccacaggacaatacatcaagccctttgaaatgtggttcccatctccttttctgtcactccgcttgctcccaccctaagccacactaagcttcaggtcccaggtctcacctctgtggcttttgtgcagactgcgatttcaccttggatagctctcttaccctatgcacttgctcttggcgactcctgttcatccttcaaaactcagtcaccgttttttgtttttkttttttttttttttgagaagaaggcttgctctgtcacccaggctggagtgcagtggtgtgatctcagctcactgcaatgtctgcctcccaggttcaagcgattctcctgccttagcctcctgagtagctgggattacaggtgcatgtcactgcacccagctaattttttatatttttagtagagatggggtttcgccatgttggccaggctggtcttgaacttctgacctcagctaatcggcctgcctcagcctcccaaagt

SEQ ID NO: 254058 - DNA, 545 bp, Homo sapiens
tataaatctaccaagaataggaaagatgaccagaactaaatagttgcactaatcacttgatgacagatattagaaaaatgtatttttagctgtttaaaattcgaatcctttacagaagaagggttggttatcagctaaaaacccctaaagtcattgtgaggggacaaaactaagctctatttttacatttcatcgcattaaaacagatgaaccaaaaaatcaagacaccaggacaacatattaaagttgataagctgaggttaaaagrtctgaacagcaaagcacactccggttcacagccattcattggcaaatcttaattcccgtgctttactagagtggtggtccccagtggtgacatgcccgcaaaggggagcccactccaaagtctcagtttcttctcactacaggagaacaaattagcatcttcccctgcccgcaaaacacagaagataaacactgtatccgttcaaggatgaaaatagaaatgaaccaacaactgctaaaagcagttctgtaacaccacagcttaagcaagatttgac

SEQ ID NO: 254059 - DNA, 580 bp, Homo sapiens
cactatttatggcagctatagccttatgaaatgtatgtcctaaataataagacttgaaagtcagaattactccttgatccatgggctgcagagtagatgttttgttagcagatgtgaaaacaacattaatttccttgtatgtcttcattagaactcttgggtgaccaggtctgttgtcaaggagcagtaatattttgaaaggaatctttttttctgagcagtaggtctcaacagtggacttaaaatactcagkaaaccatgctgtaaacagatgttctgttattcaggcttcattgttccatttttagagtacaggcagagtagatttcgtataattcttaagggccctagaattttcacaatagtaaagtagccagctgcattcacccctaacgatagagtcagtctgtcttttgaagctttgaaatcaggcattgacctctcctctctagctgtgaaagtcctagataacaccttcttccaatataaggctgttttgtctacattgaaaatttgttatgtggtataaccaacttcatcaatgatcatagtgagatcttcaggataacttgttgtagct

SEQ ID NO: 254060 - DNA, 576 bp, Homo sapiens
aacttgttgtagcttctatatcagcacttactgcttcaccttgcactttcatgtgatggaggtggcttctttccttataattcatgaaccaaggtcttctaacttcaaaattttctcttcagcttcctcacttctcttagccttcatagaattgaatagagttagggctctaaatcaggatttggtttaaggaaatactgtgtctggtttsatctatccacaccactaaaattctttccatatccactatcaggatatttctcttccttatcagtcatgtgttcactggaactgcacttttaatgtcctttaatctatatcttgtttgccctgagaaataagtactggcagtgagctgcacagagtgggttgagatcttttcctttgcattcacgacttggctgtctggcacaagaggcccagcttttagcctctctcagctttcaacatgccttccccactaagcttaatcatttctagcttttgatttaaagtgagagacttgtgactcttcctttcacttgaacacatagaagccattgtggggttattaattggcctatttcaatattgctg

SEQ ID NO: 254061 - DNA, 549 bp, Homo sapiens
ttctcttccttatcagtcatgtgttcactggaactgcacttttaatgtcctttaatctatatcttgtttgccctgagaaataagtactggcagtgagctgcacagagtgggttgagatcttttcctttgcattcacgacttggctgtctggcacaagaggcccagcttttagcctctctcagctttcaacatgccttccccactaagcttaatcatttctagcttttgatttaaagtgagagacttgtgactcttcctttcacttgaacacatagaagccattgtggggttattaattggcctatttcaatattgctgtgtctcagtgaattgggaggccrgaggaaggggaaagtagacgggggaactgccagtcagtggagcagttagaaaacatacagcatttatttattaagttcattgtcttatgtgggcatggctcatagtgcctgaaagcaattacagtagtttcatcaaagttcacttatcacaaatcatcataataagtgtaataataatgaaaacgcttgaagcattgtgagaattacc

SEQ ID NO: 254062 - DNA, 549 bp, Homo sapiens
ttctcttccttatcagtcatgtgttcactggaactgcacttttaatgtcctttaatctatatcttgtttgccctgagaaataagtactggcagtgagctgcacagagtgggttgagatcttttcctttgcattcacgacttggctgtctggcacaagaggcccagcttttagcctctctcagctttcaacatgccttccccactaagcttaatcatttctagcttttgatttaaagtgagagacttgtgactcttcctttcacttgaacacatagaagccattgtggggttattaattggcctatttcaatattgctgtgtctcagtgaattgggaggccggaggaaggggaaagtagacgggggaactgccagtcagtggagcagttagaaaacatacagcatttatttattaagttcattgtcttatgtgggcatggctcatagtgcctgaaagcaattacagtagtttcatcaaagttcacttatcacaaatcatcataataagtrtaataataatgaaaacgcttgaagcattgtgagaattacc

SEQ ID NO: 254063 - DNA, 571 bp, Homo sapiens
tcatacagcataggctcaatctaagtttgacacctgcctctgcctgcctttccaaggtaygtgtctctttcttaggcctcttgagcaccggattctgttaaacaccatacttcattatgtcttcaattgttctgttccacatctattgatctaggttcctctaaagattgagagtttctgaaggctactatctttcatgccctttatacttggctttttgaagaaagtcagtttaaacacttgctacatttaatttttaaagtctaccatcactgtttttgtttttttctttttttacagtagagggggaagtgcccctgtagtgaactattttgagtcaatgaaaacaaaagaagagatttctacattgagacatgcttttaatttcttattattcccaaactgtgctttttctttattttcttatccttttctgtcctgtcctttcattcttcctttctttcctttttaccctccagttttatcaaatcaaaggaattgcacgaaatcaacaacaaaaaggcctaaaggtttgtagtgcgattttacacagttaatagaatgtgtttgc

SEQ ID NO: 254064 - DNA, 571 bp, Homo sapiens
tcatacagcataggctcaatctaagtttgacacctgcctctgcctgcctttccaaggtacgtgtctctttcttaggcctcttgagcaccggattctgttaaacaccatacttcattatgtcttcaattgttctgttccacatctattgatctaggttcctctaaagattgagagtttctgaaggctactatctttcatgccctttatacttggctttttgaagaaagtcagtttaaacacttgctacatttaatttttaaagtctaccatcactgtttttgtttttttctttttttacagtagagggggaagtgcccctgtagtgaactattttgagtcaatgaaaacaaaagaagagwtttctacattgagacatgcttttaatttcttattattcccaaactgtgctttttctttattttcttatccttttctgtcctgtcctttcattcttcctttctttcctttttaccctccagttttatcaaatcaaaggaattgcacgaaatcaacaacaaaaaggcctaaaggtttgtagtgcgattttacacagttaatagaatgtgtttgc

SEQ ID NO: 254065 - DNA, 479 bp, Homo sapiens
tggcatctttgcatacaagctgtgggcactgggtctctgagatctgtcaaatggagattgcggtgctggtggcaatgatgatgcaatgatgaagatgatggtgatgaggaggataatggctacctcagtgccattacaaggagtaatgatttatgtgaaagggccttgtgctctagcacttcatccatttattcagtatttattgagctgctgcagggtacctggcagaattgtggaatccatggacattaccctataaaagccacagactttttcccacaagacccaggaagagacagggaagcacaaataaacaaataataatgtggtggctaagtacaaccaaagagatatttgtcgaagtaaaaaataaratatagggatgaattttgccagagtaagagtaagggagggttagtatctaagtattttgagggtgccttgggattttctggtgagtctttcatgcattaagtatg

SEQ ID NO: 254066 - DNA, 571 bp, Homo sapiens
gggaggtttacttcaacctgtaacaggttcaatggcagtcattttccagtgttatctatactgacttttagtggtgtatattctccwgtcatattttttctcaactttcttcctttaccattcattatagggaaatcatgaatgtgcagcagctgatgatgggaccaaagtcaatgtgtccaaacactctccttggtaggaaacacaaaagtccttactgtgcaatctcatagcaaagtttctaatattttcctgccaaaacttcaggaaaattcctcaaagccctgcaatgtttatcctttcacatttgacataagtaagtctgcatgtcttttttcttcttcttctttttgggaaaatatcaagaactcttaagacaagaaaatgaaatctgctgagttaaccctggcagaggtgaaaagtcaaagatgaagagcagccttctggtgtagaaacttttgtcttgatgaataattgatgggcaccgagagcacaatttgctgcttctaagcatgcagccctgacatggtatggcataggaatctcgagggtaaaaggattcttactttat

SEQ ID NO: 254067 - DNA, 571 bp, Homo sapiens
gggaggtttacttcaacctgtaacaggttcaatggcagtcattttccagtgttatctatactgacttttagtggtgtatattctccagtcatattttttctcaactttcttcctttaccattcattatagggaaatcatgaatgtgcagcagctgatgatgggaccaaagtcaatgtgtccaaacactctccttggtaggaaacacaaaagtccttactgtgcaatctcatagcaaagtttctaatattttcctgccaraacttcaggaaaattcctcaaagccctgcaatgtttatcctttcacatttgacataagtaagtctgcatgtcttttttcttcttcttctttttgggaaaatatcaagaactcttaagacaagaaaatgaaatctgctgagttaaccctggcagaggtgaaaagtcaaagatgaagagcagccttctggtgtagaaacttttgtcttgatgaataattgatgggcaccgagagcacaatttgctgcttctaagcatgcagccctgacatggtatggcataggaatctcgagggtaaaaggattcttactttat

SEQ ID NO: 254068 - DNA, 571 bp, Homo sapiens
gggaggtttacttcaacctgtaacaggttcaatggcagtcattttccagtgttatctatactgacttttagtggtgtatattctccagtcatattttttctcaactttcttcctttaccattcattatagggaaatcatgaatgtgcagcagctgatgatgggaccaaagtcaatgtgtccaaacactctccttggtaggaaacacaaaagtccttactgtgcaatctcatagcaaagtttctaatattttcctgccaaaacttcaggawaattcctcaaagccctgcaatgtttatcctttcacatttgacataagtaagtctgcatgtcttttttcttcttcttctttttgggaaaatatcaagaactcttaagacaagaaaatgaaatctgctgagttaaccctggcagaggtgaaaagtcaaagatgaagagcagccttctggtgtagaaacttttgtcttgatgaataattgatgggcaccgagagcacaatttgctgcttctaagcatgcagccctgacatggtatggcataggaatctcgagggtaaaaggattcttactttat

SEQ ID NO: 254069 - DNA, 571 bp, Homo sapiens
gggaggtttacttcaacctgtaacaggttcaatggcagtcattttccagtgttatctatactgacttttagtggtgtatattctccagtcatattttttctcaactttcttcctttaccattcattatagggaaatcatgaatgtgcagcagctgatgatgggaccaaagtcaatgtgtccaaacactctccttggtaggaaacacaaaagtccttactgtgcaatctcatagcaaagtttctaatattttcctgccaaaacttcaggaaaattcctcaaagccctgcaatgtttatcctttcacatttgacataagtaagtctgcatgtcttttttcttcttcttctttttgggaaaatatcaagaactcttaagacaagaaaatgaaatctgctgagttaaccctggcagaggtgaaaagtcaaagatgaagagcagccttctggtgtagaaacttttgtcttgatgaataattgatgggcacygagagcacaatttgctgcttctaagcatgcagccctgacatggtatggcataggaatctcgagggtaaaaggattcttactttat

SEQ ID NO: 254070 - DNA, 582 bp, Homo sapiens
agagaaaatttatgactttatctctgtttcctatgtgagagtttcaacagaggtttccctttgaaatgagacgtatccaatttaacaaaaataatacccgctaattatgagggactagacaaagcatcataaaaaaacagaataaaaaagkcagaaatcactttctgtttttaggaggaacatagtcattagatcctctcaaattggcatgtaaaatgaaactgtgaggaaaaataaaacaaagaagctaaaaaataaataattataaaaataaagaatcctatattctagaaaatgtagaaataactggttacttcaagtttcatgattttgttgtgtttatgtcaactccttgtaaatatacaaatatttgaatattttgatttctaataaatttttttaagtaaagaagttttaaataggatttgcattttcaggtattaattaagaaggtaaaagcatatatcttgataagattttttttacctacctttaaaaaggctggcattctttaaaactcccaactgctcctgggttccagcttgtctatatttcccaaaagagccaagctgttaggtaaca

SEQ ID NO: 254071 - DNA, 595 bp, Homo sapiens
agagctatgcatcattttgatgaacattgagcacttcatctcacacttcatgtgcaagttaagaggcaagagcctgaaatgaagagtttctggcgaactgccaaagccctgcagcagctgcatagccaggtgggattttatggrgctttgacaggggaagtgtcactcaagtatctgacaccattgtctgctcatggcaggaggtgggatctttgatggcttgataggcatgatagctacaattaatcctccccaaagaaatgactcttacatagaacttactagtcacttctaaaaatacaaacctaactaccaggaaacaaatgacttctgttggagaccaagagacagaacatctttccctctccaagtcaaccctcctagtaagagtgagattattttctacatctcaacagagaaatatttcaaatatgagacttcaaaacacgagacaggtgtgggtaattaattgagccattaccaataattgctatatatataaatgcatatgtatatatccatacattactgatatgaaatttgtcataagaaagatttgctttacagaattgacacttcgctttttcaattttta

SEQ ID NO: 254072 - DNA, 603 bp, Homo sapiens
ttaatgttgcaatacattaatttttattgattgtataaaattgatggtacataataactgcaatcttaattttggtattaaaataagaataaaatattataggagtggtacttatactcatttaaatattcataatataaatatcaatatagagattcagagaagcaaacaaataaaagttggaacttgatgtgatacaatgtctttttaagatgamaaactaaaacatgagtggtagataattaatttttcaattacaacagagtacatgttgtattgagaaaattcttagagagacacctggaacagttggacactaattttcttgctgagggtacagtttaacctcgtacagtgattatagcaataaagttaatgatctcgttacagccacaccaacatttttatagtgctattaaatggatatacttattcaagatgtgtgaaaaagaggttttaataggccaaaaaaaaagaaaaaacccaaaacaaaaccccaaaccagtattgttttctgccatttagttttctaagttgaaataaacacaaagcatgattaactatagctgaaattgagtaaaagaaacagctgaaagaaactct

SEQ ID NO: 254073 - DNA, 603 bp, Homo sapiens
ttaatgttgcaatacattaatttttattgattgtataaaattgatggtacataataactgcaatcttaattttggtattaaaataagaataaaatattataggagtggtacttatactcatttaaatattcataatataaatatcaatatagagattcagagaagcaaacaaataaaagttggaacttgatgtgatacaatgtctttttaagatgacaaactaaaacatgagtggtagataattaatttttcaattacaacagagtacatgttgtattgagaaaattcttagagagacacctggaacagttggacactaattttcttgctgagggtacagtttaacctcgtacagtgattatagcaataaagttaatgatctcgttacagccacaccaacatttttatagtgctattaaatggatatacttattcaagatgtgtgaaaaagaggttttaataggccaaaaaaaaagaaaaaacccaaaacaaaaccccaaaccagtattgttttctgccatttagttttctaagttgaaataaacacaaagcatgattaactatagctgaaatygagtaaaagaaacagctgaaagaaactct

SEQ ID NO: 254074 - DNA, 608 bp, Homo sapiens
tttccaaaaaaacaagtatcacaatttttatttaacacatattttgcacttggcattgtgtcagtgcttgcccatagccttacttcatggatcttagaagtctgtccccttccaacccttccaaagaattgcttttatgtgttaatatactaccccttctgcttttatcaaaggcaagtacacttatttgggtattttatctattgcatctttcaytgtgtcctgttttaaagcacatgttaaaatttatttttgaactgattgtagaaaaatatttcattctttgaaattttttttttttaaattctcagagataataaaggaatgtagctgattgtgtttctctgttacggtttgatacataaaagtctaccaaacactactacaatttgacctatagcaattgtttatctaatatatctgtgtcttctgtccttttttttgaccagtttttaactttttgttgtaatatatatcttgtttggtcttgattgtttgtgttttattattgcattatgcaattatgcatgtttttaataaactgcttcaagatctttatgatataatgtggggtataaacagaaaagaatacacaaatacttaaaaat

SEQ ID NO: 254075 - DNA, 551 bp, Homo sapiens
tacttttcatgtctcaaactgaaggagtgtgcaacatgattaaagaagtagagttgggagacagagttcagatccaagtatgtctaaagctgtgtctactctctttaattctccactttgcttcccctcaaaatcgttgtcttccaagcaaacctcacatcatgcatctgcctaagacctacccgtgaaatccctcactttcaagcaagccactggtgatagaaagtcagaggataaatgctaatttagcataaatatattttgtaatatatgcttttacttttcaataaatcataaatactgttttttagaaaaatgatgtttctggaggagaaaaagaagataatcaatatcacttgtaacctrgcatccaaatatatcaatattttctttgtgactttcttgaattttctatgcattatttctagtttttaagtttagcaacactacactccaccttttagataaagtatgtttgctataaacaatttcttacggttagaagaagtttgtttctgaaatttggaattcccgatcttatatggcccctg

SEQ ID NO: 254076 - DNA, 417 bp, Homo sapiens
tgacagaaaccctgatataaaagttcttaaacaggaaagtttatttttcttccttgtaaataaaggcaatgcaggactggtttagcagctccatataatcatcaggaactcaaatcccttctctgttgttccaacagcatcaagatgtggcttctgtctctaagacagctccagctctggccatcacatccacatttcagacagacgaagaatttactgggagaataagcatatgctttctcactttagtgacattcactatgcacactcccattcccttttgtatctcactggccagagcttagtaacttggtcacacccagcttcaaggaaagctggataatatggtcttcattctcagtggmaatgtgcccagctaaagatttgagcttgtattaaccacagaagaaggagaga

SEQ ID NO: 254077 - DNA, 602 bp, Homo sapiens
atgagtacctagaacagtactaaagatggtaggtgctcaaaaaatatttgtgaaatgaatgactgttatcgttgttattatatggttattttctcaatagatggaaacactaaatcagttaagctcggctatttaaacttggaaactttggtctcttttccccaacccccctttaaaaacataagtgttgtgacattgcaaacccgtcttctcctaagacccacagcaccaaaatatgggcaacaaactagattttggttgagcaagagtgccatctagcgctcataaaagctaaaagctgagaattaggagtaaatttttattcagtgtaaacacaaaggggaaaaaacccacaaatgcaaaactcattaggaaaaaatattcttcattaacagccaaggtgtttgaaagaaagttatttctaaataaaaatctcagctttaaaagttggtatataccatattagaagagacatttcagagagtacagtttactgaagttctacttaccttaaaagccactcttctatgaayagaaagtggtgttttgacttattttctttttaatgacatgtgtttggtctcattataatagattaactc

SEQ ID NO: 254078 - DNA, 425 bp, Homo sapiens
  misc_feature (1)...(425): n = A,T,C or G
nnnnnnnnnaggtcaattttgtgttttcatatttagtgtatttttctaaccctgatgaatctttacataagtgacttgacaaaaagcaaacaaaatcctaaaactctggtgaaacacttcagcatagcactatggcagcctcctatgaacatgtctgtaaaactcagagatgtccattttttaaaaactaaattcttgtgaaaactattcagcacatggcactaaagtattttatttttcttttcttttcttcttcttctttttttttttttttttttgagacagtctggagtatagtggcgccatyaccactcactgcagcctcaacctcccaggctcaggtgatcttcccacctcagcctcctgagtagctgggactacagggtgcctgccaccacacgtggctaattttttgtatttttttg

SEQ ID NO: 254079 - DNA, 373 bp, Homo sapiens
gggattgtgtctttattaaccactaaattaaagatcttcagataatggaccattcattattcacctcttttctacaacacttaacacatacccaaaactttgtaggaactcaataattgcttactgaaggactgaggccatctatttcagataaaatccactgattttgagaattcttttggaaaatacagcatgtttctttaccyatttgagaataggtggattagacttttacttttaaatgtacctttatgctcagtttaacactgtttttaagtgacaagaagaaatcactgtaaccaaaacttgtacttaaaaaaattcaaaagtaacaagaatcatgcaaggttgtttttattaagctttatattca

SEQ ID NO: 254080 - DNA, 586 bp, Homo sapiens
aaagtagactggtcattttataattctcccatttcactgactcttcagagatatttgtttccttgtaattttgctgatttgttagagtacrgtactcaaccatttaatacatttagagattgagaaaggcacattttcacttcctaattacaaaatgagcaagtttacgatctgtgtttgatactataaggtttctatttcttttttcttcataaatgtttacattaatacatgtaaaaaagttttaagaaataaaatgactaaacttgcctaaacaaaatcaactaagcatattgccactactttctgtatttacatatatatgtgcatacttaaaaagtctatataccctagtttcaaaagcaattgaaatttcataaatgcatttatatataaatattcttaatctagtcactactataaaacatgttttcctcaaatttccttttaggtttaagttttaatactaaaaataacttcttatggtaataaaaaatgttaaagtctacatcaataatatctcaacaaatgggaatcattcctcttacactgaaatttcctttacataagtcacctaatttactta

SEQ ID NO: 254081 - DNA, 324 bp, Homo sapiens
aacgttaatcttacagttctcttccatttccagacatcttgaatccaccaaaggggcactgggcacttaccacgccatagcaattcaccctgaaggaaaagaaaagtgcattatagacaatacttaaggtgtgaaaaaaaaatcctttttggcagttttagaaatttggaaagctccttacaaactccattaatttcattrtaacatactcatcttgataaaaaaaagtagcactataaattagaatgcagacatatatggatacacactacctagaaacaaatagaatagtgcaactatatatatggatagccattttggtcg

SEQ ID NO: 254082 - DNA, 604 bp, Homo sapiens
ttttttttctaattttgtatattgtagttaaatacttggtgagcatatatataatgtatatacacattatatatgtatacagacacacatatatacactcaccaaacacttaactgcaatatacaaaatcaggaagtctaacagctgaaacaaataggactaagagcacatagaaggtagggagtgatagaggggatgaatgctgttttcaaatacatggatggctgttatatagaaagagtctatagggcaaaggtggaaccagaaagtagaacctatatatttatctcttttgtggtgagaacacttaaaattgactctcttagcaatattcaagtatacaatacattgttattaattacagtcaggatatttacgatagctctcttgaacttactcctcctaattgaaagtttgaatcctttgaccaacatttcccaaccctcatcctccactcccccaagcccctggtaaccaccattccaatctctgcttctatgagttctactctttgagatcccacataaaagtgagaycctgcggtatttgtctttttatgcctgtcatatttcatggagcataaattttccaggttgttgctgca

SEQ ID NO: 254083 - DNA, 618 bp, Homo sapiens
ttatattaatggttatatggagaagtctaggctaatgaatgtttgttataataattataaaatttacattaggcttgttkaatgttctataatggtgacaatattattttccatttgttttttgcctttagccagcttagaggaaaagagatgatactataaaagtaaaatattcttgggttctatgtaaccattatatattaactcaattctaattatgaattttggacttaggtgacttttgaataatatatatgtaaagtagacatcaaccttctgtttgaaatattgattggaaattataaatgcctatgcatactcttggacttcaagtactttctatatggggaagcaatcaatagaaatgttgaggcaacttagaaatggatttttacacttcagattttagatatgccacattttaagaaatgcatcattttacctttgataaacaagtagccatttcctggattcaactggtgtccaagaattagtcataattgtgaaaaaaattgcctttccagagtaaaagttattatgtcttaatgtattgtgtataaatctacagttctaaataaataagcataattttctcaaaatatttctggcttggataaa

SEQ ID NO: 254084 - DNA, 607 bp, Homo sapiens
agtttcactggccaatatcaaaggagtggacaggtcaggctctctccagagattctaggaaagaatccattgtcttatgttttccagtttatagagctttattctttaattatttgtcttctggtccccttcaatagcttcaaaatattgattcattgccagggcaggggtggtaagaaaagttgtttatatgaaaattaaactgaatatattacaaacaatatcatcaaatttctaaacacattgttggataatctgcatgagaattataaaaaaaaaaaaaagaaaaaattgtggaaatctcaaagtagtctacattttgattgactcattgatgtctttcrtgtctttctttctacacattaaggaagcaaactggaaactagacaaaacactatgagtactatttatgcaagattatttcaaattccaagcagcaaatccagttccaagaaatggcctcaacccataaggtttagcaaaaacctatttaaactcaaataattatcttacagaggctttaatgtactgtttcttttagtgaccttactaatcagttagtgtcctggttagaccagattagaggggcatctatcctatctcagta

SEQ ID NO: 254085 - DNA, 562 bp, Homo sapiens
agggtagaaatagtaaacagaaataagagtccaggtttgggagtcagactggcctgaaatgaaattctggtcctgcactaatagatctgtgaccataagtaagctactcaccctctgtatgtctctaaaatggggatatgaaatgagggtagaaagggaaacaagtgctgcacctgatttgggcaaacaattcagaaatttttagtttccctatgtaagtcccatattcaggggaattggcaagtttcactagaaaaaaaaaaattggttgattctccacaatcagagcatccagagtattttatcttgttcctattgtaacgtttgctagagctacaatacaataaagtattgtacttaaaatgggagtaacactgtttaaaaaattgtccttcagctaaayattaatttaagaacttgaattgtttggaagccctgcttaaatttagtctttgtacactgcctatgttgataaatacagacaacttccaaaaccaggattactttcattttaaatgagtattaatagatgatattgccatatttctaattgtggtgattg

SEQ ID NO: 254086 - DNA, 535 bp, Homo sapiens
ctctcccttattcactttactccagccagattagcctttggatagttctttgagcataacatgctcttgtcctcggggtctttgcatgtggtaagacctctggatctttgttcttccctactcttggccaccttattctctacatccctcaggcttacctttaaagcaccttcccaaaaatcctcatcaaaagctcttctactcatatyctctcagctttcagttattttgctttaaacatttatcctaatttctgattaaagcattctcttattttctgccccacactattccacacaccttccaggaacagaggctgcatgagacgtgaatcatattagccctcttatatcatgagaactagcatagggcactcattcaaggccttgttaaataagaggaagggaaatatgggagaaacgaaaagcaaaagggagaaacaagcaaaggggacaaaggaggtatttggaagttcatgtagctgaatttgtttgttgtaagaatttaaagagataatcatgggggaaaagaagca

SEQ ID NO: 254087 - DNA, 485 bp, Homo sapiens
gaacaacctgaaaaggaaattttaaaaattccgtttacaatagcatmaaaaaaaaaaaaaaaagaaatacttaggacaaaacctaacaacgaggtgaaagacttgacttgtatgccgaaagccacaaaatgttgctgaaaagaagttaaagaggacacaaataaatggaaagacagctcatgttcatggattggaatatttgatatttaagatgtcaatactaccaaaagtcatccataggtttagtgtaatctctatcaaaatcccaatggtattatttgcatacataggaaaatccatcctgaaattcatttgagattgaagggacctaaatagacaaagcaatattgaaaagaaaaaggttgaagatctcacacttcttgctttcacaacttattacaaagctatagtaatcaaaacagtatggtactatttagcataagacagatatataagccaatggaatcaaatagagagtccagaaa

SEQ ID NO: 254088 - DNA, 485 bp, Homo sapiens
gaacaacctgaaaaggaaattttaaaaattccgtttacaatagcatcaaaaaaaaaaaaaaaagaaatacttaggacaaaacctaacaacgaggtgaaagacttgacttgtatgccgaaagccacaaaatgttgctgaaaagaagttamagaggacacaaataaatggaaagacagctcatgttcatggattggaatatttgatatttaagatgtcaatactaccaaaagtcatccataggtttagtgtaatctctatcaaaatcccaatggtattatttgcatacataggaaaatccatcctgaaattcatttgagattgaagggacctaaatagacaaagcaatattgaaaagaaaaaggttgaagatctcacacttcttgctttcacaacttattacaaagctatagtaatcaaaacagtatggtactatttagcataagacagatatataagccaatggaatcaaatagagagtccagaaa

SEQ ID NO: 254089 - DNA, 567 bp, Homo sapiens
acttttataaaattcagaaaattacatcaaataatgttctacaatggcacactaaaggaatacaggaatatcatatcatttctataatttgacataataactagcaataacaggttaacaatattgccctatcatatataagcaatgtacacasaaatttataataactagtccaagtaacataacttagccttatggaaaataactatatatgtctgaatgggagaagaataataaaaagtaaagggtcctaccttctcaaaaactaaaaccgaaaagtattttccatgtttaattaaattattttggtagataacagaccttccctactgggttaaatccaatcacaactttctaggccaacgattaacagatgctgacatcttcattcaagaacagccaggaaaggtgtatgcattccaaaaaaaagaaatttaaagatataaagcaatttgtagaagttaatatcattatccattctaggcttcttattcttgtcagagaggagaagtgctttcttctgggttgtctccgtcaattctccttcttaactccataggaattcaa

SEQ ID NO: 254090 - DNA, 609 bp, Homo sapiens
gctctgcagcaagtccagactgtagtgtgagctacacttccccttgaagatcagcagctgttcctaagatcttaagtgtctgtggtatacagaggcaccacatggagtctctggcaagccctgataggaggattacaatgcagacctctaggggggtttgggagcaaatctatgtcttcaacatatttgcttctttttttgagaaacagttactggaatgcttttgatctttgtagagcctgaaagcttgaccaaggaacatcaaaataactgtgcaatctgaactgcccctcataaactgggtgttatatggtccaccaagccataagtttagcaagcaattaatcatcaagtggacatgcttttaagagatgtacatgagaaggtggttcaatgcctcaatttgtccttcaygtcctttgagacctactccatcttcattgtcttctctcactcaatccaagggaattccttataactgagaaagaaaaccttgaacttagtttacagatggttagatcccaagggaggaatgtacacatagacaccaaaaactccattaaactggaagttaaaactgtagcctggacacctggggctcatgccatt

SEQ ID NO: 254091 - DNA, 549 bp, Homo sapiens
ctagggattatttgtgtcattaacagaagaaggaaagtgtgtgagagatagggctgggggacagtgtgcatgagcaagcttcagaactttggggtgagagcagcataaagctagagatgacagtgagctgagttcgggacaagttgattaagttctttcccagccatcccttgagaagaaaaatactaagctgtaagggcataaatggaaacactctaagaataattatgggattctgtaaaatgtatttctgatagctagagtgttgattcactctaagagacattgggcaaatcagcactttcgtctgaatttatttttcctcaagttgatctaagagcctartgttttttcccaaaagataatacaatgaattttatggtcttcatctgtattcagttaatcttgtttctgtaatctgatagggtttcttgatacttcttccatctttctcatttccccatatatgtatttttgcacatctagtctcttcatctgaacagctttgggccccttttccctttatttaggcatgcccatgtgttttac

SEQ ID NO: 254092 - DNA, 583 bp, Homo sapiens
acgtaagtgtttctaagtctaatttgaaatgatttttctgctctttagttgcccaggggttgccaagytttaaatttctgtaaagaagtaatgttttattttattttattattattattattgctgcaggaaaagactactgggaaattaaagtcagcaacacccaaggataatattattcatgacaatgtgttttagttaattatagcgatcacatgttcctgccagtctcctgcccagtcttttccattactttagccccagtaaatgagatcacaaatctcaacgtactgggccatgcagatacttattccaagatagtgacagacctgagggggcccttttagatttaggagaggcccttggttcagatttcagtatgatgaaaacaagtaagaccgaagtctcaagccacaggagtacggagttcaaccataggggttaacaatttgagaagtagaaacaaaataaaatgatgacaaatgtcactggctttcagattcagatttactctttatactgaagagttcaccaaagcataaattctccattctgcttctcactgtctgtgggaaaaagtgca

SEQ ID NO: 254093 - DNA, 583 bp, Homo sapiens
acgtaagtgtttctaagtctaatttgaaatgatttttctgctctttagttgcccaggggttgccaagttttaaatttctgtaaagaagtaatgttttattttattttattattattattattgctgcaggaaaagactactgggaaattaaagtcagcaacacccaaggataatattattcatgacaatgtgttttagttaattatagcgatcacatgttcctgccagtctcctgcccagtcttttccattactttagccccagtaaatgagatcacaaatctcaacgtactgggccatgcagatacttattccaagatagtgacagacctgagggggcccttttagatttaggagaggcccttggttcagatttcagtaygatgaaaacaagtaagaccgaagtctcaagccacaggagtacggagttcaaccataggggttaacaatttgagaagtagaaacaaaataaaatgatgacaaatgtcactggctttcagattcagatttactctttatactgaagagttcaccaaagcataaattctccattctgcttctcactgtctgtgggaaaaagtgca

SEQ ID NO: 254094 - DNA, 492 bp, Homo sapiens
actccattcctttgcttaaaactcttcaaaaatttactcttacttgtaggctaaagcataaaattcttgacaaggcttacaactattttttaaatggcataaatatatatatatatatatatwttttttaatatggcttaaacagtatttttcaactgacaaatcagaaaatcagtcaaattaattgtcaaactaaaatgtaatatcaattcagtaagttgagaccagcatttacaaaaataaaatgcagtggaatatgttagtgtgtactgcatgtagaaggagtcagtattattcatgaactttaaaaaaaatgacgcttatgtgaccatatgtaatataagtatatcctatataaaatatgacatacaaatatcatatcacattgtacattacctcaatatttgctggaaatgatgaaagttcctgaatgtactatttctgagaaatatctgtgtcatggggatagggaacctaagcagatttttgaaa

SEQ ID NO: 254095 - DNA, 591 bp, Homo sapiens
ttatattattaaatataacatatacatataattctacaagttattcttcattttaaaataataatatttagaagtgaactaaaaattcatttaacttgtcatttttataagctacctttcttagaaaaaatatcagtagtaacattaaaatacattttacttgatgactgaaggcatacaaatgcatgaaaacatttaaatattttttatattaagtataattgaaaaatgagaatgyataaacgaggtgaacatttttatatacctgcattgtggcaatttcatcactttttttacagttctttgtttacgtgaatattgttccaaatgaatccaagatctagggaaatacaaacgatatcttgctcatcctcgaattttcaacatctagcaaaatttgggggaataataggttcttaattaaggatatacaataaattttaacatcatagcaaaattgagtggaaagtgtagagaactcccatacaccctctttctccacagaggcacaactgccagctatttgacttcccacaccagaagggtgcattggttacaattgatgaacctgcactgacacatcattatcac

SEQ ID NO: 254096 - DNA, 564 bp, Homo sapiens
tcacaaaataaataataatcatacccagttgctataacattgaattgaatcttcagcatttagaaaattaaaatgcaaagaaaattttattcttgtttagagtctactaaggaagcaacctatttcttccttttaatgcacattttatcrcctaaaataaataagagtttataggcacatatgaaataatacggtatactttagatagattttgaaaatgtctttgatggaataaaatcataaggtgagtgagtgattctgagtattagtgttttttgttactttttagttgtttttgttttattttgtttttctttcccacaaagatcacatttcctgttgagtagagtatttaagaatcttttgaaattatttaattcgatagacatgtcaggttttttttattatctgtttaaaatctggggcctgaaagaaataatcacaatcatctaattatataattggagatatttatataaatcatttccaaagagatttggtctcatgatcaaatctacattcttggtgatgtccatattaaagttgtaatagtaaccactattt

SEQ ID NO: 254097 - DNA, 564 bp, Homo sapiens
tcacaaaataaataataatcatacccagttgctataacattgaattgaatcttcagcatttagaaaattaaaatgcaaagaaaattttattcttgtttagagtctactaaggaagcaacctatttcttccttttaatgcacattttatcgcctaaaataaataagagtttataggcacatatgaaataatayggtatactttagatagattttgaaaatgtctttgatggaataaaatcataaggtgagtgagtgattctgagtattagtgttttttgttactttttagttgtttttgttttattttgtttttctttcccacaaagatcacatttcctgttgagtagagtatttaagaatcttttgaaattatttaattcgatagacatgtcaggttttttttattatctgtttaaaatctggggcctgaaagaaataatcacaatcatctaattatataattggagatatttatataaatcatttccaaagagatttggtctcatgatcaaatctacattcttggtgatgtccatattaaagttgtaatagtaaccactattt

SEQ ID NO: 254098 - DNA, 420 bp, Homo sapiens
ggttctttttcatctttctggattgacgttccttcaatctttgaagttgctatcctttggatgtttttgkttttttcttttactctatttgatgacctcgagggtttgattgtggtataaggtgggttcatttctggaagattttagggggccaaagctcagctcacaacttctagactgcattcttctagaagaatggcttaaaaggaaagacctcctaatttgaggccctcattttcgctgtaagcatgaatagagtaagcttgttgatatgagtctagtttttctagactcttttctagacttggaaaagagttatagaatgaacacaaagttttgtgcagtgcagcactgtctattatgataaaaatataagaattttagtgtcttctttgattcactttggccatatatttttca

SEQ ID NO: 254099 - DNA, 491 bp, Homo sapiens
ccactgagcttcctggtggactatgacagctttttcttttcttttcttttctttttttttgagacgaagttttgcttttgttgcccagactggagtacactggcgtgatctcggctcaccgcaacctctacctcccgggttcaagtgattctcccacctcagcctcccgagtagctgggattacaggcatgcgcctccaygcccagctaattttgtatttttagtagagacggggtttctccatgttagtcaggctggtctcgaactcccgacctcaggtgatccaccagcctcggcctcccaaagtgctgggattataggcataagccactgtgcctggcccatgacagctttttcaccaacagatggatcagtctacaacttagattctgcattgaccactcagcccactgactaacatcaatgtgctctgttacaaggaaaaatataagacttaaaaatatttacacaccacgggtaactctttcttg

SEQ ID NO: 254100 - DNA, 585 bp, Homo sapiens
gtttatgtatattatttcattggataaataatagtattaactgaaagtcattattgtaagaggcagttttatcattcatgcacactataaccagccagatgtactatttggttcttttttgaaatagtaggttgtttygctttgattttgttttctgcttcatgcccatacatgctaaatagtgagtctgaggtgtacaaggacagcaaaaactatttacctcctgagagtctgtgaaatctctcattttttagtctcctcacaattggaaaatattgtttttcctttataggtgtcaatgaacctaaacacgtgaatgtgccattttaaaacatttctgaacttttctcaccgtacttgtcactgctgactcactgggacaagaggacgtcttgcaatatattcctgtctcttccccctttagatctcctgatgcttgttttctcttacttggctcaccttctgagcatattagctttacttcttaccattccctttatactttttgcaagtgaattcaccttttactccagtcctaagacgtctctttgtcccacagaacttataaactggcatttttcactc

SEQ ID NO: 254101 - DNA, 593 bp, Homo sapiens
cataaccacaatgagataccatctcacagcagtcagaatggcagttcttaaaaagacaaaaaacaacagatgcaggtgaggttgtgtaagaaaacttatacagtgttgctgtgaatgcaaactagttcagccgctgtgaaaagaagtttgaagatttctcaaagaacttgtcaatcgagaaaaatgatgagaaaagtctcaatcgttttaggagttttatttgccaaagttaaggatgtacacctgggagacaggtctatgcctttctctgacgatgattttgagggctccaaatttaaaggggaaagggtagggtattgaraagtacacaattttcatgtgagaggaggatagggaaaaatagtcattcttgcctttgtctggctcagtgaatctgtatttttttacaaaagatggcataaacaaatggggcagaggaaaaatgtggggaatctgcctttttacaaaagataacgtagaaaaatggggcaggggaaaaatcagatatgcatttgtgtttgggcagtgggggtgactgcacctgtaaagataagttatcaacttacattgccatggtgaaatattaatagaaa

SEQ ID NO: 254102 - DNA, 593 bp, Homo sapiens
cataaccacaatgagataccatctcacagcagtcagaatggcagttcttaaaaagacaaaaaacaacagatgcaggtgaggttgtgtaagaaaacttatacagtgttgctgtgaatgcaaactagttcagccgctgtgaaaagaagtttgaagatttctcaaagaacttgtcaatcgagaaaaatgatgagaaaagtctcaatcgttttaggagttttatttgccaaagttaaggatgtacacctgggagacaggtctatgcctttctctgacgatgattttgagggctccaaatttaaaggggaaagggtagggtattgagaagtacacaattttcatgtgagaggaggatagggaaaaatagtcattcttgcctttgtctggctcagtgaatctgtatttttttacaaaagatggcataaacaaatggggcagaggaaaaatgtggggaatctgcctttttacaaaagataacgtagaaaaatggggcaggggaaaaatcagatatgyatttgtgtttgggcagtgggggtgactgcacctgtaaagataagttatcaacttacattgccatggtgaaatattaatagaaa

SEQ ID NO: 254103 - DNA, 590 bp, Homo sapiens
gaaagggagagagtataaccaggcaaatcccacttccattcccatcatggccaagaattcaggttttagattttttctggggtcctcttggccaagaggggtctgttcagttggttgaggcttaggattttatttttagtttacaccactgtccattgtatatgtagaaacatcaccatgtaccccacatccatgtacaattatgtatcaattaaaagaataagaattggctgggcaccgtggctcacacctataattccaacactttaggaggccgaggtgtgctgatcacttgagcttaggagttcaagactagcctgggcaacatgccaaaaacccatctctacccaaaatacaataaattagctgggcacaatagctcacacctgtaatctcaacactttgggaggcgaaggtgggcrgatcacttgaactcaggagtttcagaccagcctgggcaacattgtgaaaccccatctctaccaaaaatacaaaaaattaactgggcttggtggcacacgctactcaaggggctgaggtgggaggatcgcttgagcccaggaggcggaggtttaagtaagccgagatct

SEQ ID NO: 254104 - DNA, 632 bp, Homo sapiens
gacttgaacagtatcctcccaaaattcacattctttggaaaccttagaatgtgaccttaggaaatagagcctttgcagatgtagtcaaggtaagacacattcatattgcattaggatagatcctaatcctatgacttttgtccttaagagagaaatttagacattgacactcagagagaaggtcatgtaaagacagagagattgaaagtgatgcacccaatagccaaggaacaccaaacactgccagcaaccaccagaaacwaagagagagacatggaacagattgtccctcagagcttccagaatgaaacaaccttgacaacactttgattttggacttctggcctctcaaactgtgagaaaatacatttctgttgtcttcagccactaagtttgtagtactttgttacaatagtcctaggaaacttatatacctagtttacaaacagagtagaaacttaaaatgacatttcaaaagctagtataggaataatcttttatataaagagtcttacaagaaacatcagaaagtgagcacaagcaagaatacattttaaatatttataattatcctttagggattaagattccccaatgttttacaagcataattttggaaggaggcttccatt

SEQ ID NO: 254105 - DNA, 632 bp, Homo sapiens
gacttgaacagtatcctcccaaaattcacattctttggaaaccttagaatgtgaccttaggaaatagagcctttgcagatgtagtcaaggtaagacacattcatattgcattaggatagatcctaatcctatgacttttgtccttaagagagaaatttagacattgacactcagagagaaggtcatgtaaagacagagagattgaaagtgatgcacccaatagccaaggaacaccaaacactgccagcaaccaccagaaactragagagagacatggaacagattgtccctcagagcttccagaatgaaacaaccttgacaacactttgattttggacttctggcctctcaaactgtgagaaaatacatttctgttgtcttcagccactaagtttgtagtactttgttacaatagtcctaggaaacttatatacctagtttacaaacagagtagaaacttaaaatgacatttcaaaagctagtataggaataatcttttatataaagagtcttacaagaaacatcagaaagtgagcacaagcaagaatacattttaaatatttataattatcctttagggattaagattccccaatgttttacaagcataattttggaaggaggcttccatt

SEQ ID NO: 254106 - DNA, 584 bp, Homo sapiens
aatgcttccctataagcgcttaagaagaatcctttaactaatggctaaagactgaatgtgggctagtatgagaatatggagtccctggaagctgaaaattcactagcaggatttttcactgtgatcacaggaaagatcagaggcatggtggaaragaaatcttccattatggtacaggcctggagctggagagtggctctctctctccaggaaatacacaaggtcctatctggaatttttttgttttcattataaaacaaaagctttaagttactggagaaagggaaataaagcctgttgtcaccagtgtacagataaaggcacactgtgggtgtgaaaggggaaaatgaaaaactctctaccctggttaaaggtagcagttctctttttctgagaaaatgacaagatcactgaaatatccccaccccagataaaaggaacacagagttggtctaacactgagggtagtctaggacaatagtcccctgaaaatctcccctaccatgctatcaagcattgagtaacaagcaacagaagtctattgctaaaggatgggcaagagcataaaaacctccctgaggtac

SEQ ID NO: 254107 - DNA, 554 bp, Homo sapiens
tttaagttactggagaaagggaaataaagcctgttgtcaccagtgtacagataaaggcacactgtgggtgtgaaaggggaaaatgaaaaactctctaccctggttaaaggtagcagttctctttttctgagaaaatgacaagatcactgaaatatccccaccccagataaaaggaacacagagttggtctaacactgagggtagtctaggacaatagtcccctgaaaatctcccctaccatgctrtcaagcattgagtaacaagcaacagaagtctattgctaaaggatgggcaagagcataaaaacctccctgaggtacaagcctaaagggagggcctaaaactgagggttaaagagaccctgagaataaaaaccttccagaaaactactgcccagactgagcacaaggtaaatatgcagggatttgaagctgatgatatactaaaagtaaccagagtaacaacatcactcaaactcagctcaactcctagtgagattaacttaaccagccactttgtagatccttctcttagcaaaagagaaggtgttctca

SEQ ID NO: 254108 - DNA, 538 bp, Homo sapiens
gtggtgggcagcccacctgagagccacatgaggcaggggagcccccaccccccagccaagggagacggtgagtgagtgtgttacccagcctgggaaaccgtgcttttgccacggaactgtgccacccatggattggaagatcccactcgtgaacccacaccactggagcctaggagccaagcatattctcaacagccattcaactaaagcttaagcctgctgagttcctgggggaaggggcaacgagcaccacagctgtagctgtctgctctctcagccatttgaggtccttgtggggaggggcagcagccagcactgggactgatatctgctgaacacaccaagctcccaaagtggkgcaagggtggcagccatctctatagctccagactgtgcttttaccatgctggagccagggaggctggaccacttggtcctaagaggtgtcccccacagctcaacacaccaaatgtggtagactgcaaccagagtgcctcttcaggcctgaccctgacctctctctcctcactgggcggga

SEQ ID NO: 254109 - DNA, 474 bp, Homo sapiens
attattttgtcacccagttattcaggctagtgtccattagttatgctgtttaatatacattcctgatttctcattttgggcatttttcacatgaccaaccatcacatcctgacaattttaattctatttctagaatctttctctttgcctgtattcctgctgtcaataatttagacaatgattgacttcaatatgtgggtaatcagggcaggctaataatttgggcgacttcagaccaatattatctaattaataggatgatcattgtgtaaaacaaacaaaaacccacggagacagggactcccggtagctgtaggattagtctctcctctgttgtctagagtaatttagctctaccctaaatttgtgttcccatctagtaaaatgaaagccctgctcctgactgaacctccgcttatatagtaagtatgaccccttgagatgtgagcrgtcttcctttttactccagttgtt

SEQ ID NO: 254110 - DNA, 592 bp, Homo sapiens
taacttttcttacttttgaatctgtttatcataccaatattacaggattatgttgaagaataaaatgctcagtcagtgtgggcttatggtagatgattaatgcttaattaacatttctccacctggagtcagtcaaaatatttatggagcattttctaattgccaagcgttgttctaagtgctatgagcaaggtagtgtgtctgctgccaagaamtgacatctagaatacactgctttcatttttcgttttaacactctcccccattttccccagctctctcaagtccctgaattgtcttacatctctgagcaaattaaataagtcaatggaatggaggaaagtcagattaactgttatgatatccagcataaagtgcctttaaaacatctgagaaaggagactttatcaaggggccatttgtggcctcttttgtggaacttggagaaagaaagctacgtgaattgctaaatcagagcgttagatatgagacaaacatacctttctgttaaaaatgtcccagttgttttgttgtggatgtgtctttttcttggtctcttatatgtgggaacatcttacaaaatcaaagattg

SEQ ID NO: 254111 - DNA, 592 bp, Homo sapiens
taacttttcttacttttgaatctgtttatcataccaatattacaggattatgttgaagaataaaatgctcagtcagtgtgggcttatggtagatgattaatgcttaattaacatttctccacctggagtcagtcaaaatatttatggagcattttctaattgccaagcgttgttctaagtgctatgagcaaggtagtgtgtctgctgccaagaaatgacatctagaatacactgctttcatttttcgttttaacactctcccccattttccccagctctctcaagtccctgaattgtcttacatctctgagcaaattaaataagtcaatggaatggaggaaagtcagattawctgttatgatatccagcataaagtgcctttaaaacatctgagaaaggagactttatcaaggggccatttgtggcctcttttgtggaacttggagaaagaaagctacgtgaattgctaaatcagagcgttagatatgagacaaacatacctttctgttaaaaatgtcccagttgttttgttgtggatgtgtctttttcttggtctcttatatgtgggaacatcttacaaaatcaaagattg

SEQ ID NO: 254112 - DNA, 592 bp, Homo sapiens
taacttttcttacttttgaatctgtttatcataccaatattacaggattatgttgaagaataaaatgctcagtcagtgtgggcttatggtagatgattaatgcttaattaacatttctccacctggagtcagtcaaaatatttatggagcattttctaattgccaagcgttgttctaagtgctatgagcaaggtagtgtgtctgctgccaagaaatgacatctagaatacactgctttcatttttcgttttaacactctcccccattttccccagctctctcaagtccctgaattgtcttacatctctgagcaaattaaataagtcaatggaatggaggaaagtcagattaactgttatgatatccagcataaagtgcctttaaaacatctgagaaaggagactttatcaaggggccatttgtggcctcttttgtggaacttggagaaagaaagctacgtgaattgctaaatcagagygttagatatgagacaaacatacctttctgttaaaaatgtcccagttgttttgttgtggatgtgtctttttcttggtctcttatatgtgggaacatcttacaaaatcaaagattg

SEQ ID NO: 254113 - DNA, 597 bp, Homo sapiens
aaacttgaatttttccaaattatgtaattttcaagctggccagatatacatttttctaatttctatattttgcagaaaatgaaacatttctatagagataagaggttagtttcctttataattaacatgtctatgcatttaaagatatttagatagatcaacccttgaggtaggtgtatgaaatttgaatacatttttttctccattaaatactggctttcactaagtatatttgaaattcacaaatctgttcccatgaatatcaaaactaaacgtttgcgtcaccaaaattgtatatcccaatgcttttcagtctgtggtaaagatcttatttccaatattgcaaactgataattttataaaatataaaagtaaattaatagaaatgaagkaaaaggacacaaggatatgcaaaatacaaacccaccttaaaaaaagatattagatgcaacagatgtagaattactgtcaaattttataaaagtttctgaagatgtaccttcaatttagttgcttttaagggaccagtggcagtctgtaggctcatgtcatcctgtggatcacactaaaagtagcactagcagccagttttaccct

SEQ ID NO: 254114 - DNA, 597 bp, Homo sapiens
aaacttgaatttttccaaattatgtaattttcaagctggccagatatacatttttctaatttctatattttgcagaaaatgaaacatttctatagagataagaggttagtttcctttataattaacatgtctatgcatttaaagatatttagatagatcaacccttgaggtaggtgtatgaaatttgaatacatttttttctccattaaatactggctttcactaagtatatttgaaattcacaaatctgttcccatgaatatcaaaactaaacgtttgcgtcaccaaaattgtatatcccaatgcttttcagtctgtggtaaagatcttatttccaatattgcaaactgataattttataaaatataaaagtaaattaatagaaatgaagtaaaaggacacaaggatatgcaaaatacaaacccaccttaaaaaaagatattagatgcaacagatgtagaattactgtcaaattttataaaagtttctgaagatgtaccttcaattkagttgcttttaagggaccagtggcagtctgtaggctcatgtcatcctgtggatcacactaaaagtagcactagcagccagttttaccct

SEQ ID NO: 254115 - DNA, 609 bp, Homo sapiens
gctgggatttaaaagtttgaaaatacagggtagaacataaatctttccaaccactttggaaggcaatttagtatcaaatataaaaatttaaaatgcatgtactcttaggccaagaaattcacataaatctgtactctcacacatgtgacaaataatgtattttaaggaataatcatagcaaaagacagtatacaaaatgcagttgttaagaaacaatgagtcatatcttcatttgctaatattgaaatttttataataccttgttaaagcagagcacagaacaatgtgtaaagtttattcccatacgtgtaaaaaatcaagcacattatatctagaactgtattatgtaatatagtagccaataacyacatgtgactattaagtccttgaaatgtggctagtctgaactgaggtatgctatagaacaaagaacccactggatttgcaaggcttagtattaaaggaaagtaaaataccttattaataagttattattttgattacaagttgaaatgatgacattttgaatatactgggttaaataaagtaatggaaatttcacctgtttctttcaattttaaaatactgctactaaaacactttaaatta

SEQ ID NO: 254116 - DNA, 609 bp, Homo sapiens
gctgggatttaaaagtttgaaaatacagggtagaacataaatctttccaaccactttggaaggcaatttagtatcaaatataaaaatttaaaatgcatgtactcttaggccaagaaattcacataaatctgtactctcacacatgtgacaaataatgtattttaaggaataatcatagcaaaagacagtatacaaaatgcagttgttaagaaacaatgagtcatatcttcatttgctaatattgaaatttttataataccttgttaaagcagagcacagaacaatgtgtaaagtttattcccatacgtgtaaaaaatcaagcacattatatctagaactgtattatgtaatatagtagccaataaccacatgtgactattaagtccttgaaatgtggctartctgaactgaggtatgctatagaacaaagaacccactggatttgcaaggcttagtattaaaggaaagtaaaataccttattaataagttattattttgattacaagttgaaatgatgacattttgaatatactgggttaaataaagtaatggaaatttcacctgtttctttcaattttaaaatactgctactaaaacactttaaatta

SEQ ID NO: 254117 - DNA, 594 bp, Homo sapiens
aggcttagtattaaaggaaagtaaaataccttattaataagttattattttgattacaagttgaaatgatgacattttgaatatactgggttaaataaagtaatggaaatttcacctgtttctttcaattttaaaatactgctactaaaacactttaaattacatatatggcttggatgacatttcactttaggcagtaccaatctagcaaatacacaggaaagtgttaaatatagctgcatctgaggagtggaattggagatttaagatgagatgaagcttcagtttttactgtctactcttttaaacgttgtgctttttaaaaattacataaatggactatctttgtaataaacatattgtaaaacatatctrttaaataattagaaaaaaagaactagttactgcttgggaccacgttggtttctgtgagttaggtggtccctggtctgttagtccctggaacatttgtatgaagtacctgtagtttttgaattgtcatcctgtattagcttggcatcttcagtagagtttggaatagtggtcattagaattgacttgagagagaactgctgttccgcacttcctcctgcc

SEQ ID NO: 254118 - DNA, 583 bp, Homo sapiens
ttcaaaataaatgtgcaaattcaagtttcagtagagttatttcaaagtagtatcctttacgcacagaatggtggtgctcagatgctgaatatgtttttaagatttgcctaagaaagagtgctttaggatatgtttgctgctagttatgctaaaggccataaattgcgcagcaaatttctttggtatctgctgtgtcctgattgaaaagtcacaaaaggttacctttttacataaggtgaacaaaagaacaaatctcatttacttattttcctacagataaatgttttcctctggttctcttgcacacacttaagaattaaaaaagaaacaattatttttcatacaatgaagaaaatatttttaaaagaaatatgtaaaatgagtaagagaacataatttatgggactttggacctttcaaattggggagttttatttcggaagtcattaagtttttatgaaatctaagctggatasagaaaccaataagcatattcccttgattttataaaatgtataatgtacttaattataagcattattgatgattgctcagctactgtcttttatacaaacactatatc

SEQ ID NO: 254119 - DNA, 611 bp, Homo sapiens
agaacttcaaatatttaaagaaaatagccatgtgtcttttattcgtggattctctgggatgtagttttaataagcctattttgctcaaatgttctcatatagcaacagtcagatttatcacactcttctctgtacatatcmcagttttcactattcctctcaaaatataactagaattaaatctgatatttctgatgtgctctgtccaaggtgggatatatcacacattgtcacacattcatcatattcacaagtatgcgcatgccctcttcctctgtctctccttcttgtgtctccctctgtctctccctttgtctctttgtctctctttcacccacacatatacacattttatcaggttgtatgcttcacttgcaagtcattgaatagaacttctttgtacgtgtcagcaatgttactgttttgttatttttaataaaactagacaatcataactagtaaaaaaaaaacacatcttgacagattttcacagagcagtcttgtttttaaaatgtaatttaaagatactttctagcttcagaaaagggcactgtgagaggataaaaaaacaatataaatctgtatgaaaacaaagcagcggtgtttagttt

SEQ ID NO: 254120 - DNA, 611 bp, Homo sapiens
agaacttcaaatatttaaagaaaatagccatgtgtcttttattcgtggattctctgggatgtagttttaataagcctattttgctcaaatgttctcatatagcaacagtcagatttatcacactcttctctgtacatatcccagttttcactattcctctcaaaatataactagaattaaatctgatatttctgatgtgctctgtccaaggtgggatatatcacacattgtcacasattcatcatattcacaagtatgcgcatgccctcttcctctgtctctccttcttgtgtctccctctgtctctccctttgtctctttgtctctctttcacccacacatatacacattttatcaggttgtatgcttcacttgcaagtcattgaatagaacttctttgtacgtgtcagcaatgttactgttttgttatttttaataaaactagacaatcataactagtaaaaaaaaaacacatcttgacagattttcacagagcagtcttgtttttaaaatgtaatttaaagatactttctagcttcagaaaagggcactgtgagaggataaaaaaacaatataaatctgtatgaaaacaaagcagcggtgtttagttt

SEQ ID NO: 254121 - DNA, 501 bp, Homo sapiens
ctctgaattttggttatttcttttcttctgctacttttgtggttattttgtgctggtttctatatttactctaggtataatgttaggttgttaatttgaggtctttctagctttttgatgtgggtgttctgtgctacaatctttccttttaacactcctttatctgtgttccagagagtctgatatgttgtatctttgtgttgattagtttcaaagaatttattgatttgtgccttaattttattgtttattccaaagtcattcaaaagcaggtttttaaatttccatataattrtattcttttgagagatcgtcttagtgatgatttctatttttaattgcgctgtggtccaagagtatggttggcatagtttcttttttatttaatttttcagaatttctttctggctgaacttacagtcagaattagagtgtgtgccttgtgtggatgagaagaaagtatattctgttgttttggggtggatggttctgtaggtccat

SEQ ID NO: 254122 - DNA, 570 bp, Homo sapiens
tattctctaattgcctccacttagaattttactatgtgttaattggttctgtttcatatagcttagtacttgcttatttataaattatttcacacatatttacttgctgtctccaaatacattatcaaatccttaaatcagatattttaagtctttgtttttcagtgtgagcaaaagaagaatttgatacataagcaatacataattgtcagaattggactataaatataaattgatgtaaagaataatgcatgagaatacatcttgagcttttaattaaatacagagtctaattgccattacagtttggttcagtttgaatgtactattgsataacatggggtaaagtacctcattatatgctgatgctagtgaaaaggaagataagcctcattgcgttaaaatatattaattttatcctgtgctcctgactttgaaagtcttgatagaagatagatccataccccctccagttcagaaaagccataatcacttatcatgcagctgatttctattctggtgcaatcaatctagttaatgtcaagtaccactgacaagagtgttcatgac

SEQ ID NO: 254123 - DNA, 566 bp, Homo sapiens
attacaaataaaagaagtggaagagaaataaaacctataaactcaatctccatggaagctaagagtaaaaggcaaactgtaaaccccaaactttatgtaagtgtggccaaaacaccaaaaccaataagaatgggctcaaccttcaatgctagaggacagtggagcaatactgagatactcaaaaaagcatgaaccaaggattttatatttcaccaarctgtcctttaaatataaggattataagtaaacaatttgaaatatgcaagaatgaaggaaatattccccataagtatttatatgagaaacttattagtgcatgagcttcatttatcaaaagataattagtaaaatattagtaaaaaatattaaggataagtttagaatatatttaactgtaaactaaaactaaacaaaagtggtaattaccaaaaggaagcagatattataattttaatcttagaccagtcagtcaagccaaaaaaaaaaattcagcaagagaaaccatggtactttgtaatgctaaacattaaattcacattaaaaatatgaggtttgttaatgtaaat

SEQ ID NO: 254124 - DNA, 599 bp, Homo sapiens
gaaacaacattttatttatttgaacgtaattgtttaagaatttgtgataattcagacgaagactaggctgacccttatatgatcatttaaacaagaatttaataatctgggaaactttgaaactaccaaaaagtttaattgtaaatttcttgaacatattgcacacactaggtgctyattaagtaattttgtattaataaaaatcaaattagaatatttaatatatgaaaatttttacatgctatgtagtcaaaagtatgtatgtgctaagaacaaatggttattatttattacatttacatcaaggtaagttctcaaatttcacctgaaattaaccaagttcaaattaatcaaatccttatatattaaattttctgtactttctgattagtttatgccatattatgtaccttaaaataatagaactgcatgccttagaaaaatatgttgtaataaaaattaactgtcaaagggatcttttggaggattattttgaatgtttaggttttcactacatttagtcattcaagaaagataattgcagtgccgtgtgtcaaccattgtgctaggaggtgaagggtagaggctcaaagaacatt

SEQ ID NO: 254125 - DNA, 523 bp, Homo sapiens
gaaaacggaggggctgtaaatcaaaatacaaaagccaggaaagacaccaatatcctgagtctttcttatagaataatactcttcccttcaatttaaaagaaaatttgatgaaattttatactaaatgataaaaacttactggcagattctagtaggaaagccacacagaggtcaatgaaacattattctttacttgagaatgttttscctcatcatcagataaaaatcaagcaagtttggagaagggaagagtattgtttgaatctttttttctgtgactggttacagctaagcaatgagccatgggagacaataacttttgattatacagaagtcatttgttttaggtttagattacatgattgctcccacaacttgcccagtctttatcaggaaaattgtgagtttccatggcaatggaaaacatggcacaaaattgcaaatgaactcatgcttctaccatagaaaactgttcctggaaacaactaagatgacactggcaattgctataaaaaaggaaagt

SEQ ID NO: 254126 - DNA, 674 bp, Homo sapiens
ctacaaacagtaccaaaataaattttttaaaacccaaataaatyaatatgccatatttatggatcataagatttaatattgtaaaaatgtcagttttcttcaaattaatctaaagatagactgaaatacaaatcaatatagtaacaatatagtaacaaggtctcggcatataggtatgtataagtgtatgtttcagtagacatggtaattgatgagctgactctaaaatgtgtaaaaataccaagggccaagaagatctaaaactatattgaaagaagacaaaaaagtaataataacactaccaccatacattaatgcttattttaaacttacagaaattagaatagtatatattgtctcaagtataaacagacccacagagagacaaaaacagacctactcatacatacatacctaatttatgacaaagatgccactataatagaaacagaaaaatgatcttttcattaaaggtgtttgatcaaaggaatatatatatatatatatatatatatatatatatgaaaaaatttattcctatctcatcccatatacacaaacacaattttagatgaataaggtaaaatcaaagattttataaaagaaagcataaggaagtacctttatgacctttaggtaagaagaagttacatatataagacatttttaaaaac

SEQ ID NO: 254127 - DNA, 591 bp, Homo sapiens
taaacatgtgaacctatatgtgtgtttatatgcatgtatcaatgatatcctcaatgaacagagcaatactttgttcaatacagcccagttcctttgtccattggacaatcacctttatcatctcatgcagttctatatttgctattctagcagcatctatggcctccctagaaacatctaattgctacctcactatcacaagtttcaatctgaaatcaaaagctcaaaagttcctttgaagccttgctggaagtcagacagtacacactgaatgtatatgtgttaaaattctgaaataattttataccaattgggaaatatttgctgtttgaattttctgtgttgtccatcccacccacaacaagcctcctatgattcccagaactttctcataatccaccaaacaatgggttaatgcctactcccagaacaacagccattacaattactcacagtgttaaacattttaaatatcacccctctttgatagattctatacagcaggatctaaatcaagtttatccaaccaatggcctgtgggccrcatgtggcccaggatagctatgaatggaacccaacacaaattcgtaa

SEQ ID NO: 254128 - DNA, 560 bp, Homo sapiens
atgtgtactgaagtagaagtccctctattaatgtctcaagatatttagtccacaaccagaaatacttctttgtgggcagggaaatttactggaatagagaggcacattaagtagcattgtgtgttacagccactgcacccttgagctattgagaaaaaaggcattccatctgaacacaaatatgtggaaaataaggcagtaaaatggggtcacatcttaagtacacttcacttacaggtgactttagaaagaacttattttcccaccaccatcctcaccaacatcacacacccactgtgcctcccaacgcacacacatgcagctccaccacctcacttaattttcaaaataaatatatatttatttaatgtatattaagattaaagagcatgaataatgaaacaactcagggagcaagtaggaaaagtatcaaatgatctacctatacataaattcactagtaggtatataacaatctggcatttccaaatttctgttacagactccccttttatctagcttggcaarcatctaaattttagtccatataagaattgttt

SEQ ID NO: 254129 - DNA, 558 bp, Homo sapiens
aaactactttcactgaactgatcttcagccagttttggtgttcattaaaaaaatttacagtgttatgcattcaaatatggtaactgagcctttaggttcccacggcaacttgatcatttcagtagaaaacttttcttttctttcttttttaacttataggtatgcctgttctctaacagtttcacttagcttatcatttcagttatttccaaccgagatatccacctttgggaattcacatattctgatacattcccaggtggctatttataaaaacacaagaaacatcatgctaacattaccaagtcctgagaaaactggtcttgcattatgtcattctaaggagaaacaccatctttctctccatatcacggacttttattttacatccctggagaaatttcatacacttggcaggtaactcacagaagctttattggtataccgmaaatacctaagtattggtggtccaaatgccccagtgccacatataaatagacaaacgagttttctttgtgatgagtttatcacccaatacttgggttcctaaacttagat

SEQ ID NO: 254130 - DNA, 611 bp, Homo sapiens
aacacattacacagaattaaagaattgaggttaaatgttaagtgacatgtccaagatcagaaataaaattaatagaaaatctgactcaatcttaggtgcctggtgtcctagtctaaaccccttacactaaataacayaacagtaatgtcacaacatatcaaatccattcaagatcctaacactagaggctttaagtttaagaagccagttgtgataactggaaaatggctgtactgggcactgttacctttatgtacttcttggtccctaaagagctggtgtcttttatagttttccttcaaatggtagatactacagaattaaaaggtgtgtcagagactggtaggtatccactagtgaacctacgtcctgaattgtccagaaaattcctatttcacatctgttgtcacagcacaattagcattggcatcatttttctttcttaatagtatgctatgttggaagataattcctgcatttctgtacacactatgagggaggcagtaaatgtcctttgttctggactatcttttcaagaatatttatatagtgaacagccttggaaaatagagttagtttttctccagagcaaaaggcaggcatatactgct

SEQ ID NO: 254131 - DNA, 611 bp, Homo sapiens
aacacattacacagaattaaagaattgaggttaaatgttaagtgacatgtccaagatcagaaataaaattaatagaaaatctgactcaatcttaggtgcctggtgtcctagtctaaaccccttacactaaataacataacagtaatgtcacaacatatcaaatccattcaagatcctaacactagaggctttaagtttaagaagccagttgtgataactggaaaatggctgtactgggcactgttacctttatgtacttcttggtccctaaagagctggtgtcttttatagttttccttcaaatggtagatactacagaattaaaaggtgtgtcagagactggtaggtatccactagtgaacctacgtcctgaattgtccagaaaattcctatttcayatctgttgtcacagcacaattagcattggcatcatttttctttcttaatagtatgctatgttggaagataattcctgcatttctgtacacactatgagggaggcagtaaatgtcctttgttctggactatcttttcaagaatatttatatagtgaacagccttggaaaatagagttagtttttctccagagcaaaaggcaggcatatactgct

SEQ ID NO: 254132 - DNA, 578 bp, Homo sapiens
ccagttttatgtggcctatgtctacacggcaaattatcagtagagagtttaaaaaaaaacaaacctgaattaccactcctccatgaaataccttgatgaaatacctkgtcacctaccctcttattagtatcaccaagaacaataattttaataagtctatttcaattaaattgactggtttatgtgttattttaaaatcagaagtcattgattcccaatgacctcatttctttaaacataagaggatcacatttaacattatggctgttaagattatctcctagtgttttgtttcgcagaaaagtattaagaaaccatagagattacataggcctatactctcatttgacaggcaaatattttctgaaaactatttaaatttaatatttaattcaaagttacacagcttattagcagtggagctgagacaaattctattctagaactctttttactactcagtgatgctattttaaagtgcattccaccattttattatggtggtctttcagtggtcagcagacatcactaaagaaatttcttcaacacatctttgtttggattaaactcactattgt

SEQ ID NO: 254133 - DNA, 609 bp, Homo sapiens
taaacaccaggaaatcatgactctgaaactgaaacatctaaagtttatgtcatagtttagttcttcagtttccttaaggaagtattccatttctcaattatttctagccaagtccacatgtaatgggtcatatttcttgcttccttaaaaagtgcttgttgtctatattgctattctaaagcctgtttctacatgctactaaatgaaaattgaaggcagaggaagccaattacatttgtgattgattcatcaactcgttgatttaataagcattatggaatakttactatataccagatagtcttacaggatttggggtagtagcagaacaaggaaaaatccagatgttccttctctcatcaacttacattctaaggtggaacacatcaaataaatacatatttaaataagtcaagtggtgatgaagtgtttgaagaaatagaaagcaagtatctgaggaaaggatattttgagttggaaaataacaagggcaaagatcctcatgggggtatagagcagaatgtttgaaaaacagcaagggaacaacatggttgaagctgagtgagtttaaataagggataattaggacaaggagttgtcagggatacc

SEQ ID NO: 254134 - DNA, 609 bp, Homo sapiens
taaacaccaggaaatcatgactctgaaactgaaacatctaaagtttatgtcatagtttagttcttcagtttccttaaggaagtattccatttctcaattatttctagccaagtccacatgtaatgggtcatatttcttgcttccttaaaaagtgcttgttgtctatattgctattctaaagcctgtttctacatgctactaaatgaaaattgaaggcagaggaagccaattacatttgtgattgattcatcaactcgttgatttaataagcattatggaatagttactatataccagatagtcttacaggatttggggtagtagcagaacaaggaaaaatccagatgttccttctctcatcaacttacattctaaggtggaacacatcarataaatacatatttaaataagtcaagtggtgatgaagtgtttgaagaaatagaaagcaagtatctgaggaaaggatattttgagttggaaaataacaagggcaaagatcctcatgggggtatagagcagaatgtttgaaaaacagcaagggaacaacatggttgaagctgagtgagtttaaataagggataattaggacaaggagttgtcagggatacc

SEQ ID NO: 254135 - DNA, 609 bp, Homo sapiens
taaacaccaggaaatcatgactctgaaactgaaacatctaaagtttatgtcatagtttagttcttcagtttccttaaggaagtattccatttctcaattatttctagccaagtccacatgtaatgggtcatatttcttgcttccttaaaaagtgcttgttgtctatattgctattctaaagcctgtttctacatgctactaaatgaaaattgaaggcagaggaagccaattacatttgtgattgattcatcaactcgttgatttaataagcattatggaatagttactatataccagatagtcttacaggatttggggtagtagcagaacaaggaaaaatccagatgttccttctctcatcaacttacattctaaggtggaacacatcaaataaatacatatttaaataagtcaagtggtgatgaagtgtttgaagaaatagaaagcaagtatctgaggaaaggatattttgagttggaaaataacaaggrcaaagatcctcatgggggtatagagcagaatgtttgaaaaacagcaagggaacaacatggttgaagctgagtgagtttaaataagggataattaggacaaggagttgtcagggatacc

SEQ ID NO: 254136 - DNA, 574 bp, Homo sapiens
aatattcttgctgcacaataatcagtttgtgtaattttgttttatggaaagtgtactaaaattgggccagaatttattctacatattcataccaggacagatcctcaatgttgatggctcagaagctggaatttattatttcctggaaatatagatactaaccaaaagataaaagagactggaatagacaccaaaacagcattatactgactttcaccaagaatataatcacataaacaagatcagctcattctccacctatactcaaactgttcaaaaagtcagatctaatcaggatgtttctttggtgactacacattcagaaaaatgtggatttaaaaaatatcagccatcctagatgaaggaatatcttactggttcttaatttttgagtaaaagacatctctgaaaatctgatgaagctatgtactatctcctaaaaagtacatttatttatgcagagaccattgcatataattctataaaattgctaacttygtaactactgtatccaaaattcagaaagtttacctgctaggatcctactcttcattaaaatatagaagtaaccact

SEQ ID NO: 254137 - DNA, 405 bp, Homo sapiens
ggctaatcttgaaacaagccaggcatggacacccgaaattccagagattacctcaaggcggtttgtcaacaatctggctattgttgagatgatgtcagcctatgctccaggtcagcagtccccagacttttcggcaccagggactggtttcatggaagacaattttttcatggatgagggcaggggtttagtttggggccaaaactgttccacctcagatcatcaggcattagaatcttataaggagcttgcaacctagatccytcacatgcacagttcacaatagggtttgcgctcctgtgataatataatgcccctgctaatttgacaggagtcaaagctcaagtggtaatgctcccctgcccatggctcacctcctgttgtgtggcctggttccagtctgcc

SEQ ID NO: 254138 - DNA, 553 bp, Homo sapiens
gcaatcagtagttttgatttaggtgaagcacccatcaagtaatggcagtagtaattgccatttgccaatgtcttggcaagttgaggtgaaaccaatgtctttagtccgtgttaaagtcaatgcatgtggaatggtatcccataattgacttacttattttttttatgatgaatgggttgtaaacatcagtgcctgtgtcatagatctaaatcttaaaccaattttggcaatttcttatagggccatgactagagaatgatattgtcatattggtttatatcattaaatttttcatattaaaagtgcttttatagtctaatagaaagtaataaaacttttattagatttatacaccaaacatataaaacaatattgatgctctgatttcaatttttaaactcctgacattatcccaagctgcaatgactgttaattcagagtacctcatgaaataggacatttcaacttgcatgtctygtgagcacctcaaatttagcaggtctcaataccagctctcctttttcatcattttcctcatcttcatgctcaccaa

SEQ ID NO: 254139 - DNA, 606 bp, Homo sapiens
tctgtaatcccagcactttgggaggctgagacaggtggatcacttcaagtcaagagctcaagaccagcctggccaacatggcaaaaccccatctctactaaaaatatttttaaaaagttagccgtagtggcacatgcctataatcccagctactcgggaggttgaggcaggagaatctcttgaacctgggaggcrgatgttgcagtgagccgagatcgccccactgcactccagcttgggcgacaaagtgagactccgtctcaaaaaacaaacaaaccgaaaccactatatcatttagattggcacccccaaacatgaaatacttaggtctaaatctaataaaatatgcaccagatctgtatgagaaactctgatgaaagaaatcaaagaactaaataaatggagatttatttcgtgttcataattagcaagactcaatattgtcaagatgttagttctttccaacttgaccagtagattgattgcattgccaatcaaaatcccagcaagttattttgtggatatcaacaaactgattataaagtttatatgggtattcaaaagacagaacagccaacacagtatgaaggagaacaaagttgcaag

SEQ ID NO: 254140 - DNA, 606 bp, Homo sapiens
tctgtaatcccagcactttgggaggctgagacaggtggatcacttcaagtcaagagctcaagaccagcctggccaacatggcaaaaccccatctctactaaaaatatttttaaaaagttagccgtagtggcacatgcctataatcccagctactcgggaggttgaggcaggagaatctcttgaacctgggaggcggatgttgcagtgagccgagatcgccccactgcactccagcttgggcgacaaagtgagactccgtctcaaaaaacaaacaaaccgaaaccactatatcatttagattggcacccccaaacatgaaatacttaggtctaaatctaataaaatatgcaccagakctgtatgagaaactctgatgaaagaaatcaaagaactaaataaatggagatttatttcgtgttcataattagcaagactcaatattgtcaagatgttagttctttccaacttgaccagtagattgattgcattgccaatcaaaatcccagcaagttattttgtggatatcaacaaactgattataaagtttatatgggtattcaaaagacagaacagccaacacagtatgaaggagaacaaagttgcaag

SEQ ID NO: 254141 - DNA, 633 bp, Homo sapiens
tttttttgcgtgtgcttttcttggcctttgtttgcttctattcttttatttggaatcaaagataagttatcaactctttaaaataacttgttatatgtataagatgttttctgtaagcctcatggtaaccacagtacaaaaacctatagtacaattcctaaaaataaaatacaaaaaaattaaaatatactaccagagagaatccttagccrcaaaggaagaaaataaagaaggaaaagtgaaagggaggagtctcaaaacaacaagaaaacaagcaacaaaatggcagtaataagcccctgtttatcaataataacactgaatgtaaatggtctaaattctccaactaaaaggcatagagtgtctgcatggataaagaaacaagacccaactatatgatgccttcaagaaacccactttacctagaaagacacacacagattaaaagtgaaagggtggaaaaatgtttcaagcaattagaaacccaaaaagagcaggaatagctattcttatatcagataaaatcagatgaaatacttatttcagacaaatcaatgactataaaaaaagacaaagaaggtcattatataatgataaagggatcaattcagcaagaggatataacaagtataa

SEQ ID NO: 254142 - DNA, 433 bp, Homo sapiens
ttactagccgcctttcttcaaatgaccatttatttttgcattttagtaaattatctaaaattgtcatttgctttactttttggtattcccgaaacagcatatagaaatgtgatcttaatagatggaagcctcttgaacattggtgtctgctatttcttgagtccttttrtggaagaacactgtccatttcaagttgcctttgggttttgttttgtattttttgacctgttttcttatttgtctttttctttctcttgtctgttttcttgtatcttgtcaacataagtgttttgctatgagtattccttcttgccaaggggatgaaatgggcacctctttttccctgttacgattgttgtttaaaatgaagaaagctgatggatttgttgagtttatagccacaatatgtaaaaggggctatagtgtcctaaac

SEQ ID NO: 254143 - DNA, 592 bp, Homo sapiens
taggttccagtatcttcatctttgaatacaaaagcaagggaggtgaaaggaaatcttcagggctcaccctgctataacaatttgaaaatgtaaaatgagagggggtagaggaaaaagatatgtggattttacagtgttgcaaaaaaaaaaaaaaaaaaacccttaaaggacacaaactagtctttcaaatctggcagttttaccactgctttaattcctaagtgctcaattaacatgtcctattagatcattggcatgttgcctgaaaccagaggtgaggtatgaagggacatcaacagcctcccacttgcagaatctggtaactcatgcaaaaggatatgtttccaacacacttactaatagaaattacgatgttgatcaggtccaatgaatttccagttgtctccggtttttaaaaggccatgtacttggtaggcaagttctagatctctgagagatgagcactgaaaatatgcaagtagtaagtatcactctgatamcctgtcagccagtggttcacaaataaataacaacagtagagtgtcttgtgaaaataatgttgattcaacatattattggttgacagcaagta

SEQ ID NO: 254144 - DNA, 497 bp, Homo sapiens
catacgcttgagtacccagagtaaaaaccttgtgaggatccayactaaatactaggttggtgcaaaagtaattgtggtttttgctattgaaagtagcggcttttgtaattgcggtttttgccatggaaagtaatggcaaaggccacaattacttttgcaccaatctaatagtaaagcaattaaattacccttagggaacaaggttcatcctaaaactgcctgaaatttttcctatgataagcatgattacataaactaaaataaaaaccattatcaattttaacttactaataggcaaatctgaaatattatggaagcttatctgttcaggggcatgaaaaatgtcaatgtaaacaataaacaaagggtagggatagtatgtgattgaaaagtacagattttaggccaggcgcgttggctcaggcctgtaatcccagcactttgggaggtggtcaggagttcaagaccagtctggtcaacatggtgaaactacatct

SEQ ID NO: 254145 - DNA, 624 bp, Homo sapiens
ataaactaaaataaaaaccattatcaattttaacttactaataggcaaatctgaaatattatggaagcttatctgttcaggggcatgaaaaatgtcaatgtaaacaataaacaaagggtagggatagtatgtgattgaaaagtacagattttaggccaggcgcgttggctcaggcctgtaatcccagcactttgggaggtggtcaggagttcaagaccagtctggtcaacatggtgaaactacatctctaccacaaaaaatacaaaaattagccaggtgtggtggcgcacacctgtagtcccagctattcgggaggctgaggcaggagaatcrcttgaacccaggaggcagaggttgcggtgagccactgcactccagcatgggggacacagtgaacctccatctcaaagaaaaaaaaaattatagattttagagaaagaagaaaaaacagaagcaaagacatgaacagaagagttagaaagtgaaaagaaccagggagaaccctccagttacagataaatttaggaaatggatagcaaattaataaagaaatgatacttactatgctcatggctgactgaaaaaacttatctgaaaatcaaagttcacaagagctttggttac

SEQ ID NO: 254146 - DNA, 553 bp, Homo sapiens
ttctctacactcctttccctacctgttttgtatgtttgtggtagtaaagctgtaatgacagtacagatagagtttcacaatttactcaagcatgcttccctttgctaatattcttaattttattagttacataatattctcttttcaatgtattgtttctaggttattttaggctctctcttttgggtaaattcctagaaattattattactattgagacagggtcttgctctgtcacctargctggagtgcagtggggcaaacgcagcttactgcagcttcaacctcctggccacaagcaatcctcctgcctcacactcctgagtagctgggactacaggggtgcgccaccatgcccagctacttttttcatgtttagtagacatggaggtctctctatgttggtttcaaactcctgggctcaagcaatcctcctgccttggcttcctaaattgctgggattacaggcgtaagccaaaactactgctgcagacaggcaaatttatatacataagacaaaccaacacagctcccccagaacccccatccccca

SEQ ID NO: 254147 - DNA, 609 bp, Homo sapiens
gctggtgggcatctgtaatcctaactactcaggaggctgaggagggaggactgtttgagcccrggagttcaaggctgcaatgggcaagatcctgtatctaaaaaaaccacaactttctgctcaggctgtacaggttaatttacaaattctctcttcttaattcatatgcagagaagataactacaacaattaatcacataaactcaagaaagctggtcaattttctatataaattaacacaatttaaggccatacataccaggttgatcaaacaggcgaataatatggtgatatgttgcaagcgagggttctcaaattaccaggtagacagaaaaaataaacaatgaggtaaaaacacagcaatccaaaacatagtttactgagacacactgaattaaaaacatattgttaatatttaagcaaaatatgcatttctattcctttgaacaaagttattttccaactcattaatgtaaaggtaaaaaactatcacaaagactgtatcactttttgaaagtccaaatacttattagtcacattcttcactgagaacagtaaaatatattgaagtgaattgattcccaaagcaactttcaataaagtaattaa

SEQ ID NO: 254148 - DNA, 596 bp, Homo sapiens
caggcgaataatatggtgatatgttgcaagcgagggttctcaaattaccaggtagacagaaaaaataaacaatgaggtaaaaacacagcaatccaaaacatagtttactgagacacactgaattaaaaacatattgttaatatttaagcaaaatatgcatttctattcctttgaacaaagttattttccaactcattaatgtaaaggtaaaaaactatcacaaagactgtatcactttttgaaagtccaaatacttattagtcacattcttcactgagaacagtaaaatatattgaagtgaattgattcccaaagcaactttcaataaagtaattaatgaaaaatatacaatacactagcacacacttaggttcaaatacctaattatgttgggaaartgtcatgaatttaaaactagctaactcaaagcaatcacttctcctcagattcaacagatccataaacaaagtacctaaaatactaatgaacactaagatgataaaggcactcccactataataagtacatgtaagtaaatgtgccaaacatggaaagaaaatttccaacatattatgtaagcacaagaataatttaaa

SEQ ID NO: 254149 - DNA, 571 bp, Homo sapiens
taaatacctcctcatgaaaaatgtcacatgagcatctctatttgactgatccaaaggatttcttgagacctagttctagaagtaaaattcgcgagtcgagagagaggctatgactcaacttacaggcgggccccggcacactactgttctgtctccagcctagtgtgttctctcctctaagtccacgtatgaatttttgagggggcccaggccacggagtctttccctggccagaatacatcatgtyattactctaagtggcacaggccagcccaaacatttctgatcaacgctttgccttaatatgaagtaggtgaggacaacatattgttaaaaagtaaactaggacagaagtaactgtttaaaatctctcttcctcctataccactttttatcaaggctatcgtaccacacatctcagtacaaatctctactaccctgacacatggcaaaacaacccatcttatttttaaaagcaatttcttcaaaaagaagcttaaggaaaaaaaaaaatcaaggccaacagttattaccaatgcttctgactgtccagtttgttgaaaatggtaat

SEQ ID NO: 254150 - DNA, 596 bp, Homo sapiens
agtgggggcttgaaatacagccagtactcaataagygctagttactttcacttgtaaaaggaagccctctggatgcagctggcctgcctcagaaggacctcagggttctaaggaaggcacatccacagtccagccacatgagtggctctgcacctggcagcagatgggaatcatctgggagcttttgtaactccacttggaccctaccccagaccaattaaatcagcatctctggtgtgaaaccaaggcatgaagtgaagcagattccaagactagtatcacaggtgaattatctacccattcattcattcgttgaacaaattaatacttaggcagtatatgaaggggagaataaggtagcagtgggttagagagaagtgttggagaaggaaaaaaagacctgctgccattttttaagaagaggcttgctggatgctataccgaaatcatatgtcacataatcctctcattggtcctgcaggcaggcattagagattagatagtggacactcagggacagttgtgtaatttgtgaggttgcaggtctcacaagagacagagctcagatgcaaactcaggtctactttgggaagcca

SEQ ID NO: 254151 - DNA, 596 bp, Homo sapiens
agtgggggcttgaaatacagccagtactcaataagtgctagttactttcacttgtaaaaggaagccctctggatgcagctggcctgcctcagaaggacctcagggttctaaggaagrcacatccacagtccagccacatgagtggctctgcacctggcagcagatgggaatcatctgggagcttttgtaactccacttggaccctaccccagaccaattaaatcagcatctctggtgtgaaaccaaggcatgaagtgaagcagattccaagactagtatcacaggtgaattatctacccattcattcattcgttgaacaaattaatacttaggcagtatatgaaggggagaataaggtagcagtgggttagagagaagtgttggagaaggaaaaaaagacctgctgccattttttaagaagaggcttgctggatgctataccgaaatcatatgtcacataatcctctcattggtcctgcaggcaggcattagagattagatagtggacactcagggacagttgtgtaatttgtgaggttgcaggtctcacaagagacagagctcagatgcaaactcaggtctactttgggaagcca

SEQ ID NO: 254152 - DNA, 583 bp, Homo sapiens
ttgaagtgtgcccaaaatttgaagatgtagttaagttaaaaatataaagatgtatctaaattgaaaataataggctataatatccattatggttgacaatgaatagatcaaaattaaatatgtctgaaaatagtattagaatattttagtaatattattgaatattagaataatattttaatataatttaataatattttgtgaccataccttaacataaattacctacaataggtatatcaggaccaaaatgttgttagaagagaaatcaataaaatgaaaactttataaggtattctaaaagcaaggaaattagaatcaaatgaaaattataagtagatagacttaactacacgtttatgtgctcacatataaatatactaaatcatgtgatttattcattatactgttaatatgatcaattrctatgattgattttcagttggtaacaaacattgtgttcctgagataacacaatattagtcgttatgtattatccttttctattacctgattctgtacagaaatattttgctaaggactttcacatgcatttcatagtttgtataggtctatggtttta

SEQ ID NO: 254153 - DNA, 484 bp, Homo sapiens
ggtccctgtgttccttgttgtagcaatctagagaggaatttcctactyactgagctggtagaaggaagggataaaactgacttaattcgcattccacagactctggcctttctcaagatattttcatagattttcttaaattgtcatgtcttcatttgctgtttgctcttagggctatttccagaggcttttaatagaagtgcacatgtgtgtttaatagttttcaccagtttcactgaggagtgggtcaatagaactcctcacatggttacacagaaagttgatctttctcctctattcgaagaagtgttttattagtatattgaacaagatgtttctaaaattttatattgatttaaataacttacaatggccaaatattgtagatgaaaatcaaggctgtagataccaagatttattatgcagtaaaacaattaaaacaggtgctattaagacagatgcgtacaattaaccaacaaaacaa

SEQ ID NO: 254154 - DNA, 638 bp, Homo sapiens
aaataaataacttgaattctgtattataccatgcagaaaataaattccatatggactacaaacctaaacaaaaattataaagcaataattttttagaatgtgctagccaaaaatgaaaatatatttttcgtattgtattaaatttgaatttctatttcttaaaaacttaatattgtgaaaaaacaagctacagaatgggaaaaaatatctgcaatacatacacaagagagarcactcaatgagaatgtataaatgactcgtacaaatctctaataaaataaaagacagcccaataatatgtgagtaaaaggtttgaacaggcactttaccaaagaagatactcaaatgagcaataacgtatgaaaagttgctaattattttttaacaaataaatccatattttaaatcacaatgtgatatgtttatgactccaccagaatagctaaatttaatagtaggacaatatcagattttgaaaagaatgaagaagcaaaattttatatgttgtttgtggagtcgttattatttatatccattttgcaagaatgtctggctataagtatttaagcaaaaatgtatacactctctaacccaggagttcaactctgaatatactgatggtatcctggtatatacta

SEQ ID NO: 254155 - DNA, 545 bp, Homo sapiens
aaatttgtgtcccttctctaccacaactccactctttccatcctgccctgtaccctgggaagctcacctgcatggactacatgaagatttccttgccgtgtggcttctcgttaaggttaagcaatgagagtacaagcccaacactgaaatgtaaagaggggagagatactagtgagctttttctagtctttcagattaacaaggatcacctgtgttattctacttaaagacacaattcctgtcctacagccattctctccatgagtttgagtaatgactctctcccattgaccttagtgttcaacagatgataatgcctcccaaattttgctctgtgataccactactccatgtgttgttgatatwcttaactttgactatatatgtactaatagttcctttgttgaattttttaaatcactagagtgattgtgcacattggcttaattacagttccagtttatgcttcttgttctggtgtacttattaatttcagattagcagggattggacagtaggtgatatgttcaacttatgagtaatct

SEQ ID NO: 254156 - DNA, 613 bp, Homo sapiens
ggcacagataccaagacaataatgccttcataatatctttttagtattttttcttgaaaatatgaactactgacttttaaattttgtgcttttacatatcaaaacatttattttacaagttaataaatttaattatgttaattttgttataayctctaaagacagcaaatcccactcttttattctctttacttttattcatttataaattattttcttaataaatcagaaagggcagaggaaagtcacaaaggtacaaaacgtacacatttttgtaccttttcctttttttaggtaagcaacattatctggtaggaaacacatattccttttattttctcaaggtcttgagattattttaatcttttatattttcccattaaaaattttgaaatggtaaaatgattaatagtgattttattcattttgaataaataaacaattaataataatgggaatggtgccataacagaaactgatatagagctatacagatatagatgtgcaaaaagagaataattttaaattcacctttcatgtattaatttaaaagaaaatacaacttaaaatgttatattttaatttttacaataatgtaattatgaatataaac

SEQ ID NO: 254157 - DNA, 613 bp, Homo sapiens
ggcacagataccaagacaataatgccttcataatatctttttagtattttttcttgaaaatatgaactactgacttttaaattttgtgcttttacatatcaaaacatttattttacaagttaataaatttaattatgttaattttgttataacctctaaagacagcaaatcccactcttttattctctttacttttattcatttataaattattttcttaataaatcagaaagggcagaggaaagtcacaaaggtacaaaacgtacacatttttgtaccttttcctttttttaggtaagcaacattatctggtaggaaacacatattccttttattttctcaaggtcttgagattattttaatcttttatattttcccattaaaaattttgaaatggtaaaatgattaatagtgattttattcattttgaataaataaacaattaataataatgggaatggtgccataacagaaactgatatagagctatacagatatagatgtgcaaaaagagaataattttaaattcacctttcatgtattaatttaaaagaaaatacaacttaaaatkttatattttaatttttacaataatgtaattatgaatataaac

SEQ ID NO: 254158 - DNA, 604 bp, Homo sapiens
taatggtctaggaagaaaaaattaattttgatttcaccaaagaaaaacagtttgttgaaaatcaatcagytctcatacatagctaagaaaatattcactgcttttcaagccatcaaatgcttttaataaatatctaaaacaaggtggttaaaatgtcaactagcacttttattaagtatttttctggatttaaaaagagaaatgtcatagcatatcctatcttctagatttgtattctcttggtcaagagcaagcatgagcaagcctctgaagagctgcatctctaactgcaagcatccccacgtacttatatatatatgagcaggcactggccctctcttttctgacattccctgaagtgttcaatattaacaagctgttcattgaactaggaacaaattggttggaatcatatttgctatgttttattaaagcataggcaaaattacaatttcaaaactacaagggatctgattccaaatgttatttttgtatatgatgaattttaaaaagtgttaaagggtgatccaaagttgcctatctattcattagcatgtcttgctttatgaaatccagaggttttttctattatgatatatgttgc

SEQ ID NO: 254159 - DNA, 501 bp, Homo sapiens
caataatataatatatggataaaatagctagggagataggtaaagagagaaayggaaagaggaaagagaggaagagagaaaaagagagagaatagcactttaagataatatgcatgattgattcttgatgaacagaaactatagaatctatgaacaataaaatattattgaagaagcaaagctataaaagtatgggtatgaaagagaactgctgcagaaagtagatgccctataaagtgtgctctgtatcacaaagtgatggttagcaaagcaggaaaaatcaatatattgagagatttggaattgctatagagctttcaggcaattcatttccaaacgttgaccaaagtttctttattactggaagaaagagtgaaaattatgtcttcctatcaaaatagacagcttgggttggcaataaaggacagtgctcttaggtcagtagggatgactgaggggaacagggaacactggactccagaagacaattgctgaagttgc

SEQ ID NO: 254160 - DNA, 634 bp, Homo sapiens
caaaataaacatctgtttgaagatagagtaatgttaccatggaatccacaacttcagaatcaaagatcctcctgtgaaggaaaataaactgaagcaagcctgattttgcacaacacctttctccttgagacatttgctgattcataagaggcagaggatagagagaccaagaaatcaagcagaaaaaagaacgcacagtgtttgaatgacaaataaataaatacataagaaaaataaaaattggatttcattgtctgcaaaggagaagcagcctcggtaaacattccaaacttgcagttaaaatttcagaagggctatactctagaatgaggtaaagaaasagtccttaggaattattaaatgtagtctcaagccaagacaattccagactgactgaagagacttattcctaccaaaactgcatcccagagtccatccttattggataaactcttaaagcaccatgcccaaagatttacacgtgtgaattctatcaagctttcaaaaaccagataatatcatgccacatacttttccccaaacataataaatttagaatgtctttcaaatattttctgcagcaagtataatattaataactaaaatgattaaatagcacaaaataaaattatag

SEQ ID NO: 254161 - DNA, 626 bp, Homo sapiens
gtattctatgtataagattgtcaatgttatggaagagaatcctgatagagagggcattatgaaaatcttgatggattatatgattgaagatgccaccattgtttaaaaaaaacaagccgtgatattcatcaagcctgaaacaatgaatttctgctggaaaaatctgtgtcgagatgttgtgtatgacttcaaacgatttatgacagagccagtcaaagaaatcacgaaagagattttggatactgcaaaagggttgagggggtgggtaatagagatatttatagtgaagggtttcactatatatattttagtgtgtaaagtgrcctatggagtgctctgtcatgtttttatgtttctcaaatccccttctaaaaatgtaaataaatgtctttaaaataattactcttttcagtaaattgtgtatcacagtaaaagtgatgtctcatggttcttatgcaaatttatcacacacacacacatatatatatatatatatgcagaatttattaagtgttaactcacatgatcacaaggtcccacaataggccatctgcaagctgagaagtaaggagagccagtccgagttccaaaactgaagaacttggagtttgatgttcgagggcaga

SEQ ID NO: 254162 - DNA, 202 bp, Homo sapiens
caaatcattttgcagtaaaatagcttgttacattctactgtcaccaaatgtaggtcaccaatttgtgtggacatagaggaggaaaaaaaggggaagataaattggatgtagctatgtttatgctagtaaagctctaggaaccactgggctctcatakttggggcatgaagtaaacattctactggctaaggagttgggaaga

SEQ ID NO: 254163 - DNA, 631 bp, Homo sapiens
gctcacagtgagtgtctgggaatcataagctaagctgcaatttttatccattagctattctaatatttttaaacataaaagaactagagtgagaaacaaaagacaggttgaattaattcccccagtagcactttcaaaggctttttctgagaaaccttcaaatttaacttagttttatttgccattggcctataaatatagctaaatgtaacaaacaaaataaagaaaaatccatcaaaattttaaaatgtaktattttatgcaaaaggaaatatgtaaagcagactatactaatgatttgtaaataaaagcaatccaccaagtaaactattgtatgccatatttgataagaagtgaaggcatcactaaacaaaaattaatttagatccacaactaaagaaatacataattttttaatgattaatttgcaattatattatggccttggagagagttgggaatgtgattctaaatccctcctaaatctaacaatgaaaggaaacatagatgattgcccactgtgaattttatctttcaaacggccaagatttttgagaggtcccgagacttcatgctggttcttgatcttcataaaatgtttgtcttatccaactgcactactaaggtgaac

SEQ ID NO: 254164 - DNA, 581 bp, Homo sapiens
aagtgatgatagattaagtacattaagtaagaacatttctgaattaatcatcatatgtagattgttgaaatgataaatagtaaagtggcaaaataattaaatgcatggaaatatttataatgaatactaaagaagaatatttaaataccctttaatattttaataaaatcatatacaaaatatattaacagacatgtcttaaaagaacaacaaatgatcaataaaagcaaaaaaaaagctactgatcaaaattataaaataaaccaatattgatttattcttcaaactattagtttgttgtattaaaacaatattttaatagtaagtgtgttgtggtgttagtaaacttagacttccaaagaagtattattcagtcattatttagtaatagtcatattaatgttattagttattatatcataaacytcatcaaagtaattttaactgcaacatgtatatatcagagtgtttaatagaaagtgacttataaggccttttaaagtctatacaaatcaaaagttgtatttataatgcaaattaatcaggagtaacctctatatttgatatatgctgaccctgta

SEQ ID NO: 254165 - DNA, 394 bp, Homo sapiens
ctggaggcccaaacgacacattctggtttcccacagtcacagccagtgcaactgtatgacaccctgagtcctgagaatcagcacacagcactcattgtagacatcactgttgtccaaagactggtctggctgccatccttatgccaagcaaagcattgccatagcctaggccactaaggaactcacagacaccaccagcattgaatacagccacagaaattatgtggagactacattaacgcacccacccagaatcaaaggcaaagcwatttacaccaccaacattatacatacatctacagaaaaaaatattttcctaggaaaactaatccaaaaaattgtaagaagtgactgttataccagctgcacagataggaacataaggacacaagaa

SEQ ID NO: 254166 - DNA, 575 bp, Homo sapiens
aagaagaaaactggaggcagactacctgacaaaaaatatactgcaaaacaaaacagcatggtattggtataagtaaagacacacagactaataaaatagaagagagaacccagaaacaaagcaacagtttacatccaactgatttttttaaatggcatcaagaacatatattgcaaaagggaatagtctctttaataaacggtgctgggaaaattggatatttatatgcagaagtataaaagtagaccactatttttcaccatttacaaaaatcaactcaaaaagkattaaaggcataaacataagactaaaaactctaaagctgctagaaaaaaatggagaaattcttcaggacattggtctaggcaaagattgtatagctaggactttaaaagcacaggtgaagcatgtatagacaaatggtactatattaaactaaaaagcttctgcacattgaagaaacaattagcagagtgaaaagcagcctgttgaatgagaaaaagtatttgcaaactattcatctgacaagggactattaacctgaaaatacatgaattcatgcatctaatggtaaa

SEQ ID NO: 254167 - DNA, 575 bp, Homo sapiens
aagaagaaaactggaggcagactacctgacaaaaaatatactgcaaaacaaaacagcatggtattggtataagtaaagacacacagactaataaaatagaagagagaacccagaaacaaagcaacagtttacatccaactgatttttttaaatggcatcaagaacatatattgcaaaagggaatagtctctttaataaacggtgctgggaaaattggatatttatatgcagaagtataaaagtagaccactatttttcaccatttacaaaaatcaactcaaaaagtattaaaggcataaacataagactaaaaactctaaagctgctagaaaaaaatggagaaattcttcaggacattggtctaggcaaagattgtatagctaggactttaaaagcacaggtgaagcatgtatagacaaatggtactatawtaaactaaaaagcttctgcacattgaagaaacaattagcagagtgaaaagcagcctgttgaatgagaaaaagtatttgcaaactattcatctgacaagggactattaacctgaaaatacatgaattcatgcatctaatggtaaa

SEQ ID NO: 254168 - DNA, 496 bp, Homo sapiens
tggaagattaatagtgtacatttttgcagtgtagtagaacctggccactccttcatttgcaaagctctgggtcagtgaactgattcaagtctgaaaattgattgatgtacttttactctctgtgattcaagtcaaatttctgttcatgaaacctacagctttttcaattatacagatcagggaaaactttattaagctatccaactatttcatctctagagacgccatgattaactagccagycctgaagatgactgtgagatagaccatcctgactcctccttaagctctattgtccataacagtaaccctgtccattttgtctttggtgattaagtgatccactgtcacccatatttccaaagtttctatgtgtaaattggcaaaatcatacagtcattttgatatatatatatatatatatatatatatatatatatatatatatatacagcacctcctcatgaattgaactttgtatctcaccccctgaaat

SEQ ID NO: 254169 - DNA, 496 bp, Homo sapiens
tggaagattaatagtgtacatttttgcagtgtagtagaacctggccactccttcatttgcaaagctctgggtcagtgaactgattcaagtctgaaaattgattgatgtacttttactctctgtgattcaagtcaaatttctgttcatgaaacctacagctttttcaattatacagatcagggaaaactttattaagctatccaactatttcatctctagagacgccatgattaactagccagtcctgaagatgactgtgagatagaccatcctgactcctccttaagctctattgtccataacagtaaccctgtccattttgtctttggtgattaagtgatccactgtcacccatayttccaaagtttctatgtgtaaattggcaaaatcatacagtcattttgatatatatatatatatatatatatatatatatatatatatatatatacagcacctcctcatgaattgaactttgtatctcaccccctgaaat

SEQ ID NO: 254170 - DNA, 588 bp, Homo sapiens
tgaaagtacttgtctcatattccctgactgatcatcttaaattttacctaaaatgttgattattgaattattgagtattgmaaatacctttatactgatattttaacaaatttaacatcattgactctgatgctggaataaaagattttcagatgagattgggtaccctcagggtggtatgaccttggatggacatagaaggtttcatacatgccactgagtttatggtaattttaatatttccatcacttgtaaaatagcaatgctgttattttagggaaaataaatgagaaaaaactgtgtgtcaacaagtgataaacatgaataatatgtaatcagaagtaggtttgggaaatgactttctgtagacttgatctagatttaaacattaataaatattacaaaatttttgaaatgttggaaaaaattgtaaaaatcattacaagaaacatttttgtgaaaccatttcgtggtttttaaaattacattcactttgtactgcttttatacttttaactattatgttatttaatttttttcacattactgtctaacttactattttatatagtcctcagtattgcaaac

SEQ ID NO: 254171 - DNA, 588 bp, Homo sapiens
tgaaagtacttgtctcatattccctgactgatcatcttaaattttacctaaaatgttgattattgaattattgagtattgcaaatacctttatactgatattttaacaaatttaacatcattgactctgatgctggaataaaagattttcagatgagattgggtaccctcagggtggtatgaccttggatggacatagaaggtttcatacatgccactgagtttatggtaattttaatatttccatcacttgtaaaatagcaatgctgtyattttagggaaaataaatgagaaaaaactgtgtgtcaacaagtgataaacatgaataatatgtaatcagaagtaggtttgggaaatgactttctgtagacttgatctagatttaaacattaataaatattacaaaatttttgaaatgttggaaaaaattgtaaaaatcattacaagaaacatttttgtgaaaccatttcgtggtttttaaaattacattcactttgtactgcttttatacttttaactattatgttatttaatttttttcacattactgtctaacttactattttatatagtcctcagtattgcaaac

SEQ ID NO: 254172 - DNA, 588 bp, Homo sapiens
tgaaagtacttgtctcatattccctgactgatcatcttaaattttacctaaaatgttgattattgaattattgagtattgcaaatacctttatactgatattttaacaaatttaacatcattgactctgatgctggaataaaagattttcagatgagattgggtaccctcagggtggtatgaccttggatggacatagaaggtttcatacatgccactgagtttatggtaattttaatatttccatcacttgtaaaatagcaatgctgttattttagggaaaataaatgagaaaaaactgtgtgtcaacaagtgataaacatgaataatatgtaatcagaagtaggtttgggaaatgactttctgtagacttgatctagatttaaacattaataaatattacaaaatttttgaaatgttggaaaaaattgtaaaaatcattacaagaaacatttttgtgaaaccatttcgtggtttttaaaattacattcactttgtactgcttttatacttttaactattatgttattkaatttttttcacattactgtctaacttactattttatatagtcctcagtattgcaaac

SEQ ID NO: 254173 - DNA, 610 bp, Homo sapiens
tacatcaaagtagttaaataaaaggagaargaacataaaaaaatttcctttgaggaaatggcattttttaaaatgagaaacttgaatgataagaaaaatcaggtataaaaagattgttgaaaagcatttcgaaccttgagaatattgactatttgccaaaatatggatgggacctcacaaatataaccttgatttaaaaagccaagtactaagactaatgataaacaattctttatttgtaaggtacaaagaagacatattaatcttcattgttagatgccaggagagtgatgacctccatgccttcaaggggacttttaggggtggagatgcataatggtaaaagagaggcttctggggtctaagggaccaaggaaggtttctgggggatctgtccaggtataatatgcttgtgaaaattctgtgaatcacatagttattatataaacaaattatatttatacatatgctatgatatatagacagtaacgtaaagtttaaaagttatattaatcatatgacatagatgtattattcacattttagactctttcctaagagttaacatttgttaagaactgatgtccctcttctgacatagaactataaa

SEQ ID NO: 254174 - DNA, 591 bp, Homo sapiens
agggtcagtaactaatcatggcacttctttcaaagtgtgccagtgaatggccactgcatctgttattcagttcaggcatacacagcaagacctgtagttgtactaactctttgtctgaagtgatgaacctgtatggcagtcacaaaaatggataatagaatgagacaattgccccataaagacgaaaacacagcaaataaatgaaactataatggtgtaagaaacatgaatgaaatgtaaagaaagatayagaagaaaaagctgatcatgggcatgttgatgctgccactgttctagagattatatacatatccagctagaagatcttactgagagcaaatttagagacataataaggaaaacggttgcaaagaaaagataaagatattccagagaaagtaaaaatgcaaagcaaaaatgttcacgttaaaggaaccctcagagatatgttacaatattaaaaagggccaaattcaaccctgggcctgtttttatatgatctgtaagccaagaattaagaaaaaaaaaacttacatttttgatggattgcacaagatgaaagaggaggaagagaaagagaagagctagaga

SEQ ID NO: 254175 - DNA, 461 bp, Homo sapiens
ccaatggagaagatattctattttttaattagtcaacaaactctgtcactgataatcttctattatactcaagcagaccaatatttgtcacatatataaacgtgattattccaatacagagtcacatgagaaaaaaaactactcacattaattttcaggctgattaaagaaatataagcggcattaattcatttaaaaatattgattgtttactatatgycaggctttagaaaatgatttgtttgagtcaataagctaactgttccaagtgtactattagtttataataatttttacaagtgcaagatcgatggagtatggggtttgtagtttcttggagaaaatttatatttcttggagggttcagaagagtcctaaaccctcttcaaactgttaataatatctaagaaaactattattgggttatatgtatatatagagagagtaagagtaaaaacaag

SEQ ID NO: 254176 - DNA, 627 bp, Homo sapiens
cacatgagaaaaaaaactactcacattaattttcaggctgattaaagaaatataagcggcattaattcatttaaaaatattgattgtttactatatgtcaggctttagaaaatgatttgtttgagtcaataagctaactgttccaagtgtactattagtttataataatttttacaagtgcaagatcgatggagtatggggtttgtagtttcttggagaaaatttatatttcttggagggttcagaagagtcctaaaccctcttcaaactgttaataatatctaagaaaactattattgggttatatgtatatatagagagagyaagagtaaaaacaagagtgagagacaaagagagagagagagacagagagagagatgttacaaataattgtcttgtgcaactatggagcctggttaagcaagtctgaaattcagagggaaggtagtcaggaagagaaaatcagaagcagcctgtaaccccatgtgtacaaactatataaagtctttgaatacaggaaaatcaaatcctctttaaaaggacccacccaagataatcttcctaagattaatttaaagtcagatgattcagagactttaatcacatctgtaaaatcatttcacagca

SEQ ID NO: 254177 - DNA, 623 bp, Homo sapiens
cagttgatttttgttaaatgtcagtcagttttgaattaccacaaacttgctcatgaaagcctcatcgaagcaaataaaattatcaatatatatgtctcaattggttttcctcaccccagaaatatatttaagaatattagattatggcaaagtttttgtttattgtatacttrttaccaacagtgatatttgctttaataatatagatattttacttaattattactaactgatctctaattttgttcatgacagcagtctccagttaaaatttctcatctccctaggtttccttgcgactagatatagccatatgacatcattctgaccagtgttataaacagaaatatactagttgcagattacagaaagttactgtttttctaacttaaaaaaaaccataattaatatgtgcatatctttttgttttttatcttacaattttattttttactagaatttgaactcagtgcctaggtgtggagaagccatttttaaaccaaaaggctaaaagctccatcataaagaaagtaaagacaaagctagtatgtgcctgggtctttgatgactttgtggactagctgcagtagccatgggatgtatacctctgtactccttgccgc

SEQ ID NO: 254178 - DNA, 553 bp, Homo sapiens
aaagttttgcatatatttgttttgctaatatttttaacaatgtatacartttttaacaaatctatgcaaaactttctgctgttttaggcttgaaggtgggattttgccaaggacccttggctgtctactctctctatcacaactttattatttgtttctaacattgactttggtagtcaacacttttgaaggctgaaaaaccagactgctggtcccgatgaaacccaggatccagagggagaactgctcctgtttgtctgccctttctcaactgattctttctgaataatccccacatgcacactgggagaatggggtggagccacgggaggtttgcaccttgtgcagaggggaggagcctgacctcttaagttcatgtgtgtggtggtctggtattcaatatgtgaggtgggagcctgttagcagaacctcttcttttttggctgagagctttcttttaataaattgctctctcctcaaattacaatgtgtctgtgtgcctaatctctcctggtcgtgtgacaggaacccaattttaactgaactaaggagc

SEQ ID NO: 254179 - DNA, 590 bp, Homo sapiens
gcaagggacctggtagagacatggtggtagggggtgggggaaatatgtatacacacacaaatacaaacacaaaatatctagggatgaaaaactacattgtcyaaaatgataacgcatgggatggacaaaaagcaagggcaatatatggaaagcagttaaaaatgtatttattcatccaaccatattaacaatcgcttttaatatgaagggtctaaatatactagttaaaagagagactgtcaatgggattaaaaaacacaagaccaaactgtgggttgtctatatgaaactttaaatataatgtcataaagtaaaaggttagagaaaatcatatcatattaacagaaatcaaaagaaagctagaatagctatattaatctcaaacaaagcagacttcagagcaaagaaaattatcagggagtggcattatataatgataaaagggtaaattattcagaatgacacaaaaatccttaacgtgaggtgattaacaatggaacatcaaaatatgtgatgcaataactaatagagctgcaaggagaaatagaaatatctactattatagttggatatttcagcactcaactatc

SEQ ID NO: 254180 - DNA, 582 bp, Homo sapiens
gcaaacagcaataatgtgagtttagttccaggctaccgaaataaagcaaacatcacaatataccaactaacatatttctaaaaattttccagtccatgtaaaagttttgtttatgctataccatagactgttaagtgtgtaatagcattatgtctaaacattgtaataccttaattaaaaattgcatcattgcaaaaattgtgattgatcatttgagccttcagtgagtcataatattttgctggtgaagggtcttgcttctgtgttgatggcttttaactgattagggtggtgattgctgaaggctagagtagctgtggcaatttcttaaagaaagacagcaataaagtgtgccacatcaattgattctttcttccatgaaagatttatctgtagcatgcaatgctgtttgatagcatatccacggtagaacttattttaaaattaaagtcgatcctttcaaacyctactacagctctatcaactaagtttattgaatatttggaatcctttgttggtatttcaacaatgttcacattatcttcaccggggtagattcaatctcaagaaatcactttcttt

SEQ ID NO: 254181 - DNA, 601 bp, Homo sapiens
aataggagaaaggaaagattggtaaatgttttgtcaattattcctttattaataatttatatattattcatatagtcatttatgcaaaaaatgaactagagaaagaaaaaataaaggatagaagcaaagatggaaggaacacaggttaaatatcacggttaattattggttatttctctttacaaaatttwaaaaaaaaaaattcctaagttatttcaagaccctaagatcctggaataaaaatatgatgttgtcattttccttgcttccttcagaaaacatgatcactgttctgtattaattgcattcctgggagggagcaaggggttttatgagatagcctcagggcttgtatctatttctcatgaactatagtctccctcaaagttattcactacataaactactccacagaaatggcgccctagaatttaagctctgaatcgagggatgtacctagttgccttattcttggacttcttccttttatgactattaaatggggattggtcaaatgtaccagatcaaagacatttaggaaacacaaaggggatgcaatgtctacctggagagacgctcaatggcattttcaagtgctatc

SEQ ID NO: 254182 - DNA, 584 bp, Homo sapiens
cgacatgttctcacttataagtgggagctaaatcatgaaaacacatagacatagaggggaacaacacacacagagttttttaacagggtggagggtaggaggagaaagaggatcaggaaaaataataaataagcactaagcttaatacctgggtaatgaaataatctgaacaacaaaccaccatgacacaatctgcatgcacataaaacatgcacatgtactsctgaacttaaaataaagttaaaaaaaatgaaatcagtgtgtccaagagacaactgcactgcaacgttcattgtagctcattcgcaacagccaagatattgtaagaacctaagtatttatcagtagttgaatggataaagaaaatgtggcatatatacaaggaaatactcttcaaccttaaaaaagatggaaatcctgtcatttgtgacaacatggttgttacataaaataagccaggaacagagaaacaaataccacatgatctcatgtacatatagattctaaaaaagtcaaactcacagaaacagagagtagaatagtggttatcagtggccagagggtggagggactggggagatgct

SEQ ID NO: 254183 - DNA, 521 bp, Homo sapiens
actgtcagcatctaggtcttcagttacagacctggggaatggcaatcagaagaattattgctgttactttcccaggtagatggtatgcccaggggagcaaaaggtttagttagtggattcattctattgaaatattcgtccagataaaatcctccattttatgttagccaaatagttttcacttctcatcttcagtgataacatcaaccaaagcttcaccatctcagcagattaaggaaagatttggaaggtcctatgtccaaggccagcaaatagtttggaacactgtgaaagctgtcgtggtttttttgtttgtttttctttttttcattttattttacatgggaaagtagcagagaaasgaaaaacattaaaagacagatatttgatctagaaaaaaatatgtatgctttttttccttaagttttctcattttcttaatatctagggatggggaatattagaaataatgttacaaataaaatgttaaattgaaggaaaacaatacagtaattgataat

SEQ ID NO: 254184 - DNA, 569 bp, Homo sapiens
atgtatattacacattgctctattctccagagagcttaaagggccttcaaggactttctcacctccatcagcttatcccccagttttatttagtagtcttatccactgacacttgaaatattgttctaattaaagcatcggctctttaggggtgctgtgaaatttctcctggaaacacgccctcttgtctttctcatcatgaaaccaggaaaaagcttgasggactcatcaagttttgggtctctttaaagcctctagcaattcataccataatctttcctatgaatgattgtcagatatgggattataaatcaccatgctagacctaaaggttagctttttcagcattttttatgcttttcaaaatttccataagaaaataaatgctgaaggatcagcaagctaaacagcttggacacccactgctgccacacaggcgtgtgaaatgcctccatctgactcagaattagagatgtaaaattgtcatccagctctggagttggaacttggcattaaaagtatttataacgtgtgtgagtagaaactgtgggcttggaaaatcactgctg

SEQ ID NO: 254185 - DNA, 615 bp, Homo sapiens
gttggaattatgttacctggaatttgcatccctctattgttctaggccagagtgggtcagtgtacagcatcaagtgcaactgtagatcatatatgttgctacttatctgctgtcatgacactattatataatatttatttaaaagggtcaatatggctgagtacagtggattacacctgtaattccagcaatttgggaggtcaaggccggcagatcacttgaaatcaggagtttgaaaccagcctgggaaacatggcgaaaccacatctctactaaaaatacaaaaattagccagccatggtggcacatgcctgtaatcccagctactcaggaggctgaggcattgcttgaactctggagtgggagaytgcagtgagccaagatcacaccactgcactccagcctgggcaacagagtgagaatttgtctcaaaataataataatagtaataaataaaataaagataaataaaaagatcaatataaaggagggtgagggagaaatacccaggatgaccacagacactaaaagtaggaggacaacagaataaggaccacacaaaaaaggctttatgagatgaagggataaagcctaagaggaaattggtaccatgtg

SEQ ID NO: 254186 - DNA, 520 bp, Homo sapiens
taccatggtacaactaactcartatttctgaattgccttttgataattcatttctagagttgtcactgaatcattattggactgagttctacaattgtagccaataaaattgtgtactctaaagtctaaattgtacactttgagagaatcaatttatcttagttcctctggtaagtctcatttgtagtaggaattcaatacttcaactccaacatgctaaatagatactttcagttaatgtttgtttctggttataatgatgatttgtgcatagctgatttttgttcttacatattgcaaaagtgaagtaatctgtcctttgattttttagtttgattatctagagatttctgcagacaacaggggtttggtctctgtcaggtgacagatattaggaatttgagtttgtaaaaatgtagtctctgtgttagcttgatgtttctgatacttttgaaatttgggagtgagaagtcattagtattttgtccttccattcataaacagactctgtgtttgtttt

SEQ ID NO: 254187 - DNA, 456 bp, Homo sapiens
ttaccatggtacaactaactcaatatttctgaattgccttttgataattcatttctagagttgtcactgaatcattattggactgagttctacaattgtagccaataaaattgtgtactctaaagtctaaattgtacactttgagagaatcaatttatcttagttcctctggtaagtctcatttgtagtaggaattcaatacttcaactccaacatgctaaatagatactttcagttaatgtttgtttctggttataatgatgatttgtgcatagctratttttgttcttacatattgcaaaagtgaagtaatctgtcctttgattttttagtttgattatctagagatttctgcagacaacaggggtttggtctctgtcaggtgacagatattaggaatttgagtttgtaaaaatgtagtctctgtgttagcttgatgtttctgatacttttgaa

SEQ ID NO: 254188 - DNA, 642 bp, Homo sapiens
gcaccgtacggactaggactgtctgtttatccattcacatgttgatgggcatttgcattatttctagtattggctgatacaagtaaagccactaggaacattcatgtgcaaatctttttctcttggtaaatacataggaagggaaacgttggatcatatggtaggtgtatgtttaacttttttagaaactgacaaatcattttgcaaaatggttgtatcattttatattcccacaagcagtctgtgggagttccaagttcactacttccttgccaacactgcgtatggtcagtttttaatttcagacatttttagttataagatatccacttagtttttaaaaatgtaccttctagtttcttgctgagactttctcttttttcttcatctgtctcaaatatgttcataactgcttgttgaaatattattgtgacagcrctttaaaatccccattagacaaatctaacatctgtcatttcagtgtcggtacctgttgattatcttttctcattagagattgtcccgattcttggaataataaacaatttcaattaataccatcattttgggtaggatgttgtaagactctggttttattaaatgttctgtttcaggatggctcctgtaacattgcttccacag

SEQ ID NO: 254189 - DNA, 533 bp, Homo sapiens
ctgccaccagcacatgcacaygtgtggatgtcaccacctcaccctcattggtgtgtgtgcaccccactgccctgccaccaccagcatgactgcagacccaccatgttgccatcctgccaccaagcacgcacgtaaaggcaggccccattgccactgccctgaccaaagtgcttttgctggcactcaccactggagtattattgccaggagacccggaacacctctacctctctagcacagcaggtgcttaatcttaaagtgccagagaacaaagccatgggtattgttccagccgtccagtgttacaacctgcagctcaggagtgctaagctgagtcttggccccatgaaattattcattaataaagccaggtgacagaacccaaattacaccacagtcaaagcctcaagaggatcagataatataaaagcaaaaggccccatccaaaggacagcaatgtcaaacactagaggaacattagcccacaaagatgagaaagaagcagtgcaagaactctggcaattcaaaaaacc

SEQ ID NO: 254190 - DNA, 533 bp, Homo sapiens
ctgccaccagcacatgcacacgtgtggatgtcaccacctcaccctcattggtgtgtgtgcaccccactgccctgccaccaccagcatgactgcagacccaccatgttgccatcctgccaccaagcacgcacgtaaaggcaggccccattgccactgccctgaccaaagtgcttttgctggcactcaccactggagtattattgccaggagacccggaacacctctacctctctagcacagcaggtgcttaatcttaaagtgccagagaacaaagccatgggtattgttccagccgtccagtgttacaacctgcagctcaggagtgctaagctgagtcttggccccatgaaattattcattaataaagccaggtgacagaacccaaattacaccacagtcaaagcctcaagaggatcagataatataaaagcaaaaggccccatccaaaggacagcaatgtcaaacactaraggaacattagcccacaaagatgagaaagaagcagtgcaagaactctggcaattcaaaaaacc

SEQ ID NO: 254191 - DNA, 543 bp, Homo sapiens
atttataactatgccatgttctctcactacagagtgcaaaacattctgttaaaagcagtattttaatttccctcttatttcctcatttttctcctttcttcttctattattcttctaattgctttattgatttatagacttatttaaagcrtatcgaagatcttattatccagctctgtcaattcacaaatgagaaattgagaaccagtggcattgttcaaattgtttatgtacttcagtcatgaagttctggtcgtctgacttctacactgctgttctctacccatgatgactgagtttctactttaggaaactgcctctcagacatcttttttaaaacttttttttttaagttcaggggtacatgtgcaggttttttgcatagataaacttgtgtcacgggggttcactgtagattatttcatcacccaggtattaagcctaatacccattagttgtttttcctgatcctcttcttcctctgacccagaaccctccaataggcccccgtatatgttgctccctctatgtgttcatgtgttc

SEQ ID NO: 254192 - DNA, 562 bp, Homo sapiens
ccccactacccctatgttacttgtgaatattaataactgtaaatttctggtagtgacaaatggacccttcagagacctcagtagagtcctgatcctctataaattaccaaaacgctattaagtgtatagatagatttttctggtctatgttttctatgattttccaaaatcacaaatatcttaagtcatatgagtactttaatttattttgtctatccttagaaacccatagttagtaaaatttcacagccatgggacattmagttatgccacatgccaaattactcattcaacaaacattcactgaatgcctgttacgtgcattctactgacaggcagtgaagatgaaaaagatggatgtgactttttcctccgagagctcatagacagtggctgaaacagacatgcaaaccaaaaatttcttatgcagagcaggcatcctatgccttaaaatttaatgaaaaaaaaaaacaaatatatttcagacggacaaagcacaacaggagaaggcaatgcagcatcagaaaggcagtatctgttggctcctagttgtaccccactt

SEQ ID NO: 254193 - DNA, 567 bp, Homo sapiens
ttaaaataatgtattgatgtgtctatggaatcagtgtcaaaaattcttgagaaattctttaggataaaaatggtgtcataatacaggaaaggtgaaaatgttgacactatatttacaaggcaggaaaagaatgctttaaaacttaaatactggtgagcttggtataattccaagcaaactgtttacactgatcgtttagggacatattgaaaaataggatgtgatgatctaggaacaataatgattcacaagaaaaaaawtcaatgcaaacctcatcaagctctccaaactaatataatagaagaatgtcatggatcttgtacattttgattgcaactagccatctgataatgtgtttcaggattcctgcatggatagcactgtggaaggcagggaggataaagggcagctcaaacctgattgagcaattttatccagagaagattaattagttacttctcagaggaacttcaaaagctgccctatccaattagagtgctgcaagggcttatcaattagcattttatcaatacattgatgataaagtgggcgtgattttcaaatgtg

SEQ ID NO: 254194 - DNA, 607 bp, Homo sapiens
gcatacgttttcaacagttcaacttctttctgactctcagccacctcccttcacctctcccagactcaattttgcatttccagcaccattgaacttacatgcactgcagtttctggccttgttacatttactcagattattctctgctgcatcatcatgatcatatttattttttaagactttattttttaaagcagttttaggttcatagcaaaattacagagatttcttatatacctcctaccctcacacatgcacagcctctaccattttcaacatcctctatcagagtggtacatttgttgcaatgaatatacattgaacacatcattatcacccaaagtccatagtttatattggggttcactcttggtgttgtactttctatgagcttagacaaatatataatgacatgtacccatcattatattatatggtgtttttttcactgccataaaagtcctcaatsctccacctattcagaactccatccctggcaatttctgcccaccattgatctttttactgtcttcacagtttttgccttttccaggatgtcatatagttggattcatacagtatgcggtcttttcatattgctgtctct

SEQ ID NO: 254195 - DNA, 482 bp, Homo sapiens
ccctacttttcaacatcagtgttattcattattctccagaggaaattatcaaaaatcttttaaaaactagaatataagtcctatgctttatcaaaattatgaataattaaaatgcagagtcaatacattcattttttgtatttttcaaactaagtgaattaatattaacatttcatgaaacagatacacatatagctcaactccaaactgtccatgaatttatctaataaacagagaaaatgctgcttataagcaagtcacaattctgatcttacagttagctgagctattaagaaattgttggaataagaactgggataataaaatgtttttgttcaaataaattaccatgaatatacaattgtatgattaattgcaaaaaaggattgtcaaagggaaatccgaytaaaataattcaactgatctaagttgcattccattaacatcatttccctgattaaactcttcaatatttcccaatg

SEQ ID NO: 254196 - DNA, 574 bp, Homo sapiens
gaggtctgttgtttttctttcgttgggaaccactgtcatttctctgaaggtccccaacatttgcagcagatgtgaagctccaagaaaacgcccccagtcaagcaaaccacagcaaatgttttcttaacttctttatatactggagaaagcaagattttgtgtcctggcagcttccagaagctcaccctcctccttcccttaggaagtgcytctggccacctgttcccaaggaccagtgttcattctattactaaaacccaatcacaagcagggcacccctgtaggactcaatttttagagtgcctattttgaaagataaaacacatttttgttaggaggcccagagtgctgttctctcattctttcagagcttgcattctttctctgtgatgtctggcatttttagttctcctcttgtccctttaccctttcatttaacacatcactccttgacagaggctcaccttcactgtcagggaagaataaccccagggcaggctgcttctcatcatcttctgtggtgaagaggaaagcagagaaataatttagttttcccatatctctttatcctctt

SEQ ID NO: 254197 - DNA, 516 bp, Homo sapiens
gcaaattttaatgaacagtatttcttggycatgtacaggtgaaatactttatgtaaatgacaacttaggattatactgttaccttagctataatgatttctaaaaatttgaatgacaaaggaacctgttatctttcttatttgtttccactgctttacttttttgagtaagatatatagcattcacttgagagaaatacacacgtagtatagaatcctagtcttaaaaaattctgtaataaaagacaactattaaatgtatgtgaattccaaatcacgtaggttatttaagattgaaaatttacatactagaaaaattgaagaatgttagtattctttaaaaaaggtatgttttatattctacaaacggcatacggataatttttgacaggatctttaaagataatccaaatttatatataaattggattggagattaaatataactatatacatatagttagttttactatcaagttcatgtatttatacaagtgtgtataattatatacatatt

SEQ ID NO: 254198 - DNA, 516 bp, Homo sapiens
gcaaattttaatgaacagtatttcttggccatgtacaggtgaaatactttatgtaaatgacaacttaggattatactgttaccttagctataatgatttctaaaaatttgaatgacaaaggaacctgttatctttcttatttgtttccactgctttacttttttgagtaagatatatagcattcacttgagagaaatacacacgtagtatagaatcctagtcttaaaaaattctgtaataaaagacaactattaaatgtatgtgaattccaaatcacgtaggttatttaagattgaaaatttacatactagaaaaattgaagaatgttagtattctttaaaaaaggtatgttttatattctacaaacggcatacggataatttttgacagsatctttaaagataatccaaatttatatataaattggattggagattaaatataactatatacatatagttagttttactatcaagttcatgtatttatacaagtgtgtataattatatacatatt

SEQ ID NO: 254199 - DNA, 471 bp, Homo sapiens
aactattcttattaatctcaagcaaaaccatagaaaccattgtyagtggaacaaaatgccccttcacaaagtgcctaccaatttatacagtgaacatcacacatttcacccaagctaatccttatacctaccctataaggtggacactattatcacttttttcagataagggatatttgatttagaagttaaatgacttggcctatatcactttgatttcctgcacataaggaaacaaattgttctctcgcatttatttaattttaattttagagacattgtctcactatgttgcccagactggtctcaaactcttgggctcatgtgatcctcctgcctcagcctcccaagtagctgagactataggcacgtgccactatgcctggcttgttctctcaatttaaaagcgcacactcaggcagtagaagattaagggaccaaaaatagagttgatatgtgcttatagtagag

SEQ ID NO: 254200 - DNA, 312 bp, Homo sapiens
ctgtaaaaggaagttatacagtgctttgcaatcatgtaacagaaaagactgtcccagtttaggatgatggagataaggaactgatggggacaggaggcagagaaattctaggcagaaaagggcaggtccctggtgaaaaccccaccctcaagccaaaaacctggaactgcggcccaamgtgagaacttctatcccgttttcctgcttgaatgttgccttttcctaaactacccatggccccaccccaccccatcctgtgcctataaaaaccccagactcagtcggagaggagcggagactgtggctggatgt

SEQ ID NO: 254201 - DNA, 589 bp, Homo sapiens
aatgatagacaggataaagaaaatgtgggacatctacactatggaatactatatgcagccataaaaaagaatgagatcatgtcctttgcagggacatgatgaagctggaagccatcatcctcaggaaactaacacaggaacagaaaaccaaacaccacatgttctcactcataagtgggagttgaacagtgagaacacrtggacacagggaggggaatgacacacactggggcctgttggggggtggggggcaaagggaaggagagcattaggacaatacctaattcatacggggcttaaaacctagatgacgggttgataggtgcagcaaaccaccatggcacatgtatacctatgtaacaaacctgcacattctccacatgtatcctggaacttaaagtaaaataaataaataaattttaaaaacaggtagatttggaagcagggataccatactgaacactggggtataatttaatgtgtgcattctgaacactaaaacctccagctcactttcccactcagcttccaaaatacttccaaccaggccttcgccctctaggcaagagactggaagatccttttctgg

SEQ ID NO: 254202 - DNA, 565 bp, Homo sapiens
tgtcaaacttcaccctcatacaatgggccccagtaaaacagtgggccttaataatcacattcctttcacttcagatgcactaagaaagggaagctaaaagcagacttggggaatatgcctgcagctgcagaaagatgtatgggaacagacacacaactctccctcccaaataagcacaacaaaaagacacagaagcagtccaagcctctgataaactcycccacaatgaatccttaaaaactcttagtctgtaaaagagtggggctctaacctaactcagccagcagcccctctcaggtttgtttaatgaccctgttaactgtaaacccacacttcgtgtttctctcctctttctttaatttcttacagatgtgtgaagtttgaccaacttgtgagtaaatggcagagatgtcaccagctggggatggatgcctctggagctccagttgctggaatccaacctctcctgtgtcatcacctctgtgttcccttcttggagcccatccagtgagtgggtaaaaaatgatgtcacaaggacttttctttgaaataggtcaggaagggg

SEQ ID NO: 254203 - DNA, 565 bp, Homo sapiens
tgtcaaacttcaccctcatacaatgggccccagtaaaacagtgggccttaataatcacattcctttcacttcagatgcactaagaaagggaagctaaaagcagacttggggaatatgcctgcagctgcagaaagatgtatgggaacagacacacaactctccctcccaaataagcacaacaaaaagacacagaagcagtccaagcctctgataaactcccccacaatgaatccttaaaaactcttagtctgtaaaagagtggggctctaacctaactcagccagcagcccctctcaggtttgtttaatgaccctgttaactgtaaacccacmcttcgtgtttctctcctctttctttaatttcttacagatgtgtgaagtttgaccaacttgtgagtaaatggcagagatgtcaccagctggggatggatgcctctggagctccagttgctggaatccaacctctcctgtgtcatcacctctgtgttcccttcttggagcccatccagtgagtgggtaaaaaatgatgtcacaaggacttttctttgaaataggtcaggaagggg

SEQ ID NO: 254204 - DNA, 553 bp, Homo sapiens
tgaggtctgtcatctggtgtggccctgggcatacagagacagtcctccagctcccgggaacagactagcagagcaggaggcggcactgatgtgcagagagcagtaatgacaaggctggggatttcttgggggaaggtgaatgcctttccccctctgacaccatctatacccaatacagcctttccttctttccagcctccaaggctcacctgacctaggctcgtttcctaacactcccgttcacctggctctcsccagtgggtttgtccaggtttctcccaatgtggcttccatggtcctgcctcagtgccttttgtcaccctgggcccccctccatctccaccacctgcttcttgtactcgcggcctccttggaagagctcaaattcctcccccgtcacctttcctgattccccacctgcctgtggcctttatctctggtgcatcatgtgccattttctgccttgtatcagagatatttttcagatgccgcctcttcctgcttttgcctagctgggccataagctttcagggtcgggaaggtgccttccccc

SEQ ID NO: 254205 - DNA, 557 bp, Homo sapiens
gcagcataagcggctggcagagccaaggaatgaccagaaaagagaaaaagaggccatctgtaccaattctaagagtttagactaaacaagttcttattaatagcaaaggataattgaaatctcaaacttacaaggttttcaacaaaagtgaagtttgctaaaagttaacagtgtaacatgtattttggtaacttytaatcttgtggccttagacagtctagtccaaagacataaagaaagttcgcttttttaaaaaggaaagaaaaggggggaggcagaatttatattaaaaaaaagttatatggtaaattcttgtcctgaaataaattaactggttgtttaaagaaaaaaaagtttgttaataagtcaaaaaattgagacatgttaaaaaattgtctgggaaagtcgtgagaaaaaaattataaaaaaaaatttttatgcaaaaaatattgtataatttaaaagtaatgaggcctcctgagtactatttaaaaaaaaaaaccagttcatgtgcaagatgtataagaaaagtaaaatatacctttggtaaaaaaaaa

SEQ ID NO: 254206 - DNA, 557 bp, Homo sapiens
gcagcataagcggctggcagagccaaggaatgaccagaaaagagaaaaagaggccatctgtaccaattctaagagtttagactaaacaagttcttattaatagcaaaggataattgaaatctcaaacttacaaggttttcaacaaaagtgaagtttgctaaaagttaacagtgtaacatgtattttggtaacttctaatcttgtggccttagacagtctagtccaaagacataaagaaagttmgcttttttaaaaaggaaagaaaaggggggaggcagaatttatattaaaaaaaagttatatggtaaattcttgtcctgaaataaattaactggttgtttaaagaaaaaaaagtttgttaataagtcaaaaaattgagacatgttaaaaaattgtctgggaaagtcgtgagaaaaaaattataaaaaaaaatttttatgcaaaaaatattgtataatttaaaagtaatgaggcctcctgagtactatttaaaaaaaaaaaccagttcatgtgcaagatgtataagaaaagtaaaatatacctttggtaaaaaaaaa

SEQ ID NO: 254207 - DNA, 557 bp, Homo sapiens
gcagcataagcggctggcagagccaaggaatgaccagaaaagagaaaaagaggccatctgtaccaattctaagagtttagactaaacaagttcttattaatagcaaaggataattgaaatctcaaacttacaaggttttcaacaaaagtgaagtttgctaaaagttaacagtgtaacatgtattttggtaacttctaatcttgtggccttagacagtctagtccaaagacataaagaaagttcgcttttttaaaaaggaaagaaaaggggggaggcagaatttatattaaaaaaaagttatatggtaaattcttgtcctgaaataaattaactggttgtttaaagaaaaaaaagtttgttaatmagtcaaaaaattgagacatgttaaaaaattgtctgggaaagtcgtgagaaaaaaattataaaaaaaaatttttatgcaaaaaatattgtataatttaaaagtaatgaggcctcctgagtactatttaaaaaaaaaaaccagttcatgtgcaagatgtataagaaaagtaaaatatacctttggtaaaaaaaaa

SEQ ID NO: 254208 - DNA, 632 bp, Homo sapiens
catataccaccttggcatttcttctgttgctttttcagatgtagttgttgaacttttcatttattttcattgtcccactgtctagacttttagccccttgaaaacagaggtcatggtttaagtgcttttgtgtttcatgtacactgtaggcattcagtaaagagttgctttgatttttagcttggtggtcttaatatatgcattttatactgattttttaaactgttgttgttgctgaaaactagatttgtcagcttgtttagtgcatcatgatccgcttactatggattctgctaccttgaccagcaaggtagcagaattttaactataatttcttctttaataagagattttctgaggcaggtaaatgaagtatactgatacttcttacacagtggaatatgaaagtgtgacacgtcgcatcttgaaagtactttaaattgtgtgcctttgagttctacactgaaaaataaaactactaccaacaacttgaccccctttcctgccctcaaattgtttagaactgaaratagtgttttgttgtacatatttatattccataaagtaaaattttttaacatcagaaaacatctaaatatattatcgattccttaagaataaacactcattcc

SEQ ID NO: 254209 - DNA, 486 bp, Homo sapiens
cccctggggaaaggatgacagctgtgcccaaggtaaagagggcaaccagtccaaaatgcaacacatcagagaactgcaagagggatttgtagaaaaagataaaattaaaagaatacttggtgttctaaaagagaaatgtcttgtgagaccattttgccagtttgaagagatttgatggttgaattagtaatgaacacctaaaaatataatcagacaaaacagattaactctaggggaaacaaaaagttgtagagaaatgaaaaagcaatcatattatgctgcagtggctcacatgtgaggtaggggtcatgatatatwtttttttcctatgctgatattcttgttgcagcatcgtttgcagaaaagactgtcctttcactcttgattggttttgaaatctttcctgaaagtcaattgcccataaatgtataaatccaatactagcatctgtattctgtccattgatgattatatctatccatatgc

SEQ ID NO: 254210 - DNA, 606 bp, Homo sapiens
tgattattggcatgttgttcatccatccattcatttattcactcattcatccatctgattaccaagtttttgttttttctctgtagtatctatgaatacttgactgttttcccaaggaatatatagcaagatattttggtactagacatgcccttgaacatttataattctgtcacatggcctcttattttctatgttagtaggaaaattggcccactgtgaaggacatcgtgatattgagtatatagataatgtgctgatgtacagggtgctctgtctactctccataacctttgttagttcactagaatactattttgctagttgtttaggcagaatctrgagtgttcaagttaatatggaaagtttaaattcattgtttttcccttgcctgggcagcctatttcttatcaaccgcttgccatttgctaatactttgaggcccactattgttacaaatccgtgtaattctttttgtttaatgctaagatagttcagtttttcagtaagcatttattgagtacctgcaatatgccaggcattatttaagacactgagcatatactgataaacaagtagtagtagataaataagtagtaccttcct

SEQ ID NO: 254211 - DNA, 413 bp, Homo sapiens
ccaaaccttcagtgtactgagacatgcartctgatgattagcatacttgtgggaacaggacactggctgatcttatgtttcagtactaaaataaagcaatatcccgcttagtcagaagacagacttccagcaaatgcaacactcagaacacatctataaacccggaaaagcaaacaagcaaacagacatctcctgagctttaaaaatagatattaaaaaataccataaaatatgttttgtgagggaattcctcagacacgtacacacattcattttttttcttattttatataaaactcttacagactctattatctgatttctcaaccagtagacaattaactgcatccaattataaggagtaaggaactgttggaagcagacatacagacaataaggagaatggacaagta

SEQ ID NO: 254212 - DNA, 633 bp, Homo sapiens
agagtctgtctccaaatttgccctttacataaggacaccagtcatattggtttaggtcccattccaatgacctcattttaacttggtaaagatcctatgtctagaaaaggacagattctgaggcactaggggttaggacttcaacatttaaattttagtggggaggcaaaatttaacccataacacttgatatctgtgcaaaaaatacaaagtaattaaattatattttaataatataacttttaaaaagtaaaaaaattgtattttctacctgctgttaatgttagttaaaggtatgctctttaaagtttactttagtattgctgatggattgccttaaattcacttgccttatcttcttcatgatcaaaggcataatagtcaatgattagccactgtgcatccataatatttaataatcaacgattagccactgtgtttccataatatttatcaaagtcagcctcgtgctctattctttctaaaacatcacctcctctaattctcttgtaatgttcttggagacataaaccatatattgatcatcttagtaaayctgttgcatagcactgtgctttgtacatgatcagtcattagtaagtttttttgaggtgaatgtaattgaaatgttag

SEQ ID NO: 254213 - DNA, 434 bp, Homo sapiens
agaacagctttcaggagatttgtcgaacttctctgaagaaagaatactgccacaccatgaataatctgtgtggataatttatcttgcatagcataattttcagtttttagtgttttcatgtagatatccagagtcactccaatttgatctcacagctcatttgactcttctgaaaaaaatataaagaasatatgtgagcaattatctctattttctaaatgaagaaactgaagattggaaaggttaaaatggcacacctaagggcacatgttatgacagaactatcaaattcaggtcttcctctgcatttatgtgctgcgttcatttgcattcttttattaagtagaaacccagtactaatgactaaattgtattttaatataagtatggatatttacagatatacacttaaatatttacacataccacttgct

SEQ ID NO: 254214 - DNA, 434 bp, Homo sapiens
agaacagctttcaggagatttgtcgaacttctctgaagaaagaatactgccacaccatgaataatctgtgtggataatttatcttgcatagcataattttcagtttttagtgttttcatgtagatatccagagtcactccaatttgatctcacagctcatttgactcttctgaaaaaaatataaagaagatatgtgagcaattatctctattttctaaatgaagaaactgaagattggaaaggttaaaatggcacacctaagggcacatgttatgacagaactatcaaattcaggtcttcctctgcatttatgtgctgcgttcatttgcattcttttattaagtagaaacccagtrctaatgactaaattgtattttaatataagtatggatatttacagatatacacttaaatatttacacataccacttgct

SEQ ID NO: 254215 - DNA, 439 bp, Homo sapiens
atgggagaatgatgagacttatgcccgctattacagactaggagagcagtcataactactagatgmcatccttgctgggcacactagagagagaaatagatcttccaggtgatcatctgaatctgcagagatggacatatgcaacaactaggctactggtatatagctagttacattatagaccttataatacaatcataaaaaataatttttttccataaaacatttacatttatcttgatgtttatgaaaggatctatgagggactactctttggtaatcattgcatctcagggcctattgctatcagtgtaagtacattgaaagagacctgggcacttaatccagctccaccacggagcagccacatggctttgggtaaatacaccataggctctctcagttaaagtccccttatcagaaacaatattgtgatacc

SEQ ID NO: 254216 - DNA, 563 bp, Homo sapiens
gactaaagctacttctctatacagcttgaagaagcagctacctattagctgtccaatagaaaaagaaatctatgaaatctaacagaagtgtcttttaagttggatattctttctgttctttcaatggaaagtatgaaaataactcagaaagatttccttgtttcaagtgttcaacatcctgagctctctccaacacgtcaagagttcctgagtaggttaccatttctcagtcttcccagggaatacagacasacatcactgctcttcttccccatcatttcctctgcatcccgattcccacatgactaatttcttccattccataataagaaccactgcccaattactcctccccactcattaccttgccttcctgaccctcttctgttatatagaccaacaacccaaggatggaaattggtagctgtatatgtgactatatctgctttacttattgctaagtaatatttagagaaagtatatagcccttctgttcaccggaagagtgaatgcctgaacttatttcttcctgtgggtgcaatctcttccactcttttcctgaa

SEQ ID NO: 254217 - DNA, 563 bp, Homo sapiens
gactaaagctacttctctatacagcttgaagaagcagctacctattagctgtccaatagaaaaagaaatctatgaaatctaacagaagtgtcttttaagttggatattctttctgttctttcaatggaaagtatgaaaataactcagaaagatttccttgtttcaagtgttcaacatcctgagctctctccaacacgtcaagagttcctgagtaggttaccatttctcagtcttcccagggaatacagacagacatcactgctcttcttccccatcatttcctctgcatcccgattcccacatgactaatttcttccattycataataagaaccactgcccaattactcctccccactcattaccttgccttcctgaccctcttctgttatatagaccaacaacccaaggatggaaattggtagctgtatatgtgactatatctgctttacttattgctaagtaatatttagagaaagtatatagcccttctgttcaccggaagagtgaatgcctgaacttatttcttcctgtgggtgcaatctcttccactcttttcctgaa

SEQ ID NO: 254218 - DNA, 520 bp, Homo sapiens
ttttaaagataattttcttattgttaaatatttatattgattcatattctcactattatgaatagtattgaaagaattgtgtttgaaaatttttaaaaaaattattgcttgtgattaagtttcctcttggctgtgaaaattcctcagattttcctggctatgatgaccttaacagttttgaggagtattcttcaggttgcaatcttatttttaagtgatagataataatcctgtttagaatttaacagaatatcaaatttaccaattctcttattatggycattcagattgtttctactttttacctactaaaaaaaacattcaatctttttttaaagttgtttcattatcttcctaggtttattactgcagaggatgaatctgaagtcagattgctctttctttacttctaattaacctgttggactcgtcacttgttcatctttctgccttcgggtacgaggctagacatatttactccctctccttcactgtacatgaatacagcaataaataaaaa

SEQ ID NO: 254219 - DNA, 520 bp, Homo sapiens
ttttaaagataattttcttattgttaaatatttatattgattcatattctcactattatgaatagtattgaaagaattgtgtttgaaaatttttaaaaaaattattgcttgtgattaagtttcctcttggctgtgaaaattcctcagattttcctggctatgatgaccttaacagttttgaggagtattcttcaggttgcaatcttatttttaagtgatagataataatcctgtttagaatttaacagaatatcaaatttaccaattctcttattatggtcattcagattgtttctactttttacctactaaaaaaaacattcaatctttttttaaagttgtttcattatcttcctaggtttattactgcagaggatgaatctgaagtcagattgctctttctttacttctaattaacctgttggactcgtcacttgttcatctttctgccttcggstacgaggctagacatatttactccctctccttcactgtacatgaatacagcaataaataaaaa

SEQ ID NO: 254220 - DNA, 627 bp, Homo sapiens
cttggttctttttaattatctcaatctctttgttaaatttatctgatatgattctgaattccttgtctcttttatcttgaattttgttgcgtttcctcaaaactgctattatgaatcttctgtctgaaacgtcacataagtctayctctgcatgattggtcactggtgccttactgagttgatttcatgaggtcgtgttttcctggatggtcttgatgctttgatatttgtcagtgtttatgcattgtagagttaggtatttatgtaagtcttcacagtctgggcttgtttgtatgattttgttttgggaaggctttccaggtatttgaaggaacttgggtgttgtgatctaagttctggtcactttagtcatatctgcattagggtgcaccaaagcagaataatgctatggctcttgcagactcatagaggcacttccttggtggtcttaaacaagatccagaagaattatctggattaccaagcagactcttgttctattcccttactttctcccaaacaaatgaggtctctctctctctgtgctaagctgcctgggactgggagaggtggtggaggtgattgacatgagcagccctgtcaccagtgggactgtgctgggcccaa

SEQ ID NO: 254221 - DNA, 550 bp, Homo sapiens
gtcagggcctagagtaaaaaaaaaaaaaaaaattgggagtctgcctgatgttctrttccattgtgactgaactggtacccaagccacaagacagagtccttcacgttcttccctctcttttccacaaccagaagagtgtctctctatggccaccaccagcccaggcccactgtgagtactgcctggctactgctgatgtttgctcaaggccaaagggctcttcagtgggctgtgataaatgctaccttgcctgggactctctcttccaggaagtggaaactcctgtggccaaaggaaggtccagaaatactgctcaagagccacggcttagaattggggataccaagagcctgtctggtgctctaacccactgtggctgagctggtacctaagctgcaagacaaagttccctttgctcttctctctctttttctctagcagaagtctctcccctttgttaccccagttgggaatatgctggttcacacctgaaatgagcttgtctctgagtctcacccaaggcccatggaaagtactacatgggtaccac

SEQ ID NO: 254222 - DNA, 550 bp, Homo sapiens
gtcagggcctagagtaaaaaaaaaaaaaaaaattgggagtctgcctgatgttctgttccattgtgactgaactggyacccaagccacaagacagagtccttcacgttcttccctctcttttccacaaccagaagagtgtctctctatggccaccaccagcccaggcccactgtgagtactgcctggctactgctgatgtttgctcaaggccaaagggctcttcagtgggctgtgataaatgctaccttgcctgggactctctcttccaggaagtggaaactcctgtggccaaaggaaggtccagaaatactgctcaagagccacggcttagaattggggataccaagagcctgtctggtgctctaacccactgtggctgagctggtacctaagctgcaagacaaagttccctttgctcttctctctctttttctctagcagaagtctctcccctttgttaccccagttgggaatatgctggttcacacctgaaatgagcttgtctctgagtctcacccaaggcccatggaaagtactacatgggtaccac

SEQ ID NO: 254223 - DNA, 550 bp, Homo sapiens
gtcagggcctagagtaaaaaaaaaaaaaaaaattgggagtctgcctgatgttctgttccattgtgactgaactggtacccaagccacaagacagagtccttcacgttcttccctctcttttccacaaccagaagagtgtctctctatggccaccaccagcccaggcccactgtgagtactgcctggctactgctgatgtttgctcaaggccaaagggctcttcagtgggctgtgataaatgctaccttgcctgggactctctcttccaggaagtggaawctcctgtggccaaaggaaggtccagaaatactgctcaagagccacggcttagaattggggataccaagagcctgtctggtgctctaacccactgtggctgagctggtacctaagctgcaagacaaagttccctttgctcttctctctctttttctctagcagaagtctctcccctttgttaccccagttgggaatatgctggttcacacctgaaatgagcttgtctctgagtctcacccaaggcccatggaaagtactacatgggtaccac

SEQ ID NO: 254224 - DNA, 629 bp, Homo sapiens
gtgtccttcttttcaaggcggtggattcccttctggcccagggtgtgtctagaaatgccatttggaagatatagcctgggggatctaaaggctctgtctggtgccctattcacaatggagtatagcaccaggtagactgtggctgagctggcattcaagttgcaagacaaagtcttctttactcttccctgtcatatattcaagtggaacgaaggagtctctttaggatttgtgagctgtgttgcctgggtttgagggaggggtggtataagcactctcttggatgctctgsttgatgtcttacttggttgcatgtctcccaagtccactggccatgagctcaacacagcactaggacccactcagaaatttcagtccttgtgtcctagacttcttttcaagtttatttaggaccccagaacactttagactgtggtggcaaagcttggcagaactcaggttctggctactaggatgggcaattcccctccggccagggctggtctaaatgctccgtctgtgtgtgtcagctgagctcttccttgttttgctttccactgtgacagagcagcactgagttccaacgcaaagaaccatagttatttagccattactcccccaagtgcaca

SEQ ID NO: 254225 - DNA, 557 bp, Homo sapiens
ctttcagcttttcactatgcagtatgatccttgctgtggatttttcgtatatggcttttattatgttgaygtatgttccttctatccacagttttctgagggtttttatcatgaataaatgttgaattctatcaaatgtttttcagcaccaatcaaaataattatatggtttgtggtgattaattctgttgataagatgtatcacactgaatgatttgcatatgaatggtcttttaatgtattgttgaatttgatttcctgtattttgttgaagatttttgcgtcaattcatcagagttattggcttgtgattttcaatttttttttgatgtgcctttttctggttttggtatcaaggtaatactggccttgtagaatgtgtttagaaatattgccttctctatttttcagagtagtttgagtaggattggtattagtcattctttaaatgtttggtggaattcatcagggaagctttgacatcctggacttttctttattgggatactttttattatgggttaaacatcgttgcttattattagtctgttcacatt

SEQ ID NO: 254226 - DNA, 557 bp, Homo sapiens
ctttcagcttttcactatgcagtatgatccttgctgtggatttttcgtatatggcttttattatgttgacgtatgttccttctatccacagttttctgagggtttttatcatgaataaatgttgaattctatcaaatgtttttcagcaccaatcaaaataattatatggtttgtggtgattaattctgttgataagatgtatcacactgaatgatttgcatatgaatgrtcttttaatgtattgttgaatttgatttcctgtattttgttgaagatttttgcgtcaattcatcagagttattggcttgtgattttcaatttttttttgatgtgcctttttctggttttggtatcaaggtaatactggccttgtagaatgtgtttagaaatattgccttctctatttttcagagtagtttgagtaggattggtattagtcattctttaaatgtttggtggaattcatcagggaagctttgacatcctggacttttctttattgggatactttttattatgggttaaacatcgttgcttattattagtctgttcacatt

SEQ ID NO: 254227 - DNA, 536 bp, Homo sapiens
tttgttgacatatagttgctcatagcagccactaatgatcctctaaatttctgcagtgtcagttgtaatgccacccttttcatctctgatgttattcacttaggcctccctcctctctttttttcctctttagtccagctaaaagtttgtcaattttatttaccttttcaaaatccaactttccgtttcattgatcttttgtattgttttcttcacttcaaattaatttatttctgctctgatctttattatttcttttcttctactaattttgagtttggttcactcttgcttttctggttctttaagatacatatttagattatttatttgaagtttttcttctttttgatgtaggcagttatggctataaatttccctcagtattgctttcagtgattcccgtagattttggtatgttgtgtttccatcrtcatttgtttccagaaatttttcaattttctccttaatttcttcttcactgactcactggtcattcagaagcatagagtttaatttctctgtgtttgtataaa

SEQ ID NO: 254228 - DNA, 580 bp, Homo sapiens
gagtcttgctctgtcacccaggctggagtacagtggcacaatcttggctcactggagcctcaacctccaggctcaagtgattttcccaccttagcttcccaagtagctaggtctacaggtgggcaccatgatgcccagctactttgtattttttgtagaaatgtggtctcactatgttgcccaggcttgtcttgaactccagggctcaagtgatccacccacctaggtctcccaaactgctcagattataggcatgagctactgtgcccagcctatacatttttatttttttcacttttatamttttttattataaactaagacacaaacacacacattaggcctacacagggtaagcatcatcattatcactgtcttccactttcacatcttgtcccactaaaagatcttcagggacaataacatatatggagatgtaatttcctatgataacaatgacttcttctgaaaggcctctggaaggacctacctggggttgttttacaggtaatacttctttataagtaggagtatatgctaaataagaataaaaagtatcgtatagtaaatacataaacta

SEQ ID NO: 254229 - DNA, 533 bp, Homo sapiens
aatactgagcaaagagaacaaagctggaggtatcacattacctgacttcaaaatatgctacaaaaccatagtaacttaaacaacatggtattggcataaaccaatggaacagaatatagagctcagaaataaatccatgcatttatgtgtaactgatgtttgacaaagttgccaagaatacataatggggaaagaacagtctcttctatatataatgttgggggaactggwtatccttgtgcagaaaaataaaattggacccttatggagtcacgttttatacaaaaatcaactcaaaatggattaaagaattaaacataaaactataaaattactagaagaaaacatatggaaaatgctcatgtcgttggtctgggcaatgatttttttgggcatgtcctcaaaacacaggctacaaaagcaaaaatagacaagtgatgttgaatccaactaaaaaaaaaaacaataggctcaaaaacgatctacataatgagagaaaatatgtgcaagccatgcatgtgatagcagttagt

SEQ ID NO: 254230 - DNA, 533 bp, Homo sapiens
aatactgagcaaagagaacaaagctggaggtatcacattacctgacttcaaaatatgctacaaaaccatagtaacttaaacaacatggtattggcataaaccaatggaacagaatatagagctcagaaataaatccatgcatttatgtgtaactgatgtttgacaaagttgccaagaatacataatggggaaagaacagtctcttctatatataatgttgggggaactggttatccttgtgcagaaaaataaaattggacccttatggagtcacgttttatacaaaaatcaactcaaaatggattaaagaattaaacataaaactataaaattactagaagaaaacatatggaaaatgctcatgtcgttggtctgggcaatgatttttttgggcatgtcctcaaaacacaggctacaaaagcaaaaatagacaagtgatgttgaatcmaactaaaaaaaaaaacaataggctcaaaaacgatctacataatgagagaaaatatgtgcaagccatgcatgtgatagcagttagt

SEQ ID NO: 254231 - DNA, 542 bp, Homo sapiens
agaacataaatttttacagccattatgggaaacactatggtggttccttagaaaattaaaactagaattaccaaatgatcctgcaattccagtattgcatatataatatatatwttatatatatatatacacacacacacaaagaaaatgaaattagcacattgaagagatatctgcactctcataatcagtgcaacattgttcacaatagcttaagatacggaataaatctatccatcaacataaatgaaaaaaagaaaatgtgccatatatatacaaaatggaatactattcagccatgtaaaaagaaggaaatcctgtcatttgcaacaacatggataaacctggaaggcattatgttaaatgaaataagccaggcacagaaagacaaatattcatggcatgatgtcactcataggtggaatctaaaaaagttaaaatcataggagcagagtgtagaggggaggttaccagtatctagagactggtaggaggagaagggtgagggaagtgtattagggagccgctagttcaaggataca

SEQ ID NO: 254232 - DNA, 542 bp, Homo sapiens
agaacataaatttttacagccattatgggaaacactatggtggttccttagaaaattaaaactagaattaccaaatgatcctgcaattccagtattgcatatataatatatatattatatatatatatacacacacacacaaagaaaatgaaattagcacattgaagagatatctgcactctcataaycagtgcaacattgttcacaatagcttaagatacggaataaatctatccatcaacataaatgaaaaaaagaaaatgtgccatatatatacaaaatggaatactattcagccatgtaaaaagaaggaaatcctgtcatttgcaacaacatggataaacctggaaggcattatgttaaatgaaataagccaggcacagaaagacaaatattcatggcatgatgtcactcataggtggaatctaaaaaagttaaaatcataggagcagagtgtagaggggaggttaccagtatctagagactggtaggaggagaagggtgagggaagtgtattagggagccgctagttcaaggataca

SEQ ID NO: 254233 - DNA, 563 bp, Homo sapiens
tgaaaaaaaatttagtacatttgttttcaatctaaactcactcctgaagtacattgggacaggatctgagatattttgccagaagtcattttccttcttagagtcttacaaacactatgttttgctgtgcatatttgtgcttctttgtgagattaccatccgttctgaaaatacaaattaggtagagaatgcttgagcagaaaatgctgaaagtrttattccaatgccaattatttaaggtagaatgtagcaaaaatatcctataggaaaacacacacacccacagacttgtaatgagaagccccgtattcaaatcccgttttcaactcttcgttctcatatgattatgaacaagttagttttcctctctaaaattcagtttcatcactcctagaatacagaatttttattgtctaacaatacttatcacatggtaggtactgaaacaagtaagttaccctctgtcccttgagtaagtaatgttacacaagaaataatctcctaaaggaagtgtaggcagtttctgtgatggatggatgaatttaagtttcaaaataccagag

SEQ ID NO: 254234 - DNA, 563 bp, Homo sapiens
tgaaaaaaaatttagtacatttgttttcaatctaaactcactcctgaagtacattgggacaggatctgagatattttgccagaagtcattttccttcttagagtcttacaaacactatgttttgctgtgcatatttgtgcttctttgtgagattaccatccgttctgaaaatacaaattaggtagagaatgcttgagcagaaaatgctgaaagtgttattccaatgccaattatttaaggtagaatgtagcaaaaatatcctataggaaaacacacacacccacagacttgtaaygagaagccccgtattcaaatcccgttttcaactcttcgttctcatatgattatgaacaagttagttttcctctctaaaattcagtttcatcactcctagaatacagaatttttattgtctaacaatacttatcacatggtaggtactgaaacaagtaagttaccctctgtcccttgagtaagtaatgttacacaagaaataatctcctaaaggaagtgtaggcagtttctgtgatggatggatgaatttaagtttcaaaataccagag

SEQ ID NO: 254235 - DNA, 541 bp, Homo sapiens
ctatctccatgagttctattgtcttaatttctatctcctataaataagaacatgcaaagcttgtctttttgtgcctggcttatttcacttaacataatgacctccagttccatccatgttgttgcaaattacagaatctcattattttttatgactgaatagtactccattgggtgtatttcattttctttatccattcctctgttgatggacatgtaagttgcttccaaatcttggctattgtgaatagtgctacagtaaacatgggagtgcaaatatcccttcagtatactgatttcstttcttttgggtatgtaaccagcagtgggattgctgtataatatgatagttctatgtttaggtttttgaggaacatccaaactattcttcatagtggttgtactagtttacattcctaccgatggcatacaagggctcccttttctccacatccttgccagcatcctcaccagcatttgttattgactgtattttttttttataaaagccattttaggagccaagatggccgaataggaac

SEQ ID NO: 254236 - DNA, 547 bp, Homo sapiens
ggaacttctccttgtggccaccaccaacaccaatccatgagagcatctgccaggccattgctgatgtttgcttaaagcccaagggctctttcatcagcttatggtgaatgctgtcaggstggatacttaatcttcagcgcagtgggcccagggcaggttcagaaatactatccaaatgctcagacctggacttggggacctcaagagcctgcttgttgctctatcccactgtggcccagctggtacataaggtgcaagacaaagtcccttttacttttccctctgcatttttcaaacagaaggagtctttcactgtagtcacaactaggaatgtgctgggtctccactgaagccagcacatctcagagcccagtgcccattgaatacttcctggttattgatagtggttattcagggcccaagggctctttagtcagcaggtgatgaatcctgcccagacttggtctttcccttcaaggtagcaggttcccctttggcccagggtgtgtctagaaatattgtctgagagctagggcctggaatggag

SEQ ID NO: 254237 - DNA, 504 bp, Homo sapiens
aagctttgtgaaatggctaaaataaaatatacttgcagtatcaagtgctatcaatgaagaggagcaactagaactctcatatattatgagagggaatgaaasatgagttagccattctggaaaccagtttggcagtttctttcttcttttttttttttttttttttcagacggagtctcgctctgtctcctaggctggagtgcagtggcatgatctctgctcactgcaagctccgcctcctaggttcacgccattctcctgcctcagcctctcaagtagcggggactacaggcgcccgccaccatgcctggctaattttttgtatttttagtagagacggggtttcaccgcattagccaggatggtgttgatctcctgacctcgtgatccgcccgcctcggcctcccaaagtgctgggattgcaggcatgagccactgcgccaggccggcagtttcttataaagttaaatatccacttaccatgcgacccaacaatctcactct

SEQ ID NO: 254238 - DNA, 568 bp, Homo sapiens
aatgcataatttcagaaaggagatacaaagtttgcaggtttggaaatgagaacaaacagaaatgggaaaaaggaaattttgagaactcagtctaaagaaaacagattctccaaatgacaattcataaaaagctctcataggtcaagaattccctgtttcagctaccataatagacactttgtatacataattcaaatgaattcttccagcaaccttatgaagtaggttgtaacaaagctgaagtagtcgctcactgcaacacgtaggtattatctattgtttaacaagcagtgatagaacacgtgacatagaaagaccactctgctggatgctagactggacatggcagagatagctccytccactctggccacgaagcttattctctatgggaaaatcagatattaaatagttatgttctaggacttttctaatgggacaactaacaaaacatggaggccaaggaaagccttttcaaagtattgatattgaagttgaaacctaaagaatatgaataacctgagctgagttagatgtctcttcattgtaatgctatagttcactcacc

SEQ ID NO: 254239 - DNA, 553 bp, Homo sapiens
acaaacagaaaaactgattttctgtgattcattaaaatgttttcattgtaagttttgatcttcactgagtgtggaattctcttaggaagtaaagatgagctgctttattgtctggcaaaatatctgtttgattttgccactgagtagcccctaaagagaatacagtatttacaaacaaggcttctggcatgttctcctatacttccctgtcctctcacagttccaaacgcctcttaaaatagctttgcaagtgccttcccaacattccccaggaggacatcacrttcccagtgtaagtgacagtggtctgggagcacattctatcacctaattgtgaatttctctggactatgaaatgctcagtgtctcagaaaacaccagttcctcaactcaccaccaattgcttctcctctccactttcccctgataaaaaaacaaagcaaaaaagacaaccaaaaaaaaaaaaaggcatttcattttgaaaacatttgtggcaaagctgattacatttatggttatcaagcctttaggatgaagtaatctgctatttgga

SEQ ID NO: 254240 - DNA, 478 bp, Homo sapiens
ctcatgtttgaatccagcctttccaacaaaatcttaccactaaattgtaagatccctttgtaaaacatcagggaaacagaagaggagaggtgaaaaacagaatcaaaagtcccacacaaaccagaaagaataacaaagaaagagtttttatagcctcatatctttcttaraaggaatacaagtctaagattgaaaataatcatgtggaaccttccatagaagtattcattgtaggttgatgaaactgataatgggttgtcaaggtgttcagactcaaagtcttgtttctgtcacctctgatcactgtcacccacataataagctacgactgtttttacccttagtaagtctcctcactataaaataaaggcatcagactagatgatgttggacaccccactaaatctttaaattcatgaaggtgaagatattaagggtaaactaacaatgacacaactgtctccaaactgaatatact

SEQ ID NO: 254241 - DNA, 597 bp, Homo sapiens
tctactcaaataacggaattaaaccggaccagagaatgtaacaaaccttacgcactaagataaacyacagagaggcaagagcaattgcagctgaggaatggaagtggaaaaaaaaaaaaagatccaagaggaatggaccacgggaacttgcactgtgatgaagaagctagaataagctggtgaatagcaaaggggagtcatttgacaatcttgttttttttccatgaaaacgacccctgcggttcaaactgaacatttcaatgataggaaaatctcattttatttggtttgaatatgaaaacttgctaaaaaataaagatggccgcctttctttcctaatgctagatgataaatttatttgagttttcagtaaattcttacagagatagaagccaaggtatctccttataaatgagagaaatttaaagaggaattctaaggatgtgaatttcctggagaatgtgttatgtaactaacaaactgcgagggagaggagtaattatcactttaattaattagggccctgttacagctcccctgtgaaagataatccttgattaaaagtgtcagtatgtaaaaatattgatggatattgaa

SEQ ID NO: 254242 - DNA, 571 bp, Homo sapiens
ggtgcacatggctgtgagagattaaatgagatagaggatgccaaatattcattaacttcatcatattatatcataccttttcatgagtattattattagtttgaggaatggctagagtataagtgtgaagcttatcattgcctgttagtattrtaataataataaattccacgaagaggaggaagaggaggaggagaataaaggggaaataaatatattggctagtatttatttagcatgtacactgtaccagtcattacactaagctatgtgcatggattctttccttgtgcagttggaggatgaagaaatgcctgtgagaaagatggctggcaaaacagctctatgagctatggaagctctcacatgggtttgatctcagggtttatcctagactgttgagaaacactgaagaattttaaacaggagaacgacatgttcagatttgcattttagaaaggtcactctggcaatgtgaggagtagcttgtactagagaaagactggagagtgggagaccggttagaagcatatggctctggtgatagttcatgtgagaggtgcgaaaggtc

SEQ ID NO: 254243 - DNA, 503 bp, Homo sapiens
gccaaacttcattacatataaccttcagacacacactgaagagctctcaatgcctgtgaagggtgactttgaatctttgacaaagctttcgtttgaataagattataaataaggtcaccactaacatgagaagaaggggaagcacaggtctcattcctgggagtgtggcgcatatttaacatgccacattgatttcactgcagcaataattaggcttcaataattagatgcacaaatcagcactctatcatcataagtggattaagagggtgacaagttcaactccagtgatttcccaccaggtatggcagtcataacatttttaaaattttttttctattttcaaggaaccaagaaaatgaagktgagggctttgcctatattgggaaaatgagccaagagcagatcttgccttgtccttcatcttctactcacacagactgtttaagagttaaatcagggaagcaccgtatttatcagcaggagctttggaaaaggtgggc

SEQ ID NO: 254244 - DNA, 647 bp, Homo sapiens
ttgtccttcatcttctactcacacagactgtttaagagttaaatcagggaagcaccgtatttatcagcaggagctttggaaaaggtgggctgatttatctgatggatgccaaagaaacctttcttttccttgacctcagtttgaaatataacaatcctgggttaaaagtagatctccgctaaatgacaatcactacttacaatgggttcttcaattgtctcttactgttttgaaatcttaataatggtttcataatacacacattattcttcctagaattatttattttttcctacagaccttcccagagagtaatttaaaagcttctattctttagcttaaaaagatgatctgtttttattctagaaaatcctgagcttttctttttcagaccctgcaattgaagttttcatatacaaataggactgattctgagggataatgtttagtgacagtgtgacaaacaatgctttgttattttttttcttttccacgaagtttggcatcacagatgttttcaactcttttctctcatagcagcgatagtgttacccaaygcctgaaaacatttactgctgctgagtataaaatatttaaaatacagggctcttttgcagacagggactatgaagaagggagaaaaagca

SEQ ID NO: 254245 - DNA, 579 bp, Homo sapiens
gtccctgtgattaagctagacccacaccaggcttcatccagagttagtggcttcactgccagttgcagggtgtggctgggcaggctttggcattcgcaggtcaatgcaagaagatggttctaaaatgctgaagacccaggctctttgtattctattctccttctctccaaggagggagcctaggcatggggagggcccactgggctgcagaaccaggaaggtctcccccatagttgcaacactggaacaggtggtgcatagtattgaactgaaatagacagccaaaaacagataattcatccagggagggggaaaaggagcaagagccaaggacagaattaaatggtgcccagaatgtcatggagctgaggcatactggcatgaacagatgcctggaggggtccctaggagaagagcaggtgcttgtagcacttttattctttcccatagcgctttttaatgccagtcttatgttgtatcatgcagacaatcatggggtttgaagctggccagagatataatccagagacatggacactttgccttgtgttttcagcacycacttaatatcaaagtcag

SEQ ID NO: 254246 - DNA, 561 bp, Homo sapiens
ccactggggctttctgaggctcagggtcaaggaaacctgaccaccctcaggggagttgcagctggcaggccatcccaagtttcagtgctagaaagctgcaactcttctcaggctctgcacatggaatccaagttgctctcctgggagtgcgagcacctcccactcccacacctacccccacctcccttgatgttaaaatcagctgagagcagagcaagactcttcaagctccttcgagtgacacaccttttttatcccaggatatatacctgacacttaagtagcagcatgtatatgtcagggatttggggtcattttgtgcccagaatctcacttactcctcgtgtggggtcccacagctgggctgggccgcagcatcagattccttgcccctcatgatgaagttttgctcaggggattctgctgtctttcccacggtctgacttcaattcagaccaggattcctaccaggcccaaaatgccattcttggatcattcatttttttctactatctgagcgacttggacwcacaaaactcacaaaaactgctcccacaagga

SEQ ID NO: 254247 - DNA, 546 bp, Homo sapiens
ttgttttttgacgcatttcaaagtagattgtagacatgagtactcttccccctaaatactttagcatgtatacagaatgaattttttaaaatgagygtcagattatctccttcccttgctcataacctccagagtgctccttacccttgaataaaagcccagtccttgtcagggagtataaagtcctgcaggatccagccttgttgccctccagcccaactacgtattcccttcccctcactcatttggttgcagccacaatggccacctttctgctcctcaaacctagccagaacttccctgccttggggcctttgcacctgctgccccctgccttgccttctccttagagaagcctttcctgaagccctcatctaaaagactctctctgtgccccactccatccatgttactgtgctccatgtttctttgtatcgctcatcactacccagtatgatgtcccatatttgtttatgacatgtcacccagagtagaatgcaagctcaataaggacatagatttttgccttattctatgcccaggccc

SEQ ID NO: 254248 - DNA, 583 bp, Homo sapiens
attagatatattttcttagagattctttaccactaggtcactggtgtcttttggctctaggtggcaccttaatcccagcttcgtctcggctttagtgaactacgagagtgctacccaacccaaaasggggagatctgaaatggaataacataacgcagcagtgtgggaaggctgggttcatgcccctggggctttgttgttgttgaatagctactctgttttggcatctcctttggccaagttatagagcagagttgtcagagctgaggttggtagttccacctccccgctttatctctgcctgtcttcagggatatttctctcctctggcacttacaatgcttcctctggtacttgtgatgggttaaggagggacttatgctgccttgactcattttgctcctctggcacttgcgatgggttaaggcagggacagttgccttgctgggaaacctaagatgttgggaaaaattggttgtccatcttgatctcacttttcccagtatagaaaccatgagttggggggaaatttttcttgtgcttggttccacagaatgggggaagggttgtcacagatgcagaa

SEQ ID NO: 254249 - DNA, 556 bp, Homo sapiens
taggactgtatcaggtcttttgaacctctaaatggaaagtcagggctccatctcttactgtctcaggtggcttcttggcacttagacaaagagacacactttccctgcaaaccagctctgcacaccagagagaatcagtccttcaggccagaggtcttgaactcttttctcccaacaggaggcctcagctctttatgtttacatacggataagagactcctcaagtgctcaaagttgctaaatgaatatctgttccaaggtgactttctgttcttctagcctgagaagctgctgccagcttttttttttaacccactaaaacaaataaacaaaaattcaattctaagaattttgactttaaccatttaatccataaatatttatagaacgctgtgacacacagaatactgttctatagcatgcattccaaaccttttaaatgaagaaaaacattttacatcaagacccattttacctacctacctaactatacacacacacacacacacacacacgcctttgtttcatttagcraaaaaaagtatcgctaaatgaa

SEQ ID NO: 254250 - DNA, 525 bp, Homo sapiens
aatctcttctggcttgtatagtttctgttgagaagtccactgttagcctgatagggttcccttagtgatatgatccttttctctagctgcctttaagaattttttcttttacactgaccttggaaagtctgatgactatgtgtcttggggatggtcaccttatatagtttcttgtagggattctctgaatttcttgatattgcataatgacctctctattgtagttggggacattttcatgggttatttccccaaatatgttttccaarttgcttactctctctccttctctcttagtaaggttattaaattgtatgtttggtctctttacataatcccatatttgttggaggctttgttcttttttaaaaattcttttttctttatttttgtctgactgggttgactcaaaggaccagtctctgagctttgaaattctttcttcagctttatctagtctgttgttaatgcatccaactgtattttgcaattcctgtagtggatttttcaattctagaggttcaa

SEQ ID NO: 254251 - DNA, 595 bp, Homo sapiens
tgttgattcattcatgcattcattttttattttaacaaatatatattgagcacctactgtgtgccagacactgaactaagcccttgtagcatgttccacaaagattttgcagtccaatagcatcaggcagacagctaagtaaaacaatgcagcaaaagtagctctgggaagtaaatctacaagtctgattaaccacacactgcgttataatttaacaacaaaaagtgaactataattctttcttaatttgctacggaatataatcacaaaaartcatgtatcagtatctcagtcccagtgcatactggaactccattaagagtgtttggaagtccactgcctctgcacttccgtttgaagactttgttagtttcactttgcaagcaataaaatgtcaatgcatatctagagccctggatagaagattccacataaatacaaaggaaagtagcatgatttcattagcttgtatacagaacagacttttaatgagaatttctcttagttcagtcctttcccccttctctctcaggcatctaatcattttcaatgactttttcaaaacaaaacaacttatatcttaaaacctgtgtga

SEQ ID NO: 254252 - DNA, 595 bp, Homo sapiens
tgttgattcattcatgcattcattttttattttaacaaatatatattgagcacctactgtgtgccagacactgaactaagcccttgtagcatgttccacaaagattttgcagtccaatagcatcaggcagacagctaagtaaaacaatgcagcaaaagtagctctgggaagtaaatctacaagtctgattaaccacacactgcgttataatttaacaacaaaaagtgaactataattctttcttaatttgctacggaatataatcacaaaaaatcatgtatcagtatctcagtcccagtgcatactggaactccattaagagtgtttggaagtccactgcctctgcrcttccgtttgaagactttgttagtttcactttgcaagcaataaaatgtcaatgcatatctagagccctggatagaagattccacataaatacaaaggaaagtagcatgatttcattagcttgtatacagaacagacttttaatgagaatttctcttagttcagtcctttcccccttctctctcaggcatctaatcattttcaatgactttttcaaaacaaaacaacttatatcttaaaacctgtgtga

SEQ ID NO: 254253 - DNA, 419 bp, Homo sapiens
ctgccaatgtgctttgagggatattgttagcattaaatttgccatttacattttcatgtttgacataattgaggaatgaatgctcttatgaaaattaaacttgtggttctcctgggctgctgtaaccctgttaaaatgtaatgtgatttttgatgcttcttcttgaggttttttattaaatagaatatcaggatgactaattccccrggcctaaatgcaggctgggaagcagcattattgatagggttgtgtccaaatggttctctgtgctcagcctctaatggcctaataatgcattagacttgaatcagaaatactttgggttgtagtgcttattgccattagtgaaaacacctggatgctccattcatcaaggttacatccaatggggcccatttgtttattaggctgtcagtaaa

SEQ ID NO: 254254 - DNA, 619 bp, Homo sapiens
ttcagatttatttcactgcaacagcctgtagagatgtacgaaagaaatgcaggagacccagggaaaaatcccagcagtgccacttcctggcggtttagccttggccaagttgttgaacatttttgagttctgatcacctcttccataaaataagaatttcttatggaggattaattagaactaacagtatggactaaatacaccatcagtgctccaaaccayctgtgtagttggataagccagttcttggcatctccactagccacaggcaagtgtggccactcacattctctgtggggctctgaagcattaggcgtggaagccagtcctggggtgacagaactcaggtggtctcttttcacaacccctgagggtgtcggagccttggatgctcgccagaagcagctcagaaaataaacccaaagtagtgtctcagttatcagaagtcagagctaaatttaggatacagctgtgaaagtgaatgcttaacaggctctgtggagtagggctagcaattatctggcaaatttgattaatgtggacaggctatgcagataattttttcagttctcagccaaatagcccctctttctcctgaatatttttcttccccaaacca

SEQ ID NO: 254255 - DNA, 572 bp, Homo sapiens
ggcaaatttgattaatgtggacaggctatgcagataattttttcagttctcagccaaatagcccctctttctcctgaatatttttcttccccaaaccatcatgaacctcacctctgggatccttctcatattcattgtcttcatttgcatgggttttcttttgtgggaattattaaatatgtgctttgactgtgcctttcgctgagaatgaagcttataaattggtgaccttggggtgctgttcagccccttgaatattccwtttggcctgcagaggttaaaaaaattgagctttcagtaggaaatttggagatttcacacaaaaatttagattcctgctttctcttgaagaaataggaggatggaaccaggcagggccacacacaggtagctgctgcctcttctcagtgtcccctggttctttctgtctcagcatgcctgcccccacattcctgcactcacacttcctggcttctctcatctgtgttctcctgtgcagattgccacccctgactccaaatgcatccacatgaatgagcccagatatgtccttctccatgatcctgaaatga

SEQ ID NO: 254256 - DNA, 529 bp, Homo sapiens
tggaagcagaaggggaacagtggaaggggtggggagaggggagaaaaaaatcaaatccacagtttttaaaggatctgaacttggtccaagctccctaggttttaaagctcyagaaaagctggcaattggactcttaaagaggtccctctaaccacaaatgcatcccactagctctaaatcatctttaatgtttcagctgggcagagcacaccatgagtcattcatgagggtgctgacatcctgagactttcctaaaggccctagaggtacaacctcttagacacaaggcactcttggattgcacatgatgggggctaggttactgtgtgttactccttgccatgcacccaaccactagctcctcaatccccaccagtcagtatctctgtcatggagaattagcacatcttattggttggtatggatgcatcagggggaactccatggcccattctcaggtctggtttgcaaagaaaagccaaatgccggccaacatcacccatgttgatgcagaatctggtgaaatgta

SEQ ID NO: 254257 - DNA, 524 bp, Homo sapiens
caaactcttattgtacaggtcaggtcagggaagggaaacaattcaggccccattaaaaaaagaaaaaaaaaattaaatcagcaatcacaatatccacaactgtgcttgcatgttctttcaccgtccttctgcccaagtcgaggagaggaggcttttattctttcccatcgggtcagtggctgttttgttccttcaggctattttattccgtgggcccagcatttgsagtccccccctccccagaggcagcctctgttcagaacccagccctgggatagctacccagccctggctggaggtggcccagaaaaggaggcagggctggccagtgcttggccagggaggccattcgaggacaccacaccagtgagtgaatcaatttcattgattttagtttcttgttcctgaaatttcatcaggaaacagatcacaaagtcaagtggaccacgggtcacttatctctctactagactgtaaattccttgagagacttgccttgcagcctggtacatgatgtgacacat

SEQ ID NO: 254258 - DNA, 552 bp, Homo sapiens
gagacactgcttacagggaactgccagatgcatgtgccagactaaccttgttttttacattttaaatgataaatacataaacttttaaatctaagtcaaattaacttttaatatgtgcatgcacatttttaaagttttatttgtgaatgtattttttttttttttttttgagatggagtctcactctgttgcccaagctggagtacagtggtgcactcttggctcactgcaacctctgcctcccgggttcaagcgattctcctgcctcagcctcctaagtagctgggattataggcacctgccaccaygcctggttaatttttgtatttgtagtagagatgggttttcaccgtgttggtcaggctggtctcgaactcctgacctcgtgatctgcctgcctcagcctcccaaagttgcattagcagtccaaattgttgatatataatggcagtaaaagaaaaaatattaattaattgaatttagatcagactaactgattcaagtttttatttcaagatttactgtatgttttacaccaaattttaataggta

SEQ ID NO: 254259 - DNA, 591 bp, Homo sapiens
cactcgggagagtgaggcaggagaatcgcttgaacctgggaggtggcggatgcagtgagccgagatcgtgccactgcactccagcctggatgacagagtgagactccatcttaaaaataaataaataaatgaaagaaagaaaaaaacaaaaaggaaaattgggttcatagttgtacagaatgaaatttgtgcaaaccactactcctgtttttatgagatgccagtattttgcaaagacagtaattttggtataaatgtcaatagattcatattagtatatactcatcaatccataggtatcttagtgaaggaacaaatactcatttaagctattataaggaagatatattagatactataaagacataytgcaaactcatagggtagaaaatctttgaccctatcagcaactggatgtgagacctataacactatggaaaacatttaaagtttgcagtgttcaagtctgtctcctctgggtttcctatttctctctctggccagctagttcattctttattctccctctgcggattgacttctttgatttttctatctgtaaaaggtggttgccccaaagaatttacatct

SEQ ID NO: 254260 - DNA, 591 bp, Homo sapiens
cactcgggagagtgaggcaggagaatcgcttgaacctgggaggtggcggatgcagtgagccgagatcgtgccactgcactccagcctggatgacagagtgagactccatcttaaaaataaataaataaatgaaagaaagaaaaaaacaaaaaggaaaattgggttcatagttgtacagaatgaaatttgtgcaaaccactactcctgtttttatgagatgccagtattttgcaaagacagtaattttggtataaatgtcaatagattcatattagtatatactcatcaatccataggtatcttagtgaaggaacaaatactcatttaagctattataaggaagatatattagatactataaagacatactgcaaactcatagggtagaaaatctttgaccytatcagcaactggatgtgagacctataacactatggaaaacatttaaagtttgcagtgttcaagtctgtctcctctgggtttcctatttctctctctggccagctagttcattctttattctccctctgcggattgacttctttgatttttctatctgtaaaaggtggttgccccaaagaatttacatct

SEQ ID NO: 254261 - DNA, 563 bp, Homo sapiens
tgattttttaaaaagcagctgcttttcttgtgttgaagctctcaatatgagtagtggctatggaaattctttgyaggtcaggacttcgtagcttcctgtggcctttctatatctctttttgcaggtttgttttagtatttatccactatgtgtaatagtgagtggtaacagcatgcactccctagtacactagggatcactttacaggtcttgaacctctgtaagccccatttctttatctataatctgtgaatttatctgataaaattttgtgctttaaaagagataatacattttacatggattagcatgttgcctgcatcatagtaagccctcagtaaatgttatggcattgctgctaatgctgctgtagtttggaatatgaggattaaattgtgattaaagaggaatgttgattaactcactcagcacaatatctagcacatagtagatacccaataaaaacgttccttttactcccatgttcaaatgcccaccccgcctcttccccatgaataggaacaagtagatgacttactagctataatgaatcttttcttaga

SEQ ID NO: 254262 - DNA, 563 bp, Homo sapiens
tgattttttaaaaagcagctgcttttcttgtgttgaagctctcaatatgagtagtggctatggaaattctttgtaggtcaggacttcgtagcttcctgtggcctttctatatctctttttgcaggtttgttttagtatttatccactatgtgtaatagtgagtggtaacagcatgcactccctagtacactagggatcactttacaggtcktgaacctctgtaagccccatttctttatctataatctgtgaatttatctgataaaattttgtgctttaaaagagataatacattttacatggattagcatgttgcctgcatcatagtaagccctcagtaaatgttatggcattgctgctaatgctgctgtagtttggaatatgaggattaaattgtgattaaagaggaatgttgattaactcactcagcacaatatctagcacatagtagatacccaataaaaacgttccttttactcccatgttcaaatgcccaccccgcctcttccccatgaataggaacaagtagatgacttactagctataatgaatcttttcttaga

SEQ ID NO: 254263 - DNA, 552 bp, Homo sapiens
gtgcctcttttactgcaaaattatatcagtctgtgacttgttgcagacataaaaagaattcctgagtaccaaaaatacatcaagtcataaaggattaagattttgactgtttttatcacatctgtggaggactttattaccctctttaattacccttagctaaggttaattaagtctgtttaagtcctgccttattgtgctatgtgtgcctctctattctttgcttaagagtttatttattttttttctttgccgtatctgatcaatagctgtcagcatgctttttggaggtcagtggcttcttttctgcacttgactggcaggtggcatgtttgaagtactgcacactttgccttctttcyggctgttagtaccctcttagttcttggcagggtgcagagaggggatcacgtaacccaagtgtttccctcacagactgacattcatctcagtattcatgttccttgtcaaggaaaggataaagaaggcataattaagaaaatgatggtgtgcctgccttgttgccagaaacctatcccattagcactgttg

SEQ ID NO: 254264 - DNA, 552 bp, Homo sapiens
gtgcctcttttactgcaaaattatatcagtctgtgacttgttgcagacataaaaagaattcctgagtaccaaaaatacatcaagtcataaaggattaagattttgactgtttttatcacatctgtggaggactttattaccctctttaattacccttagctaaggttaattaagtctgtttaagtcctgccttattgtgctatgtgtgcctctctattctttgcttaagagtttatttattttttttctttgccgtatctgatcaatagctgtcagcatgctttttggaggtcagtggcttcttttctgcacttgactggcaggtggcatgtttgaagtactgcacactttgccttctttctggctgttagtaccctcttagttcttggcagggtgcagagaggggatcamgtaacccaagtgtttccctcacagactgacattcatctcagtattcatgttccttgtcaaggaaaggataaagaaggcataattaagaaaatgatggtgtgcctgccttgttgccagaaacctatcccattagcactgttg

SEQ ID NO: 254265 - DNA, 442 bp, Homo sapiens
taagccctcctgagctttccaagttaaatttaggtatcgctcatttggatgggcttccctgttggtccctcctctctcagcctgtcacaaatacacacacattctggggttgtggcccctgctgtgtgttactgccacatctttaatgatgttcttctgagtactttccatactgcattgtggaacaatgctctcttgtttgagtttgccacgaaactataagctgcaagagcaaaatactattttatttcctgtgcttctcacagcacctggtacaataaatgtttgataaatactggttgacttagtgacagaatgaatgaggacagttaggatctaaaataggatagagagcaccatggagaggcaggaagggcctgaaaggaaccactttcagctttayagttttccattagtctttaagttgaaggcaaagtagagg

SEQ ID NO: 254266 - DNA, 581 bp, Homo sapiens
tactaccatgaggaattagttatgataataaacaaagtaagatatcatgtcttccctaactctgcttactttgtaattgtcagatgtatataattcctgtacggctgaaaacgaaacccattatttcataataaagatgattgtaatgaactaagcaactttaaattccatcagttattaacaggtgaaatttacagattaaaaataggtttttctggcatattaaatgagttatacgtttcatacatgtagtttcaaatgagtgatttggccacatgttctcactcataggtgggaattgaacaatgagaacacttgttcacaggaaggggaacatcacacaccagagcctgttgtggggtggggggatgggggagggatagcattaggagatataccyaatgtaaatgacgagttaatgggtgcagcacaccaacatgtcacatgtatacatatgtaacaaacctgcacgttgtgcacatgtaccctagaacttaaagtataataaaaataaaataaaataaaataaaataaaataaaataaaataaaatgagtgatttggggattctgtctttaagtt

SEQ ID NO: 254267 - DNA, 604 bp, Homo sapiens
tagctatgtcttgcatatgacatgttttgatgcagggagagttccagtttgtttggagtaagggttcatgtatgtgtttagtcaccattcaaatttgagagttaagtagaggtcagatatctaaggactttgaatgctagctaaggactcatagtgaactaaacacttactgaataccatctatgtgttaggcacaatgctcagcacttttatatgcattttgaatttatgctcaagacacttggatctgcgggggcaggagttagtggcactgagatatatgagcagcctgggtagaaatggagagaccagagatagaaatcgcagaagactattagggttgatgacaccttggattacggttggtcctaaaatttataatttcagctactaaagacctggttctagaggactgaaacttcatcttttcttggttattctacatataatctaatgcaataagaacctgaatgatgagtacttagttggcagatatttatcagtygcctactctatatacatctctttgttagatttgatgggctgctcactctgtccctctgcccacctgatgttagttaatctgggggacaaccatgtaata

SEQ ID NO: 254268 - DNA, 612 bp, Homo sapiens
tttgggtggttatggacttgtagcaccaccagcagcatatgagctgatgtatggttagtaggactgaaaaaatgtcaaggaagaggaggaaaggagactcatggtatggaacagattaaggacttatttacagatgcagtgaaggaagacgtttgaaatgctccaattcttcaagttggtattcatgattaaaataattaagaagtcagttttgagaactaacagtaaaggaattgaccacctgactggtgttttgatgtgaagcagatttaaagggataaaatctgtatgatgggagatcaggaaggcagcagtggtgcattcatacacagccaacactcaagtatttatttgagtattgttctggggagccatggaggatatggtttttgtgttttaaggggatcatagtctgattggcacagggataacatcaaaggccaacccaaatagaagacagcaaatgttggtgtgtcaaatgaatgttagtgctgtttgaagtgtgaatcccagatcccaggccccaatccaaaccgactcttattattttcctatggctgcctacaaattaccacaaacktaatgatttaaaatagcacacacttattatct

SEQ ID NO: 254269 - DNA, 542 bp, Homo sapiens
  misc_feature (1)...(542): n = A,T,C or G
gggtatctacttaggacaaagatttactatcccccttatcattntgaccaaagtcccctcttacgtaaaggaaaaaaattacccttttcaactttctttacatcttctttatatgctctctatgtaaatttctggcctagtagttttagttacatatattaaccacaatgttaactcttagtaaccctaattttcagtgaaaaacctaagaagtaagcaactttatgtaccgtatgcagagctcaggacaaatgacagtgctatggagacaatgcctggaggatccaactccttgcagtaaagccaagaggcacagctcaactagggatgatggggcccaggcactgtccccagggccacttgtctagtcctcagaatctaaaggctcaaatccaaagacataagctcatagacaaattaagcaaataccaaaaaataccataaaagcaakggccttatgaccttaagacatttagcagagacagtataaaccagtctaaccaatagatctaggcaaacatgtctaaattaaaattggaaga

SEQ ID NO: 254270 - DNA, 614 bp, Homo sapiens
gcgccataacaaaagactctccccagggtctaatcataagatgatcaaacactttcattcaaaatgcaggactgtaagttgcttttgctgttctttcaattacccagaatgtcagcatatctacattgacaggttaatatttggatgatgactctaagctctgtgaaaatcctgactgctttcaaataattttttaaaaatttatatttggcataactgtattgtgaagtcaaacttgatrctccttaatcttttgactatttatcacccttgtacaaaatatattgtttgtgtttcaccaaaatctattgtttagtgactcccaagactttattctctaagcacagtcttcatagctgagcagttttgtacagcaaccttcacagggctcgtgagccatatcagaaattaggattctagggaggatgaacaatatgaacattttgattctggagggaggacactaaataaacagcatctcttttctgtaataaggggcatgatttaatgactgctaaaatctattctataatgctatgactcagaagcctctgttctctgccagaggttgtttgttcccaagtcctacctcctcttcccactgccccaaatca

SEQ ID NO: 254271 - DNA, 489 bp, Homo sapiens
tgctcctagagctcttcgaagacaggaaaaggcaaggagacttccagaaaacacattaccaaagatgagagactggctcaatgaagaactaaagctaacccatgcacctggatctgcaggtctgtcctctgtgttgccaccttgtctcaagacytttttcccattctaggagggaagtgggggcctgctggtggtctcccccaaccagcatgtgccatttggcaagaccaccagagttgctgggctactgtctgctgagaatgaaggaaccatcagtagagagatgaacagcctcccagtctgggaaagaagttgccagaacttagaggaatgatagcagagctgacatattctctgtcatctgcttgccctaccatggatggcaagattcaaggccccagctgagaagaataacaaggaaagccatgttcttatggaaatagcttctgctctctaagtattctagtccacaccaactctgtttctgga

SEQ ID NO: 254272 - DNA, 616 bp, Homo sapiens
actgaatgacagttacataagtgtaaaccacatagatttcatatgcaagagggtgctattatctaatgagaaaaataagatatagacagcaactttaccaaattcatacaggctagtgacttagtcaaaatgggattccarcatgcttttgggtgacaccactgccccatttttaaccatttaaaatgatcttaatggtctaagcactggcatcaagggaggcagggggtgacattaaccaagcaatccatcatggattttcctctggcatcaatctggcttcaaggagaccacctaagccagctctgtctcttactattcttccttcccacaacatcagaaaaagcatttcctgctgttagggaatttatgattataaataaaaataaagcctgtaagacattactaaaaagtaaagaaaaaggcaactagataaaaaaaataaagttggataaaggtatgaataacaatgctgataataacaagagaattcactaaccatagtaatatgcttagtccaataaaggttctgtgaatataatgagttacaaacagattcatcttggctataaaataagaagcttctgtgattgttattgttgttattataaattaa

SEQ ID NO: 254273 - DNA, 597 bp, Homo sapiens
agtaaataattaagtgcacaagcaggtactacctctctgagagcaaacacttagtttagagcaaacacttagtttagacacatcattgccaccccacactcaccacgcctgcccataatgcccctagtacccaatggccaacttgaattactgtgtcttatcaggatgacaccagtgcagttgtttcctgcatgtagaacaggttaaatgccttctggaaagcaccagtcctttcattaatgagctcaccttgactgtccacagcacagaaggggtgccatgacagccctatgtcaagacatggattttttttttctttcccttagcccttggggtggcagtcgcctgccactgtgtgcaacctcaatgtgccccacagatattatcattttctacatgtgctacgatatgattaaggactaytgaaatttggattttcttttttcacaagacaaaaaaacagaaaaactttgagctccccagaggcaagggagggaccagtgcaatggagggctaccttagggtctttacccctgcagagcaggtgtggggtctcgtggagcaactgcatgtgccttgcctacttcctgcacccag

SEQ ID NO: 254274 - DNA, 590 bp, Homo sapiens
ttgctattgctagagagaagagaaaggaatgaggcaaatagggagtcctgcagaggggagagggagctgtccctagtacattatgggaagtcagtgctgaggcccctacttttaatgggaaatcacaaagaaacgtgcttgagggattgacaggaataataaaaaacaccagcatgctcagaatccattcggttcaccctcaggtttctaagaactaaactcatcgtcctaaatgcttacttggagagaaaccactatacgtaaagagacatgtatatatgaagaaacaaggacatagccctacctacagttttatttttattttgccataaaataaatgcttattaatttccataccacgtatggagagagctgccacatgtgaatttcttttagcaataattgccgtgcctgkgactccttaagttatatataccgcgggaatagtttccaaataagaacccagagagagggagagattcacagacaatagcttaaaaagtctagaaattatagaccgattgaggtcagcaagaaacaaattattcaatatatcccctgagggctagagccagactttcccctatgat

SEQ ID NO: 254275 - DNA, 507 bp, Homo sapiens
gcagtaggagcgtgttgcgccagataagccagtagcgttttccaggcctaaggttttagggtacagtggacaattcagcacctactgactgtaggaaactagggagggaagtcacttcccctctggttcctccagttctgccgtggtaaaatgcagacatcctgccttgattgagaatgaagtgggaagtgggaatatctcagtaatgacattctggaaccttcagaatctgttccagacaaatgggaaggctcccacctgagtgaaattgggtgaaacattgagacagcttttctgtttttgtgaatgtctgaggtggctccatttcctgtcactcattcctcagccctgtgcttcaagtttgctctcccaggrgctatcagacataggccagcctgggtgccaggagcaaacatccacgtgggcttgtcaccgtgtcagccatccaaacactaactggagtgtacagctcggcccccacaggggcagagaggatggcagagagac

SEQ ID NO: 254276 - DNA, 432 bp, Homo sapiens
atccacaaccttctgcaaacactcagctgaatagatcatccccggccatcsataagtccttcctagaaatgctgggacagcatagagacaatggaaagaagacttctgcccacatgccccatgaatgagaactaacctagaaaagacatgagctttccaaccctacatgatgctcatctggcctctggatgttggccaaggtctctggaaacatcctgtgtttgagtgcatagatccaacatgaccgctgcgcagtcagtgctaaaaacaccactcccataaatcaggaacaaatattactgagagtgtggctaggcaagaactaggggatcaccacacttccctaccacatgcacaactgtaagctacacataacgtaattttagagatttcaacaataaaactaaagaaaaaaattatattccaaatatt

SEQ ID NO: 254277 - DNA, 528 bp, Homo sapiens
cagtaaagtaagcattaatattgtccccctttataggtgtggcacaaaaaaggttaaataacttggttaaggtcacacatctggcggatggcacaggctgcacccttaccagggtctgattgtttccagtggtcatgcttctatgagttcacactctacaccaaaggctcacactgaatccggcactattgtttatgtaaacctgcattccttcaagaygtcaaaggagttgattttaaacaagcatcaccccaggggtgctggaggagccatgtctttatctactgcagttctgggagagaaacgtgcatatgaatgaagatgctgttgtaaattttctaaataatgatcccttatatttttgctttataccttgcaaagcattcttaaataacactgtctcagctgatggttgtaaaatttttatgatgttgattgccagaataatcattctcatcttcctgatgaagcagccaagatggaggctgttctgtgccttgccccaagttcaatgataaaccaatggca

SEQ ID NO: 254278 - DNA, 591 bp, Homo sapiens
atttaaaaaatagtagggtttatttcccacactgacctaagacttaaaacaaaacgaagccctctaagggttgagtgtgtggtgtggccccttctccccacagaccttccccttgggtcagagcgtttagtcggcctcatgccaatgcccatgaccgggggtgctggttcccttctgcttcttggggccttccatggttcacccccatcagagtctggaaagggaggccacgggaagtagggaagggaggaagaggaaggaaagggtgggagagctgagggttggagaatatcaagaaaaactgagattttacaggttgttactctggggttccaaaaraggtcctcacggaggttccacatcaccagaccctgggtcctgtatcagaactgtcctgggtctgcacgctggagttcactaactggacttccagccactttacttcccatcctcaacgtagaccaggaaaagtcatgatggaaagacttctttgttcctcctcagcccagcagggctctgatcatgccagcttgttgtgttgcaagacacgaaaagaagccagcaacaaaattgtcttgcgtcacttaactt

SEQ ID NO: 254279 - DNA, 560 bp, Homo sapiens
tgggcttggcggagggctggacaaaaagggcattctgtgcaagatgcctggggctaataggagcgggggggcctcctgcccctgccccacacctccaccacctctgttccagtggaatcagatgtaagaatcagagggcctgggctgttgactctgggagcaattatgaccagggccatgaggttcaacagattcctcgccttggagaaataaagggtaatcactccttagagaggacgtcatggtggcgaaactggaatgcagagcaggagagcatgggcttggtctctgcccaggagctgccctgyaggatttccaggcccgggcaaaccaggtgggatcataaggacctatgcacactccaggagtccccagtgctctactgatcactccctctgcaccgcaggtgctctacaagcatgatttcctgtcctgctcatggcaactctgagagggagagaccattgcatatgaggagggggtgtcttctcaagactcagccaccaaggatgtcccatctggcctcaggttcacaaggtctgggttcctggggaagctgg

SEQ ID NO: 254280 - DNA, 560 bp, Homo sapiens
tgggcttggcggagggctggacaaaaagggcattctgtgcaagatgcctggggctaataggagcgggggggcctcctgcccctgccccacacctccaccacctctgttccagtggaatcagatgtaagaatcagagggcctgggctgttgactctgggagcaattatgaccagggccatgaggttcaacagattcctcgccttggagaaataaagggtaatcactccttagagaggacgtcatggtggcgaaactggaatgcagagcaggagagcatgggcttggtctctgcccaggagctgccctgtaggatttccaggyccgggcaaaccaggtgggatcataaggacctatgcacactccaggagtccccagtgctctactgatcactccctctgcaccgcaggtgctctacaagcatgatttcctgtcctgctcatggcaactctgagagggagagaccattgcatatgaggagggggtgtcttctcaagactcagccaccaaggatgtcccatctggcctcaggttcacaaggtctgggttcctggggaagctgg

SEQ ID NO: 254281 - DNA, 484 bp, Homo sapiens
ttgactccttgtctctgggggccctcaggaaatctggtgatactgatgattcgtggggccccaaaaagaaatgaaggctcccaggttcttgtcctgctgccactgaatctttatctggtgacctaggcctggtcattctgagycccatgatgaagatcttctggttacataatagggaggattctacattaggcaacaggtattttttgagcttagagaagccaggtgctgtcctgagcaccacgtaccctgtctaagagaccttaactctttagaagcgtgctctccgttgtgtgttgagagctggctgaaatccagaaagtgccacggacatgcaggaggcaaggggaggagcacagggcagatttccctgggctgatttttagggaatgagtgggcattgtgaagacggaagagagagggaacagactagtataaggcacagccagtgcagagccaccgaggtgggaaggacctggattgt

SEQ ID NO: 254282 - DNA, 484 bp, Homo sapiens
ttgactccttgtctctgggggccctcaggaaatctggtgatactgatgattcgtggggccccaaaaagaaatgaaggctcccaggttcttgtcctgctgccactgaatctttatctggtgacctaggcctggtcattctgagtcccatgatgaagatcttctggttacataatagggaggattcyacattaggcaacaggtattttttgagcttagagaagccaggtgctgtcctgagcaccacgtaccctgtctaagagaccttaactctttagaagcgtgctctccgttgtgtgttgagagctggctgaaatccagaaagtgccacggacatgcaggaggcaaggggaggagcacagggcagatttccctgggctgatttttagggaatgagtgggcattgtgaagacggaagagagagggaacagactagtataaggcacagccagtgcagagccaccgaggtgggaaggacctggattgt

SEQ ID NO: 254283 - DNA, 344 bp, Homo sapiens
gtagaggtcttggtgtttccctgaaataggagctggtactgcctgaaagtagagagccaggggatagagaaactggacgtggctgattatcagagagcctccagcctaggcgagctctctcccaattttgcccgtgactcctgcccccaccaaataggataattgggaatctatgcagcaagatgctggctcagcagagaccccatatataaaaattattcttgatggcttcaatagattttgcactgtccaggccaaaatgaaatatgaagatggggtagtggaggatgacttggatgacacccggragtggtgattgaatacaacccatgagttacattcaa

SEQ ID NO: 254284 - DNA, 656 bp, Homo sapiens
attaatgggaattcactgaagttgagcatttcttttaccatgttttaaaaaattttaggataggtgtagagttatagaaaaattgtgataatacaatagagagtgctcagactcttgagaaggtagctgctcagtgagagggcaatcttaagagatctgaggctgcttcccaccttacatcaattgtcatttggcaactcaaggtcactcaaattacggcctgttgctttccctgcctggagcaccagagcagcagctcaaatattttgcccagaatgagaaacaggatatagaacagagagctccttttatacctgtataccccaaaggatgagattgaaaaagttcaaccctgagagcactcagcacaacagtgaaagcgacggtgaaaagcaactgggaaattgattcattgctaaatgataggttcacagttcagtggagagmagaggacagtgtcagcagaaagagcactactggttcaaacaaatatgaacactgacctcagcaactgtccctttaaagcagcagtttcccaacattttccgcaccaaggaccagtttcgtggaagacagtttttcctcggacagtgggggatggtttcggcttgaaactgttccacctcagatcatcaagcattagactctcctaaaga

SEQ ID NO: 254285 - DNA, 460 bp, Homo sapiens
attttttaatagttctatttatattctgaatagtcataccatctcatggggcatcaggagactctcccttcttgcctcatcacatcacttaacattaacagttttgtggggtttttttcttattatgtcagctattctttatgaattgcttttttggatagcaaaataaaaatttataattttagttttggggtaaatataaaaggaaaggctcttaatttaatctgtgtgttttgcttcactgttcattaaaaatatcctcaatcttcyttatctgccttttttcgctatacatctaatttgtctactactcaacttccaccatatgattagggtctaatgactatgacaggcttcatgatagtgctaaaatattaatcctgacctacttcccccagcgttctatccttcatgctaccactctatcctatactcatagtctgttttgactctgccaagt

SEQ ID NO: 254286 - DNA, 627 bp, Homo sapiens
gtaaggctggagtgataaacaagggccacttcatgcggcctcctgtgtgtcacactgacaactttgagttttgtcccaaaagcaatgtgacccagggtattcaaattttatgaagggtctggaaattgcagagttatatgtttataaaatatagaaagggttatatttgaattaaagcatgcctaattttggctggaaggggtaaaataatactatgaatctctctccttcttggatccctttcccaaaggtaccctaagaaatttatctgacacttttatctttataacattcatcaggaaactctgttcttgactacctaaatgagagacrtagaaaagaagctagttccataagagatttttttgtgttctgtaggtctgcccttctgtcattactttcaaagatccactactgtaagaagccaatgttcaaatcagatagtcacagagatataagcacaggaggtggggatgagtgggtgtctatgggaaaacaatccttttattataacccggaggagagttgttttacccactcccccagttgccccacagctgatatttaacatgctaagcctgttaacctgaagaaaaatgggtgattttagtgaagtaaatattttga

SEQ ID NO: 254287 - DNA, 605 bp, Homo sapiens
tattgctgcacccaatagctcagctatacagaccattaccttctttctcatgtctgaccacaattactctaagaagaccattgtttcttttgttccatctatctcaatgtccacccctttgtaaattcccaattattaccatcctttacagttcaacacagatgctatcttcaccatatctaccctggtatgtcctctacccttcaaatggaaggattatctcactaccatatattcctctgaggctatgtctgactcctcccaattgatgccacattttctatcttgtgttctgtctgaaaatacttgttttgtccccacaataacagctctgaaatgcccactttctcttctgatttccctgtcctctgttcttcaccatgcagtttgcatcartatgttcaagggagtgaggagggtggcttgatttagttaaccctaatgagaaagaattgaatcaggctctgtggaagccactgcaaaaaccataaaggcctctattcctgccttgcaggaacgtaaagctgaattgagatgaaagagcacacactcatgaaaatgacttaagaacattctcagagcagcacataaatagatgcagcttt

SEQ ID NO: 254288 - DNA, 605 bp, Homo sapiens
tattgctgcacccaatagctcagctatacagaccattaccttctttctcatgtctgaccacaattactctaagaagaccattgtttcttttgttccatctatctcaatgtccacccctttgtaaattcccaattattaccatcctttacagttcaacacagatgctatcttcaccatatctaccctggtatgtcctctacccttcaaatggaaggattatctcactaccatatattcctctgaggctatgtctgactcctcccaattgatgccacattttctatcttgtgttctgtctgaaaatacttgttttgtccccacaataacagctctgaaatgcccactttctcttctgatttccctgtcctctgttcttcaccatgcagtttgcatcagtatgttcaagggagtgaggagggtggcttgatttagttaaccctaatgagaaagaattgaatcaggctctgtggaagccactgcaaaaaccataaaggcctctattcctgccttgcaggaacrtaaagctgaattgagatgaaagagcacacactcatgaaaatgacttaagaacattctcagagcagcacataaatagatgcagcttt

SEQ ID NO: 254289 - DNA, 318 bp, Homo sapiens
ggttgctgctaagttctgtatagaaacaattgagcaccttggttgwcaaggacatttctagaagctagattacagagtccttggggctaagaattactatgtaaagtctagggttccatacagagttctagaattagggattatggggatgtattattgagaaaactgtgttgtaaagcacattattggcatgctttcatttatggacagtttcaacacagtagttgatgttcttaactctgccttccagtagttaccatgtactcaggttcccaaatcttaacctgtctcactgtggccctccccactttgtatctt

SEQ ID NO: 254290 - DNA, 544 bp, Homo sapiens
aaactatgtgaatagcctttgcatcttatcaatttcaaaaaccttaaatccatgtatttcaaaaccaaaccaaatatttctatgatgctgtaatggtgattttctagttttctcattttagtacrcttattaattgagattattttgtaagaaagaactgtttcccaatactcatacttatttattaattcagttatgtacttacattagcatggactcatggatatttatattattctttgattatgatccaatactatcattatttatgttgctaatattattcttgctgtgaccgttgtagtttttgcagattagctccttgcaatatgtacccattctatctggcacatggtgaagaggcttgctttcttttaggtaccacaagatgctcctacgtcacattgggttttgcctatctgtcctgaaaacaatcacttttcctagtaagttgttttattggggtgtggtatttataaactagggcctaggtgtttggtgttttcaatgctactgtggtgtcacagttcctgcattctttcaa

SEQ ID NO: 254291 - DNA, 594 bp, Homo sapiens
cacccctcttctcactgagataaatgcatatctgattgcctcctttggagaggctaatcagaaactcagaaaaatgcaaccatttgtctcttatctgcatatgacttagaagtccccttccccacttctagttgycctgcctttccagactgaaccaatgttcatcttacatatgttgattgatgtctcgtgtccctaaaatgtataaaaccaaactgggttctgaccaccttggacacctgtctttaggatgccctgcagctgtgtcatgggtgtgcatcctcaaccttggcaaaattaactttcaaattaactgagacgtgtctcagatttttggggttcacacctgttaataattaagagtagaatatctgcaacatattaccatatgtttatatttaattttatgaaaaactgccaaactattttcttttccatagtgactgtcactttgtattcctaccagtgatgtatgagagttccagttgctccttttactcccagtatttgctattatttttaaattttatttacttattgatttatgccattctagtaggtttagagtggtctctcattgtggtttttatttgt

SEQ ID NO: 254292 - DNA, 535 bp, Homo sapiens
ccttggacacctgtctttaggatgccctgcagctgtgtcatgggtgtgcatcctcaaccttggcaaaattaactttcaaattaactgagacgtgtctcagatttttggggttcacacctgttaataattaagagtagaatatctgcaacatattaccatatgtttatatttaattttatgaaaaactgccaaactattttcttttccatagtgactrtcactttgtattcctaccagtgatgtatgagagttccagttgctccttttactcccagtatttgctattatttttaaattttatttacttattgatttatgccattctagtaggtttagagtggtctctcattgtggtttttatttgtgtttctccagtgactaatgatgttgatcatattactatgtgcttatttgttattcatatatcatctttggtggactgtctgtttagatattttgcccatgttttattgggctattggtcttattttgagttgaaaccttctatattctcaactgaagcttttttgtaaga

SEQ ID NO: 254293 - DNA, 596 bp, Homo sapiens
tcatgccttaattatgaagaaaaatgatgattacatattatgtaataactagaaaccattaggcctacattgtcaataaggcaagaattggttcttggggaagggcaacaaattgttagtcggtacaatgatttgtggctctgtctccaaatttcaacccttcttgatacaatcttattttttaatatttaattccaagggtaaatgattgggataaaaagatgtttaaggtttcttagggaggcgataatgaaaaaaaaggtcaataaacactgttagattatatatcttagatcttcatgttattcctattaccatttcaaattgttgccaactttagaaattaatggattttattttaaagtgtaaattcctggtttttgtttaaaaacaaaatttaaaagatctggcaaatctggttccgtggttcgtccggcaataaytggccaggtctggggagcagcctcatctttagggaggtcttgtgtatctgttgttcaccccattccaccattcgcaattcattatgtccattctgacctgtttctctcatgaaagttatctgtttggccactgaagggatctatgtacattct

SEQ ID NO: 254294 - DNA, 617 bp, Homo sapiens
ctttttaatttgtgtggttttttgttttgttttgytttgtttgagacagggtgttgctctgtcacccaggctgtagtgcaataatgtgatcatgactcactgcagcctcagcctcctgggatcaagaggagctgagcctcctcagcctcctgaggagctgagactacaggtgctcactgccatgcttggctactgttttattttttttatttttattttttttttgtacagtgaaggcatcactacattgcccaggcttatgtccaactccttggctcaagcaatctgtctgcctctgcctcccaacgtgcttggattacagccatgagccaccgtacccagccctttttcattcttaagatgaggcttgactttttaattatagccattctgactggtatgagatggtatctcattggggttttgatttgcatttctctaatgatcagtgatattgagctttttttcatatgcttcttggtcacatatacatcttctttagaaaagtgttcataacttttgcccactttataatgaggttgttcatttttttcttgtaaatttgtttaagtttcttatagatgctagatattagacctttgtcagatgcatatttc

SEQ ID NO: 254295 - DNA, 617 bp, Homo sapiens
ctttttaatttgtgtggttttttgttttgttttgctttgtttgagacagggtgttgctctgtcacccaggctgtagtgcaataatgtgatcatgactcactgcagcctcagcctcctgggatcaagaggagctgagcctcctcagcctcctgaggagctgagactacaggtgctcactgccatgcttggctactgttttattttttttatttttattttttttttgtacagtgaaggcatcactacattgcccaggcttatgtccaactccttggctcaagcaatctgtctgcctctgcctcccaaygtgcttggattacagccatgagccaccgtacccagccctttttcattcttaagatgaggcttgactttttaattatagccattctgactggtatgagatggtatctcattggggttttgatttgcatttctctaatgatcagtgatattgagctttttttcatatgcttcttggtcacatatacatcttctttagaaaagtgttcataacttttgcccactttataatgaggttgttcatttttttcttgtaaatttgtttaagtttcttatagatgctagatattagacctttgtcagatgcatatttc

SEQ ID NO: 254296 - DNA, 593 bp, Homo sapiens
gttgtgatcttccatcttcatcgggtcatgccatctactttatttctctgacttaaatgctaactgatggcaaggtccaggcaaaaagcttcagacaagtagggtaactggacattttttgtttcttgggcttaaccagcacctgccttgcaggctgcctttggaaatggcaggcttaacagcctggtgagcaaacaggagagttgctttcacacttgagttatgatctgtttaaacttygagtcaactaccattcagggctcacatttcttgaacatgtgggataggaggagtttcagaataacagacaattgcccaagcccaaaggggaggtttccaggtttttaaaggaagtacaaattatggattggtctttaaaaatgttcgaggagaagcctcccttagtgtaacctactgaaataaatttgaggtgtaagcaagtaaaaataaaaaatattctaaaaatgatctatcatgtatcaaaatttaggctgctattctgagacataactttaaaagcttccccaggttggctacaaatataaccccaaactggtaaagttttagggttctactctgccatttcattattt

SEQ ID NO: 254297 - DNA, 634 bp, Homo sapiens
tcctgtgcataggctgttgttccatttatttctgtattcttcaattcctttcatcatcactttatagtttttggtgtaaagatatttcacccccttgattatgtttatttctacatattttgtggtttttcgtgctgctgtaaatgggattgcyttctcaattttactttcagtaagtttgttattcttgtatagaaatagaactgatttttatgttgattttatggcctataactttactgaattagtattaacagttttttgttgagtctttagggtttcctacctttaagatcatgtcatctgtaaacagagacaatatttcttcctttctaatttggatggcttttctttttcttggttaattttctaggacttacaaaactattttgaatagaagtggcaaaagtgagcattctggttttgttcctcgttcaggaggaaaagcttttagtcttttactattgatgatggtattagctgtgggtatgtcatacatggccttcattgtcttgaggtccatttattttaagtctaatttagtgtttttatcatgaaaggatgttcaatgtcacaattcttcttcatctactaaggtgaccatatgatttttataaatcgtttggtaaatatg

SEQ ID NO: 254298 - DNA, 634 bp, Homo sapiens
tcctgtgcataggctgttgttccatttatttctgtattcttcaattcctttcatcatcactttatagtttttggtgtaaagatatttcacccccttgattatgtttatttctacatattttgtggtttttcgtgctgctgtaaatgggattgctttctcaattttactttcagtaagtttgttattcttgtayagaaatagaactgatttttatgttgattttatggcctataactttactgaattagtattaacagttttttgttgagtctttagggtttcctacctttaagatcatgtcatctgtaaacagagacaatatttcttcctttctaatttggatggcttttctttttcttggttaattttctaggacttacaaaactattttgaatagaagtggcaaaagtgagcattctggttttgttcctcgttcaggaggaaaagcttttagtcttttactattgatgatggtattagctgtgggtatgtcatacatggccttcattgtcttgaggtccatttattttaagtctaatttagtgtttttatcatgaaaggatgttcaatgtcacaattcttcttcatctactaaggtgaccatatgatttttataaatcgtttggtaaatatg

SEQ ID NO: 254299 - DNA, 634 bp, Homo sapiens
tcctgtgcataggctgttgttccatttatttctgtattcttcaattcctttcatcatcactttatagtttttggtgtaaagatatttcacccccttgattatgtttatttctacatattttgtggtttttcgtgctgctgtaaatgggattgctttctcaattttactttcagtaagtttgttattcttgtatagaaatagaactgatttttatgttgattttatggcctataactttactgaattagtattaacagttttttgttgagtctttagggtttcctacctttaagatcatgtcatctgtaaacagagacaatatttcttcctttctaatttggatggcttttctttttcttggttaattttctaggacttacaaaactattttgaatagaagtggcaaaagtgagcattctggttttgttcctcgttcaggaggaaaagcttttagtcttttactattgatgatggtattagctgtgggtatgtcatacatggccttcattgtcttgaggtccatttattttaagtctaakttagtgtttttatcatgaaaggatgttcaatgtcacaattcttcttcatctactaaggtgaccatatgatttttataaatcgtttggtaaatatg

SEQ ID NO: 254300 - DNA, 606 bp, Homo sapiens
tttctttaaccttgatagtctgattattaaatgtcctgacgtagtctatttggcttaaatctccatgatgttacataattattttgtacttgaatattgatatctttctctaggtttggaaagttctgttattatccttttgtataaaatttctacctcagtctttacctgctctttaaggccaataactcttagatgtgcccttttgaggctattctctagatcttatacacatggtttattaatttttattttttcttttatctattctgactttctactttcaaatagcttgtcttcaagctcactattccactcgttcagttctgctgttgagagactgatgtattcttcagtttgtcaattgaatttttcagctccagattttctgcttaattattattatttcactctttatctcatgattctraattccttctgtgttatcttggattttattggaattcctcaataaagctactttaaattatctgtctgaaaactcatgtacttctgttactctggaattgatcatcagtgtctcatttagttcatttagtgaggtcttgttttcctgtatggtcttgatgtttgtgtatgttcact

SEQ ID NO: 254301 - DNA, 579 bp, Homo sapiens
  misc_feature (1)...(579): n = A,T,C or G
taccaggacttatcagttttctaggaattttacaaaatgtctggaacacgtattaataatgtatatacatataactcaaggttaaatatcatttttttccagttttaattttctattactttaaattctggggtacatgtgcaggatgtgtaggtttgttacataggtaaatgtgtgccatrggtggtttcctgtacctatcaacccatcacctagttattaagcccagcatgcattacctatgtttcctgatgttctccatccgcctaccccctcccaccgataggccccagtgtgtgttgttctcctcccggtgaccatgggttctcactgttcagctcccagttatgaatgagaacatgtgtttggttttctgttcctgcattagtttgctgagaataatggcttccagctatatccatgtccctgcaaagatataacctcattctttttcatggctgcacagtattccatggtgtatatgtaccacattttctttatccagtcttatcattgatgggcattgattccatgtctttgctgttgtganntattaccacaatgaacacacatgtgcat

SEQ ID NO: 254302 - DNA, 579 bp, Homo sapiens
  misc_feature (1)...(579): n = A,T,C or G
taccaggacttatcagttttctaggaattttacaaaatgtctggaacacgtattaataatgtatatacatataactcaaggttaaatatcatttttttccagttttaattttctattactttaaattctggggtacatgtgcaggatgtgtaggtttgttacataggtaaatgtgtgccataggtggtttcctgtacctatcaacccatcacctagttattaagcccagcatgcattacctatgtttcctgatgttctccatccgcctaccccctcccacygataggccccagtgtgtgttgttctcctcccggtgaccatgggttctcactgttcagctcccagttatgaatgagaacatgtgtttggttttctgttcctgcattagtttgctgagaataatggcttccagctatatccatgtccctgcaaagatataacctcattctttttcatggctgcacagtattccatggtgtatatgtaccacattttctttatccagtcttatcattgatgggcattgattccatgtctttgctgttgtganntattaccacaatgaacacacatgtgcat

SEQ ID NO: 254303 - DNA, 614 bp, Homo sapiens
ttactttgtctcaccactttaactttctcttaaagtgttatgtacaagaccaagaattagtgtgtagcactaagaattcttacttccaacaattatcagccatcttttattagattgattcagagtataaaattgtgacgttatttaaatggaactgagattgtaatcaccaatcttaagcaagatttcagtcttgttcaacaactggtaagtttccagtgttggggggaaatgaaatggaattcccatgtggattctacatgagcaattggacagacctttaatagctctagtatttttgaatctttggaggatgagtggrtttgacaagaaggtatgtttggctattctcaaagctctactatagttgttaattacaatgatagttaaaggtgtagatattaagagttaaataatattcatagtctatgaagccacaaatgtcaggcaggtaaggttcataagttaggcaggcagggtcaaaatgatcgccctacctaaagaggacagtggatgtccatctccagccaaatgttacactctggcaaagaaaactcagagaaagagccgaaaagcttttgagttttgtttctaaagctcgctctggtcccaag

SEQ ID NO: 254304 - DNA, 558 bp, Homo sapiens
attaccccaggggatagggcagcaggagctacagctaagattctacaaaaggatggtatgattcagacacgtcttagcttcaagattcaaagtgctgaaaaaataaaacagggtatgtaaatgctataaaaacagagatagggaggtgttgaatgctcaccaggcagaaacaaaagttttcttctttaagcaaacgtaaaaacaactgtgtgtgtgtgtgtgtgtgtgtgtgtgtgtgtgtgtgtgtgtgttgccttatataacccacaggtttctgaaaaccttcatttacaatgcatcttacttcagttgtaaaagggtaactatgtaytgtctaattcaggtgctacttctttttgcagctactaatggaaaacagaacctcaaattgattttgtttaaaagtgaaattgccccataattgctttcttctaggaaagaggctgaatatgtaattgcactcctttggggaagcacattctgaattctgccagcaggaagctcctctcttcaatagatcttgatgaaagattccatcacaaatcccattacttcaac

SEQ ID NO: 254305 - DNA, 558 bp, Homo sapiens
attaccccaggggatagggcagcaggagctacagctaagattctacaaaaggatggtatgattcagacacgtcttagcttcaagattcaaagtgctgaaaaaataaaacagggtatgtaaatgctataaaaacagagatagggaggtgttgaatgctcaccaggcagaaacaaaagttttcttctttaagcaaacgtaaaaacaactgtgtgtgtgtgtgtgtgtgtgtgtgtgtgtgtgtgtgtgtgtgttgccttatataacccacaggtttctgaaaaccttcatttacaatgcatcttacttcagttgtaaaagggtaactatgtactgtctaattcaggtgctacttctttttgcagctactaatggaaaacagaacctcaaaytgattttgtttaaaagtgaaattgccccataattgctttcttctaggaaagaggctgaatatgtaattgcactcctttggggaagcacattctgaattctgccagcaggaagctcctctcttcaatagatcttgatgaaagattccatcacaaatcccattacttcaac

SEQ ID NO: 254306 - DNA, 581 bp, Homo sapiens
caataattggtctttgtggtttttctgggcacctcttagaatttgtgcacatgagctgtttgtcgaaggaggctgtaacgaaaggccagaagcttaagctggcttataaaaagagccaagaaatttaggggccttctagtcccatggaacctaascttggggacttcaagacccagtcaaattttttagaatgataaaatacagagctgaatttgctaagttagcatattaaaattaagacaaagtaaaagtaaatacaatgacaaaatgaaacttcagcaattaacaagggatttcaaataaagaacattttatcacaaaaaggatgaaagaatgtaatctaaaatcaaaataatttattttgtatatatttacctttaaataaaatatacttcaatttaaacttttcctaactttcaaaacacgtcattgaactctacgatgctatcacacagagtataatatacagcattatactctgcaatatgaataaatctcacaaacaatgctgagttgaaagaagccagacacaagatgacccaaactgtgtggttcaatttctaaaaataagataaagaggt

SEQ ID NO: 254307 - DNA, 581 bp, Homo sapiens
caataattggtctttgtggtttttctgggcacctcttagaatttgtgcacatgagctgtttgtcgaaggaggctgtaacgaaaggccagaagcttaagctggcttataaaaagagccaagaaatttaggggccttctagtcccatggaacctaagcttggggacttcaagacccagtcaaattttttagaatgataaaatayagagctgaatttgctaagttagcatattaaaattaagacaaagtaaaagtaaatacaatgacaaaatgaaacttcagcaattaacaagggatttcaaataaagaacattttatcacaaaaaggatgaaagaatgtaatctaaaatcaaaataatttattttgtatatatttacctttaaataaaatatacttcaatttaaacttttcctaactttcaaaacacgtcattgaactctacgatgctatcacacagagtataatatacagcattatactctgcaatatgaataaatctcacaaacaatgctgagttgaaagaagccagacacaagatgacccaaactgtgtggttcaatttctaaaaataagataaagaggt

SEQ ID NO: 254308 - DNA, 581 bp, Homo sapiens
caataattggtctttgtggtttttctgggcacctcttagaatttgtgcacatgagctgtttgtcgaaggaggctgtaacgaaaggccagaagcttaagctggcttataaaaagagccaagaaatttaggggccttctagtcccatggaacctaagcttggggacttcaagacccagtcaaattttttagaatgataaaatacrgagctgaatttgctaagttagcatattaaaattaagacaaagtaaaagtaaatacaatgacaaaatgaaacttcagcaattaacaagggatttcaaataaagaacattttatcacaaaaaggatgaaagaatgtaatctaaaatcaaaataatttattttgtatatatttacctttaaataaaatatacttcaatttaaacttttcctaactttcaaaacacgtcattgaactctacgatgctatcacacagagtataatatacagcattatactctgcaatatgaataaatctcacaaacaatgctgagttgaaagaagccagacacaagatgacccaaactgtgtggttcaatttctaaaaataagataaagaggt

SEQ ID NO: 254309 - DNA, 656 bp, Homo sapiens
attaatgggaattcactgaagttgagcatttcttttaccatgttttaaaaaattttaggataggtgtagagttatagaaaaattgtgataatacaatagagagtgctcagactcttgagaaggtagctgctcagtgagagggcaatcttaagagatctgaggctgcttcccaccttacatcaattgtcatttggcaactcaaggtcactcaaattacggcctgttgctttccctgcctggagcaccagagcagcagctcaartattttgcccagaatgagaaacaggatatagaacagagagctccttttatacctgtataccccaaaggatgagattgaaaaagttcaaccctgagagcactcagcacaacagtgaaagcgacggtgaaaagcaactgggaaattgattcattgctaaatgataggttcacagttcagtggagagaagaggacagtgtcagcagaaagagcactactggttcaaacaaatatgaacactgacctcagcaactgtccctttaaagcagcagtttcccaacattttccgcaccaaggaccagtttcgtggaagacagtttttcctcggacagtgggggatggtttcggcttgaaactgttccacctcagatcatcaagcattagactctcctaaaga

SEQ ID NO: 254310 - DNA, 597 bp, Homo sapiens
tgtggtcctgaaaaaaggaaaaacagtcattaaatacattcaacagctgtgaaataacagattgagcatccctagtttgaaaacccaaaatctgaaatgctccaaaatgcaaagctttttgagtggtgacatgatgctcaaaagaaatgctcactggaacatcttgggttttggagttttggattaaagatgttggagtggaaagagtaatgcaaatattccatattctgaaaaaaaaaaaactgatccaaaacacttctggtcccaagcattttgaatgaggggtattcaacctgtatctgaggatctctaggcttagccataggccctcttctcttgctaccctatattctctccctaggtgactttatccagccccatgggtttaatgccatctaaatactagtggttctcaaatacgtatctgtcgtggttctcraataagtatctgtctcacaggcaactcctttgagctccagggcatataaccagatgtgttccaaacattttcacttgggtatctcaaaggcactgaaaacaaaaaagtcaggactgaaataaactccaaatgccaccctcccaatacagtaatgtgtc

SEQ ID NO: 254311 - DNA, 650 bp, Homo sapiens
cagtaatgtgtcacttaacaatggggatactttccgataaatgcattgttaggtgattttgtcattgtgtgaacatcatagaatgtactaacatagatgatattgtgctctttttgaacagttattttggctggaaattatattttaatataggtrcatatgatatgttatctcagggtaatatatttacatttaatgcattaatatataacagtttgttatatttgtgacataattttcatatgttacacatatgttaatgttttccatttgattttgtgaacataaaccatgtctaccttaatgaccattgtggtttcagtgtctagcacatttttgcacacatggtaggtatttcaggtcagttggagtttatcagtctggtgaccatgaaaatgtgccactcagatctcctgtaatgagacactttgttgattgatagtcccagctgccttcctcctggatgcactaccagatttgcaaagagtcgatgcttccccagccagtaactgagttatttaggggtgctgatgcaggttcctttccagaggatgtggaacttctttaagagggaacttttggcttaaggacttctctcactggcctggctaaaagatttttagaactaagctacagtccaaggttcttcc

SEQ ID NO: 254312 - DNA, 550 bp, Homo sapiens
tcccccattccacgagtacaaaaatatcaaagcactcattgcacattgtaagagtaaacaaaatagtccctgaagccatctggattgaccagatgggccaatcaatactctttctttttagttggggaaactgagtctcaggccccgtaaggcacccrtggatgttgttagggtcatcactcaggcctgaggcgtctctgtcagggttttattgagcaaagctccctgccgccatatgcgtttaaataatgaacaaggatcaatacctgtctctgttcttcttgtccacattcccttgatgatggcctaagaacaagaggccagattcaccacggaacttcagcttgcagtaacagctcattatatccttgctgtagctacattttccccactaagaaccatgaaagatattgaaaggggcggcaggaaaggtcatagagaattcaccaggatctaaatcttgaatgctggtgagctcatgtggctgagtttccataaagagacactcatccatcaacaaatgtttattcaatagtcaacataaacccag

SEQ ID NO: 254313 - DNA, 620 bp, Homo sapiens
agtgactttgagtccaaggacacaaccagaccaaggtaacccaaggagagagtcaagggagcaatctctcttcctcctaactcccctccaccaggatgcccttggtcaagccaaacctagaagccagagggcaaggaagtccacagtaacatctgcatgggtcagcttcctaggcagagagtaaaggaagatggagagtggagctggagggrcaagcagaaaagatctggaacaaacagtgtgctcagaaaagaaaggacaagaggatcccacatggacttgcagatataatacagaagcttccaaccagaatggcatgggctccctataaagagtcaagagacctggacccttgaccctgctgtgccacacagaagctggacacctgaagtaagtcacttttcttctctcagccttcctttcctcttttgcaaaagagggaaatctaatgtgccctacttgcctcagatggtctgaagttcaaacaagggaacaggtgggaaattgtatgctcttcacagaggcatatttttatctctgctgctttccaacccctggaagagaacagagaacctaacacatagtagatgctaacatgtatttgtctaaataatcatgac

SEQ ID NO: 254314 - DNA, 620 bp, Homo sapiens
agtgactttgagtccaaggacacaaccagaccaaggtaacccaaggagagagtcaagggagcaatctctcttcctcctaactcccctccaccaggatgcccttggtcaagccaaacctagaagccagagggcaaggaagtccacagtaacatctgcatgggtcagcttcctaggcagagagtaaaggaagatggagagtggagctggaggggcaagcagaaaagatctggaacaaacartgtgctcagaaaagaaaggacaagaggatcccacatggacttgcagatataatacagaagcttccaaccagaatggcatgggctccctataaagagtcaagagacctggacccttgaccctgctgtgccacacagaagctggacacctgaagtaagtcacttttcttctctcagccttcctttcctcttttgcaaaagagggaaatctaatgtgccctacttgcctcagatggtctgaagttcaaacaagggaacaggtgggaaattgtatgctcttcacagaggcatatttttatctctgctgctttccaacccctggaagagaacagagaacctaacacatagtagatgctaacatgtatttgtctaaataatcatgac

SEQ ID NO: 254315 - DNA, 620 bp, Homo sapiens
agtgactttgagtccaaggacacaaccagaccaaggtaacccaaggagagagtcaagggagcaatctctcttcctcctaactcccctccaccaggatgcccttggtcaagccaaacctagaagccagagggcaaggaagtccacagtaacatctgcatgggtcagcttcctaggcagagagtaaaggaagatggagagtggagctggaggggcaagcagaaaagatctggaacaaacagtgtgctcagaaaagaaaggacaagaggatcccacatggacttgcagatataatacagaagcttccaaccagaatggcatgggytccctataaagagtcaagagacctggacccttgaccctgctgtgccacacagaagctggacacctgaagtaagtcacttttcttctctcagccttcctttcctcttttgcaaaagagggaaatctaatgtgccctacttgcctcagatggtctgaagttcaaacaagggaacaggtgggaaattgtatgctcttcacagaggcatatttttatctctgctgctttccaacccctggaagagaacagagaacctaacacatagtagatgctaacatgtatttgtctaaataatcatgac

SEQ ID NO: 254316 - DNA, 622 bp, Homo sapiens
cccacctctggccaacgtcttcattacagcctcatgagaccgtgaagcagaggcccccagctaagccattcctgggctcctgacccacagaaactataagataataactatgtgttctttgaagcccctaaacgtggggtactttgctrtgttgcaatagaaaactaatggaatcacctaaggaacttgaacaaacacaataacaactaccaacatcatttaatgagcccaacttctggctcatcaaatacgaatttctaggggttggtccaagcagcaatttttttttttttttttttttttgagatggagtcttgctctgtcgcccaggctggagtgcagtggcgcgatcttgactcactgcaacctctgcctcctgggttcactccattctcctgcctcagcctcctgagtagctgggctacaggtgcctgccacaacacctggctagttttttgtatttttggtagagacagggtttcaccatgttagccaggatggtctcgatctcctgaccttgtgatccaccctccttggcctcccaaagtgctgggattacaggtgtgagccattgcacccggccaagcagcagtattttaaaaaccctctccatgtgatgttg

SEQ ID NO: 254317 - DNA, 622 bp, Homo sapiens
cccacctctggccaacgtcttcattacagcctcatgagaccgtgaagcagaggcccccagctaagccattcctgggctcctgacccacagaaactataagataataactatgtgttctttgaagcccctaaacgtggggtactttgctgtgttgcaatagaaaactaatggaatcacctaaggaacttgaacaaacacaataacaactaccaacatcatttaatgagcccaacttctggctcatcaaataygaatttctaggggttggtccaagcagcaatttttttttttttttttttttttgagatggagtcttgctctgtcgcccaggctggagtgcagtggcgcgatcttgactcactgcaacctctgcctcctgggttcactccattctcctgcctcagcctcctgagtagctgggctacaggtgcctgccacaacacctggctagttttttgtatttttggtagagacagggtttcaccatgttagccaggatggtctcgatctcctgaccttgtgatccaccctccttggcctcccaaagtgctgggattacaggtgtgagccattgcacccggccaagcagcagtattttaaaaaccctctccatgtgatgttg

SEQ ID NO: 254318 - DNA, 570 bp, Homo sapiens
actattctcagtaatatgagtctctaaggaaagacattggtctctgcctttctggaactgggtgaaatatatgttaggggagatttgaatatggtagaatttttgagttatacgtgtcttggttcaaatcccagttctgccaccttccgactatgtgatccttaaattatgagtcttrgtttattcatttgtaaaatgtagatagaatcaacttagagttgttatagggactcataaagtagtgtcaggaaagtgtatggcggaagtcaatataaatcaaatcttactatgagactttccttctcctaggctgtattagttatctatcactacattaaaaaatcaccatgaacttagaaccttaaaacaacacacatgtattatctcacagtttcagcattaggaatcaggcatcatttgcctgggttccctttcttagatctctcataaacctgaaatcaagacactggccagggttaaggtctcatctgaaagctcagtggagaagattgcacttccaagctcacttatgttgttggcaggattaatttcctttgggatattagactg

SEQ ID NO: 254319 - DNA, 570 bp, Homo sapiens
actattctcagtaatatgagtctctaaggaaagacattggtctctgcctttctggaactgggtgaaatatatgttaggggagatttgaatatggtagaatttttgagttatacgtgtcttggttcaaatcccagttctgccaccttccgactatgtgatccttaaattatgagtcttagtttattcatttgtaaaatgtagatagaatcaacttagagttgttatagggactcataaagtagtgtcaggaaagtgtatggyggaagtcaatataaatcaaatcttactatgagactttccttctcctaggctgtattagttatctatcactacattaaaaaatcaccatgaacttagaaccttaaaacaacacacatgtattatctcacagtttcagcattaggaatcaggcatcatttgcctgggttccctttcttagatctctcataaacctgaaatcaagacactggccagggttaaggtctcatctgaaagctcagtggagaagattgcacttccaagctcacttatgttgttggcaggattaatttcctttgggatattagactg

SEQ ID NO: 254320 - DNA, 476 bp, Homo sapiens
aatacctctactaaggttaaatattcaatattgaaggcccactctgtgttagatacttttgttattagtaatcgttattaggcactgttacagaattcttacgtattcaaaccaaactgggcatcaggaatggaaagaagtgggctgccattttttttaatctctgtatttttatgtagctmtttgcttttaaggattcccaaatctttgaaaacaacatctctagcatcttcgaagacagaaggcagtgaatatcggtgctgtttaaaggtagggatattaaggcccagaaagtctgagctgttttctgaaaagtgacaaacagttccccaagtctttgcattggcagggatcttaaaacagcctttgagagggaaacaaagacaaaacatcagggtttgtagacctgactgcagggcaggcactttctctttcctttttgggtaataccgatgggcagtttagcttcgtggacg

SEQ ID NO: 254321 - DNA, 561 bp, Homo sapiens
ggtttgtagacctgactgcagggcaggcactttctctttcctttttgggtaataccgatgggcagtttagcttcgtggacgagaacgaaacagtcccctatattccctcataggagtggggccaaggagggtggcccaaaccccagccccttctctgaaaatcctcttaggggaaaaccaaaacaaacacagcatagtttggcttttcatktggggggaattgcctggcaccacccctccatccaaaacatgcttttgatttggttttattggctactgaaaagaatcatttaatagtcaagagccaggcagtgacaaagggttcaggtaaattagtttcagttcttacgtggactgtccttcttctttggaatttgagctttagaaaataaaagcctcccctaccacttattcgctttacccctccttacccttaagccttttaaaaaggatttttcttcccctttctaaatctcttcaaaaaagagtttcttttctttcatacagaggggttggggaattacatttgtcaaaatatcctaacatcagtgcgtgaagaaa

SEQ ID NO: 254322 - DNA, 649 bp, Homo sapiens
ttttcattccatctgtgttttctcttactttctctgtatccccagtttctctcagctcaaacaccctgctattctgtgattcttctctctcgtycaatacccttcccattgaaaaagaaattcagcttatccagagatagcatcagccattgggattaaaatgcagtatatacgtttcaggtgatgtgctggaaagatcagcaaagatataaaatatccaagggaaaacaaaagaaaaaaaatggcaggcagtctaacaccggctaatagttaaataacaatttgatgtttagacataagaggctgaagttaggaaacttgaggttcacccatacattctgggcttcgaaatctgccatcagtaaaggggcacaatggtgtgaatttttagccaagcatcagttgaaccttgaatttcctgggtttttgttggaccgtatcacagtgaaacattatattcttttcccccaaatatatatctgatttcctttacaaagagcaaaaaatatttttcccaccaagctacaagaaaacacatgttatctttcccaatagggcatcatctattattggtcttttggaaagctaaaaaaaatgcttcaaacaatattctaaacccgtttattgtgttttgtcagatgaaaaaaac

SEQ ID NO: 254323 - DNA, 554 bp, Homo sapiens
ccaatgtcaaggaactttgagcagcttctaggaactgcaagtggcctctgaaagcttagggaagcctccagctaacagccagtttccatagctggaactctcagttctatagcattaagaaaatgaattttggaagtaatctgagtgagtgtgggagtagattcttccgaagtcaagcctgcagatgagaacacaacctggttgaaatcttggttataacctccagaaacccaaagcagaggacctagctaggtcatgcctagatacctgacctgcagaaactgtgagatagtagawgtatgttgttttaagctactaagtgtgtgataatttatcactgagaaatagaaaacttaatacaaatgtgtagttttggatgagttgattaacatttggtctcaggcttgccagataaaaataggatataattgtaagtaacctcctaggtttgttataaaaattaaataagataatgtaattcagtgcccagtgaatgactctcaatgttattatttcttaaaacattgtcttttggtcccagcccctctttgttt

SEQ ID NO: 254324 - DNA, 608 bp, Homo sapiens
gtatgttgttttaagctactaagtgtgtgataatttatcactgagaaatagaaaacttaatacaaatgtgtwgttttggatgagttgattaacatttggtctcaggcttgccagataaaaataggatataattgtaagtaacctcctaggtttgttataaaaattaaataagataatgtaattcagtgcccagtgaatgactctcaatgttattatttcttaaaacattgtcttttggtcccagcccctctttgtttcagtctgtaggagaaactctgacctgagcctgtatacagatattttgctcattcttaaacaagtccttctggtacatattgtaggtgttaactcctcagggctgcactttaatgccccttcccttgtgcttccttctcagtggaactgctggtcatcaaccttaccatgaccttcattttgtctctctgccctcagctgtaacatttatttcaaatattgcattttttcttctaaaatttccttatgtttctttgatatattttatatttatctgctgagagatttaatctatttattcattatgagcatactttcctttagctcattgagaaagttataataatcacttt

SEQ ID NO: 254325 - DNA, 570 bp, Homo sapiens
caggtctaagaggtaggacaggagagggatgcctgcctcagatgttccagtggggcatgcagcagattgctggcactttctttgagaagccactaatgccttttattttgtaaatgaacagacattagttggaagatgacctgccctgagtgtgctggcacaggtagcagcagtaagtgaagcagcggtaagcgcagcattccaaggagcctgtaaaataagcaggctaaggtgacagaaaggaagatgagttctcagagccagggaagcagcctgggcccaggagatggctccaggagcaatttaaatgacgaagtgataggcattcaatacagaggaaaygcagaggacagtgcaatcaatcactgccaagcttatcttctaacaaggagtagggctccagtttccagatgtaacattaaaacttaatgtttccactggggtttagcatggcaggtttccctgaaacttcagtttcactcagttaactaattatgagaaaatgtgacattggtatttcctttttctacagggacaaatcattaccagcaggagggagaagttgttatt

SEQ ID NO: 254326 - DNA, 555 bp, Homo sapiens
atgtctattattctagactaggaagccccagaagtccaggaggagttctggaaatggttcatagaacattttggctgaagcaaacggatcagatcaagaagcaaacrtgagatggggtgaagtttaccttgcggcagatcttgaattttgttttattatggacattgcagtgacttgggagtgttccaatacagactgacacaatgcaggttctatttaggaagattaatttggcagatgtacaaagcatggagtcagcctaaaagaaaagaaatctattaagaacctgtccgtctttctttcaaaaatataaacatttatatcgttaggcagaatttacttgaaaggcattatctaaaatttggcctttactaatgcacatgttttttgtacaatctccagtgcattatttctcatagccaggtaactctccccagtggcctcggtacacaacatgctttttcaggcctcataggttcttgctattttccatacctataagggctttcctgatctgctacatgtacgtaaacgctaccctttagtcaagttctc

SEQ ID NO: 254327 - DNA, 596 bp, Homo sapiens
aatggtctaacatatgtatagttggaagaagaagagagaaaggagtggaacaaatgtctgaagaactaattttttcaagatttatgacaggcaccaaaacatagacccaagaagctcagataacaccaagcgagataaataccaagacacaagcaaacaagcaaaagcccccatatccaaatatatcatgttctaattgctgaaaaagaaacattttctcttttcctagagaggaaaagaacaataagaattatagcagctatctcatcaaaaagcatacaagccagaagacagtggcatgaccaatcttttatgtactgatggaaaaacctgttgtcagaaacagttacccagcagaaatacctaaggagcaaaaatggagggaattcattgcgagcagacaagctctacrggaaatgttaaaagaagttttttaggcacaaggactatgataacaatcagaaatctggttcaacacaaagaaatgatgaacacggttgatgatgagtgtggttgaaattgcatatatgacggtaacatttttctccctgtttttaatgctctgaaagattgattggagtaaaaatagggaaaat

SEQ ID NO: 254328 - DNA, 506 bp, Homo sapiens
atatgaattattcctcagtgaatttaagtactgtatttttacatttttaatagggagaactatctgatcacctaccacacgacgacaattagactcataaaatactttttagtagcaaaaacagaagctagagatagaggaataatatcttcaaagtactgagagaaagaaattgcccaccaaatattaggcatccccaagcactamctttcaatagtgagacaaactaaggacatgttcagatgaacaaacaatagagtgggagtggcctgagacgccctgagcttgcggctggtgtctgagcaaggacaggcttgtggaggactgggccttaacctgtgaagtctgcacctgctctgggtagctcgtggcataagtcgttgcagctattcaccagaagattctgtagtaaatgcaaatacagatttagaaggtgtggggtagggcctaggattctgcctttcaaacaacctccaaggtgattgtcatatcctgttaatagcaag

SEQ ID NO: 254329 - DNA, 610 bp, Homo sapiens
ttttatggtgctttttccttagcctatcttttttcattattaacaacactttataaagtcattaagaggatgccatcctaatgcatagtaagagtaaaatacatcatacaaattgagtgattttcgatctaaagatgtcgattaaataatgcgtttagtaatggaaaccatagagaaatggtcatgcggattctcacttttaggatctgagctgctcctcaaagagggtcccatttaagtacaaatatgcaccatgctggcttatgaaacaagaatgttttccctttgctaatgatgacttgtcatgtgacacacacattatttgtgttattctggtgagatactgttttyggtcatgctccagaagcatatttaaagtcttactctagagacagggcttactcttggggagctacctgctcccgcaagtgtctcacattcttcctttgttgttttacaaatggaaagcagggagataaaacatcctagggtggtactgaggatggtggaggaaacccatctcagacaccttcttcatgcctcatgccgcccacacatgagataacttcagtagaagtgttttgcgtgctgcagagagctgtataaaatt

SEQ ID NO: 254330 - DNA, 607 bp, Homo sapiens
gtattgtgtcatttcacccatggctccactcagagatatttcacagcctgtaatgggcacaggacatctggcatttaacccaaggaccacagaagcaactagatactttgataatgctacttttccagttggaagcaattaatgcaaactctatcgaaaaaggctatggattactttagctacataacttttaaaaaatatgctagcctttgaaagcaattattttacatattagaatttaacattcccattagttttgagaagtctacataaaaagggaaaaatcttttactttaaatgtaggctraacatttctagatacttgatctcatcttcatacgctgcatttgaaattgtgatgtggcaaattcatcagtgatgatgcttttaaatgttaaggtttgatgtggaagcagaagagatacatacagaatatatttgtgtatttatttatgccttcatatattctatttaacaaatacttccatgagtattagaagatccattcatttctaagttacagtgctctgttccgtaccttgagtggcacagagctgcacttttcatcacgaccctatagcacattaagattttaatcattttgact

SEQ ID NO: 254331 - DNA, 607 bp, Homo sapiens
gtattgtgtcatttcacccatggctccactcagagatatttcacagcctgtaatgggcacaggacatctggcatttaacccaaggaccacagaagcaactagatactttgataatgctacttttccagttggaagcaattaatgcaaactctatcgaaaaaggctatggattactttagctacataacttttaaaaaatatgctagcctttgaaagcaattattttacatattagaatttaacattcccattagttttgagaagtctacataaaaagggaaaaatcttttactttaaatgtaggctgaacatttctagatacttgatctmatcttcatacgctgcatttgaaattgtgatgtggcaaattcatcagtgatgatgcttttaaatgttaaggtttgatgtggaagcagaagagatacatacagaatatatttgtgtatttatttatgccttcatatattctatttaacaaatacttccatgagtattagaagatccattcatttctaagttacagtgctctgttccgtaccttgagtggcacagagctgcacttttcatcacgaccctatagcacattaagattttaatcattttgact

SEQ ID NO: 254332 - DNA, 607 bp, Homo sapiens
gtattgtgtcatttcacccatggctccactcagagatatttcacagcctgtaatgggcacaggacatctggcatttaacccaaggaccacagaagcaactagatactttgataatgctacttttccagttggaagcaattaatgcaaactctatcgaaaaaggctatggattactttagctacataacttttaaaaaatatgctagcctttgaaagcaattattttacatattagaatttaacattcccattagttttgagaagtctacataaaaagggaaaaatcttttactttaaatgtaggctgaacatttctagatacttgatctcatcttcataygctgcatttgaaattgtgatgtggcaaattcatcagtgatgatgcttttaaatgttaaggtttgatgtggaagcagaagagatacatacagaatatatttgtgtatttatttatgccttcatatattctatttaacaaatacttccatgagtattagaagatccattcatttctaagttacagtgctctgttccgtaccttgagtggcacagagctgcacttttcatcacgaccctatagcacattaagattttaatcattttgact

SEQ ID NO: 254333 - DNA, 541 bp, Homo sapiens
tcagtgatgatgcttttaaatgttaaggtttgatgtggaagcagaagagatacatacagaatatatttgtgtatttatttatgccttcatatattctatttaacaaatacttccatgagtattagaagatccattcatttctaagttacagtgctctgttccrtaccttgagtggcacagagctgcacttttcatcacgaccctatagcacattaagattttaatcattttgactccaagacatcaaaatgacattctggagaagtctgaactatatgccccaagatattccaccaggaacatctaatgaacttgcctttatgtcttgcctaggaaaaaaagagattatctgaggaataaccccctgttactctgtctcacactccaaaaacagagtacatttgatgacttttattctatccagtatataaactgcagtggcagccacagattcatttgtaatcctataacctttcatggatattttttttcactcatcaaaaaaatgacacataatgtttatgaaagtctcagtgatgtg

SEQ ID NO: 254334 - DNA, 642 bp, Homo sapiens
cacaaggaaaagtatcgccttcacaaagcagagtatgactgtcatattctggttgtaaactggctgtccttgtatgttagattaggcaccagtgcatctggagtcttctacggtacgaacatctcacccttcagttgtctgaaaccatcccaatgtgttaagatgcatgaattctctgttgcttcagtcacttatcagagtttttatcattgatgtgttgcttgagctttttctagcaaaaattgttcagtttgaagaagctctcttccttgttatcgtgctattaactcacttcaacagtagggctttttgagtgggtgggagaagtccagtctctctctaggattaatttattctcggtttttaacttatgagtggtttagaacacccataaatatgtttcatgaagaaacattacctgaaaggactcaccccgcttcactacgtagcggctcaatggtggcttgcacctttgagyatcttttacaccttttacttccagtactgctgttcatagtggtaaggacttaatcagtgttttaaaaatcaaatgccaattaagaattatctcatcaggtttcattttatacttgcaaaattgcacctatcttaggtttattctttcagcttgcattttctcaa

SEQ ID NO: 254335 - DNA, 607 bp, Homo sapiens
gttactaaacgcatggtgagcacttaagcagcaagacaacaaagtcagcagatgacattttaatgtgcattttgatgttccatgtcttgaaactcaaccacaacaagagtagaaaacaacaaaaaagagttccaaaaacacgtttctggatcatacgattcatctgcaaggaagagagcttaccgcaaatttcaaaggtctgtaagcatcagaataaaaatacaattttttaaattcttggtatattttgtctcctttcctaggagcgaatctcttgaaagttctctccttcgtcacagggtcttcctcaagcttgtagtcgttcattcgctcacagactttctccaaaagatccgttaggaacgcctccgactgagctagggggatctaagaagaaagacagggcgaggaaacttgtcttaatgttaatgttacttcaaagaccttccggcgagtccacatggaaacgccacactctccctgaatgmaaacgtgtgccacttccctagcacgggcccagaagacggtaccgcagattgttattacaatgtaacaacgacctgctttacatcattacggggctagcgtaaattccagttttttaaaa

SEQ ID NO: 254336 - DNA, 613 bp, Homo sapiens
ttaactgccatcgtgctacgtagcactttcyggaaatttcagagttaaatctacaaaagccaaaattagaggccaggatcatcaaaaataattaaagtattttcccaaaggagagacgccataaaatactaaggaaagtggctgttgaaatcattccaaaatcagagaatgcaagataagcaaaaaatatgaatacaaatgaagagtcatgaaacctgtatccttcactcgacaactatttcttgaccacataatatatgccaggcactgttctagacaactgacatacaagacaaaaaaaaaaaaaccttcaccctgtgtaggttacattctagtaagaaaagacaaacagtaatcccaataaactaatatatggtatgtaacttaaggcctttattggaaaagactagagcaggagggtaaagaagacaggaaatgaggtaagggtcagctggtacaaactgggctgactataattttaaaaagaatagtcaaacttaagaaacaaatcagtattacatgttaatgcaacatattttaatgacaaaaagtctataaaacaaatattttttagttttccaaaactctttaatgtctgactttgtagaaaaca

SEQ ID NO: 254337 - DNA, 577 bp, Homo sapiens
aagtcattctggattaagactggcccctaaatccaaggactggcgtggcaattccatttctgggtatacactcaaaagaactgaaagcaggcacttgaagacacattaatatactcaagctcctattagtattatttacaataaccaaaaggtggaagcaactcaagtgtctaytgaaggatatatggtttaaaaaaaaatagtatagatatataatggaatattatttagccttaaaaaggaagttctgacacatgctacgacactgatgaatcttgaagacatcatgctaagtgaaataatgactcaaaatcttacagggcaagctaacacaagaaccctgtacagcctgtttatattcttaatatattctgagtcatttccctctgttttcctttagaatacaaatactttttaaagttccagttcatagcagtcatattaaacagaaccaagaagaaaaaatgtgtccccattagtccagaactttaaaggaagaacagcacatccatgaaagccaaggggtaaaatattaactgagcaaaacgaaagaggtcaatgacctccttacctggaa

SEQ ID NO: 254338 - DNA, 591 bp, Homo sapiens
taatatttcctcaagaggaccaaatggttatatcctgtaatagttccctagattaagcttcaggatgtcaaggagactggagcattatctccccagtactgatatttcagaagaaacaatgcctcagacacagggggctatctgcctcatagagatattttatttacatataccaaatgattggrgtaaggattcaggcccattaggattcagggtctctaaggagacccttttagaaagggagggatacagtggcctctttcctctttattagcagagagcaaaaaaaaaatttactttgtctctcacccatggagtatctggatattcagatagaaaaaaaaaaaaacaaaactatcatctttcatcatgtcactgcaaggacaaaagaagggcagtcgaagcattcaatttttactgtgagatagtaagaaatctgtttctgacccaggacgtctcctaggagcatttaggatacaatttttaaaagatgaatattaaaaagaaacaattgggtagttgttacacaaatatctattacaaaacctattatgtgccaacctgggtttcaatgccaaagataaattagtg

SEQ ID NO: 254339 - DNA, 591 bp, Homo sapiens
taatatttcctcaagaggaccaaatggttatatcctgtaatagttccctagattaagcttcaggatgtcaaggagactggagcattatctccccagtactgatatttcagaagaaacaatgcctcagacacagggggctatctgcctcatagagatattttatttacatataccaaatgattggggtaaggattcaggcccattaggattcagggtctctaaggagacccttttagaaagggagggatacagtggcctctttcctctttattagcagagagcaaaaaaaaaatttactttgtctctcacccatggagtatctggatattcagatagaaaaaaaaaaaaacaaaactatcatctttcatcatgtcactgcaaggacaaaagaagggcagtcgaagcattcaatttttactgtgagatagtaagaaatctgtttctgacccaggacgtctcctrggagcatttaggatacaatttttaaaagatgaatattaaaaagaaacaattgggtagttgttacacaaatatctattacaaaacctattatgtgccaacctgggtttcaatgccaaagataaattagtg

SEQ ID NO: 254340 - DNA, 447 bp, Homo sapiens
aggatctctaagaatgtcatgcagaagaactaggtgcatttgttcattgttggtttagacaatagaattgggtcaaagttccaggaaaatacattgcactttattataaggatgatttatcaaaaagtttgactgcttattgaagaactgaagaacctgttctggtatgtaatcaagcataaattgaatgaatctttgtagaaacattgtctcagtgttcacactattttgacaaggctggagtggataattcccaaggatgtttgagctctgaaattctctgaagtaagtggtatattgccaagaggtggtaataatatgggagataaattcttcaatatgtttttccacaagaagwcagcagagccaaaggttacccactctctttttacattatatcatctatttaagatgggctgtctgagaaaatattttatatgggatagt

SEQ ID NO: 254341 - DNA, 619 bp, Homo sapiens
tataatttatacactaatatttgtatatatctatctctatgtatccatctatatatctatgaatctatctccatttatcacatatctatctctattagctacatatcatgtacttgtatctactccctccttatgaagatattaatttgttagttttgtgtaactctactgwcctggagtaaactgagatatatgggagatttatgcttagcacaaattctgcgaaagatttatgttcaacatctccttttaaaatatatattttaaaacgagcttcccaaaatacttatttcaaacaccatgaaagaaaaaatggtatttaacccatttagagtctgacatacatttttcttatttaacacatttttatatagcttgaggtttcttatttgatttttaaattattgtgttaggaattattttcattgaaagattattaatgtaaattaagtcatagcaataacataaagattaattttatatattcacattcctcagtaaaaatatgataaaatttccatagagttgatttttttcaactttattcttgagtatgacccaataaatctgatttacagggcaattatgcaaaactgtttttattatcactttggataaa

SEQ ID NO: 254342 - DNA, 623 bp, Homo sapiens
attaagtcatcttaaaatgttgtatttcaattttaaatagctggaaagaataatttgaggcagaatattatgtcaatctttaaacaatttaagtggcataaaaatacatactgttatacatattatcatatatatatatacacacacgtgcaaaacgttttaacaataactgttagaatgaatggaatttcattctaatctattttaaactttaaagtcattcttgatcatcctctcttattcctttgcaataaataacctgtatataaataacctgtatataaacatagttttgtgtgaagcaagtttcaaagataatgaytttcatgagaactgtctcatttaatattagaacaccaaatgtcagatttaaaaatagttatatgaagatttaaaaataattaataaacataaaagtataattttactggaaatataaatatgaggtggatggaaagttatggaaattttgatttattatatctgtggacagataatttcttatcgaatatcatatggataaatgtattttttctatttctgtcattattttaagctttgaaaagctaatgaacgtaaattagcaaataagaacagaatggagttctataccaaatctcaca

SEQ ID NO: 254343 - DNA, 623 bp, Homo sapiens
attaagtcatcttaaaatgttgtatttcaattttaaatagctggaaagaataatttgaggcagaatattatgtcaatctttaaacaatttaagtggcataaaaatacatactgttatacatattatcatatatatatatacacacacgtgcaaaacgttttaacaataactgttagaatgaatggaatttcattctaatctattttaaactttaaagtcattcttgatcatcctctcttattcctttgcaataaataacctgtatataaataacctgtatataaacatagttttgtgtgaagcaagtttcaaagataatgactttcatgagaactgtctcatttaatattagaacaccaaatgtcagatttaaaaatagttatatgaagatttaaaaataattaataaacataaaagtataattttactggaaatataaatatgaggtggatggaaagttatggaaattttgatttattatatctgtggacagataatttcttatcraatatcatatggataaatgtattttttctatttctgtcattattttaagctttgaaaagctaatgaacgtaaattagcaaataagaacagaatggagttctataccaaatctcaca

SEQ ID NO: 254344 - DNA, 574 bp, Homo sapiens
atgccttaataacagacacattctcagccagacccatattagaaaagaatacatatggtaattgaaattttaaaatgaaagttttttaataatcttcatgaccatgtactcctaggaaagttttcatatattccmatgtgttcctacaaatcacatctaagactactagagtaaagtaaagaactggcctaaaggcaggagaatcacttgaacccgggaggtggagttgcagtgagccgcgatcatgctggcgcactccagcctgggtgagagagacagagactccatctcaaaaaaaaaaaaaaattaaaaattaaaaaataaaaaagaactggcctaaatgattatcttgatttcatttcaaaaatataaactaaattaaatgaggaagaaacacatctcctgacccataagtactgataacagattgtgcttcggtttcagctatttacgcttctcttaaaaacaaaaacaaaaagatgcttgtcttatgttccttagacccagaaagcacattgattcatgacaatgcacttccaaaaacccatttcaatttgttttttaatgtacacag

SEQ ID NO: 254345 - DNA, 513 bp, Homo sapiens
gtacgtccactgcaaaagatagtgggcaagttcctcaaaaaactaaaaatagaactagcatgtgatccagcaatcccacagctggatatttatcccaaaacaaaaggacttcagtatattgaagaggtatctgcactcccatgtctactgcagtactatgcacrttagccaagacacagattcaacgttaagtgtccattgatagatgaatggataaagacaatgtgttacatatagacagtgacatattattcagccatgaaaaaggatgatatcctgatatttgcaacaacgtggatagaactgcaggatattatgttaaggagaataagccaagcattgcaagataagtatctcatgttcatgttctcacttatatgtgggagctagagtattgatctcatggcagtagagagtagaatgattgttaccagaggctgggaaatgtagacggagaaagagagatacaggggaagaaaaagagattgactaatgggtacaaaaatatagata

SEQ ID NO: 254346 - DNA, 465 bp, Homo sapiens
ttaagtgtccattgatagatgaatggataaagacaatgtgttacatatagacagtgacatattattcagccatgaaaaaggatgatatcctgatatttgcaacaacgtggatagaactkcaggatattatgttaaggagaataagccaagcattgcaagataagtatctcatgttcatgttctcacttatatgtgggagctagagtattgatctcatggcagtagagagtagaatgattgttaccagaggctgggaaatgtagacggagaaagagagatacaggggaagaaaaagagattgactaatgggtacaaaaatatagatagatagaaggaataaagtccagtgtttggtagcacaatagcgttcccataatcaacaataatttattgtatatttcaatataactagaagattggatttggaatgttttcaacacaaagaaataataaatgttggaggtg

SEQ ID NO: 254347 - DNA, 513 bp, Homo sapiens
gtacgtccactgcaaaagatagtgggcaagttcctcaaaaaactaaaaatagaactagcatgtgatccagcaatcccacagctggatatttatcccaaaacaaaaggacttcagtatattgaagaggtatctgcactcccatgtctactgcagtactatgcacattagccaagacacagattcaacgttaagtgtccattgatagatgaatggataaagacaatgtgttacatatagacagtgacatattattcagccatgaaaaaggatgatatcctgatatttgcaacaacgtggatagaactgcaggatattatgttaaggagaataagccaagcattgmaagataagtatctcatgttcatgttctcacttatatgtgggagctagagtattgatctcatggcagtagagagtagaatgattgttaccagaggctgggaaatgtagacggagaaagagagatacaggggaagaaaaagagattgactaatgggtacaaaaatatagata

SEQ ID NO: 254348 - DNA, 513 bp, Homo sapiens
gtacgtccactgcaaaagatagtgggcaagttcctcaaaaaactaaaaatagaactagcatgtgatccagcaatcccacagctggatatttatcccaaaacaaaaggacttcagtatattgaagaggtatctgcactcccatgtctactgcagtactatgcacattagccaagacacagattcaacgttaagtgtccattgatagatgaatggataaagacaatgtgttacatatagacagtgacatattattcagccatgaaaaaggatgatatcctgatatttgcaacaacgtggatagaactgcaggatattatgttaaggagaataagccaagcattgcaagataagtatctcatgttcatgttctcacttatatgtgggagctagagtaytgatctcatggcagtagagagtagaatgattgttaccagaggctgggaaatgtagacggagaaagagagatacaggggaagaaaaagagattgactaatgggtacaaaaatatagata

SEQ ID NO: 254349 - DNA, 465 bp, Homo sapiens
ttaagtgtccattgatagatgaatggataaagacaatgtgttacatatagacagtgacatattattcagccatgaaaaaggatgatatcctgatatttgcaacaacgtggatagaactgcaggatattatgttaaggagaataagccaagcattgcaagataagtatctcatgttcatgttctcacttatatgtgggagctagagtattgatctcatggcagtagagagtagaatgattgttaccagaggctgggaaatgtagacggagaaagagagatacaggggaagaaaaagagattgactaatgggtacaaaaatatagatagatagaaggaataaagtccagtgtttggtagcacaatagcgttcccataatcaacaataatttattgtatrtttcaatataactagaagattggatttggaatgttttcaacacaaagaaataataaatgttggaggtg

SEQ ID NO: 254350 - DNA, 578 bp, Homo sapiens
aaaatagcacataaaccctataaatatgtacaactattttgtatccataaaaaatatatataattatatatgataatatataatatatattattaaatgatatatagtatgatacataatataatatataatatagggtatgargtgagagagacaaaagggaaataataatctattttatgtttaaacgctgcagcatattgaaggcgggaagaacaccaataacaataatgtttgtggtggttcttggtagccattaatgcccttaataatgaataagaatttaatgactaaaaaataagctgcacttttctggaatggttgactttcagtgaagaaaaaaattaactttgcttcaatttaaaaagttactttgcctctcatttaaacaaccctagtccctgcttgcctgctgataaattcttatcttaatgtctactccagctgattcttcttttcagctctagactctgatctccttgagaacagcagcatcacattcatcttttatttcccccttctttgcagtatccctggcatatagaaggcactcagtaaatattgatatgaactgagct

SEQ ID NO: 254351 - DNA, 578 bp, Homo sapiens
aaaatagcacataaaccctataaatatgtacaactattttgtatccataaaaaatatatataattatatatgataatatataatatatattattaaatgatatatagtatgatacataatataatatataatatagggtatgaagtgagagagacaaaagggaaataataatctattttatgtttaaacgctgcagcatattgaaggcgggaagaacaccaataacaataatgtttgtggtggttcttggtagccattaatgcccttaataatgaataasaatttaatgactaaaaaataagctgcacttttctggaatggttgactttcagtgaagaaaaaaattaactttgcttcaatttaaaaagttactttgcctctcatttaaacaaccctagtccctgcttgcctgctgataaattcttatcttaatgtctactccagctgattcttcttttcagctctagactctgatctccttgagaacagcagcatcacattcatcttttatttcccccttctttgcagtatccctggcatatagaaggcactcagtaaatattgatatgaactgagct

SEQ ID NO: 254352 - DNA, 564 bp, Homo sapiens
taaatattgatatgaactgagctgaaagcaccctatcttcaccttgatctcctggctttctaagctgggtaaaattagacataatcattatattcttgtaaaagcaaggactacagtgcctcagagcyttaagcaacccactgtcattccacaaagaggtagcattttggatacaaaagaaattagcatgtattaatttaagatggcctaattcaagtagcaaatatatttgaaagcatagtaaagcaatagcatgaataactgttttgccacctgatatattgatagaaaaggagaaagctttacccctgaaataaaatgcttaatctcagtgtcagtgttttgtatattaaaaatcttaattgaaaaaattacatcatgaaactattagcaatcattgtaactgttagaccacaggagaatgtgcaagttgctgctaagtacgtggcaagtttttataataataatcagctaaactgcttaagtgagtgataccatttaaattaggaaattaaagcttgaattatttttctgaaaatttgctactgcttcttaaagaagcta

SEQ ID NO: 254353 - DNA, 564 bp, Homo sapiens
taaatattgatatgaactgagctgaaagcaccctatcttcaccttgatctcctggctttctaagctgggtaaaattagacataatcattatattcttgtaaaagcaaggactacagtgcctcagagctttaagcaacccactgtcattccacaaagaggtagcattttggatacaaaagaaattagcatgtattaatttaagatggcctaattcaagtagcaaatatatttgaaagcatagtaaagcaatagcatgaataactgttttgccacctgatatattgatagaaaaggagaaagctttacccctgaaataaaatgcttaatctcagtgtcagtgttttgtatattaaaaatcttaattgaaaaaattacatcatgaaactattagcaatcattgtaactgttagaccacaggagaatgtgcaagttgctgctaagtacktggcaagtttttataataataatcagctaaactgcttaagtgagtgataccatttaaattaggaaattaaagcttgaattatttttctgaaaatttgctactgcttcttaaagaagcta

SEQ ID NO: 254354 - DNA, 417 bp, Homo sapiens
tattaaagggtataggataaagttctgacatttatatatgactgcagagacaataatacacataaaaaggttgagaacataagacaacatgttcttaaaacaatgctacatgctgtcatttctgaggaagggggtttctcattgagggtagtatcagaagaggattagagrcagggcatcaagatgagtgacaatcgaatgtaaacatccctcctaccaagtggctcttatcctgtcctttactcaaaagtagatagccattgtaaaaacactttaataagaaggaaatctcatgtatgttgaaataactatgtatcaaattagagaatttggtgtacttgagctgaagtcattaagactggaaagtaaacagataaaaaggtaaaggatagagccttccagctgcagaaaataaag

SEQ ID NO: 254355 - DNA, 556 bp, Homo sapiens
taaacttcaatgaatcaatctctctgtaataacaatcgtatggaaaggaaaatgaaaacttctgtttwtattacaaatttaatagcaataataaagctaatttgtttggagattgcataaatagacatacattgtaaagaaaagagattttaaagaacagatatcaaaacctcaagattgtagacaggagaagagtgagaatggtagacctatatagcatgtatgtcaaataggaaatatgttatttaaatacttattttaatttttttaacttttaatttttgtgagtacagagtaagtgtatatatacttatagagtacatgagatgttttgataaacccatgcaatgtgaaataataacaacatggagactgagtatctatcaatcacctcaagcatttattctttgtgttacaattcagtgatactcttttagttatttttcaaggtacaattaagttattattgactatagtcaccctgttgtgctatcaagtggtaagtcttattcattttatctaactatgtttttgtacccattaaccatccccacct

SEQ ID NO: 254356 - DNA, 556 bp, Homo sapiens
taaacttcaatgaatcaatctctctgtaataacaatcgtatggaaaggaaaatgaaaacttctgtttttattacaaatttaatagcaataataaagctaatttgtttggagattgcataaatagacatacattgtaaagaaaagagattttaaagaacagatatcaaaacctcaagattgtagacaggagaagagtgagartggtagacctatatagcatgtatgtcaaataggaaatatgttatttaaatacttattttaatttttttaacttttaatttttgtgagtacagagtaagtgtatatatacttatagagtacatgagatgttttgataaacccatgcaatgtgaaataataacaacatggagactgagtatctatcaatcacctcaagcatttattctttgtgttacaattcagtgatactcttttagttatttttcaaggtacaattaagttattattgactatagtcaccctgttgtgctatcaagtggtaagtcttattcattttatctaactatgtttttgtacccattaaccatccccacct

SEQ ID NO: 254357 - DNA, 556 bp, Homo sapiens
taaacttcaatgaatcaatctctctgtaataacaatcgtatggaaaggaaaatgaaaacttctgtttttattacaaatttaatagcaataataaagctaatttgtttggagattgcataaatagacatacattgtaaagaaaagagattttaaagaacagatatcaaaacctcaagattgtagacaggagaagagtgagaatggtagacctatatagcatgtatgtcaaataggaaatatgttatttaaatacttattttaatttttttaacttttaatttttgtgagtacagartaagtgtatatatacttatagagtacatgagatgttttgataaacccatgcaatgtgaaataataacaacatggagactgagtatctatcaatcacctcaagcatttattctttgtgttacaattcagtgatactcttttagttatttttcaaggtacaattaagttattattgactatagtcaccctgttgtgctatcaagtggtaagtcttattcattttatctaactatgtttttgtacccattaaccatccccacct

SEQ ID NO: 254358 - DNA, 556 bp, Homo sapiens
taaacttcaatgaatcaatctctctgtaataacaatcgtatggaaaggaaaatgaaaacttctgtttttattacaaatttaatagcaataataaagctaatttgtttggagattgcataaatagacatacattgtaaagaaaagagattttaaagaacagatatcaaaacctcaagattgtagacaggagaagagtgagaatggtagacctatatagcatgtatgtcaaataggaaatatgttatttaaatacttattttaatttttttaacttttaatttttgtgagtacagagtaagtgtatatatacttatagagtacaygagatgttttgataaacccatgcaatgtgaaataataacaacatggagactgagtatctatcaatcacctcaagcatttattctttgtgttacaattcagtgatactcttttagttatttttcaaggtacaattaagttattattgactatagtcaccctgttgtgctatcaagtggtaagtcttattcattttatctaactatgtttttgtacccattaaccatccccacct

SEQ ID NO: 254359 - DNA, 573 bp, Homo sapiens
gacgtaatttggaggccctgaatatctcaaatacacacaaaataaatgtattaaagaatactcagacacaccggtacagctcaacccataaaccacacatctgttcttctgactgagtcaggcctctaggaagttccttaccacatctcttgctctatatcttcaaaacaaagaacaactgtttttggaagttctgaaggtttggattgtgctactaactttttttagggcactattttgaactataaggagcttttcagctttggaaacacttggatgaaggaagaaaaaaaaaattaacttgtgaatccttctttccaatagcaaggaagcgatacattcttgagtaatgaagcatgttttgccagtcacaccatgcattygtttcctccacgcttctcttattgttccagtttaggatctaagagataataatcacaataaaaaatttgatttattttatacaataagatgcagttttaaaaaaggtaaaacaagaggtgatcttcaaatggagggtgaattgtggtcttagacaaaaactaaaagtgaatttatattttccacattatt

SEQ ID NO: 254360 - DNA, 556 bp, Homo sapiens
gaattttgtcacccacagacaactgttgtcttgttttgagcctcttcaaaaggtggttataatcagctgtaggactttgacaggtgctcttgaattcaggtyttttatagctttggagattgtgacattagaatagaggaaaacctttcagaactctcatggaaagctggaatgttcatgtatatcaagcagaacagcagtaaacctcatggactgaactaatagaagactaaattattccttttatgacttttgtttaaaatgttactgattctttgttttgtttttcaaagtcaagaacacttttattttaagctatttacagcttttaacaattgagtatactcctataaatgaaatttgaggcatatttctctctgatttctccaaatttgaaaactagttgtgagcattcttaacttatggcaatatagttatttgcataagtgcaattagaatctgttttcttttgcaacaggacacaattgaagaaactggttatttttacccaggctttgactggaatgacatgctttcaaatataagcagcctgcta

SEQ ID NO: 254361 - DNA, 393 bp, Homo sapiens
aaataatgcatgtgaagcccttgacacagagtagtcgcctaataaattagaactactatcctacttaactcccaaacttctcaaatctccattccctcttgtactaacataacaagaactttggtctcacacataaccttttcactggttccatctttcgtcatcttaaccacctacttatcagtctacagcttctcatttctaactgaagagsctcccaatttttccttttttttttttttttttttttttacaattcaagagtcctcatggcagggtcacaatgtcctttttcaaatttctttactacagcctattgcctgtaacttcaatacaatttctaatatttgctttcttccaaccatgctgactaatttgcccatattcttgaat

SEQ ID NO: 254362 - DNA, 587 bp, Homo sapiens
ccatcagccaaaaacaaataaaataaaataaaaataatgagattctgtcatttgcaacatggatgaaactagaggacagtgtgttaagtgaaataatgaaggtgcagtaagacaaactttccatgttctcacttacttgtgggagttaaaaatttaaacaattgaattcatggagacgaagattagaatgatggttaccaaaggatgggaagggtagtaggggatraggggtacaggggaagtggggatgattattagataaaaaccacagttacagcaaatgagtaagatccagcatttgatagcacaacagggtgactacagttaacaataatttattgtacattttaaaataactaaaagagtataattagaatgttggtaacacaaagaaatgataaatccttgaggtgatggataccacatttattctgatgtgattattacacattgtatacctgtatcaaaatatctcatgtactccataaacatgtacacttatgtacataaaaattaagtttaaaaaattgtgcagatacattttggaaaaggaaataagagaaaaagcaaaataactgacataacat

SEQ ID NO: 254363 - DNA, 587 bp, Homo sapiens
ccatcagccaaaaacaaataaaataaaataaaaataatgagattctgtcatttgcaacatggatgaaactagaggacagtgtgttaagtgaaataatgaaggtgcagtaagacaaactttccatgttctcacttacttgtgggagttaaaaatttaaacaattgaattcatggagacgaagattagaatgatggttaccaaaggatgggaagggtagtaggggatgaggggtacaggggaagtggggatgattattagataaaaaccacagttacagcaaatgrgtaagatccagcatttgatagcacaacagggtgactacagttaacaataatttattgtacattttaaaataactaaaagagtataattagaatgttggtaacacaaagaaatgataaatccttgaggtgatggataccacatttattctgatgtgattattacacattgtatacctgtatcaaaatatctcatgtactccataaacatgtacacttatgtacataaaaattaagtttaaaaaattgtgcagatacattttggaaaaggaaataagagaaaaagcaaaataactgacataacat

SEQ ID NO: 254364 - DNA, 587 bp, Homo sapiens
ccatcagccaaaaacaaataaaataaaataaaaataatgagattctgtcatttgcaacatggatgaaactagaggacagtgtgttaagtgaaataatgaaggtgcagtaagacaaactttccatgttctcacttacttgtgggagttaaaaatttaaacaattgaattcatggagacgaagattagaatgatggttaccaaaggatgggaagggtagtaggggatgaggggtacaggggaagtggggatgattattagataaaaaccacagttacagcaaatgagtaagatccagyatttgatagcacaacagggtgactacagttaacaataatttattgtacattttaaaataactaaaagagtataattagaatgttggtaacacaaagaaatgataaatccttgaggtgatggataccacatttattctgatgtgattattacacattgtatacctgtatcaaaatatctcatgtactccataaacatgtacacttatgtacataaaaattaagtttaaaaaattgtgcagatacattttggaaaaggaaataagagaaaaagcaaaataactgacataacat

SEQ ID NO: 254365 - DNA, 565 bp, Homo sapiens
ttgtatacttgacccctccaaacctcatgttgaaatatgatcccccttgttgaatgtatgacataatgtgaggtgtttggctcatggggaaggatccctcataaatgcttagtgccatcctcaaggtaatgggtaaattctggctcccaccagagctggttgttaaaaagagcctggcacctcccttccatctctgtcttgcttcccctctagccatgtgacctcacacacaggctcactttccctttccaccattagtggaagcatctggtcgccctcacaagaaacagatgctggtcctctgcttcttgtgcagtctgcagaacagtgagccaaataaacctctgttcttattaaactgcttaamctcaagtatcccattatagcaatgtgagtggactaaaacacatctattttcatcactgatgcttttcaccgtaatacaagacaaaaccacatatgagcacatgaatatcatgtcaattaatcttcttccttcttttctgatttctctttaatttattctctgcattatacccaagatggcctcatggttttggtgcaa

SEQ ID NO: 254366 - DNA, 534 bp, Homo sapiens
atttattggttagtgcttcaaatgtctcaagcatacgggttacaaaaaattgtacaacctggctccaacgcagctacctttgttctatrtaggtattttaggtctgtatatacaacttttttggtcaagcatatatttagatattataaattactagcttaagacaatacttcctagttggcactaaaaatagtatatcacaacttaactggttatacttgctagctgaaactgtgattcacaatggaatgttttctttacagaaaatcaatataattgaactcattttattttttctattggtccaacaaaagcgcacttaacaaatttaacagaagtaggaaatcttaattcttccataacttctaagaaaattaaatccttaataaaaacaagcaaatcaaacaaactaaataataaaattatccacatagagaactccaaagtaggtgatttcacaagacagttttatcaaccatttatgaatgaattaatattaatcttaggtaaacacttccagagaatagacaggaa

SEQ ID NO: 254367 - DNA, 538 bp, Homo sapiens
atttgttgtagaagagtgctctgacacgtacaatatggaaacatgatgtcatacatggaaatgacttaaacttgagacctgaaggatgcactaactagaggaaaktagaggagaatatcataggtaaagtgtagtggcatttgcaaggttgcggaagctaaaggaagcataaaactgtttggaaattttaaaaggtcataggcattgtaagatctgtttttcttgtcttaagagcaatttaaagtcatcagatatgatacagtcatggagaaaagattaatactgagttgcgtggcttttcttatatcaggtaaataaaccccttaaatgaattcccaggctattagctaattaatagaagtctctgggcataacaatgaggaaggaattctggataattactcataataaagatgagactcaaaaagctggaaatatgcagtaaaatcttcttgaacttcagctacagcaaattaatctcacatacagagaacatgttgtgccttctctatggagaatcttgtcccattgggagtat

SEQ ID NO: 254368 - DNA, 564 bp, Homo sapiens
gtagtggcatttgcaaggttgcggaagctaaaggaagcataaaactgtttggaaattttaaaaggtcataggcattgtaagatctgtttttcttgtcttaagagcaatttaaagtcatcagatatgatacagtcatggagaaaagattaatactgagttgcgtggcttttyttatatcaggtaaataaaccccttaaatgaattcccaggctattagctaattaatagaagtctctgggcataacaatgaggaaggaattctggataattactcataataaagatgagactcaaaaagctggaaatatgcagtaaaatcttcttgaacttcagctacagcaaattaatctcacatacagagaacatgttgtgccttctctatggagaatcttgtcccattgggagtatcctccctggtctttgctgacatcataggaattagcttatgtcatagctatctcttctttgatttgcagataactcaaagactgctatgagaatagatcttactttccttaccctccctaagatgtactggttcctgctaaaagagggagattgtga

SEQ ID NO: 254369 - DNA, 570 bp, Homo sapiens
aacatcgtggaatgtatcaaatcttatttttttctatataaataaattacaacttcaacttattttgatctttacatctgtatatctgtcttttcactaccacattaagcaaaatgactggcacatttttggcaaaggtggagagcagctggaatggttccatttttctggtgcagttactttaaatgtgccatacaccaaggtgtctggcaacagatgtgcatttggtcttccagggtgaaaagcaaaaaggattcattaatgttttacacaatcactgctggatagcccagcaggaatgtatatagttctgtctctaaagtrttctcttatgcaatgtggactggcataaaggggcttctttaaatgcattcttgaatcacacaggtaaagctaaagaaatatatcaagagaagagtgatagggagagcaaagtagaaaactgaaaagtaaattttgcagaatatatattcaggactgtccgaagcagggaaacttggcacctggggatttaactcttttactattattattattattattatactttaagttttagggtacatgtgc

SEQ ID NO: 254370 - DNA, 449 bp, Homo sapiens
atcagttaaaaactagggggcaatgataaagtgtagatttctattagtttttttttgcaagtttgcttaattttttaggcaatctgtgttcagtttccatcagtttagaataatgagctataagatagtatttgcaagcctcatatcagaaaacaaacaacggatacacaaagaaaaaagcaaaaaaattaaagcatacaatcagagaaaatcactttcactaaaactaagacaggagggaggaaagaagaaggsacgaccacaaaacaaccagaaaacaaatagcaaatggtattagtaagtccctatttatcaataaaaatattgaatttaaatggacattcaatattattatttttacactctgtgaaaaaagacacagagtggctgaatggatcagaaacaagaaccaatgatctgtttcctacaagaaacattgtcatttataa

SEQ ID NO: 254371 - DNA, 584 bp, Homo sapiens
cataatttctatgatttccgtataattaaaattgtaaaaatgaagttaattattatggtaggcagaattctaagatggccctcataatttttgctcctttaagcccctgattatgttatattacatggcaaagggattgtgcaaatgtaattaagtttcagttgactttgagttaataaaaagagagattatccaggtgggtctaacctagtcagtcacatgagcccttcaaaagcagttttctgtggctgttttaggagaagtcagagagattcaaataatgagaattcaattgaaggaaggttttctattgctgtgagagcagaggccacagggcaaagatctaacagtgaccttagaggcaaaggtgctccctagctgtcaatctgcaagaacataaagacatcagtcctatgactataaagtaataaattctgctaacgacctgaagaaaaaaacctggaagtaatgttttccaaaacctcaaggtgagaactcagacargctaataccttgttgtcagtcttgtgataccctgaacagagaacccagtcatatactacctgaaatcctgacctactgaa

SEQ ID NO: 254372 - DNA, 584 bp, Homo sapiens
cataatttctatgatttccgtataattaaaattgtaaaaatgaagttaattattatggtaggcagaattctaagatggccctcataatttttgctcctttaagcccctgattatgttatattacatggcaaagggattgtgcaaatgtaattaagtttcagttgactttgagttaataaaaagagagattatccaggtgggtctaacctagtcagtcacatgagcccttcaaaagcagttttctgtggctgttttaggagaagtcagagagattcaaataatgagaattcaattgaaggaaggttttctattgctgtgagagcagaggccacagggcaaagatctaacagtgaccttagaggcaaaggtgctccctagctgtcaatctgcaagaacataaagacatcagtcctatgactataaagtaataaattctgctaacgacctgaagaaaaaaacctggaagtaatgttttccaaaacctcaaggtgagaactcagacaagctaataccttgttgtcagtcttgtgataccctgaacagagaacccagtcatataytacctgaaatcctgacctactgaa

SEQ ID NO: 254373 - DNA, 638 bp, Homo sapiens
ctcagttgcctgaaggcaattaggaaaatgaggaggttagaatgagatgaagtagggcccaaagaaaggcttctctaggtctgaatttcattcagatcctcacatgaatatacataaataatttggatttggagaattatagcatcttcctgggaaaaattctgcaactcaaagttacctttatagctattaagtgactggaagacattacagactaacaagtggcagcttttttatggacagttactgaggaaacagaaaacagatcaaacaataatttcacacatcataaatgacaaacctatatataaatgagaagtgaaggggctcaaagacaggaatttgtggaagttgatggggaaaagaaaagcatcctagaaagtcacagacagggaacgttatcaaagccatctagaaaccagggaaaaagaattatgtttatgttttaacagagacctacagcacctcaataaaggaaaatggttattggaaattttttcaggcattggagtagatgcaggagtamcattttgggactccctgagttacactctataggagctgtctacagctaaggtttgcacctgcacagtcttagatagcttcattatactaacactggcaaaatataatatgtt

SEQ ID NO: 254374 - DNA, 578 bp, Homo sapiens
ttcctcctgtatatctttgtcaagatttcccttttgttataagaacagcagtaattgaattagagaataccctaagctaatgatatggtttggctgtgtccctacccaaatctcatcttaaattatagttcayataatccccatgtatcgtgggaggtaatttaatcgtggggacagtcaggctcaggctgttctcgtgatagtgagttctcacgagatctaattgtttcatatggagctatcccccattttgcttggcacctccccttgctgccatcatgtgaagaaggatgtgtttgcttccccttccaccatgattgtaagtttcctgaggcctccccagctctgtggaactgtgagccaataaagccccttttctttataaattatgcagtctcaggtgtgtctttattagcagcatgggaatgaactaatacacctaatatgacctaattgaaactgggtttacatttgcaaagactctatttctaaataaggtcacattcataggtatataggattagtcggaacatatctttcggggagataaaattcaatccataatacttcttttagct

SEQ ID NO: 254375 - DNA, 578 bp, Homo sapiens
ttcctcctgtatatctttgtcaagatttcccttttgttataagaacagcagtaattgaattagagaataccctaagctaatgatatggtttggctgtgtccctacccaaatctcatcttaaattatagttcatataatccccatgtatcgtgggaggtaatttaatcgtggggacagtcaggctcaggctgttctcgtgatagtgagttctcacgagatctaattgtttyatatggagctatcccccattttgcttggcacctccccttgctgccatcatgtgaagaaggatgtgtttgcttccccttccaccatgattgtaagtttcctgaggcctccccagctctgtggaactgtgagccaataaagccccttttctttataaattatgcagtctcaggtgtgtctttattagcagcatgggaatgaactaatacacctaatatgacctaattgaaactgggtttacatttgcaaagactctatttctaaataaggtcacattcataggtatataggattagtcggaacatatctttcggggagataaaattcaatccataatacttcttttagct

SEQ ID NO: 254376 - DNA, 593 bp, Homo sapiens
tacaaatattagtgactatggcatcataaaaataaaataactaacccaatatttattaaagtcaatttttataacttcaagcttcatcattaggtgctgtgatatttgcctaatttttattaccccccaaaatgttattagaacaaaaattaatagaaagccactgtaaagaggagcaatttgatattaatttgttttccatcacatcaaatagtatggaaagtktccaggcccttacagtaggaaattacaggtaggatgttgaggtctgacagcgttctgagtgacaggtttttctgtttctctagaatgaggaggctccaaaacaagaaatcataaactcacacatattctgacaaatttaactctctcattattgtgaatcagctagaaattttattttaatcatcatacttctggatgcatcattttgcaaccctcattgcttctgcaggtggattataggagaaagcctttgttatgtctgattaggctccttaaaatctccttgacctcggccaaattctttgaattatctgagatcactcttctggtctgcataatgcttattttcttacaggtttgtagttgca

SEQ ID NO: 254377 - DNA, 548 bp, Homo sapiens
gaatgtcatatagttgaaattatatagtacgtaacctttttagattggcttctttcacttaataatatccatttaaagtgccttcgtatatttttatgggttgatagctcatttttaagccatgaataatattccattgtctggatgtaccacattttatttatcctttcacctaacagaagaacatcttggttgtttctaagttttggcaattatgaataaaactgctataagcatctgtgtgcagttttttgggtgggtacatttttagttcatttaggtaaataccaaraagtgcaatgctggatcacatgataagagtatgtttagttttgtaagaaacagccaaactgtctttcaaagtggctgtgccacctgtattcccataagcaataaatgaaaatttttgttgttccaagtactcaccagcatttggtgtcagtgttttggattttcaccactttcgtaggtgtgcattgataatgcattgttttaatttgcaatttccaaatgacatacgatgttgagcatcttttcatatggttact

SEQ ID NO: 254378 - DNA, 563 bp, Homo sapiens
ttttaaagagttttctaaaagtttctgaatattcgaggattattcaggtatttttcatcattaatttctagtttaattcaactgtaagctgcaaaatactgtgtatgatctctattattttaaatttgcttaggtgtgttttatggcccagaatatggtccatcttggtgaatgacctaagtgaacttgaaaagctgttgttgaatggaatattctataaacgtaagttagataaagtgcattgatagtgctgttcagctcagctatatctttactaatttttcggctgcttaatatatcaagtactgacagagatatgttgaagtcccctgttataattttggatatgcctatttttctctrcaggtctaccagcttttgccttatgtatgttgatctgttgaagtacctacatttttaggattgttgtgtcttctaggagaatagtcctttatcatcatatgatagtcttatttaatcttttataatgtctcttttttttgaattttgatttatgtgaaactattctagatatttttaaattagtgatagcatggtatatg

SEQ ID NO: 254379 - DNA, 551 bp, Homo sapiens
cccatgaagagccacctctgcaggcataactcaacttgtgcctcctccaggagaaattaggtggattttgatatatttttagagctgttcttctctaatgcagctatcaggtcaatcactgcatccccttagagacagactgaggaaaagttcaggaaggccatgaatgtgttaaggggcaatccctcctgggaaataacagaaatggggagaaaataaagtgtttctttaacatggaagttagtcagtaaccttgtttgcttaccaaagaattakctgtttgttttaggtgtcatttctcaggatttcttcagctcctacacttctctaattctgaaacactaattctgaaaattgagccagtcataacaatttaattacacacacaaagggagcataacctcaagttaacataaaattatatgattggactaacatgcagttgttaccgcaattatccagtctgacactgtgcattattgcatttcacattgtattaatatgtataaaagacagagggtcaataaatatttagcagatgaatcagagtt

SEQ ID NO: 254380 - DNA, 551 bp, Homo sapiens
cccatgaagagccacctctgcaggcataactcaacttgtgcctcctccaggagaaattaggtggattttgatatatttttagagctgttcttctctaatgcagctatcaggtcaatcactgcatccccttagagacagactgaggaaaagttcaggaaggccatgaatgtgttaaggggcaatccctcctgggaaataacagaaatggggagaaaataaagtgtttctttaacatggaagttagtcagtaaccttgtttgcttaccaaagaattagctgtttgttttaggtgtcatttctcaggatttcttcagctcctacacttctctaattctgaaacactaattctgaaaattgagccagtcataacaatttaattacacacacaaagggagcataacctcaagttaacataaaattataygattggactaacatgcagttgttaccgcaattatccagtctgacactgtgcattattgcatttcacattgtattaatatgtataaaagacagagggtcaataaatatttagcagatgaatcagagtt

SEQ ID NO: 254381 - DNA, 551 bp, Homo sapiens
cccatgaagagccacctctgcaggcataactcaacttgtgcctcctccaggagaaattaggtggattttgatatatttttagagctgttcttctctaatgcagctatcaggtcaatcactgcatccccttagagacagactgaggaaaagttcaggaaggccatgaatgtgttaaggggcaatccctcctgggaaataacagaaatggggagaaaataaagtgtttctttaacatggaagttagtcagtaaccttgtttgcttaccaaagaattagctgtttgttttaggtgtcatttctcaggatttcttcagctcctacacttctctaattctgaaacactaattctgaaaattgagccagtcataacaatttaattacacacacaaagggagcataacctcaagttaacataaaattatatgattggactaacatgcagttgttaccgcaattatccagtctgacactgtgcattaytgcatttcacattgtattaatatgtataaaagacagagggtcaataaatatttagcagatgaatcagagtt

SEQ ID NO: 254382 - DNA, 589 bp, Homo sapiens
ttccagctggcaccaggtcagtgcccctctgggatgaagcttctgaagggaggagcaggcagcaatctttgctgttctgcagcctccactggtgattcccaggcaaacagggtctgaagtgcccccagcaaactgcagcagcctgttagaacaaaaacaaacaaacaaacaaacagaaaataacaacaacaacaaagaccccacaaaaaccccactgaaaggtcatcagcctcgaagatccaaggtagataaatccacgaagatgagcaaagacacggaaaattgcaaaagccaaaatgtctcttctccaaatgattgcaacacttctccagcaagggcacagaatcaggctgaagctgagatggatgaactgacagaagtaggcttcagaaagtgggtaataatgaatttctctgagctaaaggattatgttctaactcaatgcgaagaagctaaaaaccatgataaaagattacaggagctgttaactagaataaccagtttagagaggaacaaaaatgacctgatggaactgaaaatcacagcacgagaacttcawgatgttaacacaagtatcaatagtcaaatc

SEQ ID NO: 254383 - DNA, 479 bp, Homo sapiens
cggatgatggcccctttggccagcaacccttagataggcctctgagggagatctgactgttttcccctaactggagttaggggagattaagaggacaagattagaatgaggatgctccctctgggaggggggtgtctgtgtaagcgggtaatgataatagaaatttcagtttcttatgatcctcttcccatttggaaatctaagaggagacctcttgataacaaggggtgtctgtgtcaagtgaaatgaaagtatggcatggtgaggtagaccatgcttgagattacaataacagttttctacaatctgctcacaacttgtaagacactcagaacttcatgctctatttggggacagrgataaggttagagtttaaataaggacaaaggacatgaggacctcatgataggagggagtgtcagagaccaggaacatcaaagataccaaagggagaaaatacagttttattatcacaagga

SEQ ID NO: 254384 - DNA, 559 bp, Homo sapiens
ataatatactatgtatactacccatataatatatatccatatactacgcatataatatatacctgtatactacccatataatattctatgtatattataataccatgatatatcactagataaaaaagggaaactattaacagattttaggcaggaggtctcaatgttcagaytggcattctagaaaaatgatttggtcagcagatggaggatggacagaagacaacactaggagctggagtatccattggaagatattgacgtaatcaagagaggcagggtcaagaagtcatgaggataaaagggagggagagatttgggagactttttttgagatagaaatgacaggaatttctgaccagccacatgtgaaaggtgaagaagagacagagtctagggaaactgtgagaattaggaaaatatcaatagtctttgctcctctaaaggaaaggcagtaatagggatgcaaagcacaacagaaccttcatcaggaccactccccaccctggctcacatctcagggaggcacaggctttcttgcattgcaagcatgctatta

SEQ ID NO: 254385 - DNA, 557 bp, Homo sapiens
ccaggtacatccctaaggtttctgactcaggccctggcttccagacatcatcactgagcccatgtaggaccagggggatcttgctgccctacaggggaaggacacaaacctagctggcttcatcacctgctgactgcagagccctagggccttgagtaaatgtaggcagtagccaggcagtggttactgcaggccttggacaagagccagtactgtgctggcttcaggtctgactccacatagtctcaatggtggtggccataggggtacttctgtcacccctctcccagttctaggcagctcaggaaagagagagasagagactctgtttgtttgggagaaagtaaggaaagagaacaggaatctctacctggcaatccagagaattcctccagatcttatctaagaccaccatggtggtacctatatgagtctgcaagaaccacagtgttactgggcttggggtgtcccctgatgcagatattgctgctgtgaccaaaaacttagatcacaacactcatgtccctttgaatacctggaaagccttcctaaaaaga

SEQ ID NO: 254386 - DNA, 557 bp, Homo sapiens
ccaggtacatccctaaggtttctgactcaggccctggcttccagacatcatcactgagcccatgtaggaccagggggatcttgctgccctacaggggaaggacacaaacctagctggcttcatcacctgctgactgcagagccctagggccttgagtaaatgtaggcagtagccaggcagtggttactgcaggccttggacaagagccagtactgtgctggcttcaggtctgactccacatagtctcaatggtggtggccataggggtacttctgtcacccctctcccagttctaggcagctcaggaaagagagagacagagactctgtttgtttgggagaaagtaaggaaagagaacaggaatctctacctggcaatccagagaattcctccagatcttatctaagaccaccatggtggtacctatatgagtctgcaagaaccacagtgttactgggcttggggtgtcccctgatgcagataytgctgctgtgaccaaaaacttagatcacaacactcatgtccctttgaatacctggaaagccttcctaaaaaga

SEQ ID NO: 254387 - DNA, 527 bp, Homo sapiens
tcctactcaagctattctgaaaaatagaggaggagggaatactttcaaactcattttatgrggccggtattagcctgataccaaaacctgacaaaggcacatcaaaaaaaggaaactacaggctaatattcctgatgaatgtagaagtaaaactcttcaacaaaatattagcaaaccaaattcaacaatacattaaaaagattattcatcctgaccaagtgggatttatcccaggaatgcaagtatggttcaacatatgcaaatcaatcaatgtgatacatcatatcaacagaatgaaggacaaaaatcatatgatcatttcagttcatgctgaaaaagcatttgataaaactcaacatcacttcatgataaaaaccctaaaaaaaactgggtatagaaggaacataccccaatacaataaaagttgcatatgacagacccacatactgaatggggaaacattgaaagcctttccactaatatctggaatatgacaaggatgcccactttcaccactgttactcagc

SEQ ID NO: 254388 - DNA, 527 bp, Homo sapiens
tcctactcaagctattctgaaaaatagaggaggagggaatactttcaaactcattttatggggccggtattagcctgataccaaaacctgacaaaggcacatcaaaaaaaggaaacyacaggctaatattcctgatgaatgtagaagtaaaactcttcaacaaaatattagcaaaccaaattcaacaatacattaaaaagattattcatcctgaccaagtgggatttatcccaggaatgcaagtatggttcaacatatgcaaatcaatcaatgtgatacatcatatcaacagaatgaaggacaaaaatcatatgatcatttcagttcatgctgaaaaagcatttgataaaactcaacatcacttcatgataaaaaccctaaaaaaaactgggtatagaaggaacataccccaatacaataaaagttgcatatgacagacccacatactgaatggggaaacattgaaagcctttccactaatatctggaatatgacaaggatgcccactttcaccactgttactcagc

SEQ ID NO: 254389 - DNA, 527 bp, Homo sapiens
tcctactcaagctattctgaaaaatagaggaggagggaatactttcaaactcattttatggggccggtattagcctgataccaaaacctgacaaaggcacatcaaaaaaaggaaactacaggctaatattcctgatgaaygtagaagtaaaactcttcaacaaaatattagcaaaccaaattcaacaatacattaaaaagattattcatcctgaccaagtgggatttatcccaggaatgcaagtatggttcaacatatgcaaatcaatcaatgtgatacatcatatcaacagaatgaaggacaaaaatcatatgatcatttcagttcatgctgaaaaagcatttgataaaactcaacatcacttcatgataaaaaccctaaaaaaaactgggtatagaaggaacataccccaatacaataaaagttgcatatgacagacccacatactgaatggggaaacattgaaagcctttccactaatatctggaatatgacaaggatgcccactttcaccactgttactcagc

SEQ ID NO: 254390 - DNA, 527 bp, Homo sapiens
tcctactcaagctattctgaaaaatagaggaggagggaatactttcaaactcattttatggggccggtattagcctgataccaaaacctgacaaaggcacatcaaaaaaaggaaactacaggctaatattcctgatgaatgtagaagtaaaactcttcaacaaaatattagcaaaccaaattcaacaatacattaaaaagattattcatcctgaccaagtgggatttatcccaggaatgcaagtatggttcaacatatgcaaatcaatcaatgtgatacatcatatcaacagaatgaaggacaaaaatcatatgatcatttcagttcatgctgaaaaagcatttgataaaactcaacatcrcttcatgataaaaaccctaaaaaaaactgggtatagaaggaacataccccaatacaataaaagttgcatatgacagacccacatactgaatggggaaacattgaaagcctttccactaatatctggaatatgacaaggatgcccactttcaccactgttactcagc

SEQ ID NO: 254391 - DNA, 584 bp, Homo sapiens
atatgcatctctaacaagttcccaggtgatgctggaccacccttttgagaaacactgcttcagaaagccagctgaggaagtgagctgaagggacaggggacgggggaatgttttcggcagagggaagcaccgtgtgaaggcccaaagtggagatagcaccrcggcaagcaaatattcctggaaccaagagatctgaggcatggccagaggttagggagcaaggaggatcatgcagggtaaggccagtgataggtggaccaaatcctggtcctgccatctatgattatgactgagaaaaaaaatgactccacaaagcaaaagaggctgcttctcttcacaagaattggccacagtagtattgtccaatcagtagggttcttaactctcagattatgaaaaatccaggctggcttattattaaaaagtaataacactctttgcagggttaacattttatagctttcatgacacttttgcaagtgttatctcatccaattcttaaagaaatcctggaatgcaagaaggtctggcgctcctgccttcattttgccaggtctagaaccccattatcagactcctgttct

SEQ ID NO: 254392 - DNA, 449 bp, Homo sapiens
aatgttttcggcagagggaagcaccgtgtgaaggcccaaagtggagatagcaccgcggcaagcaaatattcctggaaccaagagatctgaggcatggccagaggttagggagcaaggaggatcatgcagggtaaggccagtgataggtggaccaaatcctggtcctgccatctatgattatgactgakaaaaaaaatgactccacaaagcaaaagaggctgcttctcttcacaagaattggccacagtagtattgtccaatcagtagggttcttaactctcagattatgaaaaatccaggctggcttattattaaaaagtaataacactctttgcagggttaacattttatagctttcatgacacttttgcaagtgttatctcatccaattcttaaagaaatcctggaatgcaagaaggtctggcgctcctgccttcattttgccaggt

SEQ ID NO: 254393 - DNA, 584 bp, Homo sapiens
atatgcatctctaacaagttcccaggtgatgctggaccacccttttgagaaacactgcttcagaaagccagctgaggaagtgagctgaagggacaggggacgggggaatgttttcggcagagggaagcaccgtgtgaaggcccaaagtggagatagcaccgcggcaagcaaatattcctggaaccaagagatctgaggcatggccagaggttagggagcaaggaggatcatgcagggtaaggccagtgataggtggaccaaatcctggtcctgccatctatgattatgactgagaaaaaaaatgactccacaaagcaaaagaggctgcttctcttcacaagaattggccacagtagtattgtccaatcagtagggttcttaactctcagattatgaaaaatccaggctggcttwttattaaaaagtaataacactctttgcagggttaacattttatagctttcatgacacttttgcaagtgttatctcatccaattcttaaagaaatcctggaatgcaagaaggtctggcgctcctgccttcattttgccaggtctagaaccccattatcagactcctgttct

SEQ ID NO: 254394 - DNA, 558 bp, Homo sapiens
gatataagacaaatactaacaaaaatttagttatagtaaaactaaaataagactgtataatgacaaaggtaaccattcatcagtaataatagttctgtacttttaaaaattgaaagaattacaaggagaaatgaattaattaacaatcagcatggtgagaattatgtttaatacactttattttttagagtaattttagtttttcagaaaaattgagcagaaggtacagcaatttctcatatatcccctactttatatgtgcatagccttcccccattctcaatatctyccaccagagtggtacaactgaacctacattgacacatcactatcactcaaagtccatagtttatcttaaagttcaatcttggtgttgtacattctatgggtttagacaaatttataatgacatatatttaccactatagtatcatacagggtagtttcaatgagtatgagaatttttaataagtttaatttgatggtgatatgttgaaccttgccactcacaattaaagggtacacattccttccaagcatacattaattcaaaaattg

SEQ ID NO: 254395 - DNA, 615 bp, Homo sapiens
attggacaggttaactctggaagtagggagaccagctggggactgctccagtggtccagactgatgagggttacaccaaggcagtarcagaagggttggaaaggagccatcccaggattctcaagtttgagtgagcctcagaagcacccacagggcttgttaaaacacagatcactggtccccactcccagtttctgattcagtcagtctaggctagggcctgtgaatttgcatttctaacatgttcccaagtgatgccgatgctatcggttcagagaccaagctttgagaaccattggaatagcccatttccatgggccaagttaaaaaaaaaaaaaagtttcccttctgtcactatttagaaagagggacatcactgggttagaagcagtaagatgaaatgtagaaatataacagtccctcaccagtcagctggcatctgcaagtttactagatacaaagagctattttcacattattatatactgaaacctgaatacaaataggccactaaaacctactagtccccacctcaaattctgagactacattcagagtaacttaaaaacaaaagtcattttgggaacatttccgaagcccactatagtatcagtc

SEQ ID NO: 254396 - DNA, 615 bp, Homo sapiens
attggacaggttaactctggaagtagggagaccagctggggactgctccagtggtccagactgatgagggttacaccaaggcagtaacagaagggttggaaaggagccatcccaggattctcaagtttgagtgagcctcagaagcacccacagggcttgttaaaacacagatcactggtcccsactcccagtttctgattcagtcagtctaggctagggcctgtgaatttgcatttctaacatgttcccaagtgatgccgatgctatcggttcagagaccaagctttgagaaccattggaatagcccatttccatgggccaagttaaaaaaaaaaaaaagtttcccttctgtcactatttagaaagagggacatcactgggttagaagcagtaagatgaaatgtagaaatataacagtccctcaccagtcagctggcatctgcaagtttactagatacaaagagctattttcacattattatatactgaaacctgaatacaaataggccactaaaacctactagtccccacctcaaattctgagactacattcagagtaacttaaaaacaaaagtcattttgggaacatttccgaagcccactatagtatcagtc

SEQ ID NO: 254397 - DNA, 475 bp, Homo sapiens
tcaatgtagtagcaaaacatgtgggctttagagtcaaacttctcagattcaaatcatttttcctccctgaaaaggagggaagcaagcctgcctaacatccttgagttttctcatctggaaaaaatagtggtaacagtacttacttcacagagttgctgtggggattaaatgcatttctgtttctaaaacacagaacactgtacctgccccacagttagcacttgacagatcttagcagctattatttttccatgatcattgagctaattgtcttgtatcttgcccgcaaattagtttctcagggamtgtggtaaacataaaagttggttggtataaagggttaaattgtgaaccccaaaagatatgtctactcagaacctgagaatgcgacctcatttggaataagaatttttgcagatgtaattaaggcaaggatccccagatgaaattatcctgaattaggataagccctaag

SEQ ID NO: 254398 - DNA, 573 bp, Homo sapiens
caatgttttcaagcaaatagtattatagtatttttgctgtcataagaaataatttatcaaacttaaacaacaggtattattcagactaattttccactaatatttttaaatgtcattaaaaatgtaattaggtttgccttctatgttctgatttctcaccttactagaatcattcatgcaatccaaaattataaccaaaggtcaggattaaaatttcactcaagtacacaggcaaaatgctgttatctcaagagctacattcagctaaataagaggcaaggcaaacagacctaaagctrttaatccttggctgaccttgagcccaaaaatgcaggcaatagactggcaaataagatgggctgagaggtaggaaggcaaataggattcttaatttgcttacacaattcatgcagcataattgataaatgttattgatcataaagatttccaagtcagaacttctctggaatcagaaattgtggttacagtataaatattccagtggcaaatatttttatcacttttacaaatgaacatcttaaagtgttataagctgagatactgaataaacaa

SEQ ID NO: 254399 - DNA, 645 bp, Homo sapiens
aatatctacagaactcctagcatgtccaaatttcgtatgtgtccttggtactcaaaaagtgaaggagcacatttgcttggagacccagtgcaatcccactgtccttgcctgttccagagcttcctcatacagagatggacaatgaaaggacctttaagattcactcattcaacccccttcttttacagaagagaaaactgagggcctgaggggagagtcagttgatttgtctgaaatcacacagttggttcatgaccaaagcaggagcaaactccatggttacctaccaccttcctgagtgaggcatctcttgggaatccttataattatggagaatgctgagccacttccaaayagagtccatattcagagagccgcagtcacagtaacatctacgctatgaacccataggcacagcacgcaagcattaagcagatggatttcctgccgcctctcacttccctgtcccttcactctcccttgctgcccctttcttttgccagttagtgctccatttccaccagagtatgttaaggacaaggagaacctctacaattcagtccattttacagcttgtcaggtcacgtattattacaccaagtcaggaaacagattcagaaagttaagagatatatgcgctcaagg

SEQ ID NO: 254400 - DNA, 645 bp, Homo sapiens
aatatctacagaactcctagcatgtccaaatttcgtatgtgtccttggtactcaaaaagtgaaggagcacatttgcttggagacccagtgcaatcccactgtccttgcctgttccagagcttcctcatacagagatggacaatgaaaggacctttaagattcactcattcaacccccttcttttacagaagagaaaactgagggcctgaggggagagtcagttgatttgtctgaaatcacacagttggttcatgaccaaagcaggagcaaactccatggttacctaccaccttcctgagtgaggcatctcttgggaatccttataattatggagaatgctgagccacttccaaacrgagtccatattcagagagccgcagtcacagtaacatctacgctatgaacccataggcacagcacgcaagcattaagcagatggatttcctgccgcctctcacttccctgtcccttcactctcccttgctgcccctttcttttgccagttagtgctccatttccaccagagtatgttaaggacaaggagaacctctacaattcagtccattttacagcttgtcaggtcacgtattattacaccaagtcaggaaacagattcagaaagttaagagatatatgcgctcaagg

SEQ ID NO: 254401 - DNA, 645 bp, Homo sapiens
aatatctacagaactcctagcatgtccaaatttcgtatgtgtccttggtactcaaaaagtgaaggagcacatttgcttggagacccagtgcaatcccactgtccttgcctgttccagagcttcctcatacagagatggacaatgaaaggacctttaagattcactcattcaacccccttcttttacagaagagaaaactgagggcctgaggggagagtcagttgatttgtctgaaatcacacagttggttcatgaccaaagcaggagcaaactccatggttacctaccaccttcctgagtgaggcatctcttgggaatccttataattatggagaatgctgagccacttccaaacagagtccatattcagagagccgcagtcacagtaacrtctacgctatgaacccataggcacagcacgcaagcattaagcagatggatttcctgccgcctctcacttccctgtcccttcactctcccttgctgcccctttcttttgccagttagtgctccatttccaccagagtatgttaaggacaaggagaacctctacaattcagtccattttacagcttgtcaggtcacgtattattacaccaagtcaggaaacagattcagaaagttaagagatatatgcgctcaagg

SEQ ID NO: 254402 - DNA, 556 bp, Homo sapiens
ttgccagctgtggacaagactcttcaattaacttgtaaagttttgacagtgtaatatctgggccctgtgtaaaggagagatagggaggtatggattttaaagagctggagactgataaagaattgcaaacataaattcatttatcaacccctctgctttaataatcactccaaamatgcaaataaggatttttctatctacctaaaacactaaagtaatacttcacatttgcataccatttttgtctagtcagtggaatggtctaaaatagaaaaaaagcataggatttatagtctgaggatccactgttccttccttcttagctttgtaatcattgcaaaattgtgacctctgagttctagtttccttcatcagtaaaatggagataataatatctcccttgtttttggcaaagattaaataagataatacaaagtgctttgtaaactggaaaacactatacaaatactatttttcacaaacacaatctcatttgatcttctcccaaaccttgtaaggtaggcagacatactatgtgctgaagtctataaagagt

SEQ ID NO: 254403 - DNA, 622 bp, Homo sapiens
caccaacttcttccttcttgcaatgaactgcttgccttctttcttacaccctggaaattggtaatatgctaatgcttattctgcatatgtgtctggtacttctctctgggatgtgtcaggkacttctatgtagggtcactcaggctgcacaccgcatgcacaactacagagtatactgtttacatggaccatgatgggaatgatgccccccatggttgattgtgcaattcagcagacctactggcacatattactttctctgtctgtgcaagctctcctgaaattaaatagaaaaaagcatgtttagtttactgctaggtatgacattcaacgttccaaaacaaaagaacttccttttaaaacacaatataaaatataaatttattaaaatgatgatcactctagaaactattccataggagaaagcattgaaataactggtgatgtctaaagtaaacatgattgggaccatggaaagtagcaatgtcataaaatattagaaaggattctatgcagaagagggaagagactgagaagatctatgggagataattaggagaaggtatgagatgagttttggctcaggaaaagacacaactttccagaaccaaacaacaaatat

SEQ ID NO: 254404 - DNA, 501 bp, Homo sapiens
ggctatagctgtcattttgccattaccattctgaggtgttgattttgtgcttcacatttttcctgtgtttttaacttgatgccctagcttgaatttttatttcactctaatcgttttttaaatttgaagtcttccttttactttggcaatttcagttggaacactatgtttggaaaaaaaaaatgttcacagagaaactgaaggttaaatcagctttattctgtaaacagtgcctaaattatcatctccttcccataacagcccaattaatatgttacagcaaagcagaaaagccaaaaatcaygctgaaaacatggagctattgcgacacctgctggtaagaaataaagtgcattgtgtcaacaacagcaaaagcaaatggaaacaatggatcgcttggatagattttattcctacaaatctatcttttgtgaatacctggtatgtttcaggtgctgtgacaggcactgggactgatagggggaggtctgatccttacac

SEQ ID NO: 254405 - DNA, 628 bp, Homo sapiens
tgattttgtgcttcacatttttcctgtgtttttaacttgatgccctagcttgaatttttatttcactctaatcgttttttaaatttgaagtcttccttttactttggcaatttcagttggaacactatgtttggaaaaaaaaaatgttcacagagaaactgaaggttaaatcagctttattctgtaaacagtgcctaaattatcatctccttcccataacagcccaattaatatgttacagcaaagcagaaaagccaaaaatcacgctgaaaacatggagctattgcgacacctgctggtaagaaataaagtgcattgtgtcaacaacagcaaaagcaaatggaaacaatggatcgcttggatagattttattcctacaaatctatcttttgtgaatacctggtatgtttcaggtgctgtgacaggcactgggactgatagggggaggtctgatccttacactcaagaatctcacagacttctgggaagaaatatctctatctacacacctaaatatagagagattattttttatagtcaaggttgtcaggttgggttggrtacacctaagataacacagggcccacagagatgacctttcacgaatcagggacagtgtcacagagaa

SEQ ID NO: 254406 - DNA, 511 bp, Homo sapiens
ccaggatggtctcgatctcctgaccttgtgttccgcccgcctcggcctcccaaagcagatttcttatacttgttattccttctgcctggaaagctctgtatccggatatctgtccacaggactgacttcctcatttcctttaggtctcctgttcaaatatcatctttcctgactatgctgcataaaaatagcaactgctcctgatattctcttgaccccttgctctatttcatgtttctttgtagctctkctcgtcgctggacagtgtacttgcctgtctatctgcttattgtcagtctttctccattgaaatgcaaattccatgaaaccagagtatttgtcactgaagtataacctacctgcagaacaatgtctggctcagagtaagggtttaacaaatacttgttaaatgagtaatatttacttgaaacatttatggaagatttagtcagatggaaaagcaaaaggtttttacaacttgtcaaccacttactatgaggaaagtactatt

SEQ ID NO: 254407 - DNA, 582 bp, Homo sapiens
ttatgtggcaattaaattacatgccaattaaatagaattgcaagtgctaacataacaagttaaaacaagtggaagttattactgaaacacatcaattgcttttttctactaagttgaattgacatttaaaaaattaacactgacctatgttatgcactttcagtatttagaatgtgagttaggctgttaaaagttttaaaggtaaaaaattgaaaaagggtaaaagaagtagattcttgtttcacctaaataaaataataaacaaaaataatttttaatagattggttttacttattttttaattcctttttttctctgaataatcaaaaataagctttactttgaagtaagatggcaggtgcccagagctaagctttgattgcacataaagccagctttttcatacttgatccaaatgtcaaatgtcaaatttctactttacagttaatgtacaaacatgtatatatacacctctgtgtgttctcctgtgatacaatttaaatttcagattaaatgtgtatacatacataygtatgtatatatatacacacacatacatacacaaatatattaacttttat

SEQ ID NO: 254408 - DNA, 451 bp, Homo sapiens
caacatgggtccacacatatgcagatttttttcaataagtatgttggaaaattctttggagatttacaacaatttgaaaaacttgaagacaaactgtatagcctagaaatattttgaaaaataagaaaaatgtatgttatgaatgcataaaatatatgtagatgctagtctgttttatcatttactaccataaaatacacacaaatctrttataaaaagttaagatttatgaaaacttacacatactcttaacagaccatgcatggtgccatttacaatcaagagaaatgtaaacaaatataaagatgcaatattaaatcataactgcataaaattaactgtagtacatactgtactgctgtaataatttcatagccaccttctgttgctattgtagtgagctcaagtgttgtgagtatccacttaaaatgccatgtgacactagtcatgt

SEQ ID NO: 254409 - DNA, 596 bp, Homo sapiens
aatttgaatatccgactgggaagaaagctggttgtgagcaagacatgggaagagtagcaaagataatattccccaatatctgttttcttttcttcactgggaacatggttattatgaataaagatgacatttcccagcatcccttgtaattctgtgtagatgtatgtctcagttttggccaataagatgagagcagaagtgacacatgagacttccaggtcatgtgcttagagagaagatatgtgctctcactttacctcttccctctggtgaaatatccaaayggcgatataccatcttggcttttatggataaatgcaacaccctaagtttggcagatcagcaacacaaagggagtctgggcttttgatgacttcacagagttaagatagcatgccagctgagactcatggatatgctgagatggggaggagacccttttgtttatgccaatgttattatatttacagttttcatacacaaacctatgtcacaaccaatatgagaagccaagtggattgactaaagcaggatttggtttaaagaaacaaaaaataagcctatatggtccaaaaggtaaaaggtcttataaccca

SEQ ID NO: 254410 - DNA, 389 bp, Homo sapiens
gatggaaaaaaaagggagggggatttggatttctgtaaaatgggacctatttaattccaagatcacaataggtatcccttacggtgcaaaagcaccatcagggcgggccacatgaagaatcctggcttaccacacagaaaggtttttgaagctggtktcagtgtttcctgtaattttaaaattactttttcactcctaccacattaagatctgctggatgtatcataaactatttattgagggtgttcagctggaaaattgaaaagaaagcctttcaaggatttttcctctctgaaacaggtgggaagactgaaaacagcacttgattgtttcttttttttcactcaggttaagcttttgagagtctagtgaatttgccatccaataaa

SEQ ID NO: 254411 - DNA, 420 bp, Homo sapiens
ttatttacaacttaaaccatcaacctccagcaaatgttttataaatcttttcctgtatctatattatttcaaggtactttaccttccctcaagcaaacaccacttttagattagaaatgaatcaacctggaataaaatatcagtgtttagtttcttcagatagaatttctgtacatttaattatttttattttagagtatgtgcacagacttttaataaaagaagctcaaatgttagtatttagcccaatatgctacatggtaccattgaatatgtagagataaggtggaagtagaaggaacagcaagaaaaaatccagaggtcagaaaatatagaatatgtatagtggtcccattttgctrcattgaagggtgctaaagagtaatcatgcagaaaaaatttggaatagctaatttgagg

SEQ ID NO: 254412 - DNA, 561 bp, Homo sapiens
ttcaagtttatatttcctgagttcactgcaaagaagatatatttaaaaaatagaaaacaaacaaagaattttaaaatgcattttacaaaatctacactttatcatgctttcttttgctaaagaggatcctttccaccgtatatttccaagggtcacattcaaatgaaaatgtgtcattgtatcattcctaaaaagccctgttttccatcaggttggaaacactaccatccatttttaccttcttaagacacaaacaaaaatcccttggcctctwtcacaagaatatataaaagcaaaatttcaagaacattttcaagtttgtctttgaaaggtttgtgcctcattaaaatttattttgtacaaacagctcctatatttgtcacaatcttctgtaatgatgatggctaagatttaggcttggtgaaccatcattgacttcaactatgttttaaccaaaagtaaagtgtcccagggaactggaatcatagtttcactgttttttttaaaatcataaaataatactatgaagtaaaagagagttatataactccttaccttaaa

SEQ ID NO: 254413 - DNA, 406 bp, Homo sapiens
actgatgatcttgtaggaagtactttgaagggcaaacatgcgagctacaaaggatctcatcagtttgctttaaaaatamttggtttcattactttgttttcctactgctttttttttcttccactctccagcccaaaatgtaatttaatttgttgttttgattcagaattttacagattatgcattagcatacatagaagatagtcaatattggtctcaactggcatcattgcaagtcctaggaacggccatttttgttgtggatttacttatttttcttttctttaattcttcctgtgggcatatatgttgatttgttgtattgttttctatcccctgtaaacgaagagtgttacccatacggattgttcaccttcttcttttccacttatttaagctttgctcc

SEQ ID NO: 254414 - DNA, 571 bp, Homo sapiens
tatggaagttgtcctgtagaaatctgtgcctacttatgtaccatcaatattataagctaccagacaccaagcgaacatattgacatatactatgtgtcaggccctgtgctacatgtactacagcatctaatttaaccataacaacaactacaaagcagatataaatcccacaaggatgggaaaaaacaagaatcagagaaattacaaaatttgcttagggtcacacaacaactatctggcaaatatgacaatctaaaactcagctgaagtccagtagcagccagtcactaaagctctgtagtggacatggttgactggctactagaagccattcccaaacttgtcttccttgcctatctctcatagaakaagttagaaagtcaaatacaccctttcctactctctcctatagcaaggcatgtccattgctgcagttatggtccatgagaaataaaggaaagtctaatggaagggttctaaaaatggtgtccttcctgatttttgttaaaaaaaaaaaaaaaaaaagaagtcttctttttacccatctgtttccttttggtttggagtggtt

SEQ ID NO: 254415 - DNA, 621 bp, Homo sapiens
tgtgcaatttttagttatctgtgggtcatgtaagatgctacgtaagatgcaaatagcactatttttcagcagctgatgtttgcagtatgtttgcatttgggaaaataaatatgtcagtcatggttgtcttcctatgtttttcaagtttttggctagttagaayctgattagaccatttaataatctattttaaaatgtgagaaaaatgtagctattgattaaactgtgcatgattaagatttcagaaactgaagtcaaatttttctgaagttccattagttccaagcctatggggaaaagggaaatttgtgatttaatgcaagagtatgtttcatggtactcttcaggaaaggtgttaagatggcaacaaatactttgcacttaaatggtaagctcctgaaaagtaggcaccatattgtattaatttctctgatcccttcacttaggacagtgttcagaacaaaataaaactcaacaaatgtgtgctgaataaatggtattgccggatggtgcatccaatctagagatgcatgtattcggaaatgaaaattgtgttagaactaaatatttattatgtgcatacgatgtgccaggctccattctagtgttttatatgaacta

SEQ ID NO: 254416 - DNA, 574 bp, Homo sapiens
ttcaaatttcaaagtggcatcaccatttgctttcttcagagctacaatctaaataaatgaacagtggtatcagatgcaagtatatggcctgtcctttggcgaccctttaccccatacataacttcaatttctcttagaaattttcagaatcactcagcatattttttctgcagtaacttttccctctgctttcttggtcctttttcaccaaaaatttatttgcttattttcttaaaatttctagttctcccgtaaatcttctataccattctttccacctattagtgtgctttgaagaagtaaactactactttatttaattccataacggatttttcattaggaaatgtagtatacaaaaactgtattaggattgtttaaattttttgttagattgagatagagacaaatgtaatgtgagagaagggtccaaacaaagcctaactgccacccatgttcccaagaagcatcctgtaccaagcaccagtgcttaccagcagcactagtaagctcwcaaatagcagtgcatgcaaagagctcagagcacagccagtgagttcctgttccctctgta

SEQ ID NO: 254417 - DNA, 602 bp, Homo sapiens
tgcctggctgataaaaacttatgaattcatctaaactctttaccttaggaaactaaataacccagcagagatatgaagattttcaaaaagcaatgcaggtaagtaatgtattatttatttatatcagtaaagctggtaacacagagatagtgctaatccccttctctttccataatttgttctaggttacagggttttcaaatagcagaattaaaattcaaaatttggatccaataggtgtccaatatccatgaactttctgctgtgtccaagaggatgtgttttgttgagtagcagtaagtaatgcttccatactttttatctcctacaacccaaaaagagccattgtaatgaaagctctctaggttttataatcttcagccattataactctgcatataaattaccttgaattttctattcttgtcatatgtatttaaagtaactgaatttaaaagtttatttccaaatttattttttaaaacttaccacatcatcttttacacaaagtttgtgtgtaaccagtagccagcaacagttttgtttytgaacctcaaaaccatttataccctaaaataaaaaataacataatttaagtttca

SEQ ID NO: 254418 - DNA, 527 bp, Homo sapiens
tgagcagtcttattttgaactagcatgttttaatcaaaggtatggaattaatcaaatatcaattaagaattactggaatgcacactcatgccaaatgacaactaacatgytatttcctactatgatgactctttgatttgagtcagatggcataaaaaaatattgctagctatacaataaattttactcttctgcttctgctctctaaagaaaaatcttattttttcacataagaagctcatggaatcgaatgttaattaaagaaaagatagggtaagtacaactgggggaaagacagtacctctaattacataggaaatccatgaaagaattaatcatcataagagaagaatcatttttccagtagccccactaccatgaatgatattttcatgagcctcggccaccttctccaatggatattgagaacctatcacaggtttcaaccagccaatttccattccagcttgaagggctgctgcatattgctgaaattcctcctaagaaaaggaaaaacaaatttcttt

SEQ ID NO: 254419 - DNA, 527 bp, Homo sapiens
tgagcagtcttattttgaactagcatgttttaatcaaaggtatggaattaatcaaatatcaattaagaattactggaatgcacactcatgccaaatgacaactaacatgttatttcctactatgatgactctttgatttgagwcagatggcataaaaaaatattgctagctatacaataaattttactcttctgcttctgctctctaaagaaaaatcttattttttcacataagaagctcatggaatcgaatgttaattaaagaaaagatagggtaagtacaactgggggaaagacagtacctctaattacataggaaatccatgaaagaattaatcatcataagagaagaatcatttttccagtagccccactaccatgaatgatattttcatgagcctcggccaccttctccaatggatattgagaacctatcacaggtttcaaccagccaatttccattccagcttgaagggctgctgcatattgctgaaattcctcctaagaaaaggaaaaacaaatttcttt

SEQ ID NO: 254420 - DNA, 456 bp, Homo sapiens
atttagttagggtttaaaagataagtagaaattctttaggaatgagagaaaggataggttgggtaaaaaaaaatagcatgtgcaaagacagagaaatgaaaggaagtmttaaggaaattggacaaaagctgatgttgttacagcactgtatctctacatggagaggaagtgatgagaaataaatttgtaaagataggttatatccaaactgtaaagactctcataggcttgctaagaaaattagacttgggagccatggagggtgcagtaataaaaatacataatttaaaatcaaaagtgtattgttaaagtcactggagatgattaaactatatacttaaattctcatgaatcacacatgaaaaagcatgaatgcaaaagaaaattgttttcccagcatgcaaaaaataaaaatcatgaatgtttgtaatagaataacttattcaaaactcctta

SEQ ID NO: 254421 - DNA, 456 bp, Homo sapiens
atttagttagggtttaaaagataagtagaaattctttaggaatgagagaaaggataggttgggtaaaaaaaaatagcatgtgcaaagacagagaaatgaaaggaagtattaaggaaattggacaaaagctgatgttgttacagcactgtatctctacatggagaggaagtgatgagaaataaatytgtaaagataggttatatccaaactgtaaagactctcataggcttgctaagaaaattagacttgggagccatggagggtgcagtaataaaaatacataatttaaaatcaaaagtgtattgttaaagtcactggagatgattaaactatatacttaaattctcatgaatcacacatgaaaaagcatgaatgcaaaagaaaattgttttcccagcatgcaaaaaataaaaatcatgaatgtttgtaatagaataacttattcaaaactcctta

SEQ ID NO: 254422 - DNA, 566 bp, Homo sapiens
tttaacacatgtgagatagcccaagaggtgtatcatatttagatggtttcagaatttcattaatctaccttctaggaatgtgatattttacagattgtacttttgtacagtacaaagacaggcagctaattcttaacagaaacttaaaagccatctctctttttccaacatgctcctcacatttctttagttgttcaaacacagaaaagtaacttatcagatgctcagctcctggtttcttatccaggtccccttcagaaartaagtaatctctacttgaataaatttacaagagacaggattcagggccagagatcatattaattgactgggcaagaatggcacctgttcagttcctccttgatagatttactataaaaacttcggtttcaaagatataaaatatatatcaccgaattgaaatatctgtgcagggcatatcagacaaattcctgcaatgaatttccaggatgaccatgtacagctgccccctttacctaaatattaaataaaaatgccattcctctaggcaaaaacatctgtgacccatgagattctgtgcttct

SEQ ID NO: 254423 - DNA, 574 bp, Homo sapiens
ctaaacccaaacatagcagaagaaagaacaaagatcagaacaaaactaaatgaaattaaaacaaaccaaaaaaagatacaaaagatgaataaaacaaaaagctggttctttgaaaagaccaacaaaattgatagaccattagcaagactagtcaagaaaggaagagagaaaatccaaataagctcgattagaaataaaactggaaagattgcaattgacaccacagaaatacaaaagatcattcaagggtactaaaaacacttttacacacatcaactagaaaatccagaggaaatggataaatcctggaaacatacaaccttcctagatgaaattggggagaaatagaaaccctgaactgaccaatatcaaacagcaagatagaatcaataatttgaaaattgccaacaacaaaaawgtccaggatcagatggattcacacctgaattctacaagacactcaaagaagaactggtaccaatcctactgaaactattccaaaagacagaaaaagaaggtatcctccctaaatcattctatgaagccagtatcaccctaataccaaaaccaggaa

SEQ ID NO: 254424 - DNA, 574 bp, Homo sapiens
ctaaacccaaacatagcagaagaaagaacaaagatcagaacaaaactaaatgaaattaaaacaaaccaaaaaaagatacaaaagatgaataaaacaaaaagctggttctttgaaaagaccaacaaaattgatagaccattagcaagactagtcaagaaaggaagagagaaaatccaaataagctcgattagaaataaaactggaaagattgcaattgacaccacagaaatacaaaagatcattcaagggtactaaaaacacttttacacacatcaactagaaaatccagaggaaatggataaatcctggaaacatacaaccttcctagatgaaattggggagaaatagaaaccctgaactgaccaatatcaaacagcaagatagaatcaataatttgaaaattgccaacaacaaaaatgtccaggatcagatggattcacayctgaattctacaagacactcaaagaagaactggtaccaatcctactgaaactattccaaaagacagaaaaagaaggtatcctccctaaatcattctatgaagccagtatcaccctaataccaaaaccaggaa

SEQ ID NO: 254425 - DNA, 608 bp, Homo sapiens
tggcagtaggttgagcgagcaaagattttttggtgcacctcacactggggtgcaggcattgtgcattccttgtgttgatgagtagcgtagggtttttctgtgaccctctcccggtccattctttaatctgacttttgcacctgtgaaaataaccacagcacctcgcaggtcattaggctaggtaaacagctcattacagagtgaaatgagaccaatgatagtcatattctgccaatgcagaatgtgtctayttcctattatctaattaaatgccacttcctaagtatttatggagcatctgccatgtgcttatcaccaagttggttgctgcaaggattcataagaattttatactgtactctccacccacaagggatttagcatctttttggaaatatgcaacatatattcaggaatgatattcaaaatagttcataatcagactggcacaggcaccagccaatgagactggaaacccatcttatctgaatgaatgccagctattaataactgacagagtgtgatggtgcatgctggtgaataccagccttgctttcatctgattttttttaactgttgaagaaaaaaaaacgtttaaaatcttatac

SEQ ID NO: 254426 - DNA, 505 bp, Homo sapiens
acaaagtggtttttgaaatctgaataagagctcagctatcatctatgaaattgtggatcatggagtagaaattatgaagagatcctgtttttcgctttgttttattggcaagcatcctgagtgatactgactctttccataataaactgtcatcggacacaattgtttcagaatatggtctcggtgtttgattgcagggtctgcagactcagacagtgggaatgcaatgcttaagcttcttcacttattgcctgctggtgtacaaatataggatttggcaatttagcctaaagccttcgtctctcccgctacatccacccgctctgggaggctccaggaacrcaacttgccacaggctcccaggcaagaggaggcccatagagctgatatcagagccaaggtgtgggcctgcctcatgtataatccaccctcaaaacacagtctgatggaccccttgctagagttgaactttggactccccaccactgaaataaaaaaataaata

SEQ ID NO: 254427 - DNA, 569 bp, Homo sapiens
atatacatgtttaaacagacaaaagaatttatatagataccatagacattttctgtaatgatatgaagtataatttgtatttactttcttcaaatatgggaatctctaatgtctttcaaaattaccatgatgttgaagacaatgtttatagtgatctcatatacaagtatagattttactgctctagtgatatmatttacaagtatagattttactgctctttcttctttgtttctgtgcaatctgttacaccaaccaaaaataagattgaaccgagatatgatttttagtaaacttggtgcttagtaaatttatttagatacttagtaaattaactaaaattaatttaggtgtttagtatatttattgaatgaaatctagcctaatatttataactggaatgttttataattgatttataaaaatcacaagtgatgttctttttatacagtatctatgtctttatcaagtcatagagattatatacttagtataaagagcaacatcaagattttgatggctggaaagaacactagaggaggacccctgaatatccattttcacttaac

SEQ ID NO: 254428 - DNA, 600 bp, Homo sapiens
tgatgacagcagtagtctttgaagaaagtgaaagaaaaccagtatggattaactgtaatgggtgagcacttggtagagtgggagagatataactgaaatgctggacacagaacttgtaagtcactgtgctggtccrtattagtagttgatatcggaaagcaaaatgtatacaggagaaacagtgtaaataaagcaaaagagtaaaaaaaagttagggatgcatacagtgtttgtcctttgacataactgggttactctgaaatatcaacattttcaaaatctcttctgtcaacactactataaggacttttatatatatatatatatatatatatatatatatatatatatacacacatgtatacataaaaacatgtattgcaaatagaaataaggtctctatttaaaaatctaacagttatttgctaatcacttatttttatacatataggcattagagaaaaaataaatattcatcaaagtgaattaaaaacaagtttacagtataatcagtagagaataggtcacattaaatacaaaatgtataattaagtcaaaatattcattgaatgtctgacttgcataggaagagacacaagg

SEQ ID NO: 254429 - DNA, 600 bp, Homo sapiens
tgatgacagcagtagtctttgaagaaagtgaaagaaaaccagtatggattaactgtaatgggtgagcacttggtagagtgggagagatataactgaaatgctggacacagaacttgtaagtcactgtgctggtccatattagtagttgatatcggaaagcaaaatgtatacaggagaaacagtgtaaataaagcaaaagagtaaaaaaaagttagggatgcatacagtgtttgtcytttgacataactgggttactctgaaatatcaacattttcaaaatctcttctgtcaacactactataaggacttttatatatatatatatatatatatatatatatatatatatatacacacatgtatacataaaaacatgtattgcaaatagaaataaggtctctatttaaaaatctaacagttatttgctaatcacttatttttatacatataggcattagagaaaaaataaatattcatcaaagtgaattaaaaacaagtttacagtataatcagtagagaataggtcacattaaatacaaaatgtataattaagtcaaaatattcattgaatgtctgacttgcataggaagagacacaagg

SEQ ID NO: 254430 - DNA, 600 bp, Homo sapiens
tgatgacagcagtagtctttgaagaaagtgaaagaaaaccagtatggattaactgtaatgggtgagcacttggtagagtgggagagatataactgaaatgctggacacagaacttgtaagtcactgtgctggtccatattagtagttgatatcggaaagcaaaatgtatacaggagaaacagtgtaaataaagcaaaagagtaaaaaaaagttagggatgcatacagtgtttgtcctttgacataactgggttactctgaaatatcaacattttcaaaatctcttctgtcaacactactataaggacttttatatatatatatatatatatatatatatatatatatayatacacacatgtatacataaaaacatgtattgcaaatagaaataaggtctctatttaaaaatctaacagttatttgctaatcacttatttttatacatataggcattagagaaaaaataaatattcatcaaagtgaattaaaaacaagtttacagtataatcagtagagaataggtcacattaaatacaaaatgtataattaagtcaaaatattcattgaatgtctgacttgcataggaagagacacaagg

SEQ ID NO: 254431 - DNA, 600 bp, Homo sapiens
tgatgacagcagtagtctttgaagaaagtgaaagaaaaccagtatggattaactgtaatgggtgagcacttggtagagtgggagagatataactgaaatgctggacacagaacttgtaagtcactgtgctggtccatattagtagttgatatcggaaagcaaaatgtatacaggagaaacagtgtaaataaagcaaaagagtaaaaaaaagttagggatgcatacagtgtttgtcctttgacataactgggttactctgaaatatcaacattttcaaaatctcttctgtcaacactactataaggacttttatatatatatatatatatatatatatatatatatatatayacacacatgtatacataaaaacatgtattgcaaatagaaataaggtctctatttaaaaatctaacagttatttgctaatcacttatttttatacatataggcattagagaaaaaataaatattcatcaaagtgaattaaaaacaagtttacagtataatcagtagagaataggtcacattaaatacaaaatgtataattaagtcaaaatattcattgaatgtctgacttgcataggaagagacacaagg

SEQ ID NO: 254432 - DNA, 450 bp, Homo sapiens
tatattattaattgggtgaatttttgtattaatatgttatttaaaatacaccatttaaaattagattcaatatttatgtcagttttactttctttctctttgtcctgattgttttatatagtcaacattgaaactgagaatagagagaaagagaaacaagggattttaaaggataatagtaataagcctttgtataatttttttcatacatgactttttaaaatttcataatagwgaggtgatgtggatgtaccttctaacatcatcacattttgacagtgaggaaagtgagactatgcatgggaaaaagtgaggcttagtaagtgaagcaataaagtggaaatggtactttgtctagcccctctgaccccagaccctgtgctctcatgctacatcacagtgtctgtggaataaacttttatcacttttgttgttgagaaaatgaacttg

SEQ ID NO: 254433 - DNA, 573 bp, Homo sapiens
ctatccatctaacaaagggctagtatccagaatctacaaagaacttaaacaaattttcaagaaacaaacaaacaaacccatcaaaaagtgggcaaaggatatgaacagaaaaaaggtgagtctgaagcagaggtggccatggaaaatggaaggaagatgtctttctcatctttctagttctgattcgaaaccacttcctcaagaaagtctgctctttctccaactcagaaagctcaacaacaatagtacgtattcattcgatgaaatatttatcatttgttcctttcagtgaagaaacagttacatttcataatattcatcacaatagagttgcacataaggtatgcccaaarcacaagcattccagctaactcagaaagtaggagcactaaggaattttaggcacgtttatgtgcaacaaccttaatcaacagaatcaataatcaaattaattttcaatatttatgaactaaaaattaagagatttttaatgtcatatagaattctcaactgctctggcacataagacagaggaaaatccctaatgtgaagacaacaccaccaagccaaatc

SEQ ID NO: 254434 - DNA, 333 bp, Homo sapiens
cttagctccaacatatgagtgagaacatatgatrtttggttttccattcccgagctacttcactcagaataagtctccagtttcatttaggttgctgcaaatgccgttaatttgttcctttttatgactgagtagtattccatcataaatagacacattgaccaatggaacagaatagagaacccagaaataaacccaaatatttacagccaactgatcctggacaaagcaaataaaaacataaagtgggggaaaggactccctgttcaaaaaatggtgctgggatcaatggcaagccacatgtaagagaaagaaactggatcattgtctgtc

SEQ ID NO: 254435 - DNA, 594 bp, Homo sapiens
tttgcttttttattaccatgttgtttactagaacatcctgtacttattgcattctatttcagtctgataagaacttaaattttattgwatacaacaactctggactgttactcctcccttcacagtttatgtttttgatgccagaattggtaacatttttattatgtatcccttgataatttattttcgctatagttgttgttttgcattttaatgcccatactaggaataaaattgcattacacaccttacacacacatcattaaaatcctagagtactctgaaaatgttgttttacttataccattaggttttgtgcttttgtatgttattgttgcaatttaaatattaataactcccattaagattcctgtaaggcaggtctagtgatgttatactcccttagcttttgtttgtctacaaaagttcttatttccccatgactctgaaaagacagttttactggataaagtattcctcattcgcagttttcttttttcttcagcactttgaatatattattcaaatttctcttggcctgtagggtttcttctaagaaatatgttgacagttctattgccattcatttgtgtg

SEQ ID NO: 254436 - DNA, 537 bp, Homo sapiens
attaggaaagggaacccaattaatatagttcctacaggtcagcctccagggggacacagcaagctatagagacctgaagagtagatttggagagacacacagaaaaatctagccgacgtgaaattattatttataaagggaaaattgatttacatcaagatcaacaaatatatcaagcattatgagtcaacacccctaattgtgctaagtagtcttcttagcttatatatataaagtttttattagaaaatatgttcaaacttacaaaaaagtggccaaataagaatattacaaagaatatccctatcccctttaaccagattcacctattgttagcattttactccatataytttattatatgctctgtgtctctttttatcttagtaatatattttatgttatttttctattataaaagcattgtcagttgaggcgttgggctgagtccttgactgcagctcagtaattgcaatgcgttggctgtaaataccaagtctagtgtggggatggtagctttccgccatgtgacctgac

SEQ ID NO: 254437 - DNA, 543 bp, Homo sapiens
acagtgacaacataaacttcattactgagaaagttttattagaatgcactactaaaataaaagaaaaattaaatttaaagaatgcactattaataacagcaataagactgatcctgcaagttttcttcttgaggattgaagaaatataaatgaatgctcatcctactgatggttgatatgtggccctagatttaaatttaaggggatttacaactgacctccagtctaggaattcatagtcactcatttattgagcctatcacaaagtagagttctttatttggtgttgaaggggccagggaaagaaagaaatggaaaagtggtgttccatgttgcttccttrttactaaacatgagaaactgcattatgtaaagtgatttctaaaatttctatagttccacatattatcagtatcaacatatcatactgtcatatggttccatgtattgataataccattcaaaatagttgacttgagaagttttaatctaaattagcgtaaaaagcaaacatggaaaaaacacatatggatgaaatattat

SEQ ID NO: 254438 - DNA, 283 bp, Homo sapiens
atcaatagactacaagctagattaactacagataaaagagacaaaattcaaataagcgcaatcaaaaatgacaaaaataacagtgcagttgataccacggaaatacaaaacatcatgaaagactactatgaacatttccatgtgcacaaactagaaaacttaaagaaatggatacattcttataaacataccrccttcctagatagaataaagaaggaatagaaaccttaaaaagagcaagaatgagcattaaaattgaacttgtaataaaattattacaacc

SEQ ID NO: 254439 - DNA, 507 bp, Homo sapiens
gcacctgctactgctgtacacacagagtttgtctgctataccaaaaagcacttgcttgatgttcgattatttctttcagttctccagtgttgacttgagtgactgtgctgcacatgatactacatagcaaaccatcataggtactgtgaaaaatacaaatgcatcccctttccttactcaacacgggaaggatttggtagctatgcaatgttaggttgttttaatataatcatttttgatttttagtatttagtagcagaattactttttaaatttttagtatttagtagccctttgggctgtgtgtgtgtgtgtgtgtgtgtgtgtgtgtgtatttaggggagggggcagtttggggtattcaaaaagaaagaaaatttacaaaatkaagttacagagaaatgaacagagttcttacattatgacatgatggacccacatctttacattatcagggatttaaaaaacatttcaaagaaaaagacaaaattgctctgtaataataat

SEQ ID NO: 254440 - DNA, 574 bp, Homo sapiens
ccttggcttataaggccttgtagatctcaaccacctgaaccgtcttctatcaccacctttgytcactgtgccccactcacctcattccttggcattccctggcaggcaagcctaatccccccaggagcctttttacatgctattcttctgtctggagcacttgtcccagatcctcacgtttctcatcacttcctgcccctcatcccattttctgttctctgtctagcactctgccccactgacagagcattgtgtacagttggtgtattgcctgcctccccgaccgaaatgcaaacaccctgcaggcagcagagacatcccatattgacttgtgtctctgccgtttggaacagtcttgacatgtgctgtcgtttgagtgtgtcccccagtgatcatgtgttgaaaacgtaacctctgatgcaaaagtgctgagaggtgggtcctttaagaggtgaatatgtcatgaatgctctgccttcctgaatggattaatgttgttattgtgggagtggcttctttaactcaagggtgggtttgtcatgaaagcacattcagatctctggcatgctttctc

SEQ ID NO: 254441 - DNA, 600 bp, Homo sapiens
tgattggttttgaaatatgaggacatgatatttgggaggggccagggacagaatgatatggtktggctgtgtccccacccagatctcatcttgaattgtaactcccacagttcccacatgttgtggaaggaacttggtgggaggtgatttaattatgggggcaggtctttcctttgctgttctcgttatagtgaatgagtctcatgagatctaagggttttaaaaatgggagtttctctgcacaagctctcttctctttgcctgccatcatccatgtaagatgtggcttgcttatccttgccttccaccatgattgtgaggccttcccagccacatggaactgtgagtctaattaaacctctttcttttgtaaattgcccagtcttgggtatgtgtttatcagcagcgtgaaaatggactgatacaatatgcttttgagtaattttgtctttgctttttttaattttactatttaaggtgatagtcatttgaaaaagactcttttgcaaatacaaatgaaagttgaaaatcatcactgttttgtagcttcaaaaagccattcactgtctgcagagttattggttttgcacatagtatcct

SEQ ID NO: 254442 - DNA, 657 bp, Homo sapiens
attaccctcataccagaatcagacaaataaattataagaaaagaaaactacagaccaatatctgtcatgagaacagatggaaaaatcctcaacaaaatattagcaaatagaatcaacaatgtctaaaaagaattatacaccatgaccaagtgaggtttattccagrtatgcaaggctgtcttattatttgaaaatcagttaatgcactgcttctcggttttttggctaagattaagtaaaaatcaattactgtaatttaccatatcagtgggctacaaaagaaaaactacatgattatatcaatagatgcagaaaaaaaatttgacaaatctaacacacattcatgatgaaaacactcagtgaactagaaatagtgggcaacttcctcaacttgataaagaatatctgcaagaaaaaatctacagctaacatgacacttaatgatgacaaactgaagatttcctactaaaatcaagaacaaggcaaagatgtctccttctaccacttcttttcaacatcacatgagaagttctaaccaatgcaacaagataagaaaaggaaataaaggatacagattgtgaaagaataaatagaactgtttgtctttgtagatgacacaatgatctatgcagaaaatacaaaataattaacaaaaaa

SEQ ID NO: 254443 - DNA, 657 bp, Homo sapiens
attaccctcataccagaatcagacaaataaattataagaaaagaaaactacagaccaatatctgtcatgagaacagatggaaaaatcctcaacaaaatattagcaaatagaatcaacaatgtctaaaaagaattatacaccatgaccaagtgaggtttattccagatatgcaaggctgtcttattatttgaaaatcagttaatgcactgcttctcggttttttggctaagattaagtaaaaatcaattactgtaatttaccatatcagtgggctacaaaagaaaaactacatgattatatcaatagatgcagaaaaaaaatttgacaaatctaacacacattcatgatgaaaacactcagtgaactagaaatagtgggcaacttcctcaacttgataaagaatatctgcaagaaaaaatctacagctaacatgacacttaatgatgacaaactgaagatttcctactaaaatcaagaacaaggcaaagatgtctccttctaccmcttcttttcaacatcacatgagaagttctaaccaatgcaacaagataagaaaaggaaataaaggatacagattgtgaaagaataaatagaactgtttgtctttgtagatgacacaatgatctatgcagaaaatacaaaataattaacaaaaaa

SEQ ID NO: 254444 - DNA, 484 bp, Homo sapiens
aggacaggaagggtcttctctcactacgtccccatggctatttctgatttaaatggaggcaacaaagttagwgatctgaagaaagaaagatttggtagctatgcagaaggtaggttaagttttctaggggcagaaaaagattctgaaaagcaaaatgccctgttgagaggtagtaaatggcatgtggaattaaactgtctacaggatggtctacagccaatgcattgcccattaggctggttaaattaatagatactgtgtggctggctgatgtctctcttgctcatgaggagagttatcttctttatttcacactctctggacctctcaaaggtaagaaatcaaaatcatttacccaactaaaggggcagaagttgccatcttatgatattccccaaaggctatgaatctaattcaggctattaagcctgccaggtttcctgtcattcatctctcagccctgtctcacaggactagaaaaggc

SEQ ID NO: 254445 - DNA, 484 bp, Homo sapiens
aggacaggaagggtcttctctcactacgtccccatggctatttctgatttaaatggaggcaacaaagttagtgatctgaagaaagaaagatttggtagctatgcagaaggtaggttaagttttctaggggcagaaaaagattctgaaaagcaaaatgccctgttgagaggtagtaaatggcatgtggaattaaactgtctacaggatggtctacagccaatgcaytgcccattaggctggttaaattaatagatactgtgtggctggctgatgtctctcttgctcatgaggagagttatcttctttatttcacactctctggacctctcaaaggtaagaaatcaaaatcatttacccaactaaaggggcagaagttgccatcttatgatattccccaaaggctatgaatctaattcaggctattaagcctgccaggtttcctgtcattcatctctcagccctgtctcacaggactagaaaaggc

SEQ ID NO: 254446 - DNA, 617 bp, Homo sapiens
ggaactgttcagttctctgtcatccaaggccctggtgtggctattgttcaggggaaaaaaaatcaaatcatttactttgaaaattctatgggcatacttagtattacccaggtatagtatacaagtttttaagcactttctgtaaattaaaatgytccaaaaaggaatagattttagaattatatgttttaatttaaagcctatttgtactaggagagtgatccttctttcagaattgaatgtcaactttgctttattttgactctcaatcagttgttttctcaaatgctgagtaaaactaggttacgataaatttcaaagaaagacaatactgaatgaaagggacgatattatacattgacagaaaaatgtgagctgtgaaaataaaagtagaaaataaaagagaaatatgctacttatatggaagtagaaaataaaagaaatatgctacttatatggaaacattcttagaaatatatatgagaatttatgtggattcatgtatgctttctaaatggaaacttttaggaaaaatgttacaagatgtggcttgtagagtaagtggcgattgtagagaaggttaaaaaaacaaaaaagttacccctgcacgttgacca

SEQ ID NO: 254447 - DNA, 617 bp, Homo sapiens
ggaactgttcagttctctgtcatccaaggccctggtgtggctattgttcaggggaaaaaaaatcaaatcatttactttgaaaattctatgggcatacttagtattacccaggtatagtatacaagtttttaagcactttctgtaaattaaaatgctccaaaaaggaatagattttaraattatatgttttaatttaaagcctatttgtactaggagagtgatccttctttcagaattgaatgtcaactttgctttattttgactctcaatcagttgttttctcaaatgctgagtaaaactaggttacgataaatttcaaagaaagacaatactgaatgaaagggacgatattatacattgacagaaaaatgtgagctgtgaaaataaaagtagaaaataaaagagaaatatgctacttatatggaagtagaaaataaaagaaatatgctacttatatggaaacattcttagaaatatatatgagaatttatgtggattcatgtatgctttctaaatggaaacttttaggaaaaatgttacaagatgtggcttgtagagtaagtggcgattgtagagaaggttaaaaaaacaaaaaagttacccctgcacgttgacca

SEQ ID NO: 254448 - DNA, 617 bp, Homo sapiens
ggaactgttcagttctctgtcatccaaggccctggtgtggctattgttcaggggaaaaaaaatcaaatcatttactttgaaaattctatgggcatacttagtattacccaggtatagtatacaagtttttaagcactttctgtaaattaaaatgctccaaaaaggaatagattttagaattatatgttttaatttaaagcctatttgtactagkagagtgatccttctttcagaattgaatgtcaactttgctttattttgactctcaatcagttgttttctcaaatgctgagtaaaactaggttacgataaatttcaaagaaagacaatactgaatgaaagggacgatattatacattgacagaaaaatgtgagctgtgaaaataaaagtagaaaataaaagagaaatatgctacttatatggaagtagaaaataaaagaaatatgctacttatatggaaacattcttagaaatatatatgagaatttatgtggattcatgtatgctttctaaatggaaacttttaggaaaaatgttacaagatgtggcttgtagagtaagtggcgattgtagagaaggttaaaaaaacaaaaaagttacccctgcacgttgacca

SEQ ID NO: 254449 - DNA, 617 bp, Homo sapiens
ggaactgttcagttctctgtcatccaaggccctggtgtggctattgttcaggggaaaaaaaatcaaatcatttactttgaaaattctatgggcatacttagtattacccaggtatagtatacaagtttttaagcactttctgtaaattaaaatgctccaaaaaggaatagattttagaattatatgttttaatttaaagcctatttgtactaggagagtgatccttctttcagaattgaatgtcaactttgctttattttgactctcaatcrgttgttttctcaaatgctgagtaaaactaggttacgataaatttcaaagaaagacaatactgaatgaaagggacgatattatacattgacagaaaaatgtgagctgtgaaaataaaagtagaaaataaaagagaaatatgctacttatatggaagtagaaaataaaagaaatatgctacttatatggaaacattcttagaaatatatatgagaatttatgtggattcatgtatgctttctaaatggaaacttttaggaaaaatgttacaagatgtggcttgtagagtaagtggcgattgtagagaaggttaaaaaaacaaaaaagttacccctgcacgttgacca

SEQ ID NO: 254450 - DNA, 497 bp, Homo sapiens
tactaatttgtttacaaaaataggtaagcatccctcacatatcattggtgtaatttaaaagagatttttaatgagtaatgtgtcatcttgtagtacatgtaaatggtctgcataatttccaattagacttgaatttataatatttatggatgtttgcagaatttaaactaattggaataatcattccagttgttgatcaaattagaaatgataccatcaaaactttttgagccttgattttaaaaaataattcattctttcctatttcaaaaaagtagatctgtgactgtctatatcggttaatggaatatcagacaatttaaatcaaccctgccctggaagtcaattgaaaaacaagagtaaaattttaaaattttttgtagaagcattgactatatggcaaaagaagaattaccaggccaaaataaagtggaaaaaaatcraacacagaaggataagggtgcacagatgctttagccttgaggacatttcagatg

SEQ ID NO: 254451 - DNA, 541 bp, Homo sapiens
aagccttcaacctggtttatagagaaaccaagctctgggaaaaaagcaaacgtaaatcttctctggagaaaaatatcttcattttaaacctgaaattatttctatatattttattttaatcatttcttacaggataataataataataaagcacaagaggaaattccatgagtgagaaccagcagaagtaacagaaaagatccttaaaatattgaggaattggaatgatcagactcagactgtaaattaactatgctgattatgtacaaggaaataaaaagcaagtttcaagatatgtgcagagaaaagaaagtgataaagaggaacataaaagattagtaaaagaactaagtggaactgttagaaaaaatctcaatgggcraacttcagcttctgcccaagatgtagtaacaggaactggacttaccctcttaccacaacagcaagcaaacaaaatatgtaaaagttcaattggcaggtttaagagcagactagacacacctcaaaagagagtaagtgagctgggagataagtgtgaaca

SEQ ID NO: 254452 - DNA, 480 bp, Homo sapiens
ttgattatccaaagaaagtgtgaaggtgacactgtatatcatttttaatatataatacatatatggaagaaagataaacmaaacgaaagccacgtgcagacacagcccaggtctcatccttcttcccggctgacagtgagccccctccctcccctgtgcctgcaacttttgaatcaagggacttctcctgatattttcactggcctctgaatagctctcttgctctttaagccagaggctcccctaagatgagtcctggtttgaggtctctaagtacctgagtagtcttctgtcaggatacaactgtgaattcttgccacctgccttattagtattcagtgctcgctattattgccagtatcattatcatcattagaagctcccatattcacaggtgctcactcagtatcaggcatcgtggacattttatgtgcggtatcttgtgtcttccctgccctgatccctggaggtgccatttta

SEQ ID NO: 254453 - DNA, 480 bp, Homo sapiens
ttgattatccaaagaaagtgtgaaggtgacactgtatatcatttttaatatataatacatatatggaagaaagataaaccaaacgaaagccacrtgcagacacagcccaggtctcatccttcttcccggctgacagtgagccccctccctcccctgtgcctgcaacttttgaatcaagggacttctcctgatattttcactggcctctgaatagctctcttgctctttaagccagaggctcccctaagatgagtcctggtttgaggtctctaagtacctgagtagtcttctgtcaggatacaactgtgaattcttgccacctgccttattagtattcagtgctcgctattattgccagtatcattatcatcattagaagctcccatattcacaggtgctcactcagtatcaggcatcgtggacattttatgtgcggtatcttgtgtcttccctgccctgatccctggaggtgccatttta

SEQ ID NO: 254454 - DNA, 480 bp, Homo sapiens
ttgattatccaaagaaagtgtgaaggtgacactgtatatcatttttaatatataatacatatatggaagaaagataaaccaaacgaaagccacgtgcagacacagcccaggtctcatccttcttcccggctgacagtgagccccctccctcccctgtgcctgcaacttttgaatcaagggacttctcctgatattttcactggcctctgaatagctctcttgctctttaagccagaggctcccctaagatgagtcctggtttgaggtctctaagtacctgagtagtcttctgtcaggatacaactgygaattcttgccacctgccttattagtattcagtgctcgctattattgccagtatcattatcatcattagaagctcccatattcacaggtgctcactcagtatcaggcatcgtggacattttatgtgcggtatcttgtgtcttccctgccctgatccctggaggtgccatttta

SEQ ID NO: 254455 - DNA, 480 bp, Homo sapiens
ttgattatccaaagaaagtgtgaaggtgacactgtatatcatttttaatatataatacatatatggaagaaagataaaccaaacgaaagccacgtgcagacacagcccaggtctcatccttcttcccggctgacagtgagccccctccctcccctgtgcctgcaacttttgaatcaagggacttctcctgatattttcactggcctctgaatagctctcttgctctttaagccagaggctcccctaagatgagtcctggtttgaggtctctaagtacctgagtagtcttctgtcaggatacaactgtgaattcttgccacctgccttattagtattcagtgctcgctattattgccagtatcattatcatcattagaagctcccatattcacaggtgctcactcagtatcaggcatcgtggacattttatgtscggtatcttgtgtcttccctgccctgatccctggaggtgccatttta

SEQ ID NO: 254456 - DNA, 604 bp, Homo sapiens
attaggagtgcatacatatttaatgtaaattaaagaatatatcaaaactttgcacatcaaagtgttgactatgggaaagaccatgggtggagtgggacgtcaaaggaaaacttgccttttttctttttgatatctcactgtctatctcagtccatttacattgctataaaggaatgcctgaggttgagtaatttattttaacaaaatgaagtgtatttggttcacagttctgtaggctgtacaggaagcatggcatcagcctctgcttctgrtgaggcctcaggctgcttccactcatggtggaaagtgaaggagagccgttgtgctgagctcaaatgatgaaggaggaagcaagggaggggagggaggtgccaggctctttttaacaattggatctcatgggaaccagtaaagtgagaactcagtcattactgcgaggacagcacaaagccattagtgaggagccttcccccatgacccaaacacctcccgccaggccccacctccaacactggggatcacatatcaacatgaggtttgggggccaaacatccaaactacagcacagcactgtcatttacaactttgcagtaagatgaattca

SEQ ID NO: 254457 - DNA, 523 bp, Homo sapiens
  misc_feature (1)...(523): n = A,T,C or G
nnnnnnnnnnnnnnnnnnnnnnnnnnnnnnnnnnnncttagaatgatagtcttttacagaaacactaratgagacctgagacttgtccggtgaccagagaagccaagaaccccttgcatagctgtaggatcaataaatattctcgatgatgagaaaatagaaagtaaaatgaaaaatgaagtcaccgctatttgcaaggcaaaacagacagccatctcccagtgagcaaagtgtgtatgtaggagaggcactattgtcaaattctgctcccaatattccttctgatgctaatagaatcatgttttctgcctctcatttgtaaaatgggactaatacctgcccaccctgaagaatctcaggaagattaaataagacaatgtcacagcgctggacagggaggtttcattatgatgactcagggctggcaggggaggaagtggcccttctgcccttcaaaggctgttaggaagcttcttccttctccttccctcctcatttcacacccaatcttccagttctccct

SEQ ID NO: 254458 - DNA, 597 bp, Homo sapiens
cctaaatgggccaggtcactatgacacaaaacacagaaaacacattataaaattgtaaagtcctatttaacctaagattttcaatttaatagatgcattccttgaygcctgaggcttgtatgtgacacagaaaagaattgatcacaaagaactgatgtcaatgaatactgatttcaagtcaggtatataagaagctggaaagtaatcactttatcccaagtcctaacaagtagaaactgaacaagctgaaaagtcaacaagtattcttagatctattggagaagtaaggtcagcgagcaaactgctgatcccacaattgaaaagacagaaaggcaaatacaaagagtcataacttacaggagcagaaacccacgagcagaaacccccgagagaacagatgcatgggtaggaaaacctgaactgtaaatgagaaatgaatttctagagactcagtgtggcaagtctgaaagattaaaactccagggagactcagtcataggtccacctacacatttttgtgagctttatctccaggagttttagtaggttttcatagtaaatattaaataaaaagtccctcatgcctccagcaaagga

SEQ ID NO: 254459 - DNA, 597 bp, Homo sapiens
cctaaatgggccaggtcactatgacacaaaacacagaaaacacattataaaattgtaaagtcctatttaacctaagattttcaatttaatagatgcattccttgatgcctgaggcttgtatgtgacacagaaaagaattgatcacaaagaactgatgtcaatgaatactgatttcaagtcaggtatataagaagctggaaagtaatcactttatcccaagtcctaacaagtagaaactgaacaagctgaaaagtcaacaagtattcttagatctattggagaagtaaggtcagcgagcaaactgctgatcccacaattgaaaagacagaaaggcaaatacaaagagtcataacttacaggagcagaaacccacgagcagaaacccccgagagaacagatgcatgggtaggaaaacctgaactgtaaatgagaaatgaatttctagagactcagtgtggcaagtctgaaagattaaaactccagggagactcagtcataggtccacctacacatttttgtgagctttatctccaggagttttagtaggttttcatagtaaatattaaakaaaaagtccctcatgcctccagcaaagga

SEQ ID NO: 254460 - DNA, 559 bp, Homo sapiens
gattacatactgatttaaagaattatataccactgacatggtgattatactagaaatataaagcaactaaagaggtttaagtgagtttgtgaaaggaatgttccctgtaattagttagcatttacakcctggaccctgaggtatgattccacacaataagaactcaaaagactatggctatgaggttttttttccatttccccaagttctaagtataccctctctaatcagggaactcaatgtctcattataaatgcaacataatattggacaagatatttggaattaaacagtttatacatgaagagtgtgaataattaccatggagggaagggaaacgttttgtttcttattttaaaaaagtgatattttatgatgaaaaaaacttaccccattgggtggagaggaaatccactccaactctgtttgttgtgctttagaatccagcagtagtactgaaaaagaaagttgtatttccatatgttacatgaaacacttaagcacacatgtagacatttttaaggtgaatcttttcatataactatcactatatgactta

SEQ ID NO: 254461 - DNA, 559 bp, Homo sapiens
gattacatactgatttaaagaattatataccactgacatggtgattatactagaaatataaagcaactaaagaggtttaagtgagtttgtgaaaggaatgttccctgtaattagttagcatttacagcctggaccctgaggtatgattccacacaataagaactcaaaagactatggctatgaggttttttttccatttccccaagttctaagtataccctctctaatcagggaactcaatgtctcattataaatgcaacataatattggacaagatatttggaattaaacagtttatacatgaagagtgtgaataattaccmtggagggaagggaaacgttttgtttcttattttaaaaaagtgatattttatgatgaaaaaaacttaccccattgggtggagaggaaatccactccaactctgtttgttgtgctttagaatccagcagtagtactgaaaaagaaagttgtatttccatatgttacatgaaacacttaagcacacatgtagacatttttaaggtgaatcttttcatataactatcactatatgactta

SEQ ID NO: 254462 - DNA, 567 bp, Homo sapiens
tgcaatatgtggtgattgtgactggcttctttcaccttgcataatgttttcaaggttcatccaagtcgtagcatgtataaatattcaattcattcttttttatggataagtaaaatcgtattgtataccaaatttatttatccattcatatattgatgaacatttgagttgttttcaccttttagctattatgaacagtgctgctatgaacatgcatatatgtatatttatttgagtacctgtttccatttctctttggcatatattgaatggatttggatttgtttggttgcatgatattctgtatttaactttttgaggaattgccaaactattttccatagtgcctgatccattttactttcccataagcaatgtataagagtttcaattcctccacatctttgccaacatgttgttttctaattgtcatcctagggagtgtgaagtgatagstcattctgagtttgatttgcatttccctaatgactactgatattgactatcttttcatgtgcttcttggccatttgcatatcttctttggagacatgtttattaaagtcct

SEQ ID NO: 254463 - DNA, 560 bp, Homo sapiens
aatccatctactctatattttaatttgattttcagagaacccccagggtttcttgaaatattctcagagaarcaaaatattacatatacagtaatcataatttccaaatatacaaatcataaaacatttatgcatttttgcacaagatcataaaataagactacaacagaaggcaaattttatatttcaaacttactttgagtgtgcgtgtgtgtgtgtgtcaactaagttgttaggatcactgacctttgacattaatcagtttcggaaattaagagatagaaattatgaaaatcaaaagataggaaagtataaaaagtgaggtatctattaattcagaataaagaaagttatagaaaacagagtatataactgaatttaaagtacaaggctaattgtaaatgtttctaattttatctaaccatctttaaccccaattcacttcaattcatataaaccttaaatcctgaactaaaccaacatgctgaagtttagatggtagcttttgcaaacttacaccagcaaactgatacaaatgttagctacagttaataattcag

SEQ ID NO: 254464 - DNA, 591 bp, Homo sapiens
agatggagttctgggtcttttgcttcccttccatcaactaagtgaggaaggttccaacagaaacaaatgggagtgcctaaaagaaaactagcatctctttcctgrttacacaggcaacagacttggtgatctgcctgagctctgtctatctgaacagaaggagagaattttaaaaagtgcccactggagcctgaaccatcctgctggtatccatccaaaggagtccagcagtatgaggtcaaggatacacagcaggtggtaaaagccacagaaaagtctaaaaaccaaaagtggagatcaagtccctctgggccaggcctggctattgctgcaaacacagagatggtgagtgataactggatatgagactggagttttaaagagatttctgattctattaagctctgtaaaataaaacctgcaaggcactgatctagaaagaagcaaaagaaccttgggtcagcaaaatacttattcttaaatctactacaacaatgtatgtgtgatttttttaaaaagaaacttacaggcaaagctgaggggtagagggaatacttggggtggagagtaatttactcttccaggggccaa

SEQ ID NO: 254465 - DNA, 591 bp, Homo sapiens
agatggagttctgggtcttttgcttcccttccatcaactaagtgaggaaggttccaacagaaacaaatgggagtgcctaaaagaaaactagcatctctttcctgattacacaggcaacagacttggtgatctgcctgagctctgtctatctgaacagaaggagagaattttaaaaagtgcccactggagcctgaaccatcctgctggtatccatccaaaggagtccagcagtatgaggtcaaggatacacagcaggtggtaaaagccacagaaaagtctaaaaaccaaaagtggagatcaagtccctctgggccaggcctggctattgctgcaaacacagagatggtgagtgataactggatatgagactggagttttaaagagatttctgattctattaagctctgtaaaataaaacctgcaaggcactgatmtagaaagaagcaaaagaaccttgggtcagcaaaatacttattcttaaatctactacaacaatgtatgtgtgatttttttaaaaagaaacttacaggcaaagctgaggggtagagggaatacttggggtggagagtaatttactcttccaggggccaa

SEQ ID NO: 254466 - DNA, 468 bp, Homo sapiens
tcgggaggccctggcgttcgcttggaactccgcgctgcgaagaggcggggccccgccgggtgggggcggggccgggggcgtcggtcgcggcccggcggcctgcggaagctcggcggcctggcctggcctgctcgcggggaggtgcgcagactgcgcgggggcgtggcctgcgcccctgactgcgctgtcggtccggcctttgatgaggtggccgccgctggctccctgggccccagcctggttcccgcgcgggccgcggctgccttccagacgcagggcatgcgacctgttggagtgtgaaattctakgggccgggttcctccccagagcggttttatttccgactggactgtgctgcgggtctcagaggccctctggtccgttcagggtgaggacagctgagaggcctgggcccgtgagctcttgcagaggagttgacacgcagaggggctgctgtccaataaacga

SEQ ID NO: 254467 - DNA, 552 bp, Homo sapiens
ttttaaacttcctcatatctcatctcaaaagaagaatatcagaatattattacccttcagggtaatcttgccatttgtcatctgtgtcacactgkctcttttttttttttttttttttttgagatgtggtcttgttctgtcacgcaggctgaatcgcagtgatgtgaacatggctcactgcagcctcaacttcctgggctcaaacaattctcttgcctcagcctcctttgcagttgggaccacaagtgcgcgccactacacctggctaatttttttattttttgtagagacaggttctcattttgttgcctaggctggtcttgaacacctgggctcggcctcccaaagtgctgggattataggtgtaagccaccgtgcctggccggagtcccatctcttctaaaaccttattctgttaatgttaaacctcattctttcacctatatggggattttctctccatcagcctgttgtgttcaacacataaacatgctcaaacacttgcattcatagtgacattgtgccccattctggaagcattctttgttttct

SEQ ID NO: 254468 - DNA, 597 bp, Homo sapiens
cccaccatacaaatgttttagttggggattgcattactaaccaagaagttggcaacaccaaaacaagatatgatcaacttaatagatacaaaaaactatttcaaatagtgaaaatttatactcaaaataagtattgcacataaaaatsaagttcaactaactcataaagttagctcaagataatgttctatctataaaaaaactaacaatttacttatatacttaaaacgagtttttcagtggaatcatttagatgacactggcttattggttcagtaaagtttgatctttcatttttttactctcagaaattttccaagaaatcaggcatttaagtcattctacttaaatcagctttgtttatattctatttcattttataagcaattctttagtctttatgtcactaatggcatactgaaatggaggactatcattttagaattccaatctcagatgaatagagcttaaaggatacaaagtgaattctcaactatgaataacaatctaatatttcaaaccctgattttgtgatccctcaagcacttccaactatctcaataaagtattcaaaaattaatcttattttaatgttca

SEQ ID NO: 254469 - DNA, 537 bp, Homo sapiens
atcctctcttatactttaaatcatctgtagattatttataatacaatgtaaatgctatgtaaataattatactgtattttttatttttagtatctttattgttatttttccaactattttcaatctcctattgttttaattcatacatgcggaaccatggatatggtaggccctctatactgatagatgctataacatgaatgaacctygaaaacattatgctaaataaatgaagccagtcacagaagaacacatattttatgattccatttacatgaaatgtctagaagaggcaagcccacagagccagaaagtagattaaccattgcttacttaggagctgggagagtggagaaaaatggggcaagagcagttgactgctaaaggatatgggctttcttgttggaatgatgaaatattctaaaactgatggtgttatagatgcgtaactttgtgaatatactaaaaactatggaattgaacattataaatgggtgaattgtgaggtgtatgaatactatatcagcaaggatttta

SEQ ID NO: 254470 - DNA, 564 bp, Homo sapiens
ggattatactctctcaaaatccctaaatcattctacttctgtaattgtatgagctactctatttttcccgtgactttttcctattgcccaagtttggcttttcttgacagcaggattctactttgttggatgctctttgaaaaagtctrtatttaatggtttttagaaaggttgtagctttcatccagcatttgcaggctctcagcttttgcttaaggatgaatgcgtctcaacacagtctcttctctttgtgatttccccaaacatcttaacatctgaagatccctggaagtgacgagcattgagaattcatcggcagtcatagctaagtcatggaaaaccaggattggcagaccctttacggagaacggctaactgcttctccaacatttcagttattgcagttccctctccttatatcaactcagagcccacccaggaacagacactaatactcaccaagctgcttgcattttgtccaaccgctagtttgagtattaaatcaagtcatgacatttatttccagtttgccagttttgtttctactttctttttaaagcagct

SEQ ID NO: 254471 - DNA, 611 bp, Homo sapiens
gttatcttttgagtaacattcacttattcacttcctgaacatttaatgatttccaggcactgggttttcattcataaaagagcatagtttttctccttaaaaaatgtgtaatgaatcaggtcaatagatgcacaagaggaaattaaattgtaatttaatagagatatacacatgaaccctgttagaataccctttaaacgtcaagcactaccctactcacaaatattttaacaccatgaacacttagaactctcttcatcacattgatcatgtgtctactgtgtgcaaagatacgaaagtgtatctgaattggaacataatacatttagctcaaatagagatattctatataataagacattaagtcatggaagaaaaacatctaggcatttgaaattattcagtagccactagggaaccattgatggttgtagaggaaagatacaggataacactgtcttttagaaagatttattggacagagctrtgtagggtggcctagaagacggaaagcaacatgcatataggaagactaagtgggagcctcactgcatggtagatcagacgtgtcaacagagccctgcctgagggcaataggagaagaatttaat

SEQ ID NO: 254472 - DNA, 583 bp, Homo sapiens
gcatataggaagactaagtgggagcctcactgcatggtagatcagacgtgtcaacagagccctgcctgagggcaataggagaagaatttaatggatggaagttagctttgaaagaaaaatctataaatctggctgagaaattagcccacatgagatgagaaaattgcttggtgtttaactttttatttcctccatttgtgtttaggttcatacacatgcacatgtgtgggtgactgtgtatatatgtatgtgtgtgttgtatcattttctgcatatatcaygctatatctaggaaaagtactaattctaataacgttatgttaaattgtttgtattttacacacatgtttaaaacaatccaaccatatatgaattctaatgtattttttggagagaattaaaaacacaccttttttggtgtgaaattttggagacagctctagactatgtggaaaagactgagtttgctgaaagttgaagaatgtcttcagagtgtgagtggtctctgctccgggtgattcctgcccctctttcttatgggggagaggtcatgcttctacttttctttggctaattggtaagt

SEQ ID NO: 254473 - DNA, 570 bp, Homo sapiens
taattcaacaaatatttatttgaactcttgctgtagggcaggaactcgactggatacataagatggatggtttctttcatcaaataacttccaaggtagccagtgtggtaacacyagacaaaccaatagttatgaaacaaggttacgtagtagttacccccttatctgaagttttgctttctgaggcttcagtcacctgtgatcaaccataatccaaaaatattaaatggaaaattccaaaaataaacatttcattggtgttaaatttgcaccttctgagtagcatgatgagatcttttgccatccctcctgggacatgaatcatcccattgtccagcatagcaacgctgtctgcactctccacccacaagtcacttagtagacccctcagttaccaggtatttggtgagagagaaagaccacattcacataccttttattacagtgtgtatattgttctaattgttctattttatgattagttatgatgtcttagtgtgcctaatttgtacattacactttatcacaggtacgtatagggaaaaacgtagtttctgtggagcatagtac

SEQ ID NO: 254474 - DNA, 570 bp, Homo sapiens
taattcaacaaatatttatttgaactcttgctgtagggcaggaactcgactggatacataagatggatggtttctttcatcaaataacttccaaggtagccagtgtggtaacaccrgacaaaccaatagttatgaaacaaggttacgtagtagttacccccttatctgaagttttgctttctgaggcttcagtcacctgtgatcaaccataatccaaaaatattaaatggaaaattccaaaaataaacatttcattggtgttaaatttgcaccttctgagtagcatgatgagatcttttgccatccctcctgggacatgaatcatcccattgtccagcatagcaacgctgtctgcactctccacccacaagtcacttagtagacccctcagttaccaggtatttggtgagagagaaagaccacattcacataccttttattacagtgtgtatattgttctaattgttctattttatgattagttatgatgtcttagtgtgcctaatttgtacattacactttatcacaggtacgtatagggaaaaacgtagtttctgtggagcatagtac

SEQ ID NO: 254475 - DNA, 570 bp, Homo sapiens
taattcaacaaatatttatttgaactcttgctgtagggcaggaactcgactggatacataagatggatggtttctttcatcaaataacttccaaggtagccagtgtggtaacaccagacaaaccaatagttatgaaacaaggttacgtagtagttacccccttatctgaagttttgctttctgaggcttcagtcacctgtgatcaaccataatccaaaaatattaaatggaaaattccaaaaataaacatttcattggtgttaaatttgcaccttctgagtagcatgatgagatcttttgccatccctcctgggacatgaatcatcccattgtccagcatagcaacgctgtctgcactctccacccacaagtcacttagtagacccctcagttaccaggtatttggtgagagagaaagaccacattcacataccttttattacagtgtgtatattgttctaattgttctattttatgattagttatgatgtcttagtgtgcctaatttgtacattacactttatcacaggtacgtatagggaaaaacrtagtttctgtggagcatagtac

SEQ ID NO: 254476 - DNA, 482 bp, Homo sapiens
ccttgcttcattttcttgaggatttacagtcgaaataggatagggatgtgtcagaaacacccttaaaaatagcaaaacttcatgacactgtcattcaacaaataagtacactttggaaagtggtgatttcatgaaagataaacaaacagagcatgcataaactcaatgcacacaagcacacacacgtgcagaaacaaaaatatggtaaaaggaaaagaaagatggatagagcaaaattataaaatatccaggatacaaggaaggcaaaacatgagaaataaccttcttttggccttctaagtagatagaaagctctgtggtgtaggatcaggcctgggagctgtaggcctagccaactcagtttctgcacaaagccctccaagcctctggcatgtagtgcagaggacttagtctctctacagcttcygctttgtagggaagtcttgtgatgcagcctcatttttctttcagttgtgttacct

SEQ ID NO: 254477 - DNA, 599 bp, Homo sapiens
tccctgtttcacatatttaataccattaaatttgtctaaatttataattttactgtgatctcagtaaagscatcattatattttaaagcagtggtcctcaacctttttggcaccagggaccagttttcctgaaagacaatttttccgcagacagggggtggcgaggatcgtttcaggatgaaactatttcacctaagatctgcaggaattaagttagattctcataaggagaggaatctagatccctcacaggtgcagttcacagtagggttcctgcttctaagagaatctaatgcttcagctgatctgagaggaggcggagctcgggcagtaatgctggctcacctgctgctcacctcctacccaggtcacttacctgctgttcacctgcagcccaggtcctaacaggtcacaggtacaagtctgcaggcctgggattggggaacccttttttggaggaaacacgaaaaataattctaaatttatttaaagagaaaaataagaagaatactgaaatttttttaaaaaaagaagtcataaaggaaagcttattccaactgataaaataatgttctaaaaaccacagtaattaaaacagg

SEQ ID NO: 254478 - DNA, 599 bp, Homo sapiens
tccctgtttcacatatttaataccattaaatttgtctaaatttataattttactgtgatctcagtaaaggcatcattatattttaaagcagtggtcctcaacctttttggcaccagggaccagttttcctgaaagacaatttttccgcagacagggggtggcgaggatcgtttcaggatgaaactatttcacctaagatctgcaggaattaagttagattctcataaggagaggaatctagatccctcacaggtgcagttcacagtagggttcctgcttctaagagaatctaatgcttcagctgatctgagaggaggcggagctcgggcagtaatgctggctcacctgctgctcacctcctacccaggtcacttacctgctgttcacctgcagcccaggtcctaacaggtcacaggtacaagtctgcaggcctgggattggggaacccttttttggaggaaacacgaaaaataattctaaatttatttaaagagaaaaataagaagaatactgaaatttttttaaaaaaagragtcataaaggaaagcttattccaactgataaaataatgttctaaaaaccacagtaattaaaacagg

SEQ ID NO: 254479 - DNA, 605 bp, Homo sapiens
tagtaataatagtacttgaaagaactgtgtagggtgtcatgggcatttatttatctcaaaggtattcaccaccattaaaactccattcaggggtcgcaagacgaacttgtggtcatctccagggggtgaaggttggaaagtggaacatcctagcttaattttaatagacaaggaaatgcttttttgtagttgattctggtcaggaggctcatctcagctcaaatccttgatgtcatcactaactctgagaggttgagtacaaacttttgacataccttacctcagtttctccagaaagtattaataataggataaaatattttggaatagaactctaaacattggcatagtgcacaaaatatttgtatctatagagatattgcctttgaattagttcatttggttctgtaacaatactgcctcaatgttcaataaaagtggatgttgaaactgatcattagatagagtttgggcttatgtttttccaattctgggtttcaattatccatgttatatttgtcttcttttatttcagaaaatcacaaattagcaataattacccaaytctttttgaataaccactcaaaaatagagcctaaaactaa

SEQ ID NO: 254480 - DNA, 566 bp, Homo sapiens
gaatattagtcagccttagaaaataagaaaattctgtcacttgcaataacatagataaacctggaagactttacgcaaagtaaaataagccagacacgcaaacataaatattgtatgatctcacttatatgtagaatctaaaaaagtcaaactcatagaaacagagtagaatggtagttaccagggttgtgtgtggtggagttggcgggagtggaggatatgttggtgaaagggaacaaactttcacttataaagtgaatacgttcyggagacctaatgtacaacatgctgactacagttactacaaatagattgtaaacttgaaatttgttaagaaaatagattttaagtagcctcaacacacatccaggaaaggcaactatgtgagattatggatatgttaattaacttgattgtggtgatcacttcacaatgtatatcaaaacatcacattgtatatcttgaatatatatagtatttactttttaattatacctcactaaagctaaaaataataattatttggtccccaaaacaactatgtgaggtaatgcgattattatttc

SEQ ID NO: 254481 - DNA, 566 bp, Homo sapiens
gaatattagtcagccttagaaaataagaaaattctgtcacttgcaataacatagataaacctggaagactttacgcaaagtaaaataagccagacacgcaaacataaatattgtatgatctcacttatatgtagaatctaaaaaagtcaaactcatagaaacagagtagaatggtagttaccagggttgtgtgtggtggagttggcgggagtggaggatatgttggtgaaagggaacaaactttcacttataaagtgaatacgttctggagacctaatgtacarcatgctgactacagttactacaaatagattgtaaacttgaaatttgttaagaaaatagattttaagtagcctcaacacacatccaggaaaggcaactatgtgagattatggatatgttaattaacttgattgtggtgatcacttcacaatgtatatcaaaacatcacattgtatatcttgaatatatatagtatttactttttaattatacctcactaaagctaaaaataataattatttggtccccaaaacaactatgtgaggtaatgcgattattatttc

SEQ ID NO: 254482 - DNA, 566 bp, Homo sapiens
gaatattagtcagccttagaaaataagaaaattctgtcacttgcaataacatagataaacctggaagactttacgcaaagtaaaataagccagacacgcaaacataaatattgtatgatctcacttatatgtagaatctaaaaaagtcaaactcatagaaacagagtagaatggtagttaccagggttgtgtgtggtggagttggcgggagtggaggatatgttggtgaaagggaacaaactttcacttataaagtgaatacgttctggagacctaatgtacaacatgctgactacagttactacaaatagattgtaaacttgaaatttgttaagaaaatagattttaagtagcctcaacacacatccaggaaaggcaactatgtgagattatggatatgttaattaacttgattrtggtgatcacttcacaatgtatatcaaaacatcacattgtatatcttgaatatatatagtatttactttttaattatacctcactaaagctaaaaataataattatttggtccccaaaacaactatgtgaggtaatgcgattattatttc

SEQ ID NO: 254483 - DNA, 565 bp, Homo sapiens
ggtccaccctaagcttcctttttttggtagtcagaggagttatttatggcaggagaaagagcgcctcctcttctctgtgagatgttgaatagggctgaaaatttttacacttgcagttagagtttagacaagattagttaagatgtttgaaatagcatgaactgctattcaggattaagcaaccccaattataggtcaatccttgaaacgattaaaagacattaaacatcagttttattagatgtcyaagtacaggagaagggtcatgaattagagacaataattcttttggccagggctaaagacaaactttttccattagaaatcatgttgaggctcaactgactgactcttatgcctgtggtcattagaaagtcctcgggggcagcatttctgatagttgaggccattctcagtttagagcaaaccccacacaagcaaataaaaagcttaaggctctgttcactaggacagcacttctgtaggatcccaatctcatggtgactcaacttggacaaggtcaaatttttgttccttatccattaaggagactgctgccgatgga

SEQ ID NO: 254484 - DNA, 565 bp, Homo sapiens
ggtccaccctaagcttcctttttttggtagtcagaggagttatttatggcaggagaaagagcgcctcctcttctctgtgagatgttgaatagggctgaaaatttttacacttgcagttagagtttagacaagattagttaagatgtttgaaatagcatgaactgctattcaggattaagcaaccccaattataggtcaatccttgaaacgattaaaagacattaaacatcagttttattagatgtctaagtmcaggagaagggtcatgaattagagacaataattcttttggccagggctaaagacaaactttttccattagaaatcatgttgaggctcaactgactgactcttatgcctgtggtcattagaaagtcctcgggggcagcatttctgatagttgaggccattctcagtttagagcaaaccccacacaagcaaataaaaagcttaaggctctgttcactaggacagcacttctgtaggatcccaatctcatggtgactcaacttggacaaggtcaaatttttgttccttatccattaaggagactgctgccgatgga

SEQ ID NO: 254485 - DNA, 633 bp, Homo sapiens
ttacattgtgcaccctgcttatagcagaggtgggggtgaatagacacagatcctcccctcagggagcttacaatcccgcagaaagaaagatattaaagagtaataacaaacataytataaataattacaaatgataataagtattttccaagaaagctacaggttatggagaagcagtgtctggtggtctgagttatctgtcccaattagaggataccacacacattgatgccacacaaatgtcactggacctgtatgccacacaccagcacccagatgcttaggggagtgacattcaaactggaatcaggataggaagggtaacacagttcctggtagcagagaaataggtgtgaaggccctaggaaggcccaggaagatcttggcacagtcaagaaatgaaaggagcccagtatggacaaaggagagaatgccagagagagatgtagggtaagagttggagagacatgtatgaggtggccacaggcagaccttgcaaaactgaattgattttatctaagtacagggaaattttcctgtaagttctgagcagggaagtaacataaactaatggttccagttaattttttttatcgtgtgaataattgtttggaatgaattaagaatgaacat

SEQ ID NO: 254486 - DNA, 588 bp, Homo sapiens
atcactttttctctgggcaaggtacatatctatgtgacagcctctgtttataatagctaccacagagaccagacaggaggcattaaaaattaaacaagagaagagtcgatcagcttccaatcttgggtttatagacaggaaaatgcttaatgacaggtggtctctgtaccagaggtggcctctgagagacatttctcttgattttattttttaattaacttttattttcagtattttgtcccccttttctgcccccgatggaataatatttaaatgataaaaggctcaccgctgtttccagagcarcccagatcacctctccacccagctgcaaggggagggaatctttaaagatcactctgttttggaattctaatgttgccaagtggcacacatggattctcatcatatggctcccaactgcagttctttaagctaaagagtgcagttcttcacgcttccttgtgacagtctcctaattacccattctgagccctctgaaacagcattcctcctagttaaggatctctgccatcaccgcaagacaccagtgagttgactatattttattcagcatctatccactgt

SEQ ID NO: 254487 - DNA, 584 bp, Homo sapiens
gaatcctaactaccagtacctcaaagcatgaccttatttggaaatagtatctttgtaaatatagtcaagttaagaggtagtcattagggtgaggcctcatccracgtaactagtgtccttaatacaaagggtacattgtgacagagacacaaatgtgcacaaagagaagacaatacaaagactcacaaggagaatgccatgcagagatcaaggccgagatggaatgatgcatctacaagccaaagatggccagcaaaccatcaggatgtgcggagaggcattggacagagtctctttcagagcctcagaagggaccaactcagccaacaccttatcttggacttgccacctccagaactgtgagacaattaatattgtttttaaggcccccatgtctatggtattttgctatggtagctccaggagactaatatactgataccacatcgctgttgaccaaagcagtcacagagccagcccagagcatcaagaaaattcttggccatctttaaggaccacagatatggaagcagaggccatggctatcttgtttttcactacttcaccactgcctggtacatgag

SEQ ID NO: 254488 - DNA, 525 bp, Homo sapiens
gtttctttttagaactatgggattggtctcaaccaatataactaaattattaaagtatggagtggcactagatgcagagaacatttcttacccaaagtgtcatgatatcaaagatgaccaatgttctgggtactagaaatgtagtggagaaccagaaagacaggatccttctctcctgcagactatgttttgatgaggatgatagacatgatggaaacactttactaataaatacctgtagtgctactagggagaagcaacaggatccgtagaaaattccaatgacaacctgagatrccaacaacccaatattttgcaaatagctcacatatattgccttcagttgacttaatttactgcttctggaatcatatacttgtcttctaaggtcttcaaatttcttcttgaaaacaatcaagcaaaaacagtgatcattctcttcccttcagatatcaaagaagagatcattattaataaattctggaaggataagtaaaactcagaagagatctatgctgcttaaag

SEQ ID NO: 254489 - DNA, 590 bp, Homo sapiens
gttattaatattagccctttgtagtactcctgataaatgaataacaccctggactttcaaatagtggcactgggaaaaaagtaagtagaattgaragatggtgaagagataaagtgagcaggacttaacaattgctggactatgggatgagggagcgtagagtcaaggatggctctcagtccctaggtctccaggtctaggaagatggtgttacctttcactaagggagagaactgtaagaactgctgtgagaggaccacaggagtccagttttagcgctgaatctcaggtgactgaaaagcatccaaataggaatgtcagcaaggtaatggaatatatagttctcagagaagtaacacactgtacttgagatgtacacaagttaaaggcaaacattgtatatgaaaagtgatcaaaactacatgcttcaagaaattaaaccttgaagaactcaacagttaatgtcatatatagaaaggcaagtcagttaagagtgtaaatagaaacgggtaaatacagaggagaaaaacagtaagcatggactgtcctagaattcagtggcagagcatactgcaagaaagctgatgtgg

SEQ ID NO: 254490 - DNA, 442 bp, Homo sapiens
ctgaagttggggccacccaacctgccactaccatcacaatgagcacacacacacacacacacacacatacacgtgtcacctgtgggcctggggactggcctgcccagcctgtcacaaccactgccaacaccactgtggagctcttgggactcagaggttagtcctaccactactactgcttcacccatgccatgccaactgcccaagtgcccaaggacacayttaccaccagcccacgactgccactatcatcacccaaacaagctgcctggaggcccaagaattggctggcttgggtctgctagcacagtgccagcatacactgtcctagggcccaaggacaggcccatctggtgtccttttcacaagcaaaagttcaccacagccttccctaataaccacaacctaggccactgacgaaaatcacagacaccagtgaagc

SEQ ID NO: 254491 - DNA, 580 bp, Homo sapiens
attataaaccttattaacttagcttccctttgacaatattcaatgacttaatcactcagaaaccgctagctaacatcaagacatcaataagaaacttgcatctgtgtgamcccttttctgaaaaaggtcattttcctctaaaagtattatacttgattttattattttgctattaatgatcctcttaacacaacaaataagatttactttgtaatccaccccatttgcttcaaatgggcaaaaccatctggtccactcaattaattttaaggctctttgtatcacagagccagtgtctttgaatacatttctattcaatgggcatttacgctggatacttactctcaaggttcccccttttgccctttcctctgcacaagcttcctacatgttaccatccctcgccccagatacccacaggtgaaggggactggaagcccattaagctagtagcatctcatttggcatttcacttgtttcattttattccagaaggtttgtctgaaagcgtaatgacaacaaaagcagcagatttgagagattctcccaggagaaggaaaaggacagatgtacacagaca

SEQ ID NO: 254492 - DNA, 580 bp, Homo sapiens
attataaaccttattaacttagcttccctttgacaatattcaatgacttaatcactcagaaaccgctagctaacatcaagacatcaataagaaacttgcatctgtgtgaccccttttctgaaaaaggtcattttcctctaaaagtattatacttgattttattattttgctattaatgatcctcttaacacaacaaataagatttactttgtaatccaccccatttgcttcaaatgggcaaaaccatctggtccactcaattaattytaaggctctttgtatcacagagccagtgtctttgaatacatttctattcaatgggcatttacgctggatacttactctcaaggttcccccttttgccctttcctctgcacaagcttcctacatgttaccatccctcgccccagatacccacaggtgaaggggactggaagcccattaagctagtagcatctcatttggcatttcacttgtttcattttattccagaaggtttgtctgaaagcgtaatgacaacaaaagcagcagatttgagagattctcccaggagaaggaaaaggacagatgtacacagaca

SEQ ID NO: 254493 - DNA, 580 bp, Homo sapiens
attataaaccttattaacttagcttccctttgacaatattcaatgacttaatcactcagaaaccgctagctaacatcaagacatcaataagaaacttgcatctgtgtgaccccttttctgaaaaaggtcattttcctctaaaagtattatacttgattttattattttgctattaatgatcctcttaacacaacaaataagatttactttgtaatccaccccatttgcttcaaatgggcaaaaccatctggtccactcaattaattttaaggctctttgtatcacagagccagtgtctttgaatacatttctattcaatgggcatttacrctggatacttactctcaaggttcccccttttgccctttcctctgcacaagcttcctacatgttaccatccctcgccccagatacccacaggtgaaggggactggaagcccattaagctagtagcatctcatttggcatttcacttgtttcattttattccagaaggtttgtctgaaagcgtaatgacaacaaaagcagcagatttgagagattctcccaggagaaggaaaaggacagatgtacacagaca

SEQ ID NO: 254494 - DNA, 580 bp, Homo sapiens
attataaaccttattaacttagcttccctttgacaatattcaatgacttaatcactcagaaaccgctagctaacatcaagacatcaataagaaacttgcatctgtgtgaccccttttctgaaaaaggtcattttcctctaaaagtattatacttgattttattattttgctattaatgatcctcttaacacaacaaataagatttactttgtaatccaccccatttgcttcaaatgggcaaaaccatctggtccactcaattaattttaaggctctttgtatcacagagccagtgtctttgaatacatttctattcaatgggcatttacgctggatacttactctcaaggttcccccttttrccctttcctctgcacaagcttcctacatgttaccatccctcgccccagatacccacaggtgaaggggactggaagcccattaagctagtagcatctcatttggcatttcacttgtttcattttattccagaaggtttgtctgaaagcgtaatgacaacaaaagcagcagatttgagagattctcccaggagaaggaaaaggacagatgtacacagaca

SEQ ID NO: 254495 - DNA, 591 bp, Homo sapiens
aaataagttatgtttgatagcagagtaggatgactatagttaacaatgtattgtacatttcaaaatagctagaagacttgaattgttcaatgataaatacttgaggtgacagacacaccaaacagcctgacttaatctttattcaggctataatgtaacaaaatatcacatggatcccatgtaaaaagttttgtatcaataaaaaatagttttctctgtaccttagttggataatttgtttaattaatgaaagaagataaataastgaagggattcatgaattagaaaattcagtatattaaaatgtgaatagattttatgtaatcccaataaaaattataaggtttctttgcagaaattgatccactgattctaaaattatgtggaaatgtaaaagtctaagaatagtcaaagtaatattgtgaaggattaacattaagatattaagatgtattataaagctattgtaactaagacaatgtggtattgacacaaggatagacagatcatagaagttagaaaagaccagaagcagacccacacatatttggtaaactataaccttaattcatatcaaaggtaacacatttg

SEQ ID NO: 254496 - DNA, 475 bp, Homo sapiens
tcataagtgctggtgtatcctacatcaagaggcatataatgtcaataattattaaagcctagattattaattcattggtattacaatataaaaatattttaaatctagyatttctcttgtatttattattgtaaacttcaaaaaatggaatatcccattctactacttggctacataatgataaaaattttatgggtatccaagattatatccttttatttatcaatttctaaaataataatttgttcaatggtatctaaagttgatcaactagatttctatctcattatgaacacagaaacttttaaaaatatatagtaaggtacaccatatattttgatatacttatcttgaatatataaattgattattatagtctagtaaattagcataagcattgtctcatatggttaccttttttttcttccctttgtggcaagagtgcctaaaatctattctcttggcaaattataga

SEQ ID NO: 254497 - DNA, 566 bp, Homo sapiens
tctgctctgccccccagatggggacctcttagatggcttcggaaggtccatctgacagtgaggcccatcaccacgactccaggcctgtgggactctccctgtctccacacgtcaggcttggtccctcataagtggcaaggggcagggaggccaagaaagaggggagggtgcagcgagtgtggatgattttggtgacagggcctgtgygtgggaaccaggagcttgacctcctgacccttcccttctgggccctcagtcctcccagaggccgcagacagcactccccttgccaagcaccaatcctgacatggcatccttctgctgctgaacgaagtctaatttacttggggaaaaaaaccttctgtggcccccaaatcaaatcactcagggagggaatggggttgaaaggaaccaggggaaataaatgtattcagcaagtgtatttttattccaataaaacttgattcaataacccccatgaatatttcatttgcaagaggctggcccctcctgcggctgccttggtcttaggccaattttgccctccctcccctgggggcagcaca

SEQ ID NO: 254498 - DNA, 585 bp, Homo sapiens
ctacctcaaaacttgacgacttaaaacaataaggacttagtgtttattattaataaatctataggtctgtagatttatttacagggtggttctgcagatatgggcaaagcttcattgagattggctgggcttggtcggtccctacagrcaactgataaattggcttgggattggcaagtctaagatgttctctcccatacatctggtggttggttggttgggtgtctgttggctggaaagacagagataactggactatgtgctgatcatcctctagcaggctagttggggcttgttcatacagagaaggcagggtccagagagagcagaagcacccaggacatcttgagatccagccgcaaaactggaacaccactgccttccactagccagagataatcacaagaccagcccagattcaagaggaggggaaatagattccatcttaaaggcagtcacacaataggactcacactgtattcatgcagtgtccacttattgatataagagctaaaaggaaattatttaggcagatagtgagggtaagagagtccttggcagaatttcccatttaacaaaaggcag

SEQ ID NO: 254499 - DNA, 585 bp, Homo sapiens
ctacctcaaaacttgacgacttaaaacaataaggacttagtgtttattattaataaatctataggtctgtagatttatttacagggtggttctgcagatatgggcaaagcttcattgagattggctgggcttggtcggtccctacaggcaactgataaattggcttgggattggcaagtctaagatgttctctcccatacatctggtggttggttggttgggtgtctgttggctggaaagacagagataactggactatgtrctgatcatcctctagcaggctagttggggcttgttcatacagagaaggcagggtccagagagagcagaagcacccaggacatcttgagatccagccgcaaaactggaacaccactgccttccactagccagagataatcacaagaccagcccagattcaagaggaggggaaatagattccatcttaaaggcagtcacacaataggactcacactgtattcatgcagtgtccacttattgatataagagctaaaaggaaattatttaggcagatagtgagggtaagagagtccttggcagaatttcccatttaacaaaaggcag

SEQ ID NO: 254500 - DNA, 585 bp, Homo sapiens
ctacctcaaaacttgacgacttaaaacaataaggacttagtgtttattattaataaatctataggtctgtagatttatttacagggtggttctgcagatatgggcaaagcttcattgagattggctgggcttggtcggtccctacaggcaactgataaattggcttgggattggcaagtctaagatgttctctcccatacatctggtggttggttggttgggtgtctgttggctggaaagacagagataactggactatgtgctgatcatcctctagcaggctagttggggcttgttcatacrgagaaggcagggtccagagagagcagaagcacccaggacatcttgagatccagccgcaaaactggaacaccactgccttccactagccagagataatcacaagaccagcccagattcaagaggaggggaaatagattccatcttaaaggcagtcacacaataggactcacactgtattcatgcagtgtccacttattgatataagagctaaaaggaaattatttaggcagatagtgagggtaagagagtccttggcagaatttcccatttaacaaaaggcag

SEQ ID NO: 254501 - DNA, 648 bp, Homo sapiens
tcagttgaatatctcatagttatacacatacttatggtcgtctttctttaaaaaaaagaaaaaggaagaaagaaacaaatctaacaataaccttaaaaagtgacaataaattcactcaagtcagtctctatataacatactattatcaatggtgtcctttcattttgatataggaagacaaaaagggagaaaaacaaacaagtaccttatttcatgtcattcaagataattttgacttttaatgcctttctgcaaaagaatgaatgatacgactggggtagtccattggttacaagtcactttggtgtattaccaagaaaaggaaaagacgggttaataaaatctcatttgggctagtccttttttctcctttcaggaaaataaagctgaatcttatatttaataatagcttaacctttaaacttacaaagagaaacaaccaatgaaatcttccctcatagactaacgagagtttgtagaaaaaascacagagcaatgccccaaggaaatcatcaatgaacaagaatcaatctgcatcaggacctactgacttgattcttgagcacttaagatcccaggatgatgaggttctgaaggaaaaaggctcaatttgactggggaaaaaaaaagccttattttctgcatcag

SEQ ID NO: 254502 - DNA, 648 bp, Homo sapiens
tcagttgaatatctcatagttatacacatacttatggtcgtctttctttaaaaaaaagaaaaaggaagaaagaaacaaatctaacaataaccttaaaaagtgacaataaattcactcaagtcagtctctatataacatactattatcaatggtgtcctttcattttgatataggaagacaaaaagggagaaaaacaaacaagtaccttatttcatgtcattcaagataattttgacttttaatgcctttctgcaaaagaatgaatgatacgactggggtagtccattggttacaagtcactttggtgtattaccaagaaaaggaaaagacgggttaataaaatctcatttgggctagtccttttttctcctttcaggaaaataaagctgaatcttatatttaataatagcttaacctttaaacttacaaagagaaacaaccaatgaaatcttccctcatagactaacgagagtttgtagaaaaaagcacagagcaatgccccaaggaaatcatcaatgaacaagaatcaatctgcatcaggacctactgacttgattcttgagcacttaagatcccaggatgatgaggttctgaagkaaaaaggctcaatttgactggggaaaaaaaaagccttattttctgcatcag

SEQ ID NO: 254503 - DNA, 602 bp, Homo sapiens
agggaagaaaggagacgggacttaaaggaagagagagaaagagaaaagaagggagaaagaaagggaagaaaggaagggaatattttttgtcttagaaagatgtattgtttatacaaatgaaaagatgacaatctactgagaagagacacttgctgagaaactagattcttcatttgttagcacactaaaaaacgaactttactattaaggttatgaaatgcaggtatcttgggctgtctcaataattgataaattcaacaaacacctaagtagacattaatctcataccattgtattttatcttcataacaagcctctgaggcagtaaaattgaaactcaaaggagtaagttgatcctgatcaaatagctaataggggaagggtgtgaatgtgaacccaggtcttctgaattctaatacactccttatcccacaatactacagctatgtagagaagaaaaaaaagtacastaccaagacttgtttccacacttccaagtactgacatcattaaaatcattttttgagggttgaggcttatgttttaatctcagatttttccataaaaaaataaaaacactagcccccaccacccccaagtaa

SEQ ID NO: 254504 - DNA, 613 bp, Homo sapiens
cttactattgcactaaacttagaatgcatagtgccctcaccaccccctgcaatcttttctttcactcatttgatgggggaaaattcagtacattagatgtttccaaatatacccctattatcaacagtggccctttataaatttcaatttttaatttttgtgggtacatcataggtgtacatacttttggggtagatgagatgttttgagacaagcatgaaatgtgaaataagcaaatcatgaagaatggggtatccgtcccctcaagcatttactcattgagttgcaaacaatccaattatactctttaatcaacagtggtccttgaccagcactctgctgccacccaaaaaatgcatgagaaatggyctctccgtgagctagttatcttcttttgccatccggttctatttttatcagttcattacactccttctgacattggctaggatccaggcccttagaaactgcctggcaaaaagcactctagagagggcatgctgctacataaaatgcatctgtcaccccaatttatgcaaatcacaggcaaggaccatttttaaaattaaaaaaaaaactagtaagaactttctaatacagaagaaagaaaatt

SEQ ID NO: 254505 - DNA, 613 bp, Homo sapiens
cttactattgcactaaacttagaatgcatagtgccctcaccaccccctgcaatcttttctttcactcatttgatgggggaaaattcagtacattagatgtttccaaatatacccctattatcaacagtggccctttataaatttcaatttttaatttttgtgggtacatcataggtgtacatacttttggggtagatgagatgttttgagacaagcatgaaatgtgaaataagcaaatcatgaagaatggggtatccgtcccctcaagcatttactcattgagttgcaaacaatccaattatactctttaatcaacagtggtccttgaccagcactctgctgccacccaaaaaatgcatgagaaatggcctctccgtgagctagttatcttcttttgccatccggttctatttttatcagttyattacactccttctgacattggctaggatccaggcccttagaaactgcctggcaaaaagcactctagagagggcatgctgctacataaaatgcatctgtcaccccaatttatgcaaatcacaggcaaggaccatttttaaaattaaaaaaaaaactagtaagaactttctaatacagaagaaagaaaatt

SEQ ID NO: 254506 - DNA, 613 bp, Homo sapiens
cttactattgcactaaacttagaatgcatagtgccctcaccaccccctgcaatcttttctttcactcatttgatgggggaaaattcagtacattagatgtttccaaatatacccctattatcaacagtggccctttataaatttcaatttttaatttttgtgggtacatcataggtgtacatacttttggggtagatgagatgttttgagacaagcatgaaatgtgaaataagcaaatcatgaagaatggggtatccgtcccctcaagcatttactcattgagttgcaaacaatccaattatactctttaatcaacagtggtccttgaccagcactctgctgccacccaaaaaatgcatgagaaatggcctctccgtgagctagttatcttcttttgccatccggttctatttttatcagttcattacactmcttctgacattggctaggatccaggcccttagaaactgcctggcaaaaagcactctagagagggcatgctgctacataaaatgcatctgtcaccccaatttatgcaaatcacaggcaaggaccatttttaaaattaaaaaaaaaactagtaagaactttctaatacagaagaaagaaaatt

SEQ ID NO: 254507 - DNA, 622 bp, Homo sapiens
gttttaatttctgtagagaagaggtctcattaagttgactaggcttgtcttgaacccttagtctcaagtgattttcccttcttagtctcttgaggcactgggattacaggagtgagccaccaaccccagcttgtaaaattcttttmacaaatgaaatttcagaaccaaaatgcttaactgggcgatactaaaaaaaaattaattaaaaataataagaaacatagacaaattcctttaggagacagaaaatgtgagaagtcatttcaaagataaccataatatcaaaacctcacaaaagaattacaaaatggaaaattatatatcaacagcctcatgaacataaaatataaaatcccccaaatatagaacagacaatcagggaagacacaccatacacacacatacacacacatacacaccccataatcaaatgagatttagtccaggaaggtggcaagtttagttttacatttgaaaatcaaatcaatataattgatcatatcaacaatatgtaggataaaaaacataaattacctcaataaatacagaaaataagcatttgaaaaattcagcacccatttataataaacatatcatcaaaaagaagtataagaaaactccc

SEQ ID NO: 254508 - DNA, 622 bp, Homo sapiens
gttttaatttctgtagagaagaggtctcattaagttgactaggcttgtcttgaacccttagtctcaagtgattttcccttcttagtctcttgaggcactgggattacaggagtgagccaccaaccccagcttgtaaaattcttttaacaaatgaaatttcagaaccaaaatgcttaactgggcgatactaaaaaaaaattaattaaaaataataagaaacatagacaaattcctttaggagacagaaaatgtgagaagtcatttcaaagataaccataatatcaaaacctcacaaaagaattacaaaatggaaaattatatatcaacagcctcatgaacataaaatataaaatcccccaaatatagaacagacaatcagggaagacacaccatacacacacatacacacacatacacaccccataatcaaatgagatttagtccaggaaggtggcaagtttagttttacatttgaaaatcaaatcaatataattgatcatatcaacaatatgtaggataaaaaacataaattacctcaataaatacagaaaataagcatttgaaaaattcarcacccatttataataaacatatcatcaaaaagaagtataagaaaactccc

SEQ ID NO: 254509 - DNA, 563 bp, Homo sapiens
gtgacattggtagaaaaggtacataagcaggccaatggaaaaaatagaataaagaaatagacacacgtgtattgtcacttgatttatgacaagagcaccatacaattccatggagagagactggccttttctgtaaatggcgctctagaaactgaatggtctttttaaaataaaaagttaacctggattcctacccaatacatattttaaaaataattagaggtgaatcattatctaaatatgaagttgacatgtgcagacttctagaggaaagcttcagagagtatcttcatgaacttggggtgaatagagtgttcttgaagaatataaaagtgcattagccatcaaaggaaaaaaatgacaagacttcattaaaattaagaatttctgttcatcaaaagatgccattaggataaataataggcaacacaatggagaaaatgtcataattcttatatttgagaaggaatacatatctagaacacataaatatcacctaccaatgaatayaaaaaagataattcactttttaaattgccaaaacattggacagttgcttcata

SEQ ID NO: 254510 - DNA, 583 bp, Homo sapiens
cacaattaccatgtctttaagataccaaactcttaccaatttttttgagcaattttctttgccttctaactcactgtgcacagaaaaattacttatctsgacaccctacttgttcttcagccctggggaaaggtaagaggagaggactctccagatgaaggaagagcattgcaaggcctcacaatccaagaatataggctgcatatatttaccatccctccaagaagaagcctttccattttttctagtgttgtgttctacatgcttcaatgatgaccacatggttctagaactcagaaattcaataattttgcaaaaactgaagatatagaatttaaataatatcatccattgcattttcaaatcttaaaaacctgaaattttaaacatgtcttcatatgaacaactctctctccccataatacttgcctttcctataaatatgtcaagctcagttaatcttttctgaatactagagtggatttgcaaaaagatggacattttctgctttattccagtatctccagtgtctcttaacatttttgatgccttcatcatagtaaaatggctttcatttatgact

SEQ ID NO: 254511 - DNA, 583 bp, Homo sapiens
cacaattaccatgtctttaagataccaaactcttaccaatttttttgagcaattttctttgccttctaactcactgtgcacagaaaaattacttatctggacaccctacttgttcttcagccctggggaaaggtaagaggagaggactctccagatgaaggaagagcattgcaaggcctcacaatccaagaatataggctgcatatatttaccatccctccaagaagaagcctttccattttttctagtgttgtgttctacatgcttcaatgatgaccacatggttctagaactcagaaattcaataattttgcaaaaactgaagatatagaatttaaataatatcatccattgcattttcaaatcttaaaamcctgaaattttaaacatgtcttcatatgaacaactctctctccccataatacttgcctttcctataaatatgtcaagctcagttaatcttttctgaatactagagtggatttgcaaaaagatggacattttctgctttattccagtatctccagtgtctcttaacatttttgatgccttcatcatagtaaaatggctttcatttatgact

SEQ ID NO: 254512 - DNA, 572 bp, Homo sapiens
ttgccccttgtatgcccccttttttattttaatcattttccatacttttctttcttacctttgtaagaaaccaaaattacccttgggaagacaaaactcatattgcractttaagaggtgtaaaaaaagctgggtcatcgtgggagttgtgagactgtttggctccaaaccgggtgctaaaacaattccaaagcacttgggttctgcgtctttgtgaagatcatcagggcactcttgcgtgctaatttaattctaacggttgtatgtccaggtctctgtgaaccacgcagttctttcagttaaacagaatgaaaattggagctgaatatcgagtcaaggagtgtgaaactagtgagccacgatggtcctagaaaaagccaagaatataacatttgaaagcacaaaggcacataggaggacatccagtgagtaaggctacaaatgcccttttgcgccaaaggaaaaataaaactgaccattaaaagagttattgcaaggtcttgagcttgtctaaatcgtttctcccttaactgaaaaatagtcgattagaggcaggaagcaagcaagttgct

SEQ ID NO: 254513 - DNA, 572 bp, Homo sapiens
ttgccccttgtatgcccccttttttattttaatcattttccatacttttctttcttacctttgtaagaaaccaaaattacccttgggaagacaaaactcatattgcaactttaagaggtgtaaaaaaagctgggtcatcgtgggagttgtgagactgtttggctccaaaccgggtgctaaaacaattccaaagcacttgggttctgcgtctttgtgaagatcatcagggcactcttgcgtgctaatttaattctaacggttgtatgtccaggtctctgtgaaccacgcagttctttcagttaaacagaatgaaaattggagctgaatatcgagtcaaggagtgtgaaactagtgagccacgatggtcctagaaaaagccaagaatataacatttgaaagcacaaaggcacataggaggacatccagtgagtaaggctacaaatgcccttttgcrccaaaggaaaaataaaactgaccattaaaagagttattgcaaggtcttgagcttgtctaaatcgtttctcccttaactgaaaaatagtcgattagaggcaggaagcaagcaagttgct

SEQ ID NO: 254514 - DNA, 376 bp, Homo sapiens
gtaacctttcagaatattttgctttatggttttatcatagttgcttttttmtccccatgaatagagcaagaccttcagaataaattgttctcaaataagtaatgcaatattttatgttctggtcttttaagaaatctttactcaattctgtgatgtattgaaagatatagaatattgtaaaataacagatgacttgtggtacacttcagtgaaatttaaaactccacaattgtttgcataaaaacatcaaaacagagaggaaacatagtatggtgttatcttaaagccgcaggagtcatcaaaatagtccagttagactcaaaaagggaccaataattattttccagtaaccttgtatactcggccagtgctaaat

SEQ ID NO: 254515 - DNA, 376 bp, Homo sapiens
gtaacctttcagaatattttgctttatggttttatcatagttgcttttttatccccatgaatagagcaagaccttcagaataaattgttctcaaataagtaatgcaatattttatgttctggtcttttaagaaatctttactcaattctgtgatgtattgaaagatatagaatattgtaaaataacagatgacttgtggtacacttcagtgaaatttaaaactccacaattgtttgcataaaaacatcaaaacagagaggaaacayagtatggtgttatcttaaagccgcaggagtcatcaaaatagtccagttagactcaaaaagggaccaataattattttccagtaaccttgtatactcggccagtgctaaat

SEQ ID NO: 254516 - DNA, 554 bp, Homo sapiens
gtggtgatgtgtgcctgtagtcccagctactcgggaggctgaggcacgagaattgcttgaacctggggggaggagtctgcagtgagccaagatagtgccactgcactccagcctgggtgacagagcgagactctatctcaaaaaaaaaaaaaaccttattttcattagagactactcagcgatagctgtgttctttcataagacaaaataattatcagctgagaacattatgtatgtgaaagctggagggtatttgtgttccctcataattcatatgttgctaccacgtctccagtgtgagggtatttgacagtggggcctttggaacatgattaggtcataatggtgcagccctcccaaatagtattagtgcccttatcaaaaaacaccccagagtgscccctcaccccttttgccatgtgaggacatagagaaaagatgaccaactctgaactagagagtaggtcctcaccagacacaaaatctgttagcacctcgaacttggacttccagcctctagaactgtgagaaatagatttcatttgtttataagc

SEQ ID NO: 254517 - DNA, 569 bp, Homo sapiens
tctttttgacaagttaggaaagtgctgtcggtgttgtccatgtcctcctctcctcccgttttagcttaagtctgggagagatatcaagggctgccttacatatggagagtytgtagtggaccaaactggcaggcacccttgcagtatctgtgtcattcacacatcttctgtaatctcctcccttttgtccatatgggacagggactgtggaactatgggcatttattgagtgctgactgtattcctggccctgtgctgggggggttaaattattgtgtttcatcttcagttaatgatctgtacattatttctactttcccaataagaaagcagtctcagagtattgccaaaagccacacttagtaagtttcaagggtggcatttgaaagtagttatttctaactccatgaatgatgaaagtgaaagacaaaaaattagaacacaggcttttagggtcttctcagggaggcatattggctccaaccactgagttacatttcactggagccctgggaagctaaaagagccagggtgggtccaagagggagcttgaagctagaaattctatc

SEQ ID NO: 254518 - DNA, 632 bp, Homo sapiens
atactgggcgtgaatatgaaagatttaatctctccttgagtaggagctgacttcaaatacctctgtgatgatttgatagttttgttttttagaaaaagacttcaatgactactaggcttcctcccaggagtgcctggtgtcagggggctgaagctcagaaagcaaatcagggatgatcagcttacacatcagttgttgcttggaattgcgcttccttgcacggtttccaatatccttgatgggtttttatgaggtttattcacacagtaattggctgaatattgttatctgaaacagatttccaagtcattattgcacgttaatgaggctgctgttctgcaattagatcagccacgttagatattcttgaatggaatggcaaagtgaaaaagacacctaagtcgtaaatatgtttcagagattcgcagtgatggtaggatgtgctttgagttttggggaaactgtacacataaaaatgaattaattaattaattaatttttgagacagagtctcgctctgttgcccaggctggagtgaagtggcgtgatctcagcccactgcaacctctgcccccgctgggttcaagygattcttgtgcctcagcctcctgagtagctgggattacatgcac

SEQ ID NO: 254519 - DNA, 617 bp, Homo sapiens
tctgtctggattcttcccatgtctataatgcttccactgtaggagaatcaattttatccttatttttaacatacctcaataactctgtggtgtgtggcccttagcaggacagacctgcctcttttttctgatctttgcagacttctgaagctcatttcttacacacaacacctgtgtagttctttcttttcaacggcgatgggtaatgcgtagctctctgaatgctccttctctctttgccttggtaactttacacatgccactcctggctgtagtgccttccccattcccttaatttctactcatccttgaagatttaatttgcttctcatctgcaaagtcttcacagatcctgcctctgcccctccttttccattcctatccccaactccaggccaacatgaaacctttatttgtatttctgaaatgctctgtgtacctctctccggtgccattgtcatgcctgtgtcatttcttggtctccttcctgttgcccccactagatgctgagctcctyaaaggcaagagccgtgtcttagtcagctctatattcccaggcttagctctgaaaacataataaatgtttagtggaagaagataaggaaatatgttgtata

SEQ ID NO: 254520 - DNA, 617 bp, Homo sapiens
tctgtctggattcttcccatgtctataatgcttccactgtaggagaatcaattttatccttatttttaacatacctcaataactctgtggtgtgtggcccttagcaggacagacctgcctcttttttctgatctttgcagacttctgaagctcatttcttacacacaacacctgtgtagttctttcttttcaacggcgatgggtaatgcgtagctctctgaatgctccttctctctttgccttggtaactttacacatgccactcctggctgtagtgccttccccattcccttaatttctactcatccttgaagatttaatttgcttctcatctgcaaagtcttcacagatcctgcctctgcccctccttttccattcctatccccaactccaggccaacatgaaacctttatttgtatttctgaaatgctctgtgtacctctctccggtgccattgtcatgcctgtgtcatttcttggtctccttcctgttgcccccactagatgctgagctccttaaaggcaagagccrtgtcttagtcagctctatattcccaggcttagctctgaaaacataataaatgtttagtggaagaagataaggaaatatgttgtata

SEQ ID NO: 254521 - DNA, 616 bp, Homo sapiens
agtcaatgaccaataaatagcctctatttgtacataaaagtataagaataaggaattatgccttttttaccctttaggactgaataaaggactggaacttttggccgctggcctttggagcccctccatggcctggacattatatcttgaaaatgtttgtttttatagcagtgcttgttattctccagaataacaccagcttttgagctagcgaaacragaggcaaatcctggctgtgcaactcagcctctggtgaccttagataagttctttaacgttaacactctgaacttcagcgtccataactaaaatgaggacaactcttgagtggtggtgaatgagcctgccacgctcctgacattaggaggtgttcagctaatggtcgctgccctgcccatccccttctgtgtatcttacaaatagttgtctcctccttttgtgttaagtgttgatccatctgagcattgtcaatgtcaattatgtatcttgtgggttgtcctttttagttctgatctactttttttttttttttaaagcctttgctgtcttttctgttccttcccgtggttgactgattagtaatgtgtcttctgtcaccttcctatagaacaggtga

SEQ ID NO: 254522 - DNA, 616 bp, Homo sapiens
agtcaatgaccaataaatagcctctatttgtacataaaagtataagaataaggaattatgccttttttaccctttaggactgaataaaggactggaacttttggccgctggcctttggagcccctccatggcctggacattatatcttgaaaatgtttgtttttatagcagtgcttgttattctccagaataacaccagcttttgagctagcgaaacgagaggcaaatcctggctgtgcaactcagcctctggtgaccttagataagttctttaacgttaacactctgaacttcagcgtccataactaaaatgaggacaactcttgagtggtggtgaatgagcctgccacgctcctgacattaggaggtgttcagctaatggtcgctgccctgcccatccccttctgtgtatcttacaaatagttgtctcctccttttgtgttaagtgttgatccatctgarcattgtcaatgtcaattatgtatcttgtgggttgtcctttttagttctgatctactttttttttttttttaaagcctttgctgtcttttctgttccttcccgtggttgactgattagtaatgtgtcttctgtcaccttcctatagaacaggtga

SEQ ID NO: 254523 - DNA, 561 bp, Homo sapiens
ccacctgtctgcggggctggggctcagctggtccagactggctgggctccaggccctgaggttggttcgggtccactccacatgcttcttactgttctggaaccagcaagctacatagggcatgttcacctcataatggcagaagctaaaaagggcaaaaaaacaactgccaagtacatttcaagcctcttttcctgtcacatctgctaatttccctttagccaaagcagttacaggggcaagctccaaatcaacagggcagagaagtatattcttctcatagcagacagygcttcaaagtcagggaaccaagtgcacagatacagggaggggtgaagaacttggaacaatactacagtctgataaaagaaggaaccacttgcatcaataccaactttgccaaattccatttcttttccatccacaccttttatttgctcactcacaaactgtgccaacagcttctacatgtaaaaagctaatggttagactgtgtttttggcgttactgtttcatgaatgggagaagacaacaggaaaaaggataacagtttaaaatgga

SEQ ID NO: 254524 - DNA, 647 bp, Homo sapiens
tgagggttctagtttctctacatcttcaccaacactttgtattatctgactttttgaaaataggcatcccagtgagtttgtatctcgttagttttactttacattttcctcttgaataatcatgttaagcatcttttcatatgcttagtagccatttgtatatattttctgattaaatacctattcaaatattgygcccatttttaattggattatttgtcttattattcagttgtaagagttctttatatattctagatataagatctttattatatgtatgattgcttatattttcttctagtctgtggcttgtctttttattttcttagtggtatcttttgaaattttaaattttaatgaaatctaattcatccatttttttaatggattatgatttttgtgttgtacctaagaactatttgactaacccaagtcacatagattctcccatatattttcttctagaagtttattattttatctcctgcattgtgctatattttccattttgatttaaattttgtgtgtgacataaggaaatgttctaaattcatctttttgaatgtgtatatccatttgtttagaaccatttgttgagaaaattagtccttccccattgaattgccttggtatctttgttgaaa

SEQ ID NO: 254525 - DNA, 520 bp, Homo sapiens
ataatcttttcatttttttgtgtgcaatcaaggtcttaaggaactgcggaagaaggcatatatatatatatatatacacacaaacacacacacacgtgtatatacatatataaacatacgtayacataatatatatgtgtatatataagctttctatatatatatatctatatacatataagttttctctctctctctctctgtctctctctctctatatatatatatatatctccaggctggcatttagtagtgtgatctcggctcactgcaacctgcacctccagggttcaagtgattctcctgccttagcctccctagtaactgggattacaggtgcccaccaccacacctggctaatttttgtatttttaatagagatggagtttcaccatgttggccaggctggtctcgaactcctgacctcaagtgatcctcccactttggcctccaaagtgctgggattacaggcatgagccaccaagcccggccaaacatattatattttcataactttaat

SEQ ID NO: 254526 - DNA, 589 bp, Homo sapiens
aattggcagttttaacagacgaaaaattgatcccattactcaggatagaattttccacctttttcaaaagagatgcttattaaagaggtcaggtttttttccccctcaggatcatgcatatgtaagtaagcatagctattatgtgccatctatgagaatggacgggtgagccrtaaacacaaacattcacatacagccaggtctccagcgttcctgttcaccaattacagtaatgctgatgacatatctagtttaatgcatatggcattaaagtagtcccccctcttctaggaaaatctaattacaccaaacccaagcactcaatcaaacctgttattctgtggctaaacagcctggcgttaatgcaatttgaggagatacaggccgtgactagagacgtcatgtattaacaatatctaatgggagctcctgtaggtaaatgaatatgctaacaagcaagatcactgctaaatctaatatctttaagctgtttaattccaaacagtcccttaataaatcaattgaccgggagagctgatgcccctatcaattattcaagagggcaaataaatatttcagacgatttgat

SEQ ID NO: 254527 - DNA, 299 bp, Homo sapiens
acagtaagcttcacaaataaatgttatctttgccccactgccaatcctgcaaayccacatacatcttccatccctagtctttcaagaattgagtttgaaagaatggggatctggcaggggatgtggaattaaattgaatttttattttattgtattttatactagtgatgcataacagaaaagagaacttgaacaacactataaacaaattagatttaacagacaaatatagaacactctacccaacaagagcagaatacatatttttctcaagtacatatggaatagtccccagtgta

SEQ ID NO: 254528 - DNA, 299 bp, Homo sapiens
acagtaagcttcacaaataaatgttatctttgccccactgccaatcctgcaaatccacatacatcttccatccctagtctttcaagaattgagtttgaaagaatggggatctggcaggggatgtggaattaaattgaatttttattttattgtattttatactagygatgcataacagaaaagagaacttgaacaacactataaacaaattagatttaacagacaaatatagaacactctacccaacaagagcagaatacatatttttctcaagtacatatggaatagtccccagtgta

SEQ ID NO: 254529 - DNA, 612 bp, Homo sapiens
catttctgtctcaataaaatgtctaatcaggaattcacttgtgtagaaaataaaaaatagaagtacatacccttcaagtgaagttagttgtttctgtgattttataaaatccatggacctcaagtttgagtatcattgttataaaaaacacagccattcaagccatgcatggcacaattactcattaactgggcagcttttccttcagaacacgggaatatggggacagaggccatgtgataatgttgcaggctccatgtcatggaccagtatggaaatcctagcttttcctcctctgaaattgggttactttgtccatgaaatggggatattcttgccgaactagcatgattgacatcatctcaccaaaatctcaacaaaygtatgggtacccaacaaatgctgttgatttatttcattggggtacttcagtaatgagaagtagttaatcaaccgggttagggtttgaaattggccaaatctcagaaatcaccctgatgcgacttaactcttctctgcctcagttcccttatctctaaaatggaactaatatcaatgtttttgaaactatgaaaagaattaatgcacattaagtccttaagagatttcctg

SEQ ID NO: 254530 - DNA, 522 bp, Homo sapiens
cttcttggctctctctgtgtagtgacagctgctgttaccatgtaactatcatctcacgtgaataaaggtgtttttctttcatttgaatcttatcttttgttattkgagaaaaggctcattaaactttttaaactcattgaatttagcagagagtcttaattatgtgtgactcaggcattaggggagaatgtgcataaccggaccaaattaaactgcacaaaatcatgtctttctattttaaaaatagatattttgttttcaggtaaaatccaagatagtctaaaaaggcaatagaactttaaatgactgtttattcagtcaatgactatacaaataattggtaaatgattttgaaaactatttggtgacaaaagaaaacgttccctttctaatgcaagttggaataaatcagagtacaaactgtacatttatgtgtgtatatattttatataatagaaagatatgaattaaaatgttaacaacatttatggagatggtggaattaattctttgtgctttttt

SEQ ID NO: 254531 - DNA, 521 bp, Homo sapiens
gctaacaataaattaaccaggcatagaagtaacagtgaaccatatgactttatcccataaagccagactaaaccagactaaatgaattcccgaggaatcttctacgatatcttcaaaatgctgaggatattccagtgtgttctttacataagaaaaaatgtgaaaagggcacaatcacagaggaaagcaacaaaagtcttaactcattacatttaacatatctttcgcaaagtttgcaaaatcagatgcaaacacatgctggggcccctctctgggctttctaaagcttaaacaagcgagaggtcctaaggcttaagctttatcagtttcccatgaatcagcctctgatttttgcctgtatctatgttttcatctacattgtcatctatacacatactaaaaaawatctatattttcatccatatttatgttccgtaaatcgtctcctaaccagcacagtgcccttacgcctaaaataatttctgacttatggtaagcacaagataggagtttttagaatt

SEQ ID NO: 254532 - DNA, 573 bp, Homo sapiens
tacttttccactccaggtcctttgcacattcttcactttctaccaggaatgttctctcttggcctctttccctgaagagctcaaactcatccttcaagccttagttctaattgtgcacccccagagaaatcttctcttcaacctatacgagttatcatttgtaatctcctattctaccctttccttttgcttcgaggaacttatcacattgcatcattatcattcatttgtgagattactggctcagtacttgttgcctaaactaagtttaagcaagaggacaggccctctggttcttgtttagttccatctgcaccyctagaatacagcacagtcctggcacataataaactctcgaaagacacctgttaaagaaatgcatgatgaatgaaggatgactcttttagaaatttaggttattacattcctcaccctaagctgggtgcaccatgctctccaatacattaatttttttttctttctctctcctatgaaaatgcttgagaatactctcaacagatgatttgaatactcccttggggtcaacgaaagaaagaataaaaagagaggttt

SEQ ID NO: 254533 - DNA, 588 bp, Homo sapiens
cacagatacaaggggaagggtgtcaaacttgagctcagaaaggaacaaaagaagccaggcacagccaagacactgycagggaaagggccccctagggattacctctaccagtggtgtcctcagaatacaggatttatgcctcggagctctgaacacctcactcagcagcagcttcccccaatcatctctaaccatgtcagccagctgcctgtcctaagatgtttggcatttccaggcaggagtgtctttctggaggggcttcagtcacatggcacattccaagtgacagggacctacagccatcttttatgagccactctccccctctcccatagtggtggtattatcattcttccattttgaaaatgggaaagctgaggcatagagagatgatgtagcttgctcagctatcaaatggcagagcagcccatcaataattcaaatgcaggactaagaactccaataccatattctttccactgcactgtgcccccaaagttgtgatctatgctttacatttgatattttacttactttcgtatttgtcatgaggctaagtatcctcattcaatgtaagcaaattaaatt

SEQ ID NO: 254534 - DNA, 649 bp, Homo sapiens
gtttgctgttgccccctacttctgtgcttagtgtggggcctggaatctctccatatacttccgcatgcatgagtggatgttgaagagaagaaccctaacatttagcccataycctactcccaactgggtttctatcttcagccagggcccttgcctcagtattctgtatcctcatttcatccaaaccaggcattgattgaccttctaccatgaactttggagaagccctgtgcgtggatggatctccaggacctatagcccaaacgccatgctttcgcctgtaccttcaggaactctccagccagactctggaagatcacaagctccattccctttcttggacatccacatgttggctgttgctgtgtctccctaaagcagacagcatgcctggtgaggagattactgctgctctctgctggactccatgccaccagctcttctgcctgataagataattctggaccgcagtagttatgagtagtacttcttctaaggaaaggcaatgtgaagttcctggcaagtgccagccacagtgctgttctgaagaaattctcattggaacaccttcagttacaaattaagagatataactttgtaatagtgatacctatagattgagataggaaaataaaaccatttgaaattc

SEQ ID NO: 254535 - DNA, 649 bp, Homo sapiens
gtttgctgttgccccctacttctgtgcttagtgtggggcctggaatctctccatatacttccgcatgcatgagtggatgttgaagagaagaaccctaacatttagcccataccctactcccaactgggtttctatcttcagcyagggcccttgcctcagtattctgtatcctcatttcatccaaaccaggcattgattgaccttctaccatgaactttggagaagccctgtgcgtggatggatctccaggacctatagcccaaacgccatgctttcgcctgtaccttcaggaactctccagccagactctggaagatcacaagctccattccctttcttggacatccacatgttggctgttgctgtgtctccctaaagcagacagcatgcctggtgaggagattactgctgctctctgctggactccatgccaccagctcttctgcctgataagataattctggaccgcagtagttatgagtagtacttcttctaaggaaaggcaatgtgaagttcctggcaagtgccagccacagtgctgttctgaagaaattctcattggaacaccttcagttacaaattaagagatataactttgtaatagtgatacctatagattgagataggaaaataaaaccatttgaaattc

SEQ ID NO: 254536 - DNA, 572 bp, Homo sapiens
cacgtttcattggcagcatgtgttcaataaaacctttgtgcacaggccaaaattcagcctgccagtgatttgcatggattgtgtcagccaatgttattagctaattgtgtagttaacctagtgcaagaattttattgcaacagtatatttggtacttatatatcaggaagtttttgatactcagccccgcaagccttttgaacagaggaactgggtttttaaaagcrtgtttacagttaactggaattatcactgccctgtaaattcagtgtgggggagcagtccatcagcttcgtttttaattagttgtggcaattagttggtatttccttttttctcccaggaagaaatcatgaacaaagatccaatctttcattccagttcagaaatgtgtcattttgctctttgaccaaaatgcctcccagctgccctctcctgtcctaagctcaaacagatctcaaacggttatgttcagtgataggaagacattcctagtctgacattctggtattggtgttaggctaaatgctcaggatggcatgaaatagccactgagaaatgaaaatgcccca

SEQ ID NO: 254537 - DNA, 579 bp, Homo sapiens
gccagtgctgtaactctcagtctgagactgaaggcctaagaccctggggagctgctggtataagttcttgagtgtgaaggcccaagaacctggagtcctgatgtccaaggggagcagaagaaggatgtcccagctccaggagagagaacaaattcgctttattctttctattctattgtgccccycaatggataggatagtgcatattcatattgaatgagggtgaatcttcctgactcagtccattgattcaaatgccaatcacttctagaaattcacagacatatccagaaataatgttttaccagctatctgagtaccccttaactaaggcaaattgacatctaaaattaaccatcacaatcatcatcctgattatctggataccacatgccaggaattgtgctagctcttcccatacattacacaaattaggtctccaagcctcagtataaggtaaggatccccattacaactaagaagaaacggacattcagaaagatcctttttgtatttgatagtctagtacaagatagagatatcattgcccttttcatgcaaatttattttgtttcattt

SEQ ID NO: 254538 - DNA, 566 bp, Homo sapiens
agggtagctctcattgtggcttcatgaaggctgaacagtgagcacttcagaccaatatgaattagttccagctccaaaccatctacaaaatattcatagcatttatkttaggtccaagagtcacttcctattaagtatactttgtattcccaggcaatttaggtttttccaacttcaagtagtagagattttgtctacaaaataataaaattttaaaaaatacttttttgttaaaaaaggattaggaataaatatcccaaatatatttatagagacagatgaaacagataaactgcaataatagatataaaaacagcacactggaatgcataacaggtcagcacatttgttaaaggcagatcaaatttatttcgtaaccgtgtgctcttattgaatatcaagaaatacaccggaaaggaaaattcaccaaatgcgttcaaaaaattaagcacttttcaaacacagttcaagaggctcttttcttaaaaaaatattgcccacttttctaaatcaattctttctttctttccttcttttgtttctgaaagggtgtcgctgtgtctgga

SEQ ID NO: 254539 - DNA, 566 bp, Homo sapiens
agggtagctctcattgtggcttcatgaaggctgaacagtgagcacttcagaccaatatgaattagttccagctccaaaccatctacaaaatattcatagcatttatgttaggtccaagagtcacttcctattaagtatactttgtattcccaggcaatttaggtttttccaacttcaagtagtagagattttgtctacaaaataataaaattttaaaaaatacttttttgttaaaaaaggattaggaataaatatcccaaatatatttatagagacagatgaaacagataaactgcaataatagatataaaaacagcacactggaatgcataacaggtcagcrcatttgttaaaggcagatcaaatttatttcgtaaccgtgtgctcttattgaatatcaagaaatacaccggaaaggaaaattcaccaaatgcgttcaaaaaattaagcacttttcaaacacagttcaagaggctcttttcttaaaaaaatattgcccacttttctaaatcaattctttctttctttccttcttttgtttctgaaagggtgtcgctgtgtctgga

SEQ ID NO: 254540 - DNA, 527 bp, Homo sapiens
gtcacgtgttttcattcgtgtatggaagggggcaaatttcagactgtatacatttccctttcatgggtgatttggtctactagttaccataggaccctgagagatagaaatacaaaactttgttatatattcaaccttttcagtcctaggaagaggtaaaaacacctgtgcaattatggctgttcttgagctcagggtataattggtgtgaaaaaatggacatttcctgttctggataagaggaagtggaaggcattattggtaaaccgtgtcattcttaactggtgagagattaggatcacaaatatgaggaatgtcacagaagcatggagttattttatgtgctrgtgatgtcattatacttcctcatagattttcctgggtctatctttgggccaagccagggaagttttattacatttggtccataccacccttgaaccaaaaatctcttctgcttgaagatgcacacgttgtcagtttctcttttctccagaagtcatgacagagaaaaggcaaacaaagct

SEQ ID NO: 254541 - DNA, 545 bp, Homo sapiens
ggagtgaattacttttgcttctatgtgaatatttttttacttataatattagttataaatacttatttttccttacttttctatacgagtcattagacttaggtgtgaagtcatcctagggacaaggcttttaaaaatctattgacaagattccacttccgcctgccctaatccagatgaaggaagtgagaacacaggaggaacttgccacttcatgagacaatttcattctgcagcctaaactcgttactaacgtctgtaacccttaattaattaaaatgactccagccrtgggattctgtggtgaagaggttcctcatagttacatgtattcaacctgaaattcagttaaatctgaaagatgcttaaacacacatcaatgaataaaaaatgaaaaccttgttgaattcactcagtcattggcccctttgtctcctgtatctcgtttcttcctttgggatttgacaattttctctcctaaataaaactttaaaaatacatttgttaagtacatttaaagaaggtgtcaaatgttgatgaatttt

SEQ ID NO: 254542 - DNA, 624 bp, Homo sapiens
tcccaaacccctgggccattgatcagtaccaaagaccaataggaaccaggccgcgcagcaggaggtgagcagcgtgccagcgggcattaccacccgagctccgcctcctgtccgatcagcagcagcgcattggattctcatagaaccctattgtgaactgcacatgccagggatctaggctgcctgctccatcgactgcctgatgatctaaggtggaagagtttcatccagaaaaccttttcccctcctcgtccatggaaaaattgtcttccatgaaaccattcctggtgccaraaaggttagggacggctgctgtaagtggtttgctgtatagtgtgtgttcagtaaatctgtggggttagatgcacggtttgctctgggacccatcaggctgcttcaagcacttacataaattagtcttcatatgaatttctgaaatcaaaataatagcatagctatgccagtcaaagccagtcagtttccactgccttttagttttacagatgattactttaagctcagattgcaaaccaatacaatcttaagcaaagtcttgcagaaattcgactcccatattaagtgaattcaactccatcgatatacagattagcattagaaaggcta

SEQ ID NO: 254543 - DNA, 624 bp, Homo sapiens
tcccaaacccctgggccattgatcagtaccaaagaccaataggaaccaggccgcgcagcaggaggtgagcagcgtgccagcgggcattaccacccgagctccgcctcctgtccgatcagcagcagcgcattggattctcatagaaccctattgtgaactgcacatgccagggatctaggctgcctgctccatcgactgcctgatgatctaaggtggaagagtttcatccagaaaaccttttcccctcctcgtccatggaaaaattgtcttccatgaaaccattcctggtgccaaaaaggttagggacggctgctgtaagtggtttgctgtatagtgtgtgttcagtaaatctgtggggttagatgcacggtttgctctgggacccatcaggctgcttcaagcacttacataaattagtcttcatatgaatttctgaaatcaaaataatagcatagctatgccagtcaaagccagtcagtttccactgccttttagttttacagatgattactttaagctcagattgcaaaccaatacaatcttaagcaaagtcttgcagaaattygactcccatattaagtgaattcaactccatcgatatacagattagcattagaaaggcta

SEQ ID NO: 254544 - DNA, 585 bp, Homo sapiens
tgtgtgtttgtgtgtgtaagcacacacctataggcacacacacacagtctgaagaatcacaagtccatgatttttgttccccttactgttcattttgtcactgatttttatgcatgtgctcatttacgttgcttgggggggatagagctatacataaaaacagattatcttttagagcactccagggttagtttcattttcccctcttcttttaatgaagaaaacgataggaaacataaaccgccgcccttaaagaagaaaatgcatgaaatgaaacaagtaagctttcaaaactacgcaaaacatgacaggcagacctccagcctggtgggagggctgggggtaaaatatgcacggtgcacatgcgcccagtataccctcagcacttaaagaaagataaaagtggtcttgaaagtgaatgaagttgactctcaaaaagtgggytatagatgttgaatatttaattcactgataaaagagacctgatttcctgcacacggctgccataaataaggaaaaaaaaaaacacatcttaaaagagaagcaatgagcagaaactgacctttctgtgagcaagcagatgag

SEQ ID NO: 254545 - DNA, 597 bp, Homo sapiens
aaattgaaatttaggaaaactaacagcacatacttctattctctttgcacagacccatttgttgtaggggtatgaatatatgcttgtgtgtatgtctttaaaaatgtaatgtttaatacactaacatttccgccgggcgtggtgacccacacctgtaatcctagcactttgggaggccgaggtgggcagatwgcctgagctcagcagttcaagaccagcctgggcaacatggcgaaaccccatgtctactaacaattagccgggcatggtggcaggcacctgtaattccagctactcaggaggtggagacatgagaattgcttgaacccaggaggcagaggttgcagtgagccgagatcgtgccactgcactccagcctctgtctccaaaaataaataaataattaaataaaaacatcaatatttaatgtattgtgtcggcttattctttaatgtccctaacagatttatttaacattaagcaaaagaaagtaactgctatgtgccgggcgctgtaatatttgctaggaatacaaaggtaaacaggacaagcttcatgaaccaacattttagtgagaatgagagtgtacatgcctaa

SEQ ID NO: 254546 - DNA, 597 bp, Homo sapiens
aaattgaaatttaggaaaactaacagcacatacttctattctctttgcacagacccatttgttgtaggggtatgaatatatgcttgtgtgtatgtctttaaaaatgtaatgtttaatacactaacatttccgccgggcgtggtgacccacacctgtaatcctagcactttgggaggccgaggtgggcagatagcctgagctcagcagttcaagaccagcctgggcaacatggcgaaaccccatgtctactaamaattagccgggcatggtggcaggcacctgtaattccagctactcaggaggtggagacatgagaattgcttgaacccaggaggcagaggttgcagtgagccgagatcgtgccactgcactccagcctctgtctccaaaaataaataaataattaaataaaaacatcaatatttaatgtattgtgtcggcttattctttaatgtccctaacagatttatttaacattaagcaaaagaaagtaactgctatgtgccgggcgctgtaatatttgctaggaatacaaaggtaaacaggacaagcttcatgaaccaacattttagtgagaatgagagtgtacatgcctaa

SEQ ID NO: 254547 - DNA, 593 bp, Homo sapiens
tggattgacagatgataaatgatagatgaatagatgatagatgatagagatagatggatagttgataggtaggtagatagattaattgatagggatagagagattgattgaaatattgatagacagawgatagctgatagatgaatagatgatagataaatgttagatagatatagacagatatagatagatagatggatagatagatagggatagacagattgatagattgattgatagattgatgggatagatagatagatagacaggaaactgcatagttaaaacaaatgagatgtccttcttctcagctatttagttgtcacaataaactccataatataggaggatcctcattttacagcgtaggaaaagccaggtagagggggtcaatgcctggggccgcaaagatccaggaagtcaatgtctgagcccctttgcattatgtctcctgtctgtgatacagctggaaagggctggaaggctgagaagaaatccctcctctcccatcccttatggccagagctttgtcactctcagaagacacttaacagcaggctcatatttctcatttaacccctgtacagatttaa

SEQ ID NO: 254548 - DNA, 543 bp, Homo sapiens
ggccgcggtgggaggcggggccgtgccgggtcccccgcccgcaggaggcggtggcgggggtggaggctttcctggtccgaagccgagtgcggttgggggcggtggtgggtcagcctgagccccaaacagtgccgtgaaattctccatcgtaccctccgccccggcgctgtctccgtgtctgccgttggtaattttcattggacaatgctttcaaggagtacccccccsccctttctcaaggagccgcttgtcattggatgcctcaggcaccgcctaccttttttcaacaactacttccgtcgccttatgagaacgttcaggaagtgctatttaaccttattagagtcttctgctagctccgcttgctacagtccaataaaatgacttaggcggataaagcgacaactagactaaccaataaaatattaagttcttttttgggttctgacctaccacagcgttcagagaactacatccgggtttagaggccgtacgtttgcgatatagcccaatagcagtcgttatggtgggggaggcggggcg

SEQ ID NO: 254549 - DNA, 581 bp, Homo sapiens
ggctggctttggcaaggccgagtactcacctggcagttccctcatgaggtaaaaagggccacagccagctcctgacttgtccgcgccaggaggagccgtggccgcggtgggaggcggggccgtgccgggtcccccgcccgcaggaggcggtggcgggggtggaggctttcctggtccgaagccgagtgcggttgggggcggtggtgggtcagcctgagccccaaacagtgccgtgaaattctccatcgtaccctccgccccggcgctgtctccgtgtctgccgttggtaattttcattggacaatgctttcaaggagtaccccccccccctttctcaaggagccgcttgtcattggatgcctcaggcaccgcctaccttttttcaacaactacttccgtcgccttatgagaacgttcaggaagtgctatttaaccttattagmgtcttctgctagctccgcttgctacagtccaataaaatgacttaggcggataaagcgacaactagactaaccaataaaatattaagttcttttttgggttctgacctaccacagcgttcagagaactacatccgggtt

SEQ ID NO: 254550 - DNA, 543 bp, Homo sapiens
ggccgcggtgggaggcggggccgtgccgggtcccccgcccgcaggaggcggtggcgggggtggaggctttcctggtccgaagccgagtgcggttgggggcggtggtgggtcagcctgagccccaaacagtgccgtgaaattctccatcgtaccctccgccccggcgctgtctccgtgtctgccgttggtaattttcattggacaatgctttcaaggagtaccccccccccctttctcaaggagccgcttgtcattggatgcctcaggcaccgcctaccttttttcaacaactacttccgtcgccttatgagaacgttcaggaagtgctatttaaccttattagagtcttctgctagctcygcttgctacagtccaataaaatgacttaggcggataaagcgacaactagactaaccaataaaatattaagttcttttttgggttctgacctaccacagcgttcagagaactacatccgggtttagaggccgtacgtttgcgatatagcccaatagcagtcgttatggtgggggaggcggggcg

SEQ ID NO: 254551 - DNA, 515 bp, Homo sapiens
gcaccatcttgaaaacagagattaggccatcaccagacgtcgaacctgctgtcacctcgatcttggacttcccagcctcataattgtgagcaataaatctatactctttataaattattgtctgtggtattttgttatagcagcataaatggactaaggcagcctgttcgtatattaacttggctaggctatagttccaagttattcaatcaaatactaatcaaggtattgctgtgaagatatttggtacctgtaattaaagtctrtagtcagtttaagtaaggaaaatcattctatataacaaagatggaccttcgggtgaaaatctctaaaagtagaattaggcttctctggaaaaaaaaatcattttgtggactacagcttcagcctgtgcttaagagttccagcctatcttcttgactgcctgcgctacagaagtaggagttgctaagccagccatcacaatcatgtaaaccaattcctttttcttgcaatagatttatacatatattgat

SEQ ID NO: 254552 - DNA, 597 bp, Homo sapiens
ttaaattctaaaattaatatatggttatttgtcccaggaacatacacaaatggctataaaaacacaaaataagaagaagaaaattgtgacataaagatagagaaataagtccatgaagaattaatagaattctgatgagtagagagrggcgaaggttttacaattttttaaatagttgctatttcatatttcatcaaactatcaattacatttatttatttgaaatcattgatcttttaacctatgatcttttaagaagattcaactaaatgtaattaccctggctgcaaatgatataaaaatcttcagatgcagtagaaggaagtggttatggaaatgttcctcaaagtcttttgccaatggataaaaccaaacatttatttgtctacacaaaaacttggatgatcaaaggcccctatacattataatatctgcctttctgttgtgctatttttccctcctgaaatgttatcttctcccatcttagacaaagaaacaaaaacaaaccaaacttcattatatagggatcagcttaaatatttgttacttcccgttgaagcatttattgtttatgtatggttggttatcttcttaaat

SEQ ID NO: 254553 - DNA, 527 bp, Homo sapiens
tagacaaacatgaaacaacattttaaacaatttactacatgtgtttttacattaaacttttaaaattccatatataacttttaaagaaatttattatttatttttttcaagtgacctttgtaaattaataaacacataaaggattttgttattagatttgaaatctatttaaatgaatctttcacatataacaaattcttttacaactctgtcatatatgcttgctatatgacatgtgtaatcttcgcaaagcagggttttttttcattgtttgtattgtttaccactatatcctcaggacttgaataagcatgcttatcacatggtaggtggtaataaatatttatttaattaactaacacratcacattgcttctttttaaatattaaactaaatatcattaccaagtatttataaagtgtatgtttatatagtattcatataatcctgccaggacctatgagtgctatgaatgatactaaagtccttactctgtttgtccctatgaatccattatccaatattt

SEQ ID NO: 254554 - DNA, 634 bp, Homo sapiens
ccgcccccatgattcaattacctcccactgggttcctctcacaaaacatcggtattatgggaactacaagtaaagatgagatttgggtggggatacagccaaatcatatcaagtggtataaggcatgatagtctgggtcccctgctagtgtagtttctctgcttctgtaagattgtgaacccagaaaatctgagataggtctcagttcatttagaaagtttattttgccaaggttgaggacacacccatgacccagcctcaggaaatcctgaaaacatgtgcccaaggtggttggggcacaacttggttttatacattttagggagacataagacaccrattgatatatgtaagaaatacattagctccatccagacaggtagagacaactcaaagaaacttcctccaacctccctgggggctttcatgtcacaggtaggtgagagacagatagttgcattcttttgagattctgataagtctttccaaaggaggcaatcagaatacacgtctatctctgtgagcagagggatgactttgaatagaatgggaggccaattttgtccggagtggttcccagcttgaaggggcccaagatatatttccttccacaagattcattatgtataacttc

SEQ ID NO: 254555 - DNA, 634 bp, Homo sapiens
ccgcccccatgattcaattacctcccactgggttcctctcacaaaacatcggtattatgggaactacaagtaaagatgagatttgggtggggatacagccaaatcatatcaagtggtataaggcatgatagtctgggtcccctgctagtgtagtttctctgcttctgtaagattgtgaacccagaaaatctgagataggtctcagttcatttagaaagtttattttgccaaggttgaggacacacccatgacccagcctcaggaaatcctgaaaacatgtgcccaaggtggttggggcacaacttggttttatacattttagggagacataagacaccaattgatatatgtaagaaatacattagctccatmcagacaggtagagacaactcaaagaaacttcctccaacctccctgggggctttcatgtcacaggtaggtgagagacagatagttgcattcttttgagattctgataagtctttccaaaggaggcaatcagaatacacgtctatctctgtgagcagagggatgactttgaatagaatgggaggccaattttgtccggagtggttcccagcttgaaggggcccaagatatatttccttccacaagattcattatgtataacttc

SEQ ID NO: 254556 - DNA, 515 bp, Homo sapiens
ttggaatagaaggcgccacagattgtcttccctgctaggataccaatttaacaactatctaaacaaataaaacatcttcataagcaccaaaaattaggtgagtactcatagtgccctggttttaacttcatatcacttaaagaggcactgaagagatataaaaaaatacagtcttgactcactgataacactcctcccccaccccttggaagcggtggctgtggcgtggaaagcatctctgggcactgagggagggagagcacagtcattgtgaggcattgatttcagcactgtcctgttagggtagaaaaggaaatcagatcaaactcagctgatgtccaccctakccagaggggaatcacagatcccagcagtgggaacttgagttcctgtaaacctcaccactgagggctagggtgccatgggtctctaagtaaacttgaaaggcagtctaggctgtaaggactgcaactcttaggtaagtcctattgctgaactgggccaaaagacagtgg

SEQ ID NO: 254557 - DNA, 547 bp, Homo sapiens
attgtgaggcattgatttcagcactgtcctgttagggtagaaaaggaaatcagatcaaactcagctgatgtccaccctatccagaggggaatcacagatcccagcagtgggaacttgagttcctgtaaacctcaccactgagggctagggtgccatgggtctctaagtaaacttgaaaggcagtctaggctgtaaggactgcaactcttaggtaagtcctaktgctgaactgggccaaaagacagtggactgtaggggcatgtgacctactgagacatcagttggggtggctaatggagtgccggcatcaccccttccctaagcccaggctgaatatctcaaggctccaaaagagaccccttccttcctcttgaggagaggaaaggcaagagtgatgaggactttgtcttgcattttggatactagctcagccacagcaggatacaccagtcagagctgtgaggcccctgttacagggcttagctcccagacaacatttctaaacacaccctgggccagatggaaacttgctgcctttaagaaaatt

SEQ ID NO: 254558 - DNA, 594 bp, Homo sapiens
actactctttctctttgagcatggataggaaaaatagcctaagatggaggctctctgttgggaagattttgttgtasgatcttcccctgctagaaaatttgacattgtctggagtcatttttcattgtcacaactatggaaggtgcttctggcatctagtgagaagaagcctgagatgctactaattattatacaaggcataggacaatccttcaaataaagaattatctagtacaaaatatcaatatctaggtgaaaacataggtatttatctcctttttactcaagatgaaatcaatttccaaaatgctaacaactacacaaagaaaagcagcagtagcaaatgacattgttgagagtagtattaaacaaaacacaaaactgaaaaaaatgaatgtattaatatacaaatagtaaaatattacaaactgaaagtcttacagggaccaaagatataatgtgagtgagggagattggctgagtggcagaagacaaatggcaaatgacatttagctttgatgactaagaaactgtaggggtgacaaagagtatcttgagctccctgaactgtagatcacaagccccttctaaagg

SEQ ID NO: 254559 - DNA, 594 bp, Homo sapiens
actactctttctctttgagcatggataggaaaaatagcctaagatggaggctctctgttgggaagattttgttgtacgatcttcccctgctagaaaatttgacattgtctggagtcatttttcattgtcacaactatggaaggtgcttctggcatctagtgagaagaagcctgagatgctactaattattatacaaggcataggacaatccttcaaataaagaattatctagtacaaaatatcaatatctaggtgaaaacataggtatttatctcctttttactcaagatgaaatcaatttccaaaatgcyaacaactacacaaagaaaagcagcagtagcaaatgacattgttgagagtagtattaaacaaaacacaaaactgaaaaaaatgaatgtattaatatacaaatagtaaaatattacaaactgaaagtcttacagggaccaaagatataatgtgagtgagggagattggctgagtggcagaagacaaatggcaaatgacatttagctttgatgactaagaaactgtaggggtgacaaagagtatcttgagctccctgaactgtagatcacaagccccttctaaagg

SEQ ID NO: 254560 - DNA, 594 bp, Homo sapiens
actactctttctctttgagcatggataggaaaaatagcctaagatggaggctctctgttgggaagattttgttgtacgatcttcccctgctagaaaatttgacattgtctggagtcatttttcattgtcacaactatggaaggtgcttctggcatctagtgagaagaagcctgagatgctactaattattatacaaggcataggacaatccttcaaataaagaattatctagtacaaaatatcaatatctaggtgaaaacataggtatttatctcctttttactcaagatgaaatcaatttccaaaatgctaacaactacacaaagaaaagcagcartagcaaatgacattgttgagagtagtattaaacaaaacacaaaactgaaaaaaatgaatgtattaatatacaaatagtaaaatattacaaactgaaagtcttacagggaccaaagatataatgtgagtgagggagattggctgagtggcagaagacaaatggcaaatgacatttagctttgatgactaagaaactgtaggggtgacaaagagtatcttgagctccctgaactgtagatcacaagccccttctaaagg

SEQ ID NO: 254561 - DNA, 594 bp, Homo sapiens
actactctttctctttgagcatggataggaaaaatagcctaagatggaggctctctgttgggaagattttgttgtacgatcttcccctgctagaaaatttgacattgtctggagtcatttttcattgtcacaactatggaaggtgcttctggcatctagtgagaagaagcctgagatgctactaattattatacaaggcataggacaatccttcaaataaagaattatctagtacaaaatatcaatatctaggtgaaaacataggtatttatctcctttttactcaagatgaaatcaatttccaaaatgctaacaactacacaaagaaaagcagcagtagcaaatgacattgttgagagtagtattaaacaaaacacaaaactgaaaaaaatgaatgtattaatatacaaatagtaaaatattacaaactgaaagtcttacagggaccaaagatataatgtgagtgagggagattggctgagtggcagaagacaaatggcaaatgacatttagctttgatgactaagaaactgtaggggtgacaaagagtatcttgagctcyctgaactgtagatcacaagccccttctaaagg

SEQ ID NO: 254562 - DNA, 572 bp, Homo sapiens
ggaaacattcaacatcatccttctagctatttgaaattatgtatttctgttaaccacagtcatcataccatactatagaacactagaactcatttctcctatctaacagcaattttgtaaactttaacaaaataattttatatattttataaagagactgaaaaggagattgagtatatatcttagaatttttgtaagttacattcttatttaacatttataattcttctaatttgttcatatggattcaagttacaatctgatgttatttaattcacctccccatctcctccttgtgcatttattttcaaacatattacattgctatatgttataggccctgaaattcaattatatgcatattgttttatacacttgctttaaaacttagttaacagaataaaaaakaagaaatataaatttttactatgaagttatcctgggatgacagtacttttaaaaggctctttttgactatctcttttcctgaattttctgttaaactttctgcttctattggtattacacccacttctaggctccactaatttccacgtgattgctctattgtt

SEQ ID NO: 254563 - DNA, 556 bp, Homo sapiens
cttttctgaatgtcagtattgcatataaaaataagttaaaagtagtatctacctcagattaaaagtagagtataaaatacttagctcaatgcttgttatataagatctcaataaattataactattattataattgtcatttttagttcttctcagacaccatagttgaaaattttacttttaaaaccagtcttgttggtttagtttttatcctaacaataggatatctaaagwtaagacccttgagggggaaacaaaaaaaacactagtatatgacatccctaagtaagataaactccacagctgctaggggcaaaaagtattcacagcatatgggctgcatatgggctctggttgctgtatcgacaagaatgcctaaagggattaagttgagttatatggaactcacacttgaataaatgttctaaactgctggagagaggtatagaaaagactcccaggttccctcagaaataaatatgaaatgcaaatattcccagattacctttggtaaatttatgtttgagattccatcttcctgactgattatcatcaa

SEQ ID NO: 254564 - DNA, 521 bp, Homo sapiens
caggaataaagccctcaccagacacatacattgctggcaccccaaacttgacttctagcctccagaactgtggaaaaaaataaatttctgttgtttaagccagggttccccaacccacggatggtactggtccttgkcctgttaggatccctgctgcacagcaggaggtgagtggcgttaggcaagacagctttatcacctgagccctgcttcccgtcaggtcagcagtggcattagattctcataaaagtgaaccctattgtgaattgcacatgcataggagctaggttgcacactccttatgagcatctgatgcctgatgatcggaggtgaaatggtttcatcctgaaaccatccgctcgccattggtggaaaaactgtcctccatgaaactgctccctggtgccaaaaatgttgaggactactgctggtttaagccacccagtctgtagtgttttcttacggcagcctgagtagactaacacaatcgttgaatgttttatttataagcatgttccaaa

SEQ ID NO: 254565 - DNA, 521 bp, Homo sapiens
caggaataaagccctcaccagacacatacattgctggcaccccaaacttgacttctagcctccagaactgtggaaaaaaataaatttctgttgtttaagccagggttccccaacccacggatggtactggtccttggcctgttaggatccctgctgcacagcaggaggtgagtggcgttaggcaagacagctttatcacctgagccctgcttcccgtcaggtcagcagtggcattagattctcataaaagtgaaccctattgtgaattgcacatgcataggagctaggttgcacactccttatgagcatctgatgcctgatgatcggaggtgaaatggtttcaycctgaaaccatccgctcgccattggtggaaaaactgtcctccatgaaactgctccctggtgccaaaaatgttgaggactactgctggtttaagccacccagtctgtagtgttttcttacggcagcctgagtagactaacacaatcgttgaatgttttatttataagcatgttccaaa

SEQ ID NO: 254566 - DNA, 521 bp, Homo sapiens
caggaataaagccctcaccagacacatacattgctggcaccccaaacttgacttctagcctccagaactgtggaaaaaaataaatttctgttgtttaagccagggttccccaacccacggatggtactggtccttggcctgttaggatccctgctgcacagcaggaggtgagtggcgttaggcaagacagctttatcacctgagccctgcttcccgtcaggtcagcagtggcattagattctcataaaagtgaaccctattgtgaattgcacatgcataggagctaggttgcacactccttatgagcatctgatgcctgatgatcggaggtgaaatggtttcatcctgaaaccatccgctcrccattggtggaaaaactgtcctccatgaaactgctccctggtgccaaaaatgttgaggactactgctggtttaagccacccagtctgtagtgttttcttacggcagcctgagtagactaacacaatcgttgaatgttttatttataagcatgttccaaa

SEQ ID NO: 254567 - DNA, 623 bp, Homo sapiens
atccgctcgccattggtggaaaaactgtcctccatgaaactgctccctggtgccaaaaatgttgaggactactgctggtttaagccacccagtctgtagtgttttcttacggcagcctgagtagactaacacaatcgttgaatgttttatttataagcatgttccaaaccactatttttacaagtaaggaaaactacagcttctgaaggtaagtcatcagctcatgtttatgtaggaarctactggaaaagccagaaccataacccagaatgccacctcccagtctagctctttttccactatactcaactacttcgctacaaatgggatgccacatggtgagttgcaacgctttgattattaataatttaaggcaaaaagccaaaaaagttccagatttaatttataaagtggcataggtggtgggagggttactgaatggcctttgttcctaacatgtaatgactttggccttctaaatgtaactcattaaaagatcaaaacccaggaacttctaggttgtaattgcaatcttaggacttgttagcaacttaaataataattacagggccaactcatctcatgaatataattatctggtctctgttctgatgcgatctgca

SEQ ID NO: 254568 - DNA, 593 bp, Homo sapiens
taattatctggtctctgttctgatgcgatctgcaagtactcatcactgctgatgatggccacagagcaggccatggcagggggctggtttgtctgtgtctgggcttgaccaggctgttgtggacttaccacatagcagctcayacattcacaaacacctacaaacagagctggcatcatttttttgcattctggccatctcatattaaacaatcaagggaaccttcatggtgatggtaaaattaggaatttgctcagctcaatgttgaattaatgcctagctatggcttcagcatatatgcagtgttttttgttattttttaaattgaaatgcattatcaatttctgatccattatatgtaaggaacaaaactgttgatttttaacatttccttccaggtgaaacatacaacttagaactattgatcactgctctctttgaaattctattgtcttttaatttattacacatctccctaaattttctctcaagattctgcccattctttcttggcttctttttctatcttctcttcctcattaaaatgctattcacctacaaggtactgacagcctcttcttgttctatgtggt

SEQ ID NO: 254569 - DNA, 593 bp, Homo sapiens
taattatctggtctctgttctgatgcgatctgcaagtactcatcactgctgatgatggccacagagcaggccatggcagggggctggtttgtctgtgtctgggcttgaccaggctgttgtggacttaccacatagcagctcacacattcacaaacacctacaaacagagctggcatcatttttttgcattctggccatctcatattaaacaatcaagggaaccttcatggtgatggtaaaattaggaatttgctcagctcaatgttgaattaatgcctagctatggcttcagcatatatgcagtgttttttgttattttttaaattgaaatgcattatcaatttctgatccattatatgtaaggaacaaaactgttgatttttaacatttccttccaggtgaaacawacaacttagaactattgatcactgctctctttgaaattctattgtcttttaatttattacacatctccctaaattttctctcaagattctgcccattctttcttggcttctttttctatcttctcttcctcattaaaatgctattcacctacaaggtactgacagcctcttcttgttctatgtggt

SEQ ID NO: 254570 - DNA, 582 bp, Homo sapiens
acacattcacaaacacctacaaacagagctggcatcatttttttgcattctggccatctcatattaaacaatcaagggaaccttcatggtgatggtaaaattaggaatttgctcagctcaatgttgaattaatgcctagctatggcttcagcatatatgcagtgttttttgttattttttaaattgaaatgcattatcaatttctgatccattatatgtaaggaacaaaactgttgatttttaacatttccttccaggtgaaacatacaacttagaactattgatcactgctctctttgaaattctattgtcttttaatttattacacatctccctaaattttctctcaagattctgcccattctttcttggcttctttttctatcttctcttcctcattaaaatgctattcacctacaaggtactgacagcctcttcttgttctatgtggtttccttgggtaagcacaattaatatagctgagaatasttcccataaactgttttctttttttcccaagctttctctcattcatcttcttcctataatctcagtttccatcactggcctaaccagcatgtc

SEQ ID NO: 254571 - DNA, 601 bp, Homo sapiens
tcttgcattcttctgttaggaattgcttttcacagttatggagttaatgagaatatttagttctgatacataccttctaaattcaaaccttcttgacctgttattaaaatctctttcttagaccatttttccctttctctttgcaaaagaatgttgatggagactaattcttcctragcagatctggaggaaatcgtgtggggaactataaatttcaagatctgaaaatctgtctcccagtgacaaagatcttaagctacctttaagatatcccagaggaaaccgaagggctcctcacctaaatcctgcttctcattcctgaatgcttcctttggctccccctggaatgactctgtgatctctttgcagttctcttcctacaagtgggcattggctgggaggcaccattgtaggaagagaacagcaaagagatcacaacagacctggctttcccctcatcttggtctctgccaattagtcctgttagagtgagtttaaaagacaactctgactacaaaataatatatcccatatactttatcttatttcatattgattatatcttgaacttatgatcatttaagcacgtaaaggtgcaaaa

SEQ ID NO: 254572 - DNA, 601 bp, Homo sapiens
tcttgcattcttctgttaggaattgcttttcacagttatggagttaatgagaatatttagttctgatacataccttctaaattcaaaccttcttgacctgttattaaaatctctttcttagaccatttttccctttctctttgcaaaagaatgttgatggagactaattcttcctaagcagatctggaggaaatcgtgtggggaactataaatttcaagatctgaaaatctgtctcccagtgacaaagatcttaagctacctttaagatatcccagaggaaaccgaagggctcctcacctaaatcctgcttctcattcctgaatgcttcctttggctccccctggaatgactctgtgatctctttgcagttctcttcctacaagtgggcattggctgggaggcaccattgtaggaagagaacagcaaagagatcacaacagacctggctttcccctcatcttggtctctgccaattagtcctgttagagtgagyttaaaagacaactctgactacaaaataatatatcccatatactttatcttatttcatattgattatatcttgaacttatgatcatttaagcacgtaaaggtgcaaaa

SEQ ID NO: 254573 - DNA, 527 bp, Homo sapiens
acatcatcccagcttaaggtctccctctgcctaatcaccttttgttttatgctcctccctctgcaaatgttgatcccaaggaaattccttaataaatctctcctggccaggcatggtggctcatgcctgtaatcctaggtttgagaccagcctggccaacatggtgaaaccctgtctctactaaaaaaaaaaaaaaaaaatacaaaaatttgccggacgtggtggagcatgcctgtaatcccagctatcttagaggctgaggcagaagaatctctggaacctgcaagtcagaggctgcagggagccaagaccctgcycgactgcactccagcctgggtaacacagcaagaatccatttcagaaacaaacaaacaaaaaccctcttcatacatactaatctgtagctcagagtttgcttcccagagataaaactccattactccagtggagtcagagaaaccagacacggagtgggattttaaagctggatcacctgccctttgctggagatgaaattgaggatccca

SEQ ID NO: 254574 - DNA, 494 bp, Homo sapiens
tttcaaaacttttatgaatagctttctgttaacaagaagcctaagcaatggtatagtcaattaacacatattttgcatgttatatgtattatatactgtactgttacaataaagtaagctagagaaaaaatattaagaaaatcataaggaagagaaaacatatttaatatttattaagtggaagtatattatcataaaggtcctcattcttattgtcttcaaattaagtaggctaagaaagaggagaaagaggaaggcttagtcttactgtcccatgggtggcagaggtggaagaaaatccatgcaaaaggagacccaaacagttcaaatytgtgttgttcaagggtcaaagcaatatatggacagacgatagatagaagattagatagatattaatggatggatggatggatggatagatagacagatagatagcagcccaaaatcagcattctggaacacgtggcctggtagtaaagtcttggtgttggtcc

SEQ ID NO: 254575 - DNA, 573 bp, Homo sapiens
ctgagcttttgctcccctctattttaaattggattaatattattatagctcacagggtagttgtgagaatacatgtctatcacagtgcttgttacttatcagtcactcaatagatattaaaacacttctgctaattcttggaacccaacaagaggcctttgaactcttgacccaatatgaagttaagtgaaaaattcagccagcaagcatatgaagtagttagatttggcagtgggtcacagagtgggcctatcagcccagtctaagagtataaaactctgcttctcctaaaatatatttcacacacacacacacacacacacactatatatgtgtaatattttattgccttttcacctctttgtgtcttcctttgcttttgaatccacaggctccctaatgatagygatttttttccccaagagctaacacattatgggggagtggaagacagccagtgacagtgagggaaaatcagtaacattgagaggcagcagggacctatataggtcattattaaatcatggactaccattaaaaatttagcactagtcaataagtatattcagtagg

SEQ ID NO: 254576 - DNA, 570 bp, Homo sapiens
tcatcacccatgtattaagcctagtatccattagtgatttttcctgatcttctctttcctctcaacatctaccctttgaaaggccccagtgtgtgttgttcccctatatgtgtccatgtgttctcatcatttagctcccacttctaagtgagaacaggcagtatttgtttttcagtttctgtgttagtgtgctaaggataatggcttccaagataagttttgaaaagctattgatctcatattctaagttaatgtcccaaagcaagcttgtccaacctgyggcccatgggctgcatgcagcctaggaagactttgaatgcggccccacacaaattcatcaactttgttaaaacaatatgagatatttttgcgattttttttttagctcagcagctatcattagtatattttatctgtggcacaagacaattatttttccaatgtggcccagaaaaggcaaaagattggacactcctgcagcctaaaggaaaaaaaattagtccccagatattacagtcctcaggaatttccatctacatggaacatttatatttataagataaaagttaa

SEQ ID NO: 254577 - DNA, 570 bp, Homo sapiens
tcatcacccatgtattaagcctagtatccattagtgatttttcctgatcttctctttcctctcaacatctaccctttgaaaggccccagtgtgtgttgttcccctatatgtgtccatgtgttctcatcatttagctcccacttctaagtgagaacaggcagtatttgtttttcagtttctgtgttagtgtgctaaggataatggcttccaagataagttttgaaaagctattgatctcatattctaagttaatgtcccaaagcaagcttgtccaacctgtggcccatgggctgcatgcagcctaggaagactttgaatgcggccccacacaaattcatcaactttgttaaaacaatatgagatatttttgcgattttttttttagctcagcagctatcattagtatattttatctgtggcacaagacaattatttttccartgtggcccagaaaaggcaaaagattggacactcctgcagcctaaaggaaaaaaaattagtccccagatattacagtcctcaggaatttccatctacatggaacatttatatttataagataaaagttaa

SEQ ID NO: 254578 - DNA, 570 bp, Homo sapiens
tcatcacccatgtattaagcctagtatccattagtgatttttcctgatcttctctttcctctcaacatctaccctttgaaaggccccagtgtgtgttgttcccctatatgtgtccatgtgttctcatcatttagctcccacttctaagtgagaacaggcagtatttgtttttcagtttctgtgttagtgtgctaaggataatggcttccaagataagttttgaaaagctattgatctcatattctaagttaatgtcccaaagcaagcttgtccaacctgtggcccatgggctgcatgcagcctaggaagactttgaatgcggccccacacaaattcatcaactttgttaaaacaatatgagatatttttgcgattttttttttagctcagcagctatcattagtatattttatctgtggcacaagacaattatttttccaatgtrgcccagaaaaggcaaaagattggacactcctgcagcctaaaggaaaaaaaattagtccccagatattacagtcctcaggaatttccatctacatggaacatttatatttataagataaaagttaa

SEQ ID NO: 254579 - DNA, 347 bp, Homo sapiens
tttttaaaaattaaataatatttaaaactctacactccagttttttcctgaatatgtatcatgcatagtcaaccatatcaattcatcattttagcagctgtgtattattccacagtgtccatggaatctgaatatcattctggataccttccgctttgactacccagatctgcttgccactgacctctgtgctgctctctaggaggcaaactcccatggtttcccttgccctctggttgggttgacaaataggagattaacagsaggagaaaaaggtgagggcagcatatttattccctggctactttcttgcaagtcatactcatcttgactgtttttcagcagaa

SEQ ID NO: 254580 - DNA, 618 bp, Homo sapiens
atcatatgtcacatatgcttctatgatccacagccagtacttatgyagtggagtgcagtcaaaaggaatgctttgtatttcactgacaaactctgagatatgtagattggtgaactgccaaaaataatgcattttactaaggtgtcatttgtaaagtaacatattatggtttataggtttctaaaatgtataaatgtgactcaatcatacttgaaaaggccttggaaaaattgagtttacagatcaagaaactgggtttcctagtaacacagttggctagtagcattcaagtgagaagaatctaagattaacagagtagatctgaactgctttggcctttgtttcttatccctaaaactcggaaaatactacagcagggttgggtagactaagtgagacaatgggtgttttagtgtgaaaaacccaaacccctatataaggcaatgctttagggaaaaactggacctagaacccagttgctctggcttgtctgtctcatactctttgtgctgactgccctccaagaaattctggccataggcattttaggcaaaggcatgccaaataattcttcagttagtctttagtatccaggaacctagaaatcctcagttatag

SEQ ID NO: 254581 - DNA, 539 bp, Homo sapiens
ttctatttgcagataacaattgcctatggataatatctaaaggaatttacagaaaaaaaaggtctcctataagtgagcttagcaagtcgtagaatatgaggtcaccataaaaaaactcagtcatatttccatttactagtaatgaacaattagaaactattttttttaatgtccattacaatggctccaaaaggtttacaaatacgcatcttttaaaacagaatctgtatactgaaaatgacaaaatgctaatgaaataaagatgatatatataatacacacagattggacgactcaatctatttaagatgtcaattctccccaaattgatctatgttatcatacaaatctcaaaaggatttttgtattcagagaaaagaatattctaaaatttatagaaaaygtaaaaatagctagaatagtaaaaagttttaaaaaaaggaatttggagaactcacactaatttaagacttttcataaagctttagtatttaggatgtaatatggacaaacaaaaaaaaattaatagtgtttccaga

SEQ ID NO: 254582 - DNA, 639 bp, Homo sapiens
ctgttattggtctattcagagattcatcttcttcctggtttagtgtcaatgatttgtagtcctgctctcatttgatggtgtttctcctattctgtttttcacacctttcatttcccacctttacagacagaaagcaagacacacgggtgcctcatctttctacattgttcacatgtctgtcttttttgccaccacacattggggccacaataggtgaaatttctttattatttgccattccattcaaggcagaaaggactaatgttcacctgcatgckttctactggaacagtggattgtaaggacttcaagagatgctgctggccagaacaaatgggcatccccaggataactggcatgagtagaaaaccagagaggctgcccccaaatgtgctgtatgagacctgtggtattttatattactctctgcagtaaaggagacaccaaaaataattgaagtttcccagcaggacaactaaatgagggttcttcactgacctgcactgactttaactaggttaaagaaaataaataaataagatattcttgcaaactttaatttgtggaccacttgcttctgctacataatgctgttcttctctcagaataagttcagaatttctgatgatttgcttaata

SEQ ID NO: 254583 - DNA, 546 bp, Homo sapiens
atccatctggtcctggactttttttggtttgtaagctattaattattgcctcaatttcagagcctgttattggtctattcagagattcatcttcttcctggtttagtgtcaatgatttgtagtcctgctctcatttgatggtgtttctcctattctgtttttcacacctttcatttcccacctttacagacagaaagcaagacacacgggtgcctcatctttctacattgttcacatgtctgtcttttttgccaccacacattggggccacaataggtgaaatttctttattatttgccattccattcaaggcagaaaggactaatgttcacctgcatgctttctactggaacagtggattgtaaggacttcaagagatgctgctggccaraacaaatgggcatccccaggataactggcatgagtagaaaaccagagaggctgcccccaaatgtgctgtatgagacctgtggtattttatattactctctgcagtaaaggagacaccaaaaataattgaagtttcccagcaggacaactaaatga

SEQ ID NO: 254584 - DNA, 513 bp, Homo sapiens
tttcccaaacaattcaactcaaagaggatttaaccagggaacattataatcaaattgccaaaaatcaaaggcaaagagagaattttgaaaacatcaagagaaaagagatatgttacatacaacagaactttaattagactatcagtgaatttctcagcagaaaccttgcaggtcaggaaacagttggatgatatatasaaaatgccaggagaaaaattaaaatcttgtcaactcaaaatagcttagctaataaatctgatcttcttaaaaaaatattttaggttcatgggcacatatgcactttgttttataggtaaatttgtgtcacaggagtttgttgtacaggttattttgtcaacccagtactaagcctagtacacaatggtaattttatctgctcctctccctcctcccaccctccaccctcaggttaaatacaaaaattagccaggcgtcatggtgcacacctgtaatcccagctaactgggaggctgaggcatgagaataacatga

SEQ ID NO: 254585 - DNA, 513 bp, Homo sapiens
tttcccaaacaattcaactcaaagaggatttaaccagggaacattataatcaaattgccaaaaatcaaaggcaaagagagaattttgaaaacatcaagagaaaagagatatgttacatacaacagaactttaattagactatcagtgaatttctcagcagaaaccttgcaggtcaggaaacagttggatgatatatagaaaatgccaggagaaaaattaaaatcttgtcaactcaaaatagcttagctaataaatctgatcttcttaaaaaaatattttaggttcatgggcacatatgcactttgttttataggtaaatttgtgtcacaggagtttgttgtacaggttattttgtcaacccagtactaagcctagtacacaatggtaattttatctgctcctctccctcctcccaccctccaccctcaggttaaatacaaaaattagccrggcgtcatggtgcacacctgtaatcccagctaactgggaggctgaggcatgagaataacatga

SEQ ID NO: 254586 - DNA, 464 bp, Homo sapiens
gcttcactagcaaagtccaccaaacatttaaagaaataacctaatctttctcaacttcttacaaaaaattgaagagaagtgaacactttcaaactcattttatgaggccagaattaccctgataccaaagccagatgaggacagtacaagaaaagtgaattacagcccagcatccctgataaacatagatgcaaaaaattgttttttatgtttatcagggatatcaggaaaactgaagtcaacagcatgttaaaacaatcacccagcaggaggaatttgagtcctagctggctctcccactggctgaatataaagaggtctggggccagaataaatktgagtggcagtcaggctacttggactacagtccttcagtgagacctggaggtttgtctgaatcacacagtgcatttggggtgcaggtgacccagtgtgacaccaactatgaaggccaagtagtgcct

SEQ ID NO: 254587 - DNA, 566 bp, Homo sapiens
atatgcttaaactatttaactatataaaaatccagttgtaacattgtttctttcttmgctttttagaatgttttaagaactttcgaagtttttttgttgttgttgttattgtttttgccaccttcatagctgatctctgtctactgcatcaccttaaataccaaaaagctaaatggagcttttatatggtcaaattcataacctctgtgtttttaaaatccttttaaatgataatgaatctgcattgctgtagagtttaatgtcattttctgacttcagtgcagacagagggttctctccctgtcagatatgatttggaaaggacatcagaggccaaggaacattgttggcttggataagttccacagatgaaaaggcttaattgaggggactggctaaattttggtaggcagcatatgagtgaagtgctgtttccaaatggtatttgaataattgtatccaaataagaagcttttcaggtttgacttttgtgaccttttaagtagtaaattgtcacacatttcaactgagctaatgtttcaccagattgattcatttgagacttc

SEQ ID NO: 254588 - DNA, 566 bp, Homo sapiens
atatgcttaaactatttaactatataaaaatccagttgtaacattgtttctttcttcgctttttagaatgttttaagaactttcgaagtttttttgttgttgttgttattgtttttgccaccttcatagctgatctctgtctactgcatcaccttaaayaccaaaaagctaaatggagcttttatatggtcaaattcataacctctgtgtttttaaaatccttttaaatgataatgaatctgcattgctgtagagtttaatgtcattttctgacttcagtgcagacagagggttctctccctgtcagatatgatttggaaaggacatcagaggccaaggaacattgttggcttggataagttccacagatgaaaaggcttaattgaggggactggctaaattttggtaggcagcatatgagtgaagtgctgtttccaaatggtatttgaataattgtatccaaataagaagcttttcaggtttgacttttgtgaccttttaagtagtaaattgtcacacatttcaactgagctaatgtttcaccagattgattcatttgagacttc

SEQ ID NO: 254589 - DNA, 566 bp, Homo sapiens
atatgcttaaactatttaactatataaaaatccagttgtaacattgtttctttcttcgctttttagaatgttttaagaactttcgaagtttttttgttgttgttgttattgtttttgccaccttcatagctgatctctgtctactgcatcaccttaaataccaaaaagctaaatggagcttttatatggtcaaattcataacctctgtgtttttaaaatccttttaaatgataatgaatctgcattgctgtagagtttaatgtcattttctgacttcagtgcagacagagggttctctccctgtcagatatgatttggaaaggacatcagaggccaaggaacattgttggcttggataagttccacagatgaaaaggcttaattgaggggactggctaaattttggtaggcagcataygagtgaagtgctgtttccaaatggtatttgaataattgtatccaaataagaagcttttcaggtttgacttttgtgaccttttaagtagtaaattgtcacacatttcaactgagctaatgtttcaccagattgattcatttgagacttc

SEQ ID NO: 254590 - DNA, 608 bp, Homo sapiens
attgttcattgctctattttcctcactgatagttttctatctctatctccatctattggtaacttctggcctctttcaaaactgactggcccactttaacaagcctgcctaattttgccagatcctccacatactggccagtcctgcttttgccaagcacttattctaacagtgtctttcatataataaatgttccataaacatgaggcgatttcatctgatagtgggtttcgatattattctatcaggcctgccaatctccttgaatgataaacaacacatgcatctatacatgtacaatctgatctctactgttgttcttctgtgatttaaagctgacagccaaaaattaagcacagtttttggccaaattgcctaaatactaaaaggtaattattctttttccaggataatttcctgttctcctttttctgttactttctccttaagaatctttctcctgcytctctccaaccattttcaacctgattcccctacttttatcaacaagaacacaaagacttcagtgggaaaaaacattggtttaaaagccatgttttgtattatatgttttataatttcgaattgtaaaggacactgattgtgaa

SEQ ID NO: 254591 - DNA, 582 bp, Homo sapiens
ctgaccctgggacatagcatcatgctgtagctctgacttggcagatcagattaaactacttcagggacattaaagtataaatatttcatagtgccctcatgggactgaatttaaactaaaacacttaaaagtctcagttgtttggtcttgctgatgatttctacatttttcttctctttaaattttcacattttgcaaagttatcttttatggagtttagttttgactgtttgctactgttgttttttataaattctagaatgtttaaagctggaatcttggctgcaaaaaatgaaatctraaggcaaagaaatctattggttagcaggtatctcttacaaaaggacaagattaataaactgaaggagagcttttattagaaagtgagaatgtgcacaagaagcacagaacagagagtgaactcagggacattgtgcacactggacactgcacaaaactgccagctgggcttctaaggaaagactcaaattcagccagtgttcagatcactgagcagtgtgcccacgagagtgtatctgcccaaagggaatgccacatctgaaacattgtcatgaccaaggc

SEQ ID NO: 254592 - DNA, 582 bp, Homo sapiens
ctgaccctgggacatagcatcatgctgtagctctgacttggcagatcagattaaactacttcagggacattaaagtataaatatttcatagtgccctcatgggactgaatttaaactaaaacacttaaaagtctcagttgtttggtcttgctgatgatttctacatttttcttctctttaaattttcacattttgcaaagttatcttttatggagtttagttttgactgtttgctactgttgttttttataaattctagaatgtttaaagctggaatcttggctgcaaaaaatgaaatctaaaggcaaagaaatctattggttagcaggtatctcttacaaaaggacaagattaataaactgaaggagagcttttattagaaagtgagaatgtgcacaagaagcacagaacagagagtgaactcagggacattgtgcacactggacactgcacaaaactgccagctgggcttctaaggaaagactcaaattcagccagtgttcagatcactgagcagtgtgcccaygagagtgtatctgcccaaagggaatgccacatctgaaacattgtcatgaccaaggc

SEQ ID NO: 254593 - DNA, 572 bp, Homo sapiens
attctgccctccaggggggcatttgctaatgtacagaggagacatttttggttttcacaactgggaaaaggacaatattggcatctggtttgtagaggcctgggatactactcagtatcctgcaacatacaggacaaacccccaaacaaatagctgtttagctctaagtttccatggtactgagtttgacaaactccaaaacagaggtatttgaacactaagctcaatttttttcttatcacaacattactttttctctgaggctactaataatccatcaaagcaataatgtggaacacagttcttgagatactgtgtaagatacattaagagggatgrcttgacctgggactcaaaacagaaactgcacaatggaaaaatgttacgttatcatttatgcattttttaagtgaccagccagctgtctttggatagacggagttgagcagttcagattcaacccttgctttcaagtgagaagataacccatatgtgtgcatgtatgtatacgtatgtatatatgtatacatatctaaatatatatatagagagagatatataagaaaaataac

SEQ ID NO: 254594 - DNA, 566 bp, Homo sapiens
aaaaaaaaacagcaaaagagcaaactaggattttcacagattgataaaactatatatggaagaaacagtaaacagtgaaaaaccctgtagacagatgcttagattagtttaaaaacaatagatgtgagaggtagtttgtaaataaagygatatgatcaaaacaataaccatacagactgctctatcaaagtgaacagccacaaatttaagaagaatttgcattctgtatctaataggcttttagcatatagcacattcaaaatgaaaaattaacagaacaaaatgtcttgtttttattagataatattttctcattaaaattccaagaacaagattgaatactattacaaatatattttatgtgggaaaacatatacattaaggtgccaaagcatacccaggcagttggtgacattttttttttgctttgaatcacaaaacttttatatttctgccaaaacaaggaatctttttaggatggcatatctccagttagatagttattttgtcagcttgcatgctaaaaaggtagatttttacacctttggaaatcagatgtaagctca

SEQ ID NO: 254595 - DNA, 566 bp, Homo sapiens
aaaaaaaaacagcaaaagagcaaactaggattttcacagattgataaaactatatatggaagaaacagtaaacagtgaaaaaccctgtagacagatgcttagattagtttaaaaacaatagatgtgagaggtagtttgtaaataaagtgatatgatcaaaacaataaccatacagactgctctatcaaartgaacagccacaaatttaagaagaatttgcattctgtatctaataggcttttagcatatagcacattcaaaatgaaaaattaacagaacaaaatgtcttgtttttattagataatattttctcattaaaattccaagaacaagattgaatactattacaaatatattttatgtgggaaaacatatacattaaggtgccaaagcatacccaggcagttggtgacattttttttttgctttgaatcacaaaacttttatatttctgccaaaacaaggaatctttttaggatggcatatctccagttagatagttattttgtcagcttgcatgctaaaaaggtagatttttacacctttggaaatcagatgtaagctca

SEQ ID NO: 254596 - DNA, 566 bp, Homo sapiens
aaaaaaaaacagcaaaagagcaaactaggattttcacagattgataaaactatatatggaagaaacagtaaacagtgaaaaaccctgtagacagatgcttagattagtttaaaaacaatagatgtgagaggtagtttgtaaataaagtgatatgatcaaaacaataaccatacagactgctctatcaaagtgaacagccacaaatttaagaagaatttgcattctgtatctaataggcttttagcatatagcacattcaaaatgaaaaattaacagaacaaaatgtcttgtttttattagataatattttctcattaaaattccaagaacaagattgaatactattacaaatatattttatgtgggaaaayatatacattaaggtgccaaagcatacccaggcagttggtgacattttttttttgctttgaatcacaaaacttttatatttctgccaaaacaaggaatctttttaggatggcatatctccagttagatagttattttgtcagcttgcatgctaaaaaggtagatttttacacctttggaaatcagatgtaagctca

SEQ ID NO: 254597 - DNA, 588 bp, Homo sapiens
aacatacatcagcacaaaagcaaggatgtgatgatgagagactcaagagaaagtgatagaagacaaatattcacagggttggattgcaaataccctgggcagaataataawttgatatcccttttgattcatattctttatgtattttttcaacatttatttagggaagtgaggatgagcatctgttagaaatagtttacttgtttgtttttcacctggagggatgatctaaagaagtgagagtgaaactagtctaataataacgatctttataaggagagcaatgataacaaacagtattttcttctgttcttagtaccaatggctttgcactgcttgaatctctcttcaagagaatttgctgcagagaccataattggctgagttttcagtgcacttttaatccaccattacagccacaccgtggtcatgcttcccttaggctgcttacagcaatgactgacaatggcagaactaccacagccagccatttttgactgacatggaactcctccaggaaaaccttttctgaagactcctcattattttagcctagattttcaattccaattcagtctgaagctctcc

SEQ ID NO: 254598 - DNA, 590 bp, Homo sapiens
gatttaaatgatatttagacaagactttggacttgaaattgacactggagtgggtgaagactttgggggctcttgggacacagtgaatgtagtttgtatctgagaaaaacataaatttcagggggccagaagacagaatgttatgggctaaactgtgtctctcaaatttatatgttgaagtcttaacctgtgaatgtgactgtatttggagataggacttttaaggaggtaggtagtgttacataaagtcataagggtgggaccctaatcaaataggctgggtgttgttagaagaggaaggaaaaaacacaccacatctgtgtgtgtgtgtgtgtgtgtttatgtgtttatgtgtgtgtgtatacttgtgcacactaagaaaatgccatgagaggacatagcaagaagacagccatctgcaagccagtaaggacacagccagaaaccagccctgctgataccttgatctttgactctagcaaccttaatgatgaaaaaacaaatttctgttgtctaagccacccagtctgtggaatattgtatagcagtckaagtagattaatgcaggagcatttatcaacagggagaaa

SEQ ID NO: 254599 - DNA, 590 bp, Homo sapiens
tgcttctattggcaaagatatattcaattggtactatgtttttagacataatgtaaaaatatgttactctgttaagtccagcagtgttgtagaaattgaaactgaggttttgaaatttgcaaagaagtagtaatatacaaaatccatggagtatcaagttactaagtacttacaataaagattttctaattatataatgtgcttgcttttttttcctttcaggaaaattatataataaaaaaaattgtggagcagagtttagatgtcataaaaatatcccagggactgttggctttttttctatattaacaactcatatacttaaattatgtacatatrtatatatagatatatatgtttaaaatatttatttaaaatgtatacatacatatatacatgctttaaacatatatgtatgtgtttaattcaacaaggcaaatgttcacaggatttctctgaaggtattttcattacaatgtgttagtgtgttaccagaagaatatctaacctcattaagaatccagaattatgcatgctatgcatttttcaaaaaaggaatgttttccagaatgccacattgaataaacaac

SEQ ID NO: 254600 - DNA, 576 bp, Homo sapiens
gggtcagaaaaatttgacttgttaaaattctgatttcaaggtcccaatattatttactcttggttttaaaaatatttgcaaattggtttcattcttcccatctttttcaggtaccctaatcagtcatagattcagtctctttacataatctcatatttctgcgagtttttttcccttccttttcagtcttttttctctattcttgtctgtcttatttcagggggacagacttcaagctctgagattcttttccccacttggtctattctgctgttaatacttgtgattgaattgtgaagttgctgaggtgtgtttttcagctctatcaggtcagtcacatttctatctatactggctattttggctgttcagctcctgcattgttttatcatgattttcrgcttccttgcattgggttacaacgtgctcctttagttcagtgaagttcgtttttaatccacattctgaagcctacttctgtcatttcagccatctcagcctcagcccagttccaaacccttgctggagaggtgtcgcagtcatttggaggaaagtgggcactctggctttttgagt

SEQ ID NO: 254601 - DNA, 576 bp, Homo sapiens
gggtcagaaaaatttgacttgttaaaattctgatttcaaggtcccaatattatttactcttggttttaaaaatatttgcaaattggtttcattcttcccatctttttcaggtaccctaatcagtcatagattcagtctctttacataatctcatatttctgcgagtttttttcccttccttttcagtcttttttctctattcttgtctgtcttatttcagggggacagacttcaagctctgagattcttttccccacttggtctattctgctgttaatacttgtgattgaattgtgaagttgctgaggtgtgtttttcagctctatcaggtcagtcacatttctatctatactggctattttggctgttcagctcctgcattgttttatcatgattttcagcttccttgcattgggttacaacgtgctcctttagttcrgtgaagttcgtttttaatccacattctgaagcctacttctgtcatttcagccatctcagcctcagcccagttccaaacccttgctggagaggtgtcgcagtcatttggaggaaagtgggcactctggctttttgagt

SEQ ID NO: 254602 - DNA, 588 bp, Homo sapiens
aaataccacatgttctcacatataagtggaagctgaatgagaacacctgaacacataaaggggaacaatgcacactggggcctattggagggcagagggttggagaagagagagaatcaggaaaaataactaatggatgctaggcgtaatacctgggtgataaaacaatctgtacaaaaaacccccatgacacacatttacatattaacaaacctacaaatcctgcacatgtacccctgaacttaacataaagttaaaatatatacatatatattaacttttaacttataggttccattgtattcctcattctggccagcattccagcaaagctttacttttgataaygaagggtacttggatagacagtgtacatgattcagcataatctgtttttcaatttcagtatgaaatcagataatctagagttcatgctgtacaagtaaatcttaaatcagtgatcttttgaggacatgggggctccttctatggctttattcaagccctgccctcaaaatctttactgggagtaagaaagcctctttgaaagagcataggcagtaattactagatacacaataaaattgt

SEQ ID NO: 254603 - DNA, 588 bp, Homo sapiens
aaataccacatgttctcacatataagtggaagctgaatgagaacacctgaacacataaaggggaacaatgcacactggggcctattggagggcagagggttggagaagagagagaatcaggaaaaataactaatggatgctaggcgtaatacctgggtgataaaacaatctgtacaaaaaacccccatgacacacatttacatattaacaaacctacaaatcctgcacatgtacccctgaacttaacataaagttaaaatatatacatatatattaacttttaacttataggttccattgtattcctcattctggccagcattccagcaaagctttacttttgataatgaagggtacttggatagacagtgtacatgattcagcataatctgtttttcaatttcagtatgaaatcagataatctagagttcatgctgtacaagtaaatcttaaatcagtgatcttttgaggacatgggggctccttctatggctttattcaagccctgccctcaaaatctttactgggagtaagaaagcctctttgaaagagcataggcartaattactagatacacaataaaattgt

SEQ ID NO: 254604 - DNA, 514 bp, Homo sapiens
catctataccaaaacttatataacagtttgaggtgctgacagcttagcaatagtagattttctaattaacaaagatggtgtgtgtatgtatatatatatcatatatacatcatatatatcatatatatgataggatatcatatatcatatatatcatatatacatataaatacacacaaactatctaatatatctatatctatctattcattttgatcttctgtaagttcttcatcaatttcttgtagactccagtgcttgttcttgcatatttttttttaagtttatccctatgtatttcatatattttattatattaargtggcacacaaatacatggaaattaaacaacttacttatgaataactcctgaaaggtaaacactgaaattaaggaattaataaaaaattatttgaaggtaatgaacatagggacacaacttaccaaaatctctgtggtgtagtcaaagtggtgttaagaggaaactttatagccctaatgccttcatcaagaa

SEQ ID NO: 254605 - DNA, 569 bp, Homo sapiens
tggaggtagataataccagacaaaaaggtgcctcctccaactgagaacactgtgctggccataactgcatgtttttgtttcaggatttggcctcttgtactttccttgtgtttttgtctatcaggaaaaaatttaaaaaacattttattatacactagcatcaagtctgttacttaataaaaatgaattgctctttttggtagggagatcctttttctaaaattgtggtttacatagcataaaaattaactatgttaaagtacacaatttcatggcatttagtacatttgcaatgctgtgaaatcatcagcactatctagttccaaaacattcttatcaccccaaaaggaaaccccacacctattataccaccatgccccattacctccttccccatgctctggcaactactaatctactttctgtttctatggataggactattcagaatatatcagaatttccctttgttgggttatttccccctaaaatccatgcagaaaaggaaacaaggkgtttaataaaatagtaaaaataaagacaatttttagaaccaagacttattgacc

SEQ ID NO: 254606 - DNA, 613 bp, Homo sapiens
aaaagggagattaggccgggcgtggtggctcatgcctgtaatcccagcactttgggaggcggaggcgggcggatcaccaggtcaggagatcgaaaccatcctggctaacacggtgaaaccccgtctctactaaaaatacaaaaaaaattagctgggcatggtggtgggcacctgtagtcccagctactygggaggctgaggcaggagaatggcgtgaacccgggaggctgagcttgcagtgagccgagattgcaccactgcactccagcctgggcgacagagcgagactccgtctcaaaaaaagttaaaaaaaagagattaggcaaagcttagctgaggtgattttgtggtgaggacccaaggaaagtgaaattgctatggggatatttggttaaagagaattacaggaacaaataacatcgggctaaagttctaaagtaaaaatgtcaggtgtattcaaagaatagtaaggaggtgagtgtaagtagagcagtgagattgatcagtaaatctccccagaaagttactgaaggaccagggccctgctacttcagggtaagaagtcaggttgctaaaaataaaaatgaagaactaaataagcaaataacaacta

SEQ ID NO: 254607 - DNA, 613 bp, Homo sapiens
aaaagggagattaggccgggcgtggtggctcatgcctgtaatcccagcactttgggaggcggaggcgggcggatcaccaggtcaggagatcgaaaccatcctggctaacacggtgaaaccccgtctctactaaaaatacaaaaaaaattagctgggcatggtggtgggcacctgtagtcccagctacttgggaggctgaggcaggagaatggcgtgaacccgggaggckgagcttgcagtgagccgagattgcaccactgcactccagcctgggcgacagagcgagactccgtctcaaaaaaagttaaaaaaaagagattaggcaaagcttagctgaggtgattttgtggtgaggacccaaggaaagtgaaattgctatggggatatttggttaaagagaattacaggaacaaataacatcgggctaaagttctaaagtaaaaatgtcaggtgtattcaaagaatagtaaggaggtgagtgtaagtagagcagtgagattgatcagtaaatctccccagaaagttactgaaggaccagggccctgctacttcagggtaagaagtcaggttgctaaaaataaaaatgaagaactaaataagcaaataacaacta

SEQ ID NO: 254608 - DNA, 570 bp, Homo sapiens
gacctacttgagggtggaggatgggaggagagaggggatcaaataactatttgttactatgtttattacctaggtgaaaaaacaatctgtacacccaacccgtgtgatgaacagtttaccagtgtaacaaacctgcacatgtacccctgaatgtaagctaraagtttaaaaaactaaccaataatataaataaaaaagtaataattaaaaaaaagaaatatacaaatgatgttttccagaattcaaagacagaagagttaaaagtgacaggtacacagagtgcctggcccaatgaatgaaataacacacacaaagatttgatattaaacattcaagaaatctgggaaatataagatcctaaaaagcttttgaatgagaaggtgaagttgtttatgaaatatcagatattagaatgacatcagacttctcaacagtaaaatgccagaggatgatggataaacatcttcaaagtttttgttaaaaattttattccaaaatttccagtgaattcaaacatattaattaagtatggggaaataataagcatgtttttgaacatgcaacatgcac

SEQ ID NO: 254609 - DNA, 582 bp, Homo sapiens
aatcaacatacaaaagtcagttgcatttctatacactaacaatgagctattcaaaaaaactgataatctcatttacgatagcatcaaaaaacaaacaaaacagaaataaatccagaaggtgaaatatctgtacactgagaactatgaaaaactgaggaaagaaattaaagacacaaataaatagacagattctcacattcacagattggaagaattaataaatgatctacagattcaattcagtccctatcaaaatttcaatgactgtttttcagaaaaaaataattctagagttcatatgaaaccacaaaatcactgaatagctaaagcaacctcgagcaaaaagaacaaagctggaggtatcacacttcctgatttcaaaaaatattacaaacctatactaatcaaaatagcatggtactgccataaaagcagacacatagaccaatgaaacaaaatagagagttcagaaataaatccacrcatatatggttaactaattatcaacaaagatgccaaaaatacacaacaggacaataatagactcttcaataaatggtgttgggaaaactggatatccac

SEQ ID NO: 254610 - DNA, 612 bp, Homo sapiens
ctttgcaggttgaatttatacaaagtatgaatttgaacaaatcagaaataaattaaataaaataaagatacctggaaattttctaaatatttggaaattaaagaaaatattttgaaaaaacccacagttgaaaaatagctcacaaggcaaattgtaatgaaaatgaaaataccacataccaaaatttgaatcacacaaattatctgtgttgctttcagataattttatagcattaaattaaatcgtcattttagaaaagaaaaaagtctcaaagcagttatttaaactttaaagaaatttttaaaaactcaagcgaaatgcaaagtaagcagaaggaagcagataactatacaaatagaaatcaatcaaatgtaaaatgatrttgaagaccaaaaaagtagagaaaatcaatgaatgtaaaatctggtttattgaaatgatcagtaacttgataaatatctggctagattcatcataagagagaaaaacaaattaccaataataggaataaaattgtgggtatcacagcagccattaaataataataaggcaatgttatgaacaatttcatggcaataagtttggctacttacatgaaatatacaaatcctt

SEQ ID NO: 254611 - DNA, 567 bp, Homo sapiens
gcattgccaataagcagtaatatttttgaaaggaattattttctaggtagtagatctcaacagttgacttaatcagtaaaccatgctgttaacagatgtgctgtcaaccattttctcttctattttcagagcataggcagagtagatttagcataacttttaaaggccctatgatttttggaatggtaaatgagcactggcttcaacttaaagtcacyagctgtattagccccaacaagtggatcagcctgtcatcttgtttgaagcttttaagctaggcattgacttactctagctattaaaaccctagatggcatcttcttctaatataaggctgttctgtctacattgaaaatatgttgttcagtgtagccaccttcatcgatgaacttagctagattttttggataatttgctatagcttctacataagcacttgctgcacttttatgttatatagacaccttcctcctttaacctttatgaataacttttgctcacttcaatcttttcttctacaacttccttatttctctcagccttcacagaattgaggagggtagggtt

SEQ ID NO: 254612 - DNA, 568 bp, Homo sapiens
tcatctgaactgcgatgtgaacatgtaaacgtgggaatcagaatgattcatgctggggtggagtggccacagccaatgatatagtccatgctaagctccacaagtgtgaccatcttgaagtaataggatttttagtgatcgtaatgggatttcaaagtcagattctaattctgccaccactcacagcatgctttttggatcacaggatccctaygagctgtaggtgtctctgtggatggaaacaaatattatttgacccttaataatttgccacaattatttggattttggtacagagaaaagagagcaaataaggaggttgagagaaggaatctcctctgtggtgagtgagaatgcaatgtaaccctgggaattcacagatatagctgtccagcaagtctgctgggatagaggtggaggggagcggctttcttcttcttctggaaatgcaatgatgtgctgcaggcccagagtctccaggagttggacagtgggcctttcagtcaatcatagaaacaactggcacccaagtccagattgcctggccactaaaagtctatttctccac

SEQ ID NO: 254613 - DNA, 590 bp, Homo sapiens
ttcattgattatctatattcagaaacagaataggaatttagattggttccataaactttaaagtataccaaggcagagcatggctggtttactgcttttctttcttttttcttcctttttaactcttttctccatcggtatatccattttttattctcgtttttatttgccttttgcattattttacctactatatcattttattaaatatgaccaaatagagtctctcatttttttattattccaaaagcaaagkaaatttcattctagtgtttaccagcaaagctcctgcaagagcatctatgtaaatgctatccatgtaactaaatgcattccacattttgcccaaactaaattaaataccaacagaaatcttgccaaaaataaaaagaaagtgttaagactattttctattaatctttttattactccttattataatggtatatatgtacaaagacatacagaactaagagtacagctcaaagtgaataaatctgtgtaaccacaaattaagaaacaaaccagcacctcaggagaaccatctgccctcccacgatataccctcacctctccccaaaggtaaactg

SEQ ID NO: 254614 - DNA, 479 bp, Homo sapiens
gattttcaaataattttactaatttacatagcaaaccagcagtatatgagagtgcaattatttcatgttctcaatgctttatattttgatttttttaaattttagctattcttttgggtttgtaattgtatatttcattgagcactttttcatacaattatttagatacgctgatcctttacaarttcttgtttaagtcttttgcccatttatttatatcatctttattaaatttttatattgatctataggggttgttttagattctgtgggtctttttgtcaatatgtatattgtgaatatatttcttttctcactttttgcattgcattttaaaccttataatggtgaattctgataataagagatcttcattaagttcaacttatcaatattgccctttgtaatagtgctttgtgtgttctgtttcagaaatctttccacaaccccaggccatgaaaatactcacttgtgttatt

SEQ ID NO: 254615 - DNA, 624 bp, Homo sapiens
aactatagccttacaaaatgtatttcttaaataataagacttgaaagttgaaattactgcttgacacatgggctgcataatggatgttgtgttagcaggcattaatacaagattaatctactgtacatttccaccagcattcttgggtgaccaggggaattctcaatgcttagtaatgttttgaaagaaatctatttttctaagcagtagatctcaatgagggctttaacamttcagtaaaccacgtggtaaacaaatgtgctgtcatccaggctttgttgttaaatgtatagagaaaaggcagagtagattcagcataattttaagggctcttagatttttggaatggtaaatagcaatgccttcaacttaaaaatcaccagctgcattagcccatcacaagagagtcagactgtcctttgaagctttgaaggtaggaccatgcttgaaaaccagtgatgtagattgaagattgattgagtatatttgaaattttgtttgtttttaagtaaaaaatgcctctacccgtgatgaggaagagacttggacatacatccttagatttacatttgtatttgggccctgtggtaaccccacttccttacccagatgtgtcaacatgta

SEQ ID NO: 254616 - DNA, 624 bp, Homo sapiens
aactatagccttacaaaatgtatttcttaaataataagacttgaaagttgaaattactgcttgacacatgggctgcataatggatgttgtgttagcaggcattaatacaagattaatctactgtacatttccaccagcattcttgggtgaccaggggaattctcaatgcttagtaatgttttgaaagaaatctatttttctaagcagtagatctcaatgagggctttaacacttcagtaaaccacrtggtaaacaaatgtgctgtcatccaggctttgttgttaaatgtatagagaaaaggcagagtagattcagcataattttaagggctcttagatttttggaatggtaaatagcaatgccttcaacttaaaaatcaccagctgcattagcccatcacaagagagtcagactgtcctttgaagctttgaaggtaggaccatgcttgaaaaccagtgatgtagattgaagattgattgagtatatttgaaattttgtttgtttttaagtaaaaaatgcctctacccgtgatgaggaagagacttggacatacatccttagatttacatttgtatttgggccctgtggtaaccccacttccttacccagatgtgtcaacatgta

SEQ ID NO: 254617 - DNA, 624 bp, Homo sapiens
aactatagccttacaaaatgtatttcttaaataataagacttgaaagttgaaattactgcttgacacatgggctgcataatggatgttgtgttagcaggcattaatacaagattaatctactgtacatttccaccagcattcttgggtgaccaggggaattctcaatgcttagtaatgttttgaaagaaatctatttttctaagcagtagatctcaatgagggctttaacacttcagtaaaccacgtggtaaacaaatgtgctgtcatccaggctttgttgttaaatgtatagagaaaaggcagagtagattcagcataattttaagggctcttagatttttggaatggtaaatagcaatgccttcaacttaaaaatcaccagctgcattagcccatcacaagagagtcagactgtcctttgaagctttgaaggtaggaccatgcttgaaaaccagtgatgtagattgaagattgattgagtatatttgaaattttgtttgtttttaagtaaaaaatgcctctacccrtgatgaggaagagacttggacatacatccttagatttacatttgtatttgggccctgtggtaaccccacttccttacccagatgtgtcaacatgta

SEQ ID NO: 254618 - DNA, 607 bp, Homo sapiens
aataaaaatgtaacatatcaaaatttgggggaagcttataaagcattttgtagagaaaaatcatttaaatgcctatattagtagagaaaaaggtttaaaatcaatgattcgaagtttctactctaaaaagctaggtaaagaagaataaattcaatgtgaaataagttgaactaggtcataatacgcataagaacagaaagcaatgaagtaacacaggcacaccattaactagggctgctctttgaatgaataaataaaattaatccctagtaagctcaatcaataataaaaagaaataaacacaaattacaaatatcaagaattaaagagatataacgatagatatgaaaaggacaataaaggaatatagtaagaaaatttgtgccaagaaattttaaaaattagaaaatgtaatacttagtaaaaatgaacaaagccttaaaaatgctataaagctgaaacaaaaaatatatgaatattcctatatctctaagagagatggaatttttaatcaataaattttactccaaaaaattctagaaggagatttttttaatgctgawttctaccaaataatttaaggaagaataatatcttatataaactc

SEQ ID NO: 254619 - DNA, 589 bp, Homo sapiens
ggatattatcaacatctcgttattttgttctcataattatttgattaatgataatgactcagctgctttgtaatactatgtatgtcttttattagccttataacttcccttaacagtatagggaccttgatttcttagttttgccaagagagcaataaactcacagtcaagttacttttttagaatgtgtatagttcccaggtgaagggaatttcagttcacttagatatcctttaattttcacattcattccagcctcatttctactctgcatatgtctccagtatatttttgctcatgacacagaaatatcagttccattctttgctggaattaacaaacagcaaaatatctcacctgctggacagaatgcattgatctgctattktctatctgtcctagaacctcttgtagcaccattgtttaacacattcttggattcatatttagagcatcaggctaattcatgtttgctgatttgcatatgaaggctagatgttaaagtagaatttaaaatatttggttatatctactgtttttaccctctctaatttagtagaacgtttctggatgtcatattgtgtggttt

SEQ ID NO: 254620 - DNA, 585 bp, Homo sapiens
agcttgggatggtgattgggagtagctcacatgacacatgttaggatgttgccaaactcattttggcaaggctatttgatagtaaaaggatataacgctagcagcctctgttgtccaacaccagggagataattcttctgttcttatccagcatggtgccaagctctacgggaacaaaatggaagaaggaggaggcagaaaacgaagccctcaggtcccttaggttcaggaatgcacayaattaatgccttccttgacccttaggaaagccagagcgctaagcattgggaatattttacattaacaaaaccatatttgtttaaccagtatcctgtccttttttattgccacatcctggggaatttttgaatttattcaaaaaatgtcctgcaatgttagtactgaatctaatggctgggctgcattgcttcctgttactctccatctggccgtttgtactaacacaacacttaggggaatactttctatgtagatgtcaatgccctggcacaaaggagagacttgagacactggacataactttgtaaaaactatctcgaagaattagaatattgaaacatgaga

SEQ ID NO: 254621 - DNA, 612 bp, Homo sapiens
ttttctttctttcactctttctcttttacctttttctttttttttttttttttggcatttcttttacttttgagaactctctgctaagggctaactcaggtaaaatattaatagatgtcaagatgtttgaaaaaaccaagttggtaattataggggaaaggtatgcagcataacacagggcaatgacactgtgccaagctaagaataaggctagcaaactatagatgacgtgtgcatagtgggagctgtactaagtaaacctagcagcggttagaacagggaaatcttcagtagtctttatattttgacttcaaagcagcaatttggctacttaaatactgcaaaagatgggatttagaaagctataaaggataaataatgtagataaataaaaggtaaatgatgtagatacatctcaatgtagataaatcttgtggcttcttttataccatagatctgtaggctgaccatatgtcctggctcatgcaggatggctcttgtttacacttgtcttaattcaataatagtggctccttttattcacagyagtgttctagtttggatggtaaggtatacgttcacataatatatcagcaaaatgtttctgatagg

SEQ ID NO: 254622 - DNA, 572 bp, Homo sapiens
ttgggcaataagatcacgttggtggcaatgtatcttatctggaagtatgtgatgtcagctatccccttcttgtaaaattcagtataataacttgtactcttaataatctttgtactcaagttattatactcagtataataatttgatctcttaataatcttttagattcctattaaaaaggtacatattctcttcaaaattaatgaacaatctctgtaattaataagtaatgagtgaatttcttttcccaaaatattgaagcaaatgctcataaacaaaagcaattaatttaagaattcctttcctctttcggtgttgataatttatgaagaatrtttctgatctccagtggctactgttgggtgtgacaattctaggggattttcagttctcaaattaactgtggttcacagcaagaatgtggaatttggtagtatttctttgtcaatatcagcagcataaagtcttagaaatgtggagatgtaacggagtttcaataaagcaaaaccacagccctcctacatgtacacatactgcctatatttaaaacaggtataataatagcacctaat

SEQ ID NO: 254623 - DNA, 656 bp, Homo sapiens
tccgtattccattgtatgcaatggttaggagtattgcatatyctgcccatgggtagatagaatgttcccatgggcttggggctctgtgggcaattgcaaggagggctggcgtaagcgctgagccagaatcgggccttctttcttctttcttgagtgtacttagtgctgctgcaggctcactctaaccatttgcctaatggtattcctggacatccatgtgaggcttgacctcactcccactcaaggacagtcatcttgacactgtttttctccactttctgtgattatatagatggcagcttccaacttgagaattagggctatgctagaaaacctgtgatttccattgccccagtaagctcaagcctatttctatttctagggctatattaaccatgtcacatacactttcccatggttaccttaaggctacatttcccacaatattttctgacaactatttcatgctctgtgggaatagaaaaaaaaatgccattattaaatgagtttgggcagcctgtgtattctacctcctgctttcagctgcaccttccaggccctaagaactcctgtaggaaataaccaagtttatctcagcatttgccagacatagatgacagtgtgagacctttcttcatgtaacactaacaacatcc

SEQ ID NO: 254624 - DNA, 656 bp, Homo sapiens
tccgtattccattgtatgcaatggttaggagtattgcatattctgcccatgggtagatagaatgttcccatgggcttggggctctgtgggcaattgcaaggagggctggcgtaagcgctgagccagaatcgggccttctttcttctttcttgagtgtacttagtgctgctgcaggctcactctaaccatttgcctaatggtattcctggacatccatgtgaggcttgacctcactcccactcaaggacagtcatcttgacactgtttttctccactttctgtgattatatagatggcagcttccaacttgagaattagggctatgctagaaaacctgtgatttcmattgccccagtaagctcaagcctatttctatttctagggctatattaaccatgtcacatacactttcccatggttaccttaaggctacatttcccacaatattttctgacaactatttcatgctctgtgggaatagaaaaaaaaatgccattattaaatgagtttgggcagcctgtgtattctacctcctgctttcagctgcaccttccaggccctaagaactcctgtaggaaataaccaagtttatctcagcatttgccagacatagatgacagtgtgagacctttcttcatgtaacactaacaacatcc

SEQ ID NO: 254625 - DNA, 372 bp, Homo sapiens
agtttcctcagttccttggccagaaatcaattgcacacattgtaggtctatttatgcactgtctaacctgkttttttggcttatatttccatctttatgccatactgtcttgattattgtagtcttgaaataaatcttaaaatcagatactctaggttctctgtatttgttattctttgtcaaaaatagtttggtaattctacattatttgcattgcttaaataaatgtaaggatcaccttgtcattttcaacagaaaaggcttccaggattttgatgaagataatattaaatctatctatctatgtatctatctatcatctgtcatctatctataaattaaactagagaaataatgtgattaaagtataaa

SEQ ID NO: 254626 - DNA, 584 bp, Homo sapiens
catttcccacatttttttattgtgaatacatgttgcttttaaaaattttcctgctcaaaagtttatatactttattttagtttatttatttttttgaggcacaatcttgctgtgtcacccaggctggagggcagtgatgtgatctcagctcactgcaacctccacctcctggattcaagcgattctcctacstcagcctcccgagtagttgggactacaggtgcaccccaccacatctggctaatttttgtatttttagtagagacagggttccaccatgttggcccagctagtctcgaactcctgacctcaggtgatgaacttgcctcggcctctcaaagtgctgggattacaggcgtaaatcactgcacctggcctcatttcccacatttgtgccttttccatgttggttatttatccaggaaaaatattaaatacaacaacaacaaaaataggaactaatgtttattgattggttattatgctccacttaccattttaagagctttacatgtattaacttatttaatcatcagaataaccatttcaggtaattacattatttttccatttaactgagttag

SEQ ID NO: 254627 - DNA, 597 bp, Homo sapiens
catgttctcatatacaagtgggaactaaacattgagtatacatggatacaaagatgggaacaatagacactgggggctgcgtaaggaagaagggtgggagtggtacatggaatggaagggtaccgatcgggtactgtactcattaccttggtgacaggatcattcttacactgagcctcagcaacaagcaatatcgccatgtaccaaacctccacatgcattccctgaacctaaaataaaagtagagataaataaataaatataaataatatttatttattattggtaaataaatgaggcatttatttaccaagacaatgtttgtgttcyatgaccagttctgaaaaaatggagttaaatacatttatccaaaaaatggataaaaatactagattattatcctgatgcacaacaggaacctgttgtgctgtactcattttgtttagtcacatgttcacaaaaaagaattacaattaggagtattttttttaaacatgagcaaaagcgatattgaagcagttatggtgtctggggtaaatacctggggttcatcctcttgcaccaagaaaatttaggacacagacacatatgaggagt

SEQ ID NO: 254628 - DNA, 492 bp, Homo sapiens
tttgttgctcagcctctggatattaatccactaagccagtggcaacctaaataaaatcctcctgttccacccatctggtctctccagtctcctcattcctgcaacacctgcaatcccagctacatgggaggytgaggcaggagaatcacttgaacctgggaggcagagggcacagtgagccaagatggtgccactgcactccatcctgggtgacagagagagactcagtctcaaaaaaaaaaaaaaaaagaatataagtgaatgttgacctcatggggactcactggtgtttcagacatcaagactataggctagagttcaagacccagtgaggagatgtgatatgattttgtgtgaggcaagcatcaaaagcagacacctgtgtgtaaagcccagagatctgaagagctaacctgtctgtgaaaagggaattagataaaacacaggctaccagttcacagatgctagagagagcttgctgtcagcctaggg

SEQ ID NO: 254629 - DNA, 583 bp, Homo sapiens
gccacttcactggggctaaccttcctacagcaccacagactcatagcagtggtggtgtgtttgcccattttcttcccagggctgtgttaaaatgaaaaccatgctgatctctagccttagaagcatcctcagcagtctcctctctttgttcttgaccttgttctccttcacaaatgaagggaaagtaatggctgtgcaaaaaaacttgccccagtcttgcctcagatagctcagggaagtcccttcgctgtggctctgctgcaaggtcatgtcatgtgctcatkctccaaatttatcaccgaacataagcaccatgcccagtggcccctttctctacagtagtggttttcaagctttggggtcatggaaaattacatgcaaagcttgcttcattgccacccattactgggctatatcctagacctactgactcacacttttgtggtaagattcagttgccgcattttaggaagctccccatgaccatcacttagggccttcctgaagaggtatcactctcctgtaagcgtgtgcatcctccttcttttgaatctttcattagattctcatggacctgttccta

SEQ ID NO: 254630 - DNA, 537 bp, Homo sapiens
tgtttcactgcatcaaatacgtaggccaagggcagatgctctaaaaacgtgaaatacaatagaataaaataaatttgtataaatagaattataaaaatatgtaactctaaaaaatgaaaataaatatatacataaaataatatgtgtacatacataaataaaaagtcaaccacttttcagcacacacaactgaaagtactatttgagtctaaaaggccgctgtgaaacctttggcagagtaaagaaaacttgtttaaaattcctggtagaaacacttaaaaatatgttggaaactagaggacaaggagaagatctaagttaaggaagaagaagacagttgcattgcagatcccgagttacgggctrtgggctttctcttgcagcatggagggcccttctcccggatggtgctgtgagtgtccacatggttcaccgctggggagcccattctgttgaaagaatccatatctgtcaggattgctcggtggccctactcacaaggtatcttttccccaaagtttccaggtctacttgatt

SEQ ID NO: 254631 - DNA, 571 bp, Homo sapiens
ctttaaatgctactgattattcctccaaattgagagcttctcctgcatatttgaaatatattagttcattcaacaaataatgagcgatcacagcaaacaatttagtcctggaattcagcttccaattgttttccttttctgcccaaatttcaatatcttaattagagttgccagagttaccaaataaaaataytggaatgcccagttaaatttgattttcaaataaacatcaaataaaagtgaagtagaagtatgtcccgtgcagtatttggaatatattgctattaaacaattatctaaatgtatcactttaactgatcatcctgtgttttaccaggcaacctgtaatatttttgatcaccttaaaaccaaatttgaatgtttttccagactaaaccttaatccacatttacatcaagaaataatttttgtttgaaccactttcaccttcccactaacccagatttaaaattgttttcttgctagttctttaattatttctcacctggaacttaaaaacaacagatatctttttgttttttacaaactgacttatgaatgtgattcagca

SEQ ID NO: 254632 - DNA, 446 bp, Homo sapiens
acttttggtaaagatactttattgtgaccaagttgacaagatcttaggtcctaagaaacgaaaaaggcagagaaagatctctggctctgtgctccaaggctaccttctgtcctttgctcctctgcaaatgactttcatcagttagtgctctcgtgtggcacgattcaactttttttttttgtctcagcattttgtatatgttgtaaagtacaggttatattgtttttgcatacaggtatcaaaatatttcagcacaatatttaaaagactatccataacccattgatttacattagcattttataaaaaaattaaacacaaatttgtgtttattcmtagactttctgtgattttccattgatctataagtgtactgttacaccaacaccacagtgtcctgattactgacatcttgaaatcaggcagtaaaattcttccattttgtc

SEQ ID NO: 254633 - DNA, 670 bp, Homo sapiens
aatgatatagtaggcattgatgctaatttgcaactctaaatgccttttataaatcatgttcttcattaaaaaagagaaaaaaattattatctctattatctgttcccttccctacttgagaaacaaacaaacaaacaaaaaacttgccaaggaaaaaaagaagcagagtcttttctctgacattagcattataacatgtttacagcacaacatcagttcttttctgaaaataggtaaaatgcaaatgcattargatgctaaagattcaagatatgactacaatatgaccttggcagacaaaggtacagaaaggtaaacgaagaagccaccatcctgatcccaggattataccaataattcagcagtcaatgtgttttatcatatagccatgtttccgcacataaattattctagctccagtgctgctgttgcctatgcaattgcttttaaaatagaatgcattcttatgctaagtaagtgtgcttgctgtggtgctgaatatcattcttattctgagattagaatattaaaaataaatatttgcagctcctgtgataataaaagaaacacaacatgaactccagtgaaaatgtaagacaaaagaagagaaaacatttaaatgctgaacttataaagaagacaaagaacaaaagcaattgcttgacgttat

SEQ ID NO: 254634 - DNA, 548 bp, Homo sapiens
tgatttagaaggtatatatcacttctagttggataccctcatgtagctacaacagatcccagagaagactgtcttgagctgggcttcagtgtgcmatactgaaatgcagtggatactaaaagaagaagaaaaagaacatagaaggtgttttaagccatgtctaatacaagaggactttttcttattaatatttttctataatttttaatttaaaaatgggtatgtattccatttataattctgaaatggcacacgtgcatgcacacacatacaaacctgaaaaaagaaatcctcactgggtttgttctataatacctcttttaaaaaggtcacccgttataggtacctgcatactgtacagatactttgctcctttattcagatttctaatttaaacatcaaggaaggaacaatgaaatgaatgctctaatagaatacataatctcagagtaatttctctagccctttctaatagaccagaattttgtttttattttattatgtgtttacagcagatcagcccttctgaatatagttgttagtttgag

SEQ ID NO: 254635 - DNA, 617 bp, Homo sapiens
tcactgggtttgttctataatacctcttttaaaaaggtcacccgttataggtacctgcatactgtacagatactttgctcctttattcagatttctaatttaaacatcaaggaaggaacaatgaaatgaatgctctaatagaatacataatctcagagtaatttctcyagccctttctaatagaccagaattttgtttttattttattatgtgtttacagcagatcagcccttctgaatatagttgttagtttgagtaataaattgagaatagattaactgagataagcccagcttagatccaggaggaactggctgaaatgttgtaggtagtggtgggaagttgtcctggtaagaaattcccacagattaactagaatttactacacatcactattttatatctggttttgatattatgctttctaacgggatggataacaacacttcccttcctgtggattagagagaaatcttatgagtttctccaaagagtgcaaaaacttcaggcctatttatttccaattataggctttgacttttacatcaaacctcatgttcatttttaaattttgaatcatcagtgggttttaaaatattgctaattacaggaggcat

SEQ ID NO: 254636 - DNA, 605 bp, Homo sapiens
ttactacacatcactattttatatctggttttgatattatgctttctaacgggatggataacaacacttcccttcctgtggattagagagaaatcttatgagtttctccaaagagtgcaaaaacttcaggcctatttrtttccaattataggctttgacttttacatcaaacctcatgttcatttttaaattttgaatcatcagtgggttttaaaatattgctaattacaggaggcataaatgttaaagtgttaaaaatactaaaagtgaacaaccttccagaaaaaaatgttttcagttgaatttctcaactaatgaaaatgacaatgacaatgtgggtgttatttagttgtctattttatctgacaaacacatgtgatgcgatgacacatgaaacacaaaattattgatgaaatatgaaagctattgaatggaaaacattgggcatggataggatggttttataactggtagaaaatgttcatttagggaaaagataattgttctgccaatctagatcctgtggatttaacagtctacttgggtgttttccatagctgcgccatttccccctataattatggtgtcaacttttaagtaaatat

SEQ ID NO: 254637 - DNA, 593 bp, Homo sapiens
cacccacgctgcccagatggcaaaatgcttcagccttcactgatgtcttacagtgctgcagaggcatgtgtctgtgctggccggcctgggcctggcaaatgatgtgccgtcttctttctgtgcacagcagctcaaaaaccatgatgaggcttcgtctgctggaatgaacagatatcaatttaagcagttggcctctgaaatttcattcacatttatggacatttctatttttctacatttaaacctcaggaagtagatcagagattgcaaatttcctcccataagcagggacacaggtttccagaatgtgagtgtgtatgtttatttcagattgagcatgtgwgcttgagagagacagagagataggaagaaacaagtctttctacgggacacttggttgacccataaattcacttttcttgttggggttagtttcttctttattatttcctatctcatcttatcttgggtttatttggccatttcttttactaagttcttgaaacaaatgcttggcttattagttttccaactctcctttttttctaagataggcattcaatagagcccacacatcttctatggtcattaat

SEQ ID NO: 254638 - DNA, 587 bp, Homo sapiens
aagatgtggtaagattgggtgaaaattaagatttttaaagtgtaattctctttcaacaaaggaaagtgagttattacttttgtgcaaaagtaattgcagtttttggaattacttttaaaagtaaagaccataattacttttgcaccaacctactaaataacccttaacattttaatgaacaaggcacaaggcagatcacacaatgaacaaggcagatcacacaataaggaaacaacagaaaacyagtcatctgagcacacaagaaaagaaggaatgggcatttctccgatgacaagttgtggaacacagaggtgagaagatgatgtacagttaaaacatgaacattgaaacaaattctaaagactgatggtgccaaataagtttatcagtaaattgtgtaagatggacttaattattcttaaaattatccataaagctgttctcaaagacattatcaagtgcctagctgaagtcaaggcatctgtctgttacactttcttgtgtcaccagatgagtaatccagtcataaataaaatgagactttctttccttaatcttagtgaatatctcattctagtgaaatattc

SEQ ID NO: 254639 - DNA, 554 bp, Homo sapiens
aaaaaaaaaaaaagttacaaagttatcccttgttgaattataaaataatttaaaatatttcaatttatctattttttcttacttgtgtttttcatgtcatatttaagaaaccatgcctaatccaaggttatgtagatatatggtcatgttttctaactaaataggttttagttttatttcttgaatttaattctttgattttcttgagttaattttctatgtgttgttaacttagtaagttcaacatcattcttttttacatagatatccagttttccagcgccattwgttggaaagaacatttttttccattgaatcgccttggaacctttgtcaaaaatcaattgaccatagatatatggatttatttctgggctttcaattctctttcgttgatacatatgtctatccatctatccttatgccaataccatgctgtcttgatttctgcagctttttagtaagttttgaaattgggaagttgagtcttccgaatttgttctttttttgttaagattgttttgactattttgggtctcaagtatttccatatg

SEQ ID NO: 254640 - DNA, 551 bp, Homo sapiens
aattatttaaattaaatgattttagcaacatgagaaatgtagtatatttttctgatttattttataagatatttcttcacagatgaaaactttataacaaaatagcccagttgttattgttgttgttgttgttgttgttgttgtttttaagttggagtcttgttctgtcacccaggctgcagtgcagtggtacgatctcggctcactacaacctcggcctcccgggttccagcgattctcctgcctcagccacccaagtagctgggtctacaggcgcatgccactacgcctggctaatttttgtatttttaggagagacaggttttcaccatgttggccaggctggtctcaaactcctgaccttaggtgatttgcccacctcagcctcccaaagtgccaggattacaggcgtgagcaaaggcgcccagccatagcccgggtacttttatgactaggtggaaatcactgatttaaacggctggcactttactctayagaaacagttcagataatgaaaaaagcatcttcattagactctctctacttttcct

SEQ ID NO: 254641 - DNA, 585 bp, Homo sapiens
tctgccaatctgcattttaattgaagcctttaatttatgttttaatgtaattactgataaataggatttacatatgccattttacttttcattttctatatatatcttatgttttctttgttcctcagttcctccaatactgcctccttctgtgttaaatagatattttctagtgaaccatcgtaatgcctttaccatttcttttattgtatatttctgagttatgttcttagtggttcctctggggattactgttaatatcttaayttataccattcttgtttgtatgactatcagtttaatttcaattacatataaaaatgcatttatttagatctggtcttccatcccttacttactgtcacaaaatgtatccttatacattattctcaccaacttattaagtgaattaaactaatctagatcattatcattaacaaatatttgttgatcatccagcaacaacttgtatgcctacatttgcttttaaatcatatttaaaaatggactcacaaataaaaatacatttttactatctttaatatttatctatataatagtctttactaatgctctttatttcct

SEQ ID NO: 254642 - DNA, 628 bp, Homo sapiens
gataaatttatcattaaaaaagaaacagaatggaaggattcggaaaatgtgcaccctatccgtctaaggagtgaaaaaacatattccgaaaagaatactaagggtatgtacaacaggcagtttgctaaagagattaatgtggctagaagaaatccaggtgccattcattacgacaatgggagaaagactctaaaggcatttgagagacctctgaggctgtccctaccttcacaggcccagagctctaggcaaggacaatcattttaggaaacgagcccaggttgctctccacagtctcatcgctcaggacggtcttgggactctgccgtgtgcattctgatgtagcattcrtcagccacctcagccattgctcaagcagccccagatatagcttgacccaccactccagtaagtacaagcagtaagcgttgcagcatccacagtgttaattctgcaggtgtgaagaatgcaagcattctggtggcatggcttcctctacctagattttaaaggatgaacctgctacaacagagtgtcccaactaaggcaaagccttatagagctgtgggaaaggggccacctcaaagactccagaactatagagtcaccagcatccaacaccagcctg

SEQ ID NO: 254643 - DNA, 628 bp, Homo sapiens
gataaatttatcattaaaaaagaaacagaatggaaggattcggaaaatgtgcaccctatccgtctaaggagtgaaaaaacatattccgaaaagaatactaagggtatgtacaacaggcagtttgctaaagagattaatgtggctagaagaaatccaggtgccattcattacgacaatgggagaaagactctaaaggcatttgagagacctctgaggctgtccctaccttcacaggcccagagctctaggcaaggacaatcattttaggaaacgagcccaggttgctctccacagtctcatcgctcaggacggtcttgggactctgccgtgtgcattctgatgtagcattcatcagccaccycagccattgctcaagcagccccagatatagcttgacccaccactccagtaagtacaagcagtaagcgttgcagcatccacagtgttaattctgcaggtgtgaagaatgcaagcattctggtggcatggcttcctctacctagattttaaaggatgaacctgctacaacagagtgtcccaactaaggcaaagccttatagagctgtgggaaaggggccacctcaaagactccagaactatagagtcaccagcatccaacaccagcctg

SEQ ID NO: 254644 - DNA, 628 bp, Homo sapiens
gataaatttatcattaaaaaagaaacagaatggaaggattcggaaaatgtgcaccctatccgtctaaggagtgaaaaaacatattccgaaaagaatactaagggtatgtacaacaggcagtttgctaaagagattaatgtggctagaagaaatccaggtgccattcattacgacaatgggagaaagactctaaaggcatttgagagacctctgaggctgtccctaccttcacaggcccagagctctaggcaaggacaatcattttaggaaacgagcccaggttgctctccacagtctcatcgctcaggacggtcttgggactctgccgtgtgcattctgatgtagcattcatcagccacctcagccattgctcaagcagccccagatatagcttgacccaccactccagtaagtacaagcagtaagcgttgcagcatccacagtgttaattctgcaggtgtgaagaatgcaagcattctggtggcatggcttcctctacctagattttaaaggatgaacctgytacaacagagtgtcccaactaaggcaaagccttatagagctgtgggaaaggggccacctcaaagactccagaactatagagtcaccagcatccaacaccagcctg

SEQ ID NO: 254645 - DNA, 568 bp, Homo sapiens
atcactctgaatgtggagcaaagctgcccatgaggaacaaatatactcctgttctttaagccagtttttaaaagtttatcctaatatattcatagataattatgtatatcaaatatcaaagtatattgaaagttgttaccaattttatttcctgaagcgtatgtaatgctcactaaatatttgtggaatgagaaatyaaagagtacttgccttaattttaattaaagctgataaagccttaaggacattcctactgtgtgtgaaatagtatttgtgacaatcatcacttgttcatcttggattttgctttgaattaccttttcttctttttgattgctgaaaattaagtgtaatctcattatttattcctctctccttttagttacattatcttaatacacaaatattctctgagtagctccgttgagtttgtcttgcattgacttttagttgcttagtatatttctctttagggactgagactatatgatgtacagccatacataggtagacacactgggaagcagcgtgggataatgaaaattattaggaatttagagggcttaag

SEQ ID NO: 254646 - DNA, 588 bp, Homo sapiens
tttctacatatgaaaagccttaagtatcagaatgatcaaaagtagttctggaatcagaatgttgaggttcaaattcttgtctcattacttactgtttgtttgaccttagacaagtcacataatcactacaagcctcatttgtaataacatctatcattaaggtggttgtgagaatcaaatgtattgatttctgtaaagtgcttggaggacaaactgacctatagtacagaatcatttatggctctcattatcatgggccaagtgctgggctaggtgttgtgtatgcaatcataaacaaarcactcataatccctgcctttctggagtgtaaaatcaattgacccatgcatctttagcaacaagtacatgcatatctaaatgataaattcctgagcacagaattgctatgtaaaacaactatataaattaagtgctatttggtaaatataataaagagagtaattatatggtctttccagcataactcatttggttttctttatcactttgttagatagaacatacataataatgctacatagtcatacatgactggcattccagtggtaattctaattttaatgagaa

SEQ ID NO: 254647 - DNA, 599 bp, Homo sapiens
gttaaaatgaaagagtatcagtttaatcctcctccactttgctactaggtccattagtaagtacctctattgacagtctatgcagtttttatataatatttttgaatattttccttaattcctggaaacccaccaatgcattttaccatgagaagtttactcagggtacttggcctttttgtttctttatcaccatcttattaagggaaatttcaaatatgtgtatacaagaaaacagagtaatatagtaaacactatgcaactgtcttccagcttctgaaattatctttaactcagtaccgatcttgttttacttatatatgacccaccttccctactttgaattattctgaagtaatcccagatatcttattggctgcataggtatcrgttgggggttttcagcctatgttctagtacaacatacacaatagataattttcccatgtgtaatacaatctacctaggtgactcacttatagactcttacctaattatttttaaatgaatagatgtatacacacaaatatagacaattctcagatgatgaaccaaaatctcccttcatttctcacaatcaggaaacatattaaaatgca

SEQ ID NO: 254648 - DNA, 599 bp, Homo sapiens
gttaaaatgaaagagtatcagtttaatcctcctccactttgctactaggtccattagtaagtacctctattgacagtctatgcagtttttatataatatttttgaatattttccttaattcctggaaacccaccaatgcattttaccatgagaagtttactcagggtacttggcctttttgtttctttatcaccatcttattaagggaaatttcaaatatgtgtatacaagaaaacagagtaatatagtaaacactatgcaactgtcttccagcttctgaaattatctttaactcagtaccgatcttgttttacttatatatgacccaccttccctactttgaattattctgaagtaatcccagatatcttattggctgcataggtatcagttgggggttttcagcctatgttctagtacaacatacacaatagataattttcccatgtgtaatacaatctacctaggtgactcacttayagactcttacctaattatttttaaatgaatagatgtatacacacaaatatagacaattctcagatgatgaaccaaaatctcccttcatttctcacaatcaggaaacatattaaaatgca

SEQ ID NO: 254649 - DNA, 587 bp, Homo sapiens
aattattattgcatactccctattctaaagtagtggggataaatctagataattaagatctagttcttaaaggttgtaacatcttaaaatgtggaataactcaagatctgtagaataagaaggatagatttaagaatattgagctagtagagaattgggaggaaagaaactaaagaagaaaaacaatagaaagctatctatggtaaagaaaatggttccaacaatctaaacgtcctgtttatgtctttgataagcttatccttattttcacttaygttattatacttttttacctcccaaggaaaaacatactggtggacaagagcatacccatgagagccagagggtctgatttgaacctctgtgcgttagttgtctgtagtagatagagtttaactaaaacatgatgatggaggaaaaaatagtcgattaaaaggtattctctctgaaaggtttgtggacaaataggttcttaaactcatctacttgtcaacaaaatatgaataatacgaatatttcagacaactggaaaaccctaagcaacaaaaaggcacacagagcaatcagcaagaaaattaaatacacca

SEQ ID NO: 254650 - DNA, 562 bp, Homo sapiens
aaattaagtaatgcttacactatgatccaataattaaactccaaagtatatacctaagatacataaatgagtttttccagcaaaagagttgaaaaggagtgttcatagcagctttattcataaaattccaactagaagcaaccaaatgccatcaacaggtgaaaggtaaaacaaatagtagttcatttttgtaaaatagtagtattcattcaatgaaacagcaattaaaagaaaaaaagaaggaacaaatactggtgcctgcaacaacatgttctatttcaccaataatatattcactgaaataaaccagacaaatagaacacaaacttcatgatcccagttatatgaatttcaagaagcaacaaaactagtagatattcatagaagtcacattagtgacctctgagggaatatgaactggcaagactcacagtggaaatgtatgaagtgctggaaatattgtacatcttcttggggtgcttgcrtgtgtttgtgtatgcattaggtgcacagtaaaaaatcgtatatctcatagactttattatgtattatataataagtt

SEQ ID NO: 254651 - DNA, 661 bp, Homo sapiens
ctcgctctgtttatatatctcattaagtataccttgtatgttatttttacaatctattcaaaactcagtgtctmagtttaatatagacatgtaatatacactagatttcactctagattattaatgacaaccttctcatccccatttcctcccactcaatgtcaaacacaaggttacttttagcaaagtatacctataggggagaaaaactttctcacccattgcaaggttcattgctgaggcccctataacagaagacaaattaagagaaaatgcacatttatcaaatacaagttttcatgacatagaagccttcctaaaagaagatccaaagaaataagagaaactatatttttgtggtaaagcatatcagaggcattcgaacaagagtgactaccttgaatagcagctgggcaaaattaggctgagacctgctgggcttgaattcccaggaagttaggcatttttagtcacaggatgaaataggaagttggcacaagatacacagtcataaagacctcgctgataaaacaggatgtagtaaagaagccagctaaaactcatcagaaccaagatggtgatcaaagggacctttggtattcatcactgcccattatatgctaattataatgcactggcatgctaaaagacatttccacca

SEQ ID NO: 254652 - DNA, 661 bp, Homo sapiens
ctcgctctgtttatatatctcattaagtataccttgtatgttatttttacaatctattcaaaactcagtgtctcagtttaatatagacatgtaatatacactagatttcrctctagattattaatgacaaccttctcatccccatttcctcccactcaatgtcaaacacaaggttacttttagcaaagtatacctataggggagaaaaactttctcacccattgcaaggttcattgctgaggcccctataacagaagacaaattaagagaaaatgcacatttatcaaatacaagttttcatgacatagaagccttcctaaaagaagatccaaagaaataagagaaactatatttttgtggtaaagcatatcagaggcattcgaacaagagtgactaccttgaatagcagctgggcaaaattaggctgagacctgctgggcttgaattcccaggaagttaggcatttttagtcacaggatgaaataggaagttggcacaagatacacagtcataaagacctcgctgataaaacaggatgtagtaaagaagccagctaaaactcatcagaaccaagatggtgatcaaagggacctttggtattcatcactgcccattatatgctaattataatgcactggcatgctaaaagacatttccacca

SEQ ID NO: 254653 - DNA, 608 bp, Homo sapiens
acaactgtattaatatttttttgtttactttgtgatctttttatttatttcctatctgctattttattgatttctacattcatgtttatttttcttctgtttacttttgacttaatatgctttgtttctccagctttttaagttagaagcttagaattttttatttaaaatattyaatatacccattacatattataattatttctataaatactgctttatctaataggtttttacatgttttgttttaatcttcattcagtgctaaatattttcttcttttccatgtaaacttttagttcataacaaatgcagaaatgtgtttattaattttcaagtatttggatattttataaatattattgaattttatttattaggggttattaaaaaacacactctgcctgaaatttcctgagacttctattatggcccaatttgttcatcttggtcagtgttccatgtgaaattgaaaataatgtgtattctgatgttgatgggtgtagagctctgtgtatttcatgaagtgaactctttatttctgatatatttttttcaattctgaaatttccattgaagtcttttgtatcatttctctgttgaaatta

SEQ ID NO: 254654 - DNA, 459 bp, Homo sapiens
tgagctgggtaaaacagactcatccttaatctgagtgggcarcatctaatcagctgccagcacagctttgataaaagcaggcagaagaacatgaaaaggctaggctggcttagcctcccagcctacatctttctcccagcctggatgcttcctgctcttgaacatcagactccaggttcttcagttttggactcggactggctttcttgctcctcagactgcagacagcctattgtaagaccttatgattgtgtgagttattactccttaataaactccactttttatatacatgtatcctattagttctgtctctctagagaaccctgattaatatacatcttaaaacaatgagtagaaacggaaatgaatgaaatatgtcccccagaaaagagcgtatctcttgctctctcaggctgctaatgaaggaggatgagccactttaattggtgattttgc

SEQ ID NO: 254655 - DNA, 559 bp, Homo sapiens
tagctacctcatcgctgcattaagagattttactttatacacaatagacaaatagtaaatattattataagcttaccaaaatatttttttccacttcataagctctctgagtcaagtattggaatacctcagttcttacatttggaatgctctagggatcagtcctcaagtcttttctatttgtactcacactcctggtagtgtcatgcaaactcatggctttaatatcctctatatgacaactaattgtgaattacattttcagtttaggcctctctccaaaattccaggcttaggtatctgacatctcctcaacaggtcctttggaacatgtaattaaaaacctgtccaaaaacaaacttcttatctgccaaaaagcatgctccagttacagccatycttgtacaaggaaaaaaaaaaagaatttcacatggatcagtttaggtcaaaatcattaaattgttctctggaatttttgtttttctgtcatatctcaccttacattttttactaaatcccgtagattttgatgttaaaatattttcagagcccatctgtt

SEQ ID NO: 254656 - DNA, 566 bp, Homo sapiens
tgaacatgaaaatggaaaacaacagcaagtaaaaccaacaagcaatgcagccacattttgtagaatttctgtgtgcatttttttcaagaatgcctcttgttagtttagacactcatgtgtctaatccattttggttttctgacttcttggcctggcttcatcaatgttcctgtgaccaatcacctaatttcaccttctggatcacctcttcctgacactagatatcaagcagcctgacaaaacaactttagaaaatacttaggaaatcttcttagttagagagttttatagtggataaagacttaagggaaggctctgagaaattrtacttggaaaattagaggatgcagttcaggatttcccagcttagaggaagagacctggaggagaagtgcgtgtcgtgccaaatgaagacgatggcctatccagagtcgattctattaatatgtgtgtgtgtctgcatacatgtgtgcatgttgtgggaccgtggaaaatagttcagggtaggcatgtaagcttaggttacaataaatcaggaaaaccaggaatttagcaattatacatga

SEQ ID NO: 254657 - DNA, 566 bp, Homo sapiens
tgaacatgaaaatggaaaacaacagcaagtaaaaccaacaagcaatgcagccacattttgtagaatttctgtgtgcatttttttcaagaatgcctcttgttagtttagacactcatgtgtctaatccattttggttttctgacttcttggcctggcttcatcaatgttcctgtgaccaatcacctaatttcaccttctggatcacctcttcctgacactagatatcaagcagcctgacaaaacaactttagaaaatacttaggaaatcttcttagttagagagttttatagtggataaagacttaagggaaggctctgagaaattatacttggaaaattagaggatgcagttcaggatttcccagcttagaggaagagacctggaggagaagtgcrtgtcgtgccaaatgaagacgatggcctatccagagtcgattctattaatatgtgtgtgtgtctgcatacatgtgtgcatgttgtgggaccgtggaaaatagttcagggtaggcatgtaagcttaggttacaataaatcaggaaaaccaggaatttagcaattatacatga

SEQ ID NO: 254658 - DNA, 619 bp, Homo sapiens
tttgtaaaatggttatagtcaggggtttccttaactcaatagcactgcattgatttacaaaacacaaacaaaaaagtctcaatagttgttcatatttacaaaggaaaactttgtgtagtgatctttaagttgccttttatgaataggaatataaacatgctttagaatcaaaggggtatcaacaggaaatttgctgttctctgatttttctaggcttttcggcctgctacccaaagcttcaaaaataaacatagtttagtgaagcttctaaactcagggtgtatagagaaacgacaaggaaagaaaggaaaggaaatggtttgtgtctgacataatgatgaagtgtatggttgctgctcactggtgaagataaacaaaatgtagctgaatagaagcatgtcttctgtatcttgtccatttttacataccaggataaaacawctgaactgattaatcaaaggttattccagaatgatcacagagacatataagttctgaaataaatatttatacatatggaggtattacatagtcttgattctggaaacatagaagtcttggaagtaattctagtcttaactagcagttctctgtctatggattggtgtttttctagaat

SEQ ID NO: 254659 - DNA, 528 bp, Homo sapiens
tccagggaacccctgctctgtgcagccttgggacttggtgccctgcatccaagccactccagtcagtgttaaaaggggccaaggtacagctcaggctgtggcttcagaggatacaagccttaagccttggcagccttcatgtagtgttgggcctgtgggtacacagacatcaggaaatgaggtttgggaacctctgcctagatttcagaagatgtatgaaaatacctgaatgttgaggcagaagtctgctgcaggggtggagccctgcagagaggcacagagaacctctgctagggcaatgcagaagggaaatgtggggttggagcccccaygtagagtccctactggggcactgcctgttggagctgtgagaagagggacaccatcctcttgaccccagaatggtagatacaccaacagcctgcaccatgtgcctagaaaagccacaggctctccaggccatgaaagcagccagaagggaagctgtaccctgcaaagacacaggagcagagctgccaaaggctgtgg

SEQ ID NO: 254660 - DNA, 567 bp, Homo sapiens
catgcatgtctttgttaggcacatgataatggactaatamaactattttattaataagtgatcaagtaatctctttttgagacagggtcttgctctgtcaactgggctggtgtgatcacagctctcatgcaacctccacttctggggctcaagcaatcctcccacctcagactcttgagtacgtaggactagaggcttgcaccaccacacccagctaatttttgtttatttgttaattttcttttttgtagagatgtgatttctccacgttttttagtctggtcctgaactactggggtctagtgctctgcctgcctcaacatcccaaagtgctggaattacaggcctgagccactgcacccggcctagcttgtagtctcttgaagtacagaattgaaactggcaaaataaattggctacaggtttttagactggattaaattaatatatattattaaaaagatcatattgtcccattattaaaaattatttgaaaataaagtcaaccataatcccaaaacactgatgacccatttacttcttaaattattattttcactttctgtt

SEQ ID NO: 254661 - DNA, 567 bp, Homo sapiens
catgcatgtctttgttaggcacatgataatggactaataaaactrttttattaataagtgatcaagtaatctctttttgagacagggtcttgctctgtcaactgggctggtgtgatcacagctctcatgcaacctccacttctggggctcaagcaatcctcccacctcagactcttgagtacgtaggactagaggcttgcaccaccacacccagctaatttttgtttatttgttaattttcttttttgtagagatgtgatttctccacgttttttagtctggtcctgaactactggggtctagtgctctgcctgcctcaacatcccaaagtgctggaattacaggcctgagccactgcacccggcctagcttgtagtctcttgaagtacagaattgaaactggcaaaataaattggctacaggtttttagactggattaaattaatatatattattaaaaagatcatattgtcccattattaaaaattatttgaaaataaagtcaaccataatcccaaaacactgatgacccatttacttcttaaattattattttcactttctgtt

SEQ ID NO: 254662 - DNA, 567 bp, Homo sapiens
catgcatgtctttgttaggcacatgataatggactaataaaactattttattaataagtgatcaagtaatctctttttgagacagggtcttgctctgtcaactgggctggtgtgatcacagctctcatgcaacctccacttctggggctcaagcaatcctcccacctcagactcttgagtacgtaggactagaggcttgcaccaccacacccagctaatttttgtttatttgttaattttcttttttgtagagatgtgatttctccacgttttttagtctggtcctgaactactggggtctagtgytctgcctgcctcaacatcccaaagtgctggaattacaggcctgagccactgcacccggcctagcttgtagtctcttgaagtacagaattgaaactggcaaaataaattggctacaggtttttagactggattaaattaatatatattattaaaaagatcatattgtcccattattaaaaattatttgaaaataaagtcaaccataatcccaaaacactgatgacccatttacttcttaaattattattttcactttctgtt

SEQ ID NO: 254663 - DNA, 561 bp, Homo sapiens
gcttgctttgtctcttcagactgtgttttttccttrccttatggcatgcctggcaattttttgttgaaagccagacataatttatcagataataagaactgaggtgaacaggtctcttgtgtgaggatgtgagttaatctggctaggaattggtctttgcttaatgtttgctgtagctataggtgtcagaagcttcaaattcctccagtgtccttgtttttgtctgtcccctgactttgggtttcctgatgtactcctccttaaagagagtctgtatcatgctgctgtctcagcaagaatgcagtattaggacactgcagtcctggttggtgtggtggtaaggtgttgggaagaggaattgttcaataatctctcatttcaatcttcatcttttagtgggcctgtgactttcacaactatttcttcttgtatagcttctccacctctagcccattagataagacaggaaagctatgggcaactggagcaagaatgcctttcccccatacctctgggacaaggctctggtaaggtctttccccgctggagagcattcttttg

SEQ ID NO: 254664 - DNA, 607 bp, Homo sapiens
gaaacaaaagaagcccactcatcacattccccagaggtaagaaagataatgtttaaaaaatgtaatttaaattggccaaaaacataataaaaatattctttctaggaaaatgatattctatttatctttataaatttagaatctaacgaatatggcatgtataaaggctgatacacgattactatatacacatagtgtatgcgtgtgtgtgtatatatatatatataacatgcatataaaatcagattattctgtgygtattgttcatttttatacattcagtctacatatcacctaactcccttttatagaaagcagattagtgttatttactgaagaattgttaaattaccttcttctagtttgctgattacttagctcctccttaaataggagtatagacctcaaattataagagctgcacaagaaagtgtagtttaactattcatatgactttgtgcaagtcactcaaccccgggactttttctttaaggataaaatgtagcagtgttacagagtgggaaagaagttcaagtcagaatatcataggcatcttggcttcctaatgatattaaaatgtcaattaaaatattataaatgaaaatta

SEQ ID NO: 254665 - DNA, 607 bp, Homo sapiens
gaaacaaaagaagcccactcatcacattccccagaggtaagaaagataatgtttaaaaaatgtaatttaaattggccaaaaacataataaaaatattctttctaggaaaatgatattctatttatctttataaatttagaatctaacgaatatggcatgtataaaggctgatacacgattactatatacacatagtgtatgcgtgtgtgtgtatatatatatatataacatgcatataaaatcagattattctgtgtgtattgttyatttttatacattcagtctacatatcacctaactcccttttatagaaagcagattagtgttatttactgaagaattgttaaattaccttcttctagtttgctgattacttagctcctccttaaataggagtatagacctcaaattataagagctgcacaagaaagtgtagtttaactattcatatgactttgtgcaagtcactcaaccccgggactttttctttaaggataaaatgtagcagtgttacagagtgggaaagaagttcaagtcagaatatcataggcatcttggcttcctaatgatattaaaatgtcaattaaaatattataaatgaaaatta

SEQ ID NO: 254666 - DNA, 607 bp, Homo sapiens
gaaacaaaagaagcccactcatcacattccccagaggtaagaaagataatgtttaaaaaatgtaatttaaattggccaaaaacataataaaaatattctttctaggaaaatgatattctatttatctttataaatttagaatctaacgaatatggcatgtataaaggctgatacacgattactatatacacatagtgtatgcgtgtgtgtgtatatatatatatataacatgcatataaaatcagattattctgtgtgtattgttcatttttatacattcagtctacatatcacctaactcccttttatagaaagcagattagtgttatttactgaagaattgttaaattaccttcttctagtttgctgattacttagctcctccttaaataggrgtatagacctcaaattataagagctgcacaagaaagtgtagtttaactattcatatgactttgtgcaagtcactcaaccccgggactttttctttaaggataaaatgtagcagtgttacagagtgggaaagaagttcaagtcagaatatcataggcatcttggcttcctaatgatattaaaatgtcaattaaaatattataaatgaaaatta

SEQ ID NO: 254667 - DNA, 572 bp, Homo sapiens
taacgaatatggcatgtataaaggctgatacacgattactatatacacatagtgtatgcgtgtgtgtgtatatatatatatataacatgcatataaaatcagattattctgtgtgtattgttcatttttatacattcagtctacatatcacctaactcccttttatagaaagcagattagtgttatttactgaagaattgttaaattaccttcttctagtttgctgattacttagctcctccttaaataggagtatagacctcaaattataagagctgcacaagaaagtgtagtttaactattcatatgactttgtgcaagtcactcaaccccgggactttttctttaaggataaaatgyagcagtgttacagagtgggaaagaagttcaagtcagaatatcataggcatcttggcttcctaatgatattaaaatgtcaattaaaatattataaatgaaaattatcacttgaaaagtaagcataagctaatgtatctcaaaaaattgtctaaaatgacctaaacaattgcatgagatactaattttagtgactaaattaggggcagaattat

SEQ ID NO: 254668 - DNA, 561 bp, Homo sapiens
agctgcacaagaaagtgtagtttaactattcatatgactttgtgcaagtcactcaaccccgggactttttctttaaggataaaatgtagcagtgttacagagtgggaaagaagttcaagtcagaatatcataggcatcttggcttcctaatgatattaaaatgtcaattaaaatattataaatraaaattatcacttgaaaagtaagcataagctaatgtatctcaaaaaattgtctaaaatgacctaaacaattgcatgagatactaattttagtgactaaattaggggcagaattatgtaactattttttaattacatagtcaatgttgactgtttatgagctattgaatgattaccatggaatgccaagataattacttaaggcctgattcagtctcaaatatctctgcagctgtagaggctgctgagtcctgtggattttcctctggattgccagctgcacagactttccaccagttatgaagccataagcctgattctactcatactcagccacctacaatcccatacagtgtttggtgcataagggcacttaaac

SEQ ID NO: 254669 - DNA, 473 bp, Homo sapiens
gaatttgtacacaagggctttccctcttcaggctttgaactccaaatatatacaaaacggtccagggatgcccatcaagagaaacagcctaaaggttagtggtgcgttggtaaacctcttgagatatattaaagaagcmaaaaaaaaaaaaaaaaaaaaaaattatctaaagggctgaatcttcaacactggccacaaatgactgtaggtcaagccatgattaggaatcacaggggaaaacaggccagtgttgaatgataggcagcagaaagacatcaatagaatatgaagcttacacctttcaaatgctcagctagaaaaatattacaacaaatgctttacagtattaaaatgtgattgtcttaatagtaacacttagaaactaataaaccaagcagatttgcaaaacaataaaataaaatgttgtaagtgtatagaaaagagcattatcaaaatttaatagagggactaat

SEQ ID NO: 254670 - DNA, 593 bp, Homo sapiens
tactgtttggggacctgagtcttggatggatatcatctctctaattcagttttttgtatgtttaaataaaatacaaatattgtttgaaatgaaatatcaaacaggactttaacaaaataagttaaaacaagataattatgattaaaattaggactagccttccttaaagcccctgattcagtccctggtatgctcccttaccaacttagggcccactataaggaattgaaaccaacactcaaatgaggtyttactattctgtattcaacactaaattaatgcccccaatcttcataaaaagaaaattcatacatctaacattattaatcatgaaagataattcactgaaggtgatttatcataaaaattccacactgaacttctcacgagttcatatttttcttcatgatgaaaaatatatatggcttgcagaggattcctatatacagaaaatcatttcgtatagcttatgtgtctgacactacagtggtactcaaatgtgaaagcactttgaaaacaactgatgccttattttaaagcaactattccctcccaagatttactaaatgagaatgttcaaaggttaagaccag

SEQ ID NO: 254671 - DNA, 593 bp, Homo sapiens
tactgtttggggacctgagtcttggatggatatcatctctctaattcagttttttgtatgtttaaataaaatacaaatattgtttgaaatgaaatatcaaacaggactttaacaaaataagttaaaacaagataattatgattaaaattaggactagccttccttaaagcccctgattcagtccctggtatgctcccttaccaacttagggcccactataaggaattgaaaccaacactcaaatgaggttttactattctgtattcaacactaaattaatgcccccaatcttcataaaaagaaaattcatacatctaacattattaatcatgaaagataattcactgaaggtgatttatcataaaaattccacactgaacttctcacgagttcatatttttcttcatgatgaaaaatatatatggcttgcagaggattcctatatacagaaaatcatttcgtatrgcttatgtgtctgacactacagtggtactcaaatgtgaaagcactttgaaaacaactgatgccttattttaaagcaactattccctcccaagatttactaaatgagaatgttcaaaggttaagaccag

SEQ ID NO: 254672 - DNA, 610 bp, Homo sapiens
tatgtggtaaccctaaaagcccaaaacttactatcacagtattcgtgaagaatagtagcttaccaggtactcactggtggagagagaatgggcttggaactcatgttaaaccttattcacagaaaattgacattatctgacccctctccagttatctgaaaaccttctctcacaggccttgtatgtatttgaccttagtcagagctgacttggtttggatcattcagaaaataatttttatggacattagttaactttaaaaagtttaataatatggcagcttacaagaggtgttgataacagttggagcaaacaagaagctgactaaagctggggaaggaaatgtccaaagaaaactttgaaaagccctaacatgttactgaaaagccagaagaccaagcgtctacagggttgtgtggatgaccaggaaagacctgaaagagsccaaagtccgtctttccaattgatgtgcaattctgtaaaatcaggaaaggaagattaaggcagagttttaatctgcctgtttatgcttgaaaatcatgaggataaaaataattttagcagtataccatgttatggatctgaatacttaatatattttgtatgtcaa

SEQ ID NO: 254673 - DNA, 550 bp, Homo sapiens
gcctttattttttaagatggattagtaggaacattgggtgaaaattctcctcagaaagaagataaaagttactggggaatgcacatgttccaaatggaaaactgaggaaagagagccaggacctgtcagagcgcstatgggaagaagctgaagtgcagaaaaagaaagcaagagtatgacagtgattgacctccaaggaatgtggagcccagaaggaagggaaggtggggtgtttctctgcttcccttgcccctttgactgtctgctaactgccaaactgttggggagcccctctgccctaatgaccctgggcaacactgtcattcgcaatttgggagttcccagtgacagagaaacagctggccagtactcatagttatgtccacactcctcaggcctgcactaaaacagcaaacaccatattgtttgcgtgccacctgtggcggacctctactctgctttgcccttgagtcgtggcatcatgagaccccccttcacacactcaaacatacaccacaacctgttctaactttggcaatcacaggggatc

SEQ ID NO: 254674 - DNA, 515 bp, Homo sapiens
aagctacactgtggccaggagccgaaggataaagtctatttgaactaaaggtcatgggccctgcaccagggatgcaattaggttcctgcctgctcaggatgasgaactggtgcacacccactaactctttcccctgaaacttcaatgcaccccaacatgaaccccccttgcaacccttctcccactgtcaggaagggtgtgaccaatgatcatcagtctacacaaaggagagctggctcttactctagagtgccaattactggagactgaagcctgaattgcaatgccaaatgaaaaaaaaacctgctgccaaaatggcatagtgttagtgcatgagacaagcttgctaaaacatccccacgctcagcccctcaagagacagagtgtcagcttaaatgtccaatacaccactacaacaagaagcatctgagaaagccaccacacagaaactatccataaggaacccatacagagccttgggctccctgaaagcactcagaaacaaataaacaaaa

SEQ ID NO: 254675 - DNA, 515 bp, Homo sapiens
aagctacactgtggccaggagccgaaggataaagtctatttgaactaaaggtcatgggccctgcaccagggatgcaattaggttcctgcctgctcaggatgaggaactggtgcacacccactaactctttcccctgaaacttcaatgcaccccaacatgaaccccccttgcaaccyttctcccactgtcaggaagggtgtgaccaatgatcatcagtctacacaaaggagagctggctcttactctagagtgccaattactggagactgaagcctgaattgcaatgccaaatgaaaaaaaaacctgctgccaaaatggcatagtgttagtgcatgagacaagcttgctaaaacatccccacgctcagcccctcaagagacagagtgtcagcttaaatgtccaatacaccactacaacaagaagcatctgagaaagccaccacacagaaactatccataaggaacccatacagagccttgggctccctgaaagcactcagaaacaaataaacaaaa

SEQ ID NO: 254676 - DNA, 560 bp, Homo sapiens
gtagcatcacaagtgaattcaattgactgaagctgtttactgaatcaagatggatctggtagcatccaacatttttctgcattttgtatctctgatacttgtcgcaaaccccctcgctgaaatctttccatattttagagttcagtgctttatcaaatactgtacatcgtatttttttcctgtctctcattatctgacatgaaggcatmtcacattagctcttgtcatgagtcatttttaacttctaaagcatgaagtcttttacttgttttcattgctgtgttttaatgcatttgcttagccgggcaggatatatttttgttttcctatcccacacccgtcttgccaaatatttggaaaatgttaggaattaatcgagtggctataggtttttcttttgtttttaacaaccttattgagatataattcatacacactacaattcatttagagtacacagttcagtggtttttactatattcacagatatgtgctaccatcaccacagtcaagtttggctagttttcatcacctcaaaaaacaaaacaaaattccaggca

SEQ ID NO: 254677 - DNA, 560 bp, Homo sapiens
gtagcatcacaagtgaattcaattgactgaagctgtttactgaatcaagatggatctggtagcatccaacatttttctgcattttgtatctctgatacttgtcgcaaaccccctcgctgaaatctttccatattttagagttcagtgctttatcaaatactgtacatcgtatttttttcctgtctctcattatctgacatgaaggcatatcacattagctcttgtcatgagtcatttttaacttctaaagcatgaagtcttttacttgttttcattgctgtgttttaatgcatttgcttagccgggcaggatatatttttgttttcctatcccacacccgtcttgccaaatatttggaaaatgttaggaattaatcgagtggctataggtttttcttttgtttttaacaaccttattgagatataattcatacacactacaattcatttagagtacacagttcagtggtttttactayattcacagatatgtgctaccatcaccacagtcaagtttggctagttttcatcacctcaaaaaacaaaacaaaattccaggca

SEQ ID NO: 254678 - DNA, 583 bp, Homo sapiens
gctgtaaatatgtaggctgttttctcctctcttcctaatattaacagaatagagtgataacacattcaaaatcttctaaagtacttcctcaaaaaacttttagagtaactgggggagtcctttgtggtcaagtactggtcaggtttgttttgctcacagtcactaaaccatagttttacaattattcatatagtgcaaaggttttgtacctgcatctttttctctaacrtatatttttcccaggtttttgctgggacactttagttaaaacaaggcttcaaagaaaaagtcctaagctagtgggagaggttcaaaggcttcttgcagggtcaattagcacctataaaatttatctctgttttttactaatggctattaaactaaagtgagggctaaagatgactgataaccaccacttcctccaattgttgttatttaagtggaaaatagctcttaactctctgcacttaatattcaacgtgtgacaagtttaagattcagcaactattgtagatttgaggttctttttaaaactttttactgagtttattaaagtaactcatgtcactgtgataagaaacct

SEQ ID NO: 254679 - DNA, 583 bp, Homo sapiens
gctgtaaatatgtaggctgttttctcctctcttcctaatattaacagaatagagtgataacacattcaaaatcttctaaagtacttcctcaaaaaacttttagagtaactgggggagtcctttgtggtcaagtactggtcaggtttgttttgctcacagtcactaaaccatagttttacaattattcatatagtgcaaaggttttgtacctgcatctttttctctaacatatatttttcccaggtttttgctgggacactttagttaaaacaaggcttcaaagaaaaagtcctaagctagtgggaraggttcaaaggcttcttgcagggtcaattagcacctataaaatttatctctgttttttactaatggctattaaactaaagtgagggctaaagatgactgataaccaccacttcctccaattgttgttatttaagtggaaaatagctcttaactctctgcacttaatattcaacgtgtgacaagtttaagattcagcaactattgtagatttgaggttctttttaaaactttttactgagtttattaaagtaactcatgtcactgtgataagaaacct

SEQ ID NO: 254680 - DNA, 583 bp, Homo sapiens
gctgtaaatatgtaggctgttttctcctctcttcctaatattaacagaatagagtgataacacattcaaaatcttctaaagtacttcctcaaaaaacttttagagtaactgggggagtcctttgtggtcaagtactggtcaggtttgttttgctcacagtcactaaaccatagttttacaattattcatatagtgcaaaggttttgtacctgcatctttttctctaacatatatttttcccaggtttttgctgggacactttagttaaaacaaggcttcaaagaaaaagtcctaagctagtgggagrggttcaaaggcttcttgcagggtcaattagcacctataaaatttatctctgttttttactaatggctattaaactaaagtgagggctaaagatgactgataaccaccacttcctccaattgttgttatttaagtggaaaatagctcttaactctctgcacttaatattcaacgtgtgacaagtttaagattcagcaactattgtagatttgaggttctttttaaaactttttactgagtttattaaagtaactcatgtcactgtgataagaaacct

SEQ ID NO: 254681 - DNA, 529 bp, Homo sapiens
ctgggcacccctatttcacaggcaggctggaaagggtgtggcctgaaagccatagtttctgtcttggtgggaaggctcattgcctcgggcagttttgagttctgagtgcagattgcctgaatcaagctagcttttgctagtggarcactgtgggtttgagacctgccttgccaagtgtttaggagctgagtggagcttactgctgcctgccattccccaatccctgtgcggatttttctgtgctacaaaggtagctgggctcttacctggaatgctaccccagtgctcagagagctgccctctaattgccactggggctgctgcttgctcctgcacatgaggagcaagagtacagcgttacctgacccagtccacatctggctttgccccatcaccctccctggtatcttaactcaaaggacagaaacttttgggagccccatggctccatgcattgcctgagacaccagagcccctcccctgggtaacataaagcaagcataaatcccactgctaccaccaaagctgg

SEQ ID NO: 254682 - DNA, 454 bp, Homo sapiens
atctgagaaaaccatcatacacgctctgtaaaaaaggaacccatacggagtcttcaccatcgaaagcactcagagctaaattaggttacaataaactgtaagcattaaagttacatcatcagaggggtggggraggcataaaataaaagttgaataaaaaaataaattcaaacataattagaagaaatagtctatgcaaatgagaagaaaccagaaaaattattccagcaatatgaaaagacagggttatgtaataccccataacatcctactagctctccatcaatggatccaaaccaagacaaaatctttgaaataccagataaataattcaaaacattgattattaaattactcaagaagatacaagaaaaaggtgaaaaccaacataaagaaatttacaaaaacaagtgagaatatgtataaaattttttctaaagaaatacctgtttta

SEQ ID NO: 254683 - DNA, 589 bp, Homo sapiens
agtactactttagccttactactaaggcatgactttctgcagtctctaacgaatggccaatgtgttcagcaaattctctgctttggtcaggtagaagctgaacttatccttgacctctgtgagtttttgcagtcattgtttttcaagcttcatggagttgcacctacaaatgtaaagcacagacttgagggaatcctcctgaatatttcttgaaggattttctgccttgttctaacacctcaagtaatctgctccacaaattgtagatacctcaattttccagaattccaatttctgtctccttaattcagaaagactgttctctgattggatcttctttccctaaaccatggtcaagaaagtgcccataggcataaatgtggggcatattgtaggctcaccaaattrttttcctttctctcggggtcatactcctgtgctgtctgaggtttaatatctgaaaatattttcttcatgcattttctctagtttatagttgtgtatggtagaagggcaaatatcatactagttatttctttggacctggaagaaaaattctccaaaacagaattttgaggtaaatgttttc

SEQ ID NO: 254684 - DNA, 554 bp, Homo sapiens
atatgagattttggaaaatggccaaacctaggaatcactggtattcctgagggagaaggaaaagcaaaaaaatgcttagaaaacttatttgagggaataattgaggaaaattttctggccttgctagagatttagacatccaaatacaagaagctcaaataactcctgggagattcactgaaaaaaaggacatcaccaaggcatatagtcatcaggctataaagtcaatgtgaagaaaagaattgtaagagcagtgagaygaaagccatcaggtaacctatacagcaaaacctatcagacttacagcagacttctcagcagaagccttacaatccagtagagattggggtcctatctttagctgccttaaacagcacaactgtcagccaagaattttgtatctagcaagactaagttttataaatgaaggagaaataaaattttgttttcagtcaatcaaatgttgagggaggttgtcactaccaaaccagtcctaaaaatgtgctaaaagaagttctaaatcttgaaacaaaaggttgacatgtaccagaata

SEQ ID NO: 254685 - DNA, 554 bp, Homo sapiens
atatgagattttggaaaatggccaaacctaggaatcactggtattcctgagggagaaggaaaagcaaaaaaatgcttagaaaacttatttgagggaataattgaggaaaattttctggccttgctagagatttagacatccaaatacaagaagctcaaataactcctgggagattcactgaaaaaaaggacatcaccaaggcatatagtcatcaggctataaagtcaatgtgaagaaaagaattgtaagagcagtgagacgaaagccatcaggtaacctatacagcaaaacctatcagacttacagcagacttctcagcagaagccttacaatccagtagagattggggtcctatctttagctgccttaaacagcacaactgtcagcyaagaattttgtatctagcaagactaagttttataaatgaaggagaaataaaattttgttttcagtcaatcaaatgttgagggaggttgtcactaccaaaccagtcctaaaaatgtgctaaaagaagttctaaatcttgaaacaaaaggttgacatgtaccagaata

SEQ ID NO: 254686 - DNA, 634 bp, Homo sapiens
gaaaagaattgtaagagcagtgagacgaaagccatcaggtaacctatacagcaaaacctatcagacttacagcagacttctcagcagaagccttacaatccagtagagattggggtcctatctttagctgccttaaacagcacaactgtcagccaagaattttgtatctagcaagactaagttttataaatgaaggagaaataaaattttgttttcagtcaatcaaatgttgagggaggttgtcactaccaaaccagtcctaaaaatgtgctaaaagaagttctaaatcttgaaacaaaaggttgacatgtaccagaatagaatctcttgaaagcatraaattcacaggacctataaaaaataacaaaatggagaaaacaaagtaactaagtaacaatcaacacagtcactggaacagtacctcatgtctcaatattaatgctgaatataaatggtctaaatgctccacttaaaacatacagattttcaaatgaattaagaaatcacaaacaaaatatctgctctcttcaagagactcacatgaaacgtaaagataaaacactcaaggtaaagtgatggaaaaagaatttccacacaaatgaaagccaaaatcctgcaggagtatttacaatta

SEQ ID NO: 254687 - DNA, 582 bp, Homo sapiens
catggatattattccagaccaggggtactcagcatttccccacactttaactatgtacagttaacttcaccctcatatgagatagtgttttgaagaaacacttcttggataattttaaaatggtaagatagcctggactattagaaagtgcactgtaagagtcaaaacctagattctatatacggctttgatgcttaagtagttgtatgaatttaggcctgttatcttcccgggsttcatttttctcatgtatgaaatgagaaggttggactagataattgatgtgttttgttatttagcaaccattatttagaacctaccatatgccttcatattttgagagtagatattatagagatagaagagactatgatccctacttcaagtattgcaacatctggtgggggagacagacataaaccaacaacagtaattcaatgtgatgatctctaatgactttccagttatgaatcaaaatgaattttttctttttccttattaatacatgtgtagcacacacacacacacacacacacacaccctttcatacatgagccaattgattgcagagaagtacaagca

SEQ ID NO: 254688 - DNA, 563 bp, Homo sapiens
tccatgggtttctcccacatatctgaacttcctctgagccaaaggcactaccatctgatccagaatatactttcaaaaaagtttatgtggttaacagctttggtagataatgatagtgtctctctttcagcaattggagggaaagcttacaagctattataaaatattaagattcactaagcccaggattcctctcctgtaatgaayccactgtgtgtgcagatgtttgttacttggccctatttttgctgccccatcagaattgggcctcaggagaatattatgaaaatgctgatcccctggatgcttctctggatttaagaagctattcttcatctctgacccaataatctgtgtcttctaccagcatgcataaaactgtggccatttaaattgttagcttacaagtaaaacctcagaagccagtccttgaaagtagttatgtgtcttgttcactaacatcccttccattacagaaaattaatataatcccattcccattcctgtttgataaagattggcttacaaatatgcgtgttatgctaaactggccaaagcaatgt

SEQ ID NO: 254689 - DNA, 563 bp, Homo sapiens
tccatgggtttctcccacatatctgaacttcctctgagccaaaggcactaccatctgatccagaatatactttcaaaaaagtttatgtggttaacagctttggtagataatgatagtgtctctctttcagcaattggagggaaagcttacaagctattataaaatattaagattcactaagcccaggattcctctcctgtaatgaatccactgtgtgtgcagatgtttgttacttggccctatttttgctgccccatcagaattgggcctcaggagaatattatgaaaatgctgatcccctggatgcttctctggatttaagaagctattcttcatctctgacccaataatctgtgtcttctaccagcatgcataaaactgtggccrtttaaattgttagcttacaagtaaaacctcagaagccagtccttgaaagtagttatgtgtcttgttcactaacatcccttccattacagaaaattaatataatcccattcccattcctgtttgataaagattggcttacaaatatgcgtgttatgctaaactggccaaagcaatgt

SEQ ID NO: 254690 - DNA, 563 bp, Homo sapiens
tccatgggtttctcccacatatctgaacttcctctgagccaaaggcactaccatctgatccagaatatactttcaaaaaagtttatgtggttaacagctttggtagataatgatagtgtctctctttcagcaattggagggaaagcttacaagctattataaaatattaagattcactaagcccaggattcctctcctgtaatgaatccactgtgtgtgcagatgtttgttacttggccctatttttgctgccccatcagaattgggcctcaggagaatattatgaaaatgctgatcccctggatgcttctctggatttaagaagctattcttcatctctgacccaataatctgtgtcttctaccagcatgcataaaactgtggccatttaaattgttagcttacaagtaaaacctcagaagccagtccttgamagtagttatgtgtcttgttcactaacatcccttccattacagaaaattaatataatcccattcccattcctgtttgataaagattggcttacaaatatgcgtgttatgctaaactggccaaagcaatgt

SEQ ID NO: 254691 - DNA, 711 bp, Homo sapiens
caatttaaaatttaacaataaagcaagacccaaatcactaaccattttatgtaatgaaattttggcagcatcattgaaggccccctgtgtgcccatcatggacccagtttctccctatccccctagatataaccactgttcagaattttgtcattaacgttgccatgctttcctttatagcttcatccgcaaccatgctttccctcatcaatatagtttagctttscctgcttttcaactttatataaatggagtaatactctatgtattattttttgtctagcttctttgtcaatttctatgtgacattcatccatgttgctgtgcaaaccttccatatttttcagttacattgttgcataatattccattgtatgactatggcaccatttatttatacatggtatatttggtagaaatttggattttttcttatttgggacaaataataaaaatcctgacattcacatttttgtaaagataccttgctacctatctccacaatattttctaggttatatacctagaagtgaaattcctgtttcctatgatatgcatactttcaattttgctagataatatcaaatatttttgcaaactgccatatcagtttatactcccactaaaaatacatgagattatccatttaccacattctctgcaacacttagtattgtcagatttttaaattttagctaaacaattaaaaga

SEQ ID NO: 254692 - DNA, 711 bp, Homo sapiens
caatttaaaatttaacaataaagcaagacccaaatcactaaccattttatgtaatgaaattttggcagcatcattgaaggccccctgtgtgcccatcatggacccagtttctccctatccccctagatataaccactgttcagaattttgtcattaacgttgccatgctttcctttatagcttcatccgcaaccatgctttccctcatcaatatagtttagctttccctgcttttcaactttatataaatggagtaatactctatgtattattttttgtctagcttctttgtcaatttctatgtgacattcatccatgttgctgtgcaaaccttccatatttttcagttacattgttgcataatattccattgtatgactatggcaccatttatttatacatggtatatttggtagaaatttggattttttcttatttgggacaaataataaaaatcctgacattcacatttttgtaaagataccttgctacctatctccacaatattttctaggttatatacctagragtgaaattcctgtttcctatgatatgcatactttcaattttgctagataatatcaaatatttttgcaaactgccatatcagtttatactcccactaaaaatacatgagattatccatttaccacattctctgcaacacttagtattgtcagatttttaaattttagctaaacaattaaaaga

SEQ ID NO: 254693 - DNA, 645 bp, Homo sapiens
acaccaaaactagacaaggacacagcaacaccaaaaaagaaaactgcaaataaaaactcctgatgatcatagatgtaaaaatccttacaaaaatattaacaaatacaatsctacagcacatcgaaatgaaaatacaacatgatcagttgggatttatcccagggatgtgaggatgattcaacatacacaagtcaataaacataattattaaggacaaaaaccatataatcatctcaataaacacacttaaaaaattgataaaattcaacagccctttatgataaaagtttgcaacaaacaaggcatagaaggaacatatctcaacataataaaggctatatatgaaaaatacacaaacaacaacattcttacagtggaaaagttaaaggcattccctctaagaactggaacaagacaagaatgcctacttttcaccattctcattcaacatagtgctgaaagtcctcttcagagcaatcagggaagagaaaaaataaaagacatctgaattaaaaaataagaaatcaaattatccctatttgctaatgatatgatcttatatctagaaaactctaaatgctccatcaaaaacctcttagatttaataaatggattcagtaaagtttcaggatacaaaatttatat

SEQ ID NO: 254694 - DNA, 645 bp, Homo sapiens
acaccaaaactagacaaggacacagcaacaccaaaaaagaaaactgcaaataaaaactcctgatgatcatagatgtaaaaatccttacaaaaatattaacaaatacaatgctacagcacatcgaaatgaaaatacaacatgatcagttgggatttatcccagggatgtgaggatgattcaacatacacaagtcaataaacataattattaaggacaaaaaccatataatcatctcaataaacacacttaaaaaattgataaaattcaacagccctttatgataaaagtttgcaacaaacaaggcatagaaggaacatatctcaacataataaaggctatatatgaaaaatacacaaacaacaacattcttacagtggaaaagttaaaggcattccctctaagaactggaacaagacaagaatgcctacttttcaccattctcattcaacatagtgctgaaagtcctcttcagagcaatcagggaagagwaaaaataaaagacatctgaattaaaaaataagaaatcaaattatccctatttgctaatgatatgatcttatatctagaaaactctaaatgctccatcaaaaacctcttagatttaataaatggattcagtaaagtttcaggatacaaaatttatat

SEQ ID NO: 254695 - DNA, 600 bp, Homo sapiens
tccctccccttctttctttctcttcttccccactcttccttcacttttttccttcattttccttctttcttttccttctttttttctaactaaaactttaaagatttctctttaaaaactttttccccatcccttttctgtttttaaatatgatttcaatttttattttagttcttgggatatatgtggaggtttgttacatgagcatatcgtgtgatgctgaggtttgtggtacgattgatcctatcacctgggtagtgagcattgtacgcaatagttagttcttcagccctggctccgatccctccctcacccctgtagtagatccctgtttctattgttgccaacttaatgtccacaaatacccaatgtttagttcccacttacagtattttgtttyctcctcctgcattaatttacttagaataaatggcctccagcaacatccattttgctgcaaaagaaatgattttattatttttctggctgtgtaggatttcattgtgtatgttcaccacattatccttatgcaatccactgttgatgggcaccaaggttgattctatgtctttgatgttatgaagagtgctgtgatgaatg

SEQ ID NO: 254696 - DNA, 629 bp, Homo sapiens
ttgtatcctgaaactgtattaaagtcacttatccgttccaggagccttctagcagagtctttagagtttcctaggtatacagtaatatcatcatagaagagagagagtttgacttcttcttcacctatttggatgccttgtatttctttctcktgcctgattattctgggtagtactttcagtacaatgttgaatagaggtgctgagaatggacatccttgtcttgttccagctttcaggggacatacttccaacttttgcctgtgcagtatgcttacattccttctgtatctctcttcccaaaggaaatcactgtctgaatgtggcatgcatcatttttatacatatttttctatttttactacatatatctatacataaaatgagaaaagtattatttcatgtatttaaagtttatacagtcgatgtctattttcgtttcctttttcaatgtattatctcacccaacattataattagttgtgtttttatagcaaacacttcaacaatacaccacatccctttctcaatactcaagctgaggcaataatggaattctccttttcttccttggggtgattattccataattggagtggccaatgaggatcaagtgttttaatttgaga

SEQ ID NO: 254697 - DNA, 629 bp, Homo sapiens
ttgtatcctgaaactgtattaaagtcacttatccgttccaggagccttctagcagagtctttagagtttcctaggtatacagtaatatcatcatagaagagagagagtttgacttcttcttcacctatttggatgccttgtatttctttctcttgcctgattattctgggtagtactttcagtacaatgttgaatagaggtgctgagaatggacatccttgtcttgttccagctttcaggggacatacttccaacttttgcctgtgcagtatgcttacattccttctgtatctctcttcccaaaggaaatcactgtctgaatktggcatgcatcatttttatacatatttttctatttttactacatatatctatacataaaatgagaaaagtattatttcatgtatttaaagtttatacagtcgatgtctattttcgtttcctttttcaatgtattatctcacccaacattataattagttgtgtttttatagcaaacacttcaacaatacaccacatccctttctcaatactcaagctgaggcaataatggaattctccttttcttccttggggtgattattccataattggagtggccaatgaggatcaagtgttttaatttgaga

SEQ ID NO: 254698 - DNA, 579 bp, Homo sapiens
accctaactgagaaaaaaatgtttttcaaagaattgctgtttatctgagtactttgtagttgtagtagggcttttcacacatcccatattcacctacaatttaagagtgaatattaattttttccttttttctactataaatactgtgctttgarattttgaattggttgatcttttgtagtttgctttttaatccatttcaatattttgttcctgtcaagttttcttctactgacataactgtgttgacacatataagcctgtacgaagaatgcatgaaggtgtttaaattaagtcaaacaactggctagttgcttattatgaaaactgatgtattggttgaactttaaaatttaactttccactcttcagatttgtgacaaaaattaagattatgttataggcctatcactttcattaaaacaatcctttatgtcactattgatactgtcctctcccttattcgcaaaaatcagaagaatctcacagcctaggacatacgtctcttatattctagggccacacagaaaaataaacctgtggtatttttaatttacaagacattttcttccatatcta

SEQ ID NO: 254699 - DNA, 532 bp, Homo sapiens
tgctgtttatctgagtactttgtagttgtagtagggcttttcacacatcccatattcacctacaatttaagagtgaatattaattttttccttttttctactataaatactgtgctttgagattttgaattggttgatcttttgtagtttgctttttaatccatttcaatattttgttcctgtcaagttttcttctactgacataactgtgttgacacatataagcctgtacgaagaatgcatgaaggtgtttaaattaagtcaaacaactggctagttgcttattatgaaaactgatgtattggttgaactttaaaatttaactttccactcttcagatttgtgacaaaaattaagattatgttataggcctatcactttcattaaaacaatcctttatgtcactattgatactgtcctctcccttattcgcaaaaatcagaagaatctcacagcctaggacatacrtctcttatattctagggccacacagaaaaataaacctgtggtatttttaatttacaagacattt

SEQ ID NO: 254700 - DNA, 503 bp, Homo sapiens
atctacgttcataaaagaaattaataataattgttagccaagatcaacttaacagtaaatccccacttaatgtctatgacaggttgttggatattgcaactttaagtgaagcagtatacggcatttccttgaataatgccattttgttcaacattgttttgttataatattgataaggaagaaaactggytgcattatatgtccttttgcttaatgtcacagttagaacctataaatgacattaagtgaagacttagcatacttggaaagtaagatagatcagagagaagacattcactttttaggactataacttcccctaaaaaatgtggtagaaatggcaccatcctttctttttttttttttttttttggtacttttactattccttctttggcaatagcccagtgtgtttcaagggacaatattaggtaaacaaatggttatttgttcaggacttgtgacaaacaaattaaggagaaatttccccttgcattggcata

SEQ ID NO: 254701 - DNA, 503 bp, Homo sapiens
atctacgttcataaaagaaattaataataattgttagccaagatcaacttaacagtaaatccccacttaatgtctatgacaggttgttggatattgcaactttaagtgaagcagtatacggcatttccttgaataatgccattttgttcaacattgttttgttataatattgataaggaagaaaactggctgcattatatgtccttttgcttaatgtcacagttagaacctataaatgacattaagtgaagacttagcatacttggaaagtaagatagatcagagagaagacattcactttttaggactataacttcccctaaaaaatgtggtagaaatggcaccatcctttctttttttttttttttttttggtactttyactattccttctttggcaatagcccagtgtgtttcaagggacaatattaggtaaacaaatggttatttgttcaggacttgtgacaaacaaattaaggagaaatttccccttgcattggcata

SEQ ID NO: 254702 - DNA, 614 bp, Homo sapiens
cctttgggaataggaattaataaactctaccttttgccacacgttgttcagggcagagttggaggtgaggtagataaacttcagggttttgaaatcccatgaagcttaataaaaagtataaaaaataacttcaatcttgggggtaactacaaggaatagtcaacagtgccttgaaagttttctaatctaaaatgatttttttcatgggaagatatgcccaaaacattatgttttattccttaaggagaatcttctctatttgaaattcttactatgttctaawttaacaagcaggacttattttttgtaaggtgggttttattgctgaacttgtttgtgtaggaaattaagagctggttacattcagtcctgcccatatacaaacatggacgttcaatgggaaaaggtaggaaatttgttttccacactgcttctatccctctagttaccctgatgtaactctccatctagagggcttatcaatattgtgggatattaaaatgagtccttacatgaggcaagtcagatggggactgggcaggataaatagcacttccactggacagccagtggggccacttgctggcttctgtctcgttggctagatgccatca

SEQ ID NO: 254703 - DNA, 586 bp, Homo sapiens
aactctccatctagagggcttatcaatattgtgggatattaaaatgagtccttacatgaggcaagtcagatggggactgggcaggataaatagcacttccactggacagccagtggggccacttgctggcttctgtctcgttggctagatgccatcatgaaaggtaaccgaacccctccctccaggttatttatctttctcattccagtggaaactgagtgagtggctatgagtctgatgytactctcatgtggcttttaagccctagccagcaatagctcaacttgagagtgagcacaagcgagagagagttaggggagaaggggtgtcagctgctaacactgcttctgtctgtatcattcaagatcagttcatctcttcctgggatctggtgagctctgcattcatcacatcagcacaggctttttcctgcataatccgaaggatcttttcaagtttttagcatggaaaataaccccctttcccctcccatcccatatgctgtcaaatctgtgactttcagcacatgaatcctatttagccccatgaagtaaataaaggctttcaaaatttaaaagccaaagac

SEQ ID NO: 254704 - DNA, 586 bp, Homo sapiens
aagctgatcttaaaaggctacatacttatgattttaatgctataacattttggaaaaggcaaatctctggagatagtaaacatatcagtggttgctaagagttagaagagagaaagggatgaatagacagagcaaagagggttttcaggacagtgaaactgttctgtatgacactgcaatggtgaatacacgtcattatacrtttgtcaaaacccaaagatttgaaccctaatgtaaactatggacttttggtgaaaatgtatcaatgtgaattcattaactgtaacaaatgtgctactctggtgagatatgttgatagtgggagattatgcatggaggtagtgggtatatggaaattcagtactttctgcctaattttgctgtaaactcaaaactgctctaaaaaataaagtttacaataaaaaacgaggtgaaataattatgttttaactacattttttgaatgtggatagaattgtgaatcacttggccagaaagatgatgaatgatgaaaaaagatgaatatatggctactctagcaattacacatcacccctactcctagcttttagtttttattcatttt

SEQ ID NO: 254705 - DNA, 613 bp, Homo sapiens
ttcctaatttgtacagattcagcccattaatataaatattctttataaatactagtacacaatgatatccataaggatcattttgaaatatgttaatatctcaaattatcaaaggaagtacctagcattattacaatctactaaataaatcaggggaaagatatattttagaaaaaatgtcttacaattatggttgacattaaaagcatctgcagtttacccctcagtttaactagaaatactgcagtataccacaaagttttaatcactctagtaaatcatgatgttgtaatgacagtgtgagattayatattatgcaagattcgattgcaaaggcatcatagatggatggcaaaagtagaaagcccttaaagaaaaacccttgagttactccgcccttatgaatgaatacataaggctcctataaaagggcttggagggagtttgtcttttattgcccttccacattccaccacgtgaggacacaatgttccttttctccagaggatgaagcatcaatgtgccatcctggaagcagagagcagccctcacgagacatggaacctgccagcaccttgatcttggacttcccagcctccagaactataagaaa

SEQ ID NO: 254706 - DNA, 549 bp, Homo sapiens
gatgaaaccctgattctactaaaaacacaaaaatacaaaaactccctagctactcaggaggctgagtcaggagaattgcttgaacctgggaggcggaggttgcattgcaccaagatggtgccactgcactccagcctgggtgagagagtgagaccctatctcaaaaaaaaaaaaaaagctattattaataacttaatgccaacaaatttgaaaaatgagataaaatggacaaattctttgaaaaatacaacttaccaaaactgacaaaagaagaaattgaaaatctgaagagtcctagatctagcaaagaaattgaatccataattgaaaaccttccaacaaagaaactctaagccttgatggctttgctaacaaattttccaaatgtgccccagagctccacacaaccttgtcatatcctgaccttgccacctcaatgctcagatcctcaccgttgtgcttcactttgagaccacaatsaccaatgccatcatttccaatatctccatttatgtaagtcatcttctggagcccaagatcatctcccca

SEQ ID NO: 254707 - DNA, 521 bp, Homo sapiens
caaaatcaaattataaattatgtctttttctgatctaattaaccctttaagatattaggtttctggccaggtgcagtggctcatacctgtaatcacagcactttgggaggctgagggtgccagattacctgaggtcgggagtttgagaccgcctggccaacatggtgaaaccccatctctactaaaaatacaaaaattagcctggtatggtggcatgtgcctgtaatcccagctactcaggaggctgaggcaggagaatcacttgaacccaggagggagaggttgyggtgagccgagatcatgccaatgcactccagcctgggtgacagagtgaaactccatctcaaaaaaaaaaagatattagggtccctaaagtcaaaaaatgacataatttggcttatttggtgtaaaaattatacaggaaacattgtcaaatatgaaatggtgtttggtcttctttagtctgtatttgtataaatatgttattggtatgtgttccaaaatcatgggaaactcctaaa

SEQ ID NO: 254708 - DNA, 625 bp, Homo sapiens
gactatggcttccctaaaaccttttgtcatctatggacaattgtcttgttttgatcctccttagaaggtggttttataatcagctatagaactctaacacgtgtttttaaatgcaggattctgataactttgaagattgtgacattagaatagaagaaaaaactttcaggactctcatgaagagctgaaatgttcatgaatatcaagcagaacaggagttaactgtgtgaactgaactaacagaagactaaatcaatctttttaacattttgcttaaaayattgctgatcctttgttttgtttttcagagtcaagaaaacatataagctatttacagcttttaacagttgagtaaagaatactcctatgaacaaaatttggagtacatttgtttctctctacctgatttctccagaatttggaaactatttgtgagtattcttaacttatgacaatatagctatttgcataagtgcaataagaagccattttcatttgtaacaggacacaattggagaaactggttattttaccaaggctttgactgaaatggtgtgctttcctttaaggaatcagacttgacttatggagccaataaaagaactcaggaaaaactgaccttata

SEQ ID NO: 254709 - DNA, 625 bp, Homo sapiens
gactatggcttccctaaaaccttttgtcatctatggacaattgtcttgttttgatcctccttagaaggtggttttataatcagctatagaactctaacacgtgtttttaaatgcaggattctgataactttgaagattgtgacattagaatagaagaaaaaactttcaggactctcatgaagagctgaaatgttcatgaatatcaagcagaacaggagttaactgtgtgaactgaactaacagaagactaaatcaatctttttaacattttgcttaaaacattgctgatcctttgttttgtttttcagagtcaagaaaacatataagctatttacagcttttaacagttgagtaaagaatactcctatgaacaaaatttggagtacatttgtttctctctacctgatttctccagaatttggaaactatttgtgagtattcttaacttatgacaatatagctatttgcataagtgcaataagaagccattttcatttgtaacaggmcacaattggagaaactggttattttaccaaggctttgactgaaatggtgtgctttcctttaaggaatcagacttgacttatggagccaataaaagaactcaggaaaaactgaccttata

SEQ ID NO: 254710 - DNA, 558 bp, Homo sapiens
gaatgtgtgttttcctcaaaggaatggagacaacctgtagactatattgtgttccatattgggctagracaagaatccctgatcagaaataatgagtagtaccggaaggagtagaagtaggcagctctgtctcttgcgccactggagaaaagaaagacgcctaccaagaaataagcctgggagcaagcatctcacaggaggtccccaatgccctctcccagcttccacatgccaagtactcagagtctccaacccttcctcaccctctctttgactgcaaattttgaagcttgccttcatggcattaacaaccacaagtgacttggagtctaaggactcccattccaattgcagggaggaatggatgatgctggtatccactaaaatgaagcttacatagtttaatattacaagttggggcttggaaaatgtattatatatcaccatctttcctcccataagtatattaatgctcccacattttttaatttatgtggtaggaataaaaatttctaatgccaaatcatgggctgattaggaataatgactcatgctgac

SEQ ID NO: 254711 - DNA, 558 bp, Homo sapiens
gaatgtgtgttttcctcaaaggaatggagacaacctgtagactatattgtgttccatattgggctaggasaagaatccctgatcagaaataatgagtagtaccggaaggagtagaagtaggcagctctgtctcttgcgccactggagaaaagaaagacgcctaccaagaaataagcctgggagcaagcatctcacaggaggtccccaatgccctctcccagcttccacatgccaagtactcagagtctccaacccttcctcaccctctctttgactgcaaattttgaagcttgccttcatggcattaacaaccacaagtgacttggagtctaaggactcccattccaattgcagggaggaatggatgatgctggtatccactaaaatgaagcttacatagtttaatattacaagttggggcttggaaaatgtattatatatcaccatctttcctcccataagtatattaatgctcccacattttttaatttatgtggtaggaataaaaatttctaatgccaaatcatgggctgattaggaataatgactcatgctgac

SEQ ID NO: 254712 - DNA, 607 bp, Homo sapiens
ctattacaagaaaagcatgggaatgacctgtctccatgattcaattacctcccactggatcccttccacaacatgggaattcaagatgagatttgggtggggacacagccaaaccatatcagtccccaacccaatcaattatttattggcaccttcaacaagcatattactttgtttcctctctttccttcctttctttcttcctcctttctttcttcttttcaacacwtgtatactaaatgctgactatcgaccaggcactattccaggcagagtgatccaatggtgaataagacagaccctcatggggttttctttctagtaagaagatacacagttaaaacagccattttaaaacttatgctatctgctatgataggataagaacctaatagaagacctaaccaaattcctagtgggttaggtaaagttttcttggggacaggacattcaggcttaaccctgaaggaagacagaaagtaagagtggtccaggcacctaccatatgagatgtccttggatttcttcttttctttttcagtctttcttcaaagatattaactgccagcgcttctgttgcccacaaagtcaggtaagatacctcagt

SEQ ID NO: 254713 - DNA, 605 bp, Homo sapiens
acagagacattgggaaacacttagactataaagagaagtgaaataaaagcagagtccaaaattgtatacactgattatgactatattcaaatgttcacagtaaaataaaagattgtagaaaaagtacaaataattttaaaagttataataatgatggtcatttaatgcatgcctgcgataagctaggtgaagtactaacaactttagatgtattatccctaatgcttactaccttggtaccctgcaagataaatattacctgttgcaggcatagtgagttgctaatagatcttgtggagaagataggcctcaacctcatccccacactaaatcagtggttgatgggcgtggcccagtggagcagatgtaatctagttttgaccaatgagacataatgagaagtctgccagagaactttaggaaaaggtttcttcccacataaaagacagagcctcctcgtgaggagagaatcctattgtctccactccwtgactctctgctttggctataactatgtgaggcattattttggacctaaggtggtcatcttggggccatgacttgaccagcctaacaataagaagccaatgttctcagaataacaa

SEQ ID NO: 254714 - DNA, 591 bp, Homo sapiens
tgataatcacatgtaggtcttctaagtcgaaaatcaattgcctttctactaaaccctattgagaggaagatttccaacatgattcaaaatctgtgatactacaatcaaaattccgggagagtaagattgaattatttctgtacctctacagagactagggcatcagttttcattttcttattcttacctatttcattcttaggacaaagctcatagaagttaactgagaataagctggccttcagaaagaggggaagaagctatgtaacgagrgagcaagaaatgacaggttgagacactatggaataatctgttgaatgatatacaaatagaaatttttatgagccatacaattatttttattccagtaactcattctcttcttgctcccatatgaaagataccttaaatactttaattaaaggatttttgtataatttatttcatctactgtttcattacacacatttttatcatctcaaaagaaaatcctctagtgatttgaactgtgcagcataatcagccactattacaagtatgtttttctccctccgtcatcatcctctgcaatatacaaagataacaaaatga

SEQ ID NO: 254715 - DNA, 591 bp, Homo sapiens
tgataatcacatgtaggtcttctaagtcgaaaatcaattgcctttctactaaaccctattgagaggaagatttccaacatgattcaaaatctgtgatactacaatcaaaattccgggagagtaagattgaattatttctgtacctctacagagactagggcatcagttttcattttcttattcttacctatttcattcttaggacaaagctcatagaagttaactgagaataagctggccttcagaaagaggggaagaagctatgtaacgagggagcaagaaatgacaggttgagacactatggaataatctgttgaatgatatacaaatagaaatttttatgagccatacaattatttttattccagtaactcattctcttcttgctcccatatgaaagataccttaaatactttaattaaaggatttttgtataatttatttcatctactgtttcattacacacatttttatcatctcaaaagaaaatcctctagtgatttgaactgtgcagcataatcagccactattacaagtatgtttttctccctccrtcatcatcctctgcaatatacaaagataacaaaatga

SEQ ID NO: 254716 - DNA, 539 bp, Homo sapiens
ggttccacagcgtgggcttaattatcattaactcatcacctgcatcacccaccatctcatgatgaatgagacacaccatactagtcacaaagggtgaggtctcctccagagctttctcctgcacagtctctcatcctctagtcaagaggatgactactctcctcccaaccatctccagaataattktaaagattgggttgtggaagagaaatcttggtctcgccttcatgggaggcctcaaggcttgagatttcttttcctgaaactttcacccactctttgggtaccaaagattgaatcctcaccaatgaccatcaagaagccccactgcctatagctagcattgggccagatgtctgacaggttgtagggagagtacttttagtcttcagctcagacttctcatgcttatacactggatttggatgattttcagattctcctgaaggctacttaaatagctcctcaaaacaatgggacccctagcgtgagtttagcacacagggaaaacaaaggcatactcacacttacaatcacca

SEQ ID NO: 254717 - DNA, 595 bp, Homo sapiens
aaattgttctgggtgagtgagtggtgactgaatataaaaacctagaccattaccgtatgcaactgtagactttataaacactgtatagttaggctacactaaacacatttaattttttttctcctataagtaaaccttagcttactataacttttttactttataaacatttttaaacttttttacttctgtaataacacttagcttaaaacacaaacacactgtacagccatacaaaaatattttctttatatccttgttctataagctttttattcatttttaattttttcaactatttaaacttttttgttaaaaactaagacaggcacacacattaggcctacacaggattagaattatccaaatcactgtctttcacctccacatctcatcccactggaargtcttcaagggcaataaaacacatgtagcctgtcatcttatgtaacaatgccttcttctagaaaactcctgaggacctgtttgaggctgttttatagttaactctttttttaagtagtatactctaaaataaccataaaaattatactatagtgtatatataaaccagtaacatagttgtttattatca

SEQ ID NO: 254718 - DNA, 595 bp, Homo sapiens
aaattgttctgggtgagtgagtggtgactgaatataaaaacctagaccattaccgtatgcaactgtagactttataaacactgtatagttaggctacactaaacacatttaattttttttctcctataagtaaaccttagcttactataacttttttactttataaacatttttaaacttttttacttctgtaataacacttagcttaaaacacaaacacactgtacagccatacaaaaatattttctttatatccttgttctataagctttttattcatttttaattttttcaactatttaaacttttttgttaaaaactaagacaggcacacacattaggcctacacaggattagaattatccaaatcactgtctttcacctccacatctcatcccactggaaagtcttcaagggcaataaaacacatgkagcctgtcatcttatgtaacaatgccttcttctagaaaactcctgaggacctgtttgaggctgttttatagttaactctttttttaagtagtatactctaaaataaccataaaaattatactatagtgtatatataaaccagtaacatagttgtttattatca

SEQ ID NO: 254719 - DNA, 595 bp, Homo sapiens
aaattgttctgggtgagtgagtggtgactgaatataaaaacctagaccattaccgtatgcaactgtagactttataaacactgtatagttaggctacactaaacacatttaattttttttctcctataagtaaaccttagcttactataacttttttactttataaacatttttaaacttttttacttctgtaataacacttagcttaaaacacaaacacactgtacagccatacaaaaatattttctttatatccttgttctataagctttttattcatttttaattttttcaactatttaaacttttttgttaaaaactaagacaggcacacacattaggcctacacaggattagaattatccaaatcactgtctttcacctccacatctcatcccactggaaagtcttcaagggcaataaaacacatgtagcctgtcatcttatgtaacartgccttcttctagaaaactcctgaggacctgtttgaggctgttttatagttaactctttttttaagtagtatactctaaaataaccataaaaattatactatagtgtatatataaaccagtaacatagttgtttattatca

SEQ ID NO: 254720 - DNA, 595 bp, Homo sapiens
aaattgttctgggtgagtgagtggtgactgaatataaaaacctagaccattaccgtatgcaactgtagactttataaacactgtatagttaggctacactaaacacatttaattttttttctcctataagtaaaccttagcttactataacttttttactttataaacatttttaaacttttttacttctgtaataacacttagcttaaaacacaaacacactgtacagccatacaaaaatattttctttatatccttgttctataagctttttattcatttttaattttttcaactatttaaacttttttgttaaaaactaagacaggcacacacattaggcctacacaggattagaattatccaaatcactgtctttcacctccacatctcatcccactggaaagtcttcaagggcaataaaacacatgtagcctgtcatcttatgtaacaatgccttcttctagaaaactcctgaggacctgtttgaggctgttttayagttaactctttttttaagtagtatactctaaaataaccataaaaattatactatagtgtatatataaaccagtaacatagttgtttattatca

SEQ ID NO: 254721 - DNA, 577 bp, Homo sapiens
tcaatactgggtcaggaaatragggcttggacaagcagtcctaaggctgaagtcagggaataattttcttctctctctgcattcagaattttggtttgatcaggactctgtggcagggagctgcctggagaggttccactaataggggttgagacatcccaggccacagaagggacagaccaagagagttctgagagcatctcaggaagattctaagatattctagtatctcctcatcaacagttatattttgctgaaggttaccatttggactttactgaactacatcccacccatgatatgacttggatgagcgagaggtgtggccctgtcccaaatgactgggacagtgatgcagcagtcgccatcaggacctagctgtgctgcgtgaggcagagatctctggagggtcctcagagatgataatggcagccaccactaccagccggaactaccttccagatcacccagcacctaggcctgcatgtgacataagattcacctgaggatctcgttaaatagccagttctgactcggtaggtctagagtggggtccaagagtccgaagttctagcaa

SEQ ID NO: 254722 - DNA, 577 bp, Homo sapiens
tcaatactgggtcaggaaatgagggcttggacaagcagtcctaaggctgaagtcagggaataattttcttctctctctgcattcagaattttggtttgatcaggactctgtggcagggagctgcctggagargttccactaataggggttgagacatcccaggccacagaagggacagaccaagagagttctgagagcatctcaggaagattctaagatattctagtatctcctcatcaacagttatattttgctgaaggttaccatttggactttactgaactacatcccacccatgatatgacttggatgagcgagaggtgtggccctgtcccaaatgactgggacagtgatgcagcagtcgccatcaggacctagctgtgctgcgtgaggcagagatctctggagggtcctcagagatgataatggcagccaccactaccagccggaactaccttccagatcacccagcacctaggcctgcatgtgacataagattcacctgaggatctcgttaaatagccagttctgactcggtaggtctagagtggggtccaagagtccgaagttctagcaa

SEQ ID NO: 254723 - DNA, 572 bp, Homo sapiens
agtgttagttatcaaaattggttgaaatgttggtgttcatctcttactgttgatctgtaatgagattttacatactccatctttgaaaatatrtttcacaaagattttaacaaatactgatatctcccacaaacatatgattttcattgagcatattcaccactcaggaggaatttatggaattctattagattcttctcttgatatctgccttttggcatatccttgcatttcagattaattgaaggttaggtggaagttcctcaactgtccattaaatggatttcaaaatatgaaatgtgcactgcaatgaggtcctgaaacactgttggaactgcagtttaagctcagaaaacatatctgccacaaatttgtgtgaaaatagagatcctgcttcttattttaacttttgacagcatggaaaatgtatttgatcttgccattacttattgttgaaacaacactagttctcatcaaaatgacttttccacgttaaatttcaatagaagcactgtcttataatgtaattttagattaaatttattaggaaacattatcatatctgcaacaag

SEQ ID NO: 254724 - DNA, 497 bp, Homo sapiens
tccctggtatgtaaaactgatattttagtcatcttaagatgtcaaattcacctcgaaaactgtaaggcaatataaaacaaaacacccaccrgcaccataggaatacgccgcatactgttagaattatatcagctcatttggatgtcaagaactacacatcattgtcacagagaactgcaagaaattttcttaaattggaaaaagatacagaatcctcattaccacaggtaccacaacaatctgcaaattgagggctatgtttgccagacatgcattccctgaaagaatgatctctttgacaatggatcattctctcctaagcaatttgctgaatcgactaaaacctggcccaaagaattctaactggtgcctccacagaacaacatggcgtccatatggcactcacgaacccaaggcagggcctagaatatggggctgtttagcaatgtgttggggtccaaatgtatacactatgattaaaatgtacttttattttc

SEQ ID NO: 254725 - DNA, 595 bp, Homo sapiens
actgtaaggcaatataaaacaaaacacccaccagcaccataggaatacgccgcatactgttagaattatatcagctcatttggatgtcaagaactacacatcattgtcacagagaactgcaagaaattttcttaaattggaaaaagatacagaatcctcattaccacaggtaccacaacaatctgcaaattgagggctatgtttgccagacatgcattccctgaaagaatgatctctttgacaatggatcattctctcctaagcaatttgctgaatcgactaaaacctggcccaaagaattctaactggtgcctccacagaacaacatggcgtccatayggcactcacgaacccaaggcagggcctagaatatggggctgtttagcaatgtgttggggtccaaatgtatacactatgattaaaatgtacttttattttctgttatcagtctcaagctgttttctgcaatttcattccctgattccttgggaagggagatggagtagtggtggtggtggaggaaaggagatggcaaagaaagattttcaaatcacccattaatgataacttaatctctcacttaaaagaatctctg

SEQ ID NO: 254726 - DNA, 631 bp, Homo sapiens
cacatctagcatcccatccagacctaygtttttaaataccatcttccactgctaggaacaaggacttctggagaaatggctgcttacaggctcggggcagggaaagtataaggtaagcctagaatgtgttgttatgctaggaagtaggaaatgcttaaggaatgatagggacctgtcaaagggacacagaagccaggtttagggagttcacactggccaaatctaggacaatttgtgcatcaaaataaattagcatgtctaattataattcatgaagcaaaatagaaaaccataacattgcactgatagaaataaatgagtaaataaagaaatgaggtagaaaggaaaccatttatttacagtataatgccaattaatcaatgtagatcaaatgatgggaatagataatctccatctggcaccatttggtagttgatatagacaggagtcaccaatggaagctggacacagatttgcatagagacagtatattatttataatattgggcaattctgccacaaaatattcatcaaatgcagagggaaaatgctgacttctccagatgagcacagaatcatttctgtggtactcctgctaagaatgcatgacctgagtctggtcatgtggaaa

SEQ ID NO: 254727 - DNA, 631 bp, Homo sapiens
cacatctagcatcccatccagacctatgtttttaaataccatcttccactgctaggaacaaggacttctggagaaatggctgcttacaggctcggggcagggaaagtataaggtaagcctagaatgtgttgttatgctaggaagtaggaaatgcttaaggaatgatagggacctgtcaaagggacacagaagccaggtttagggagttcacactggccaaatctaggacaatttgtgcatcaaaataaattagcatgtcyaattataattcatgaagcaaaatagaaaaccataacattgcactgatagaaataaatgagtaaataaagaaatgaggtagaaaggaaaccatttatttacagtataatgccaattaatcaatgtagatcaaatgatgggaatagataatctccatctggcaccatttggtagttgatatagacaggagtcaccaatggaagctggacacagatttgcatagagacagtatattatttataatattgggcaattctgccacaaaatattcatcaaatgcagagggaaaatgctgacttctccagatgagcacagaatcatttctgtggtactcctgctaagaatgcatgacctgagtctggtcatgtggaaa

SEQ ID NO: 254728 - DNA, 657 bp, Homo sapiens
tccacaggtattccccacacacaaggggagggcattatacaagacgtgagtcatcagatgtcatcttagaattctgccttacacacagaataagctacccatactgcttggacctcccagatcatgagtcccactctgtrtcaatgtgactcattagaaaaaatccaaaacagtatcattttcttgttcaatcatgacacatcatagcatttgagggaactacacttttgattaactcttgaatagacctcaatactttttactttcttcctggtcatgtaagtcaaaagagctgactataattattttctaaaaagactaaaaaggttttccttcctcagcatccttgatcagagtctataaacctaaatctgcattaatactgacctggagaaaagatgataaatgagagaaatgggtttaaaacaattttttttctaccaagcacctacaatcactgactctcacctcccagcccagttgaaggttctggttaagactgtgatgcaggactggcatctgtaaaaatgacacttgccttcgggttgggtcaaatgataagagttggcttttctgacgtacatgcctcaggagtcttgagtcagggcttcacagactcacttcctgattctgagatctcccaagaccctgaccact

SEQ ID NO: 254729 - DNA, 657 bp, Homo sapiens
tccacaggtattccccacacacaaggggagggcattatacaagacgtgagtcatcagatgtcatcttagaattctgccttacacacagaataagctacccatactgcttggacctcccagatcatgagtcccactctgtgtcaatgtgactcattagaaaaaatccaaaacagtatcattttcttgttcaatcatgacacatcatagcatttgagggaactacacttttgattaactcttgaatagacctcaatactttttactttcttcctggtcatgtaagtcaaaagagctgactataattattttctaaaaagactaaaaaggttttccttcctcagcatccttgatcagagtctataaacctaaatctgcattaatactgacctggagaaaagatgataaatgagagaaatgggtttaaaacaattttttttctaccaagcacctacaatcactgactctcacctcccagcccagttgaaggttctggttaagactgtgatgcaggactsgcatctgtaaaaatgacacttgccttcgggttgggtcaaatgataagagttggcttttctgacgtacatgcctcaggagtcttgagtcagggcttcacagactcacttcctgattctgagatctcccaagaccctgaccact

SEQ ID NO: 254730 - DNA, 529 bp, Homo sapiens
gctcagacttaaccaggctactgcaatcctaagccacgatgatgctatttgcrttattaaggtaacactaattgctatgacagataaactcagaaattttgttccatgcaattactcaggaaccagactgtcaaaggctctgctgacttcagcacctggtttccaaggtcaccctaaccactgacatatagccagcagagggggaatgaggatggcagtcacctaggaagcattgatgggccaggcctagaagtgatgtacatgacttcaactggcattccattggccagaactcagtaacctggtccctcctgaatgcaaaggtcattgggaaatgcagtccccatttcagtagcaacttcccagaaacagtactctatggaagagaagcatgcgtcatgagtggacagcaatctagatctgctacaatgaagacagtggtagctggtggtagcaaccaccatttactgtgttctaggcccctgataagtgctggacaaatagcctctccccgaatcctcaaaataac

SEQ ID NO: 254731 - DNA, 529 bp, Homo sapiens
gctcagacttaaccaggctactgcaatcctaagccacgatgatgctatttgcgttattaaggtaacactaattgctatgacagataaactcagaaattttgttccatgcaattactcaggaaccagactgtcaaaggctctgctgacttcagcacctggtttccaaggtcaccctaaccactgacatatagccagcagagggggaatgaggatggcagtcacctaggaagcattgatgggccaggcctagaagtgatgtacatgacttcaactggcattccattggccagaactcagtaacctggtccctcctgaatgcaaaggtcattgggaaatgcagtccccatttcagtagcaacttcccagaaacagtactctatggaagagaagcatgcgtcatgwgtggacagcaatctagatctgctacaatgaagacagtggtagctggtggtagcaaccaccatttactgtgttctaggcccctgataagtgctggacaaatagcctctccccgaatcctcaaaataac

SEQ ID NO: 254732 - DNA, 606 bp, Homo sapiens
acagttcagcatggctgtgggggcctggaaagcaaacacatccttcttcacgtggcagcaggaaggagaagtgccaggcaaaagaggaaaaccccctcataaaaccatcagatatcatgagaactcactcactatcatgagaacaacatggaggtaactgctcacatgagccaattacctcccactggctccctcccacaacacgttgggattatgggaactataattcaagatgagatttgcgtgggaacacagccaaaccatatcagtagtaattctgacattctacaagactgagtcacagtactagttcacgatcctttsttatcttctatttttttattcaagaagaagtaaaaggaagagaaggaggaaaaccagaaggaggaaaagaaaaagaagaatgtgagaaaagtccagaatccatataaatcaagatatagaaaagagtttttctaaatctcagatttagtcatttgttttattcattcatgtattcattaaatacacaaatacaaaatttattaagcacctactacacctaaagtcaacaaattaagagttctggagggagggacactggtttctatatatagtttggtacac

SEQ ID NO: 254733 - DNA, 577 bp, Homo sapiens
atagtttggtacacttcacttcttttcccaaaatgaaggctttcctcaagtttccatttatcacttagtatgtcagttcatcttgtatccaataaaagaatggacaagtcatgcagaagtcttgatcttagaagcgaggaatatagaatgatcaaccaaagcaggctgtgagcattcaaggatgcagagatacagggtggacctcagtatttcctttgtgccctgattacataatatgcaatataaaatgatgtctgcaatccccatgttctgttctctgggaaaagagytccaggtacctcccaaaattgtgactaaacacactcatgatttcgtaaatctgtttgttgaaaccgctatctacatctctgcagtaggaaaagcacctagctttaaaatatgcatgcatatataaatgaacctgattatgggttctttttgtacttttcatgcccataactaatattattgtccattttattcttcttatttctcaaggaattcagaaatggtaatatgacttttctgctttctcttaaagaactggtattcatttctaagggtgtgtgtgtgtcac

SEQ ID NO: 254734 - DNA, 577 bp, Homo sapiens
atagtttggtacacttcacttcttttcccaaaatgaaggctttcctcaagtttccatttatcacttagtatgtcagttcatcttgtatccaataaaagaatggacaagtcatgcagaagtcttgatcttagaagcgaggaatatagaatgatcaaccaaagcaggctgtgagcattcaaggatgcagagatacagggtggacctcagtatttcctttgtgccctgattacataatatgcaatataaaatgatgtctgcaatccccatgttctgttctctgggaaaagagctccaggtacctcccaaaattgtgactaaacacactcatgatttcgtaaatctgtttgttgaaaccgctatctacatctctgcastaggaaaagcacctagctttaaaatatgcatgcatatataaatgaacctgattatgggttctttttgtacttttcatgcccataactaatattattgtccattttattcttcttatttctcaaggaattcagaaatggtaatatgacttttctgctttctcttaaagaactggtattcatttctaagggtgtgtgtgtgtcac

SEQ ID NO: 254735 - DNA, 577 bp, Homo sapiens
atagtttggtacacttcacttcttttcccaaaatgaaggctttcctcaagtttccatttatcacttagtatgtcagttcatcttgtatccaataaaagaatggacaagtcatgcagaagtcttgatcttagaagcgaggaatatagaatgatcaaccaaagcaggctgtgagcattcaaggatgcagagatacagggtggacctcagtatttcctttgtgccctgattacataatatgcaatataaaatgatgtctgcaatccccatgttctgttctctgggaaaagagctccaggtacctcccaaaattgtgactaaacacactcatgatttcgtaaatctgtttgttgaaaccgctatctacatctctgcagtaggaaaagcacctagctttaaaatatgcatgcatatataaatgaacctgattatgggttctttttgtacttttcatgcccatarctaatattattgtccattttattcttcttatttctcaaggaattcagaaatggtaatatgacttttctgctttctcttaaagaactggtattcatttctaagggtgtgtgtgtgtcac

SEQ ID NO: 254736 - DNA, 605 bp, Homo sapiens
cctaacttatctgtccacttagcctaattgtgagtattttaaatgtaagtatcctaacatgagctcagtaaatgtttgttaaattaatggatatggaaatgaataaatgatgaattagaatgtgtggttgtgattttaaaaaaattagaagaatcttttttgtaccataagagaccaaatatgatttcagtattataggataaaataaatyattgctaccatattcaaattttgtgcaataaatcttaggcaaaacatctcactatgctttataaatgcatctgtaaaatacaaaaagatgagttacagcttacctgattgatcaattttgactttgactaacagaggcttttactgcagttctttagaataaaacattgaactcagtagaacataatttgcgctctttttgtggctattaagtgtctttcagtgaagatcattagtctctactctttcaacattatggtcttcttgttctacactctggacagttgttggtttataagcacagagtaagcacttcattattaaggtatttcaagagaggtaagagaccaggtctctccgttgaaaaatctaaatcagagaagatgcctttcaga

SEQ ID NO: 254737 - DNA, 605 bp, Homo sapiens
cctaacttatctgtccacttagcctaattgtgagtattttaaatgtaagtatcctaacatgagctcagtaaatgtttgttaaattaatggatatggaaatgaataaatgatgaattagaatgtgtggttgtgattttaaaaaaattagaagaatcttttttgtaccataagagaccaaatatgatttcagtattataggataaaataaatcattgctaccatattcaaatttygtgcaataaatcttaggcaaaacatctcactatgctttataaatgcatctgtaaaatacaaaaagatgagttacagcttacctgattgatcaattttgactttgactaacagaggcttttactgcagttctttagaataaaacattgaactcagtagaacataatttgcgctctttttgtggctattaagtgtctttcagtgaagatcattagtctctactctttcaacattatggtcttcttgttctacactctggacagttgttggtttataagcacagagtaagcacttcattattaaggtatttcaagagaggtaagagaccaggtctctccgttgaaaaatctaaatcagagaagatgcctttcaga

SEQ ID NO: 254738 - DNA, 515 bp, Homo sapiens
aaatacaaaaagatgagttacagcttacctgattgatcaattttgactttgactaacagaggcttttactgcagttctttagaataaaacattgaactcagtagaacataatttgcgctctttttgtggctattaagtgtctttcagtgaagatcattagtctctactctttcaacattatggtcttcttgttctacactctggacagttgttggtttataagcacagagtaagcacttcattattaaggtatttcaagagaggtaagagaccaggtctctccgttgaaaaatctaaatcagagaagatgcctttcagaaatcacccaaactgacaagaccacggctgtagagcttgaagatctttcaaagtccatgatcacctcatgacaatgacccagtcccctccccttgagaagctsaagtgtggctgtggcaggaaaagcaggggagaggaaaatgtctactttgtgttctagaagaatttgagatttagaatcaaaagaattgggactg

SEQ ID NO: 254739 - DNA, 557 bp, Homo sapiens
tgtgttctagaagaatttgagatttagaatcaaaagaattgggactgattgaggctccacattattttttccatgtgatcttgagcaggtccctcaactatccatggctcaagctttgtctagaaaaacgataacgaagacaagagcaacartaatacttgtgttaaatagtacttattaagagaaataaataaaatcttggcaaattctgaaggtatctacaaacaatgatgtaaaaatatgttaatgatgggtttggagatggtgataatagtgatgctagctgagaaatagtactaatatggatgacaggtgagtcagaggcatttgcacactccctataggatactgctctatttacaacgactgtctcccagtcaaggtcatcgactctgggatctgtatacattgtccctagaaaattcatattaaatggcttgaaaactatttctccttttctaaatctttataggcctcagcgaactttgcacccaaccaggaaagttacatccacctctcccctggctgcagttgtgcttcacctggtgttttactga

SEQ ID NO: 254740 - DNA, 534 bp, Homo sapiens
tgtgcttcacctggtgttttactgatgtctggttgcacgaggtcaatcaattaaagtggattagatccacagtctgaaatgctaacagagggcgcagagagataagactgataaatagctcgagacagctccatctctgactccaagcaaaaaaaaaaaaaaagagagagagagagtagggatgacagcttaggacatcaggaaccatgacctgaaaaggcgagaagcaaggaaggacaagacagccgatgcaagtaaataagatgcaagtcaaagctaccacggctstaagtcaccagtcacaactggcatcctgagtcatcacgtccttcaaatctactcggaacatccacttctcattcacagaccccaatgtcatgctggtttatttggtagttaagtttgactgcaaggcaaacttcaagttcatttccataggtgccccagccctgtgccaagacctggagcagtctcctggcaggactcaggtgacagctggcagggcagtgctgactaaaatccagtacagactga

SEQ ID NO: 254741 - DNA, 588 bp, Homo sapiens
ggaggaaatgtattgaatgacagaatacaaatgctgtgaagagacttggaaacagagaaaaaatctcaacgaatgtgaattaagatgaatgtaaattcatttatggaaaagaaacaattacagtctaagtgtataatttggatggcttggtcaaaatgggatttcagaagaagagctgtggggataccacatggccaggggttcaataggatcgctaagtggaacagaatctctataaaaacattcatgtcagctcttgattgattaatagaagagtgttgctattggagacaagaatggtctctgtgctctgcaggagtcaggcaaaatgcagagaatcctaatttgtggtaaataccctgctttaataaagtcatcaataggctttaatttgtccacaatattgtgtgatgaaaatggcaaaacttcggaaaatacttttatgtcacctgaggaatgattacagaaactagaaaagcaaggacttggagggagaaatgtgaacgccacratcacgcagtattgtcccataaagaaaaaccacatagtaacttttctgagtatagacatctaagcagtgggaagtat

SEQ ID NO: 254742 - DNA, 620 bp, Homo sapiens
aacatggtatcaaaaaacaaaaaggacttccttcatcaaaagagataatttattttaaagacattattttcacttgaacctaagtaaacctgatgtcaatatgaggctttttccatacgtaacctatcaaaagctattggaaaggttgcaagagccatctctctgtctcctctctctctctctctccctcatttgctgtcatgattcctggactagcccgtctctcgacattatatagccttagacaacacaggatagatagtagcatgaagtgtgcagaagtaagtccaccagtaggattgctagggctagccaccctgttttctccttgaacttgaccacaacatgttttaccttgtatcttgctccaatcacagctgtttccrtagaaaaatcatttcttgtgatggacttttgtctcactggagtaacactctttcgtgaggatagcaaaagttgtagggacagcctaagtttttttttttaagtggttttggttttgtgtttatggaatgtttgttagtacagcaggagtgagactggatagagttgaaggtgctgaaagggtcagatggcagagcttcgtgggggcccatgtgaatgcttagagttttggtagc

SEQ ID NO: 254743 - DNA, 544 bp, Homo sapiens
attattcactcacttgtacattcattcaatcactatttatgtaactactaaacagagtgctgtgttacagagacatgaaaatgaactacagtctaagtctttccctctttaatataagcagacatgtaaacttataagtaattaaactgtttatacctacagaggctagtcattatataattatatttggtatttcccaacaattttctagttacaattcatttaatccttacaccggtcctatgagacatgcatcactcctgttttctagataaagaaactatgggtgaaagaggctcagttgccggcccaagtctacagagctggaaaggtgcaaaccctgagttcttaaytgctacacttcggtgtaagacaacagtgtcctttacagatgctatgtctgtaaaactggatacatacaggacaactgggaataaaggagcatattcagatccacatggggagaaaaggtaatctggagaggtttcatagaggggtgatttagaatgtgaagactaaactggcttgaatactactttattcc

SEQ ID NO: 254744 - DNA, 350 bp, Homo sapiens
gatgtgacagaatccctggagcctgggaagttgaggctgcagtgagctggaatcatgtgactgtactccagcctgggcaacagtgtgagatcttgtttaaaaaaaaaaaaaamaaaaaaaaaaaaaaacgggaaagaaagagagagtgaaagagtttgatctcactcataagtcgacactaataaacagtcaaatacatagtaacacagagtagaaagttggttaccagatgcagtggaagaggagatggggagatataggttaaagggtacaaagttaacaattatgtagaacgaatatctagagacttaaggtacagcatgataactatagttactactactgtattg

SEQ ID NO: 254745 - DNA, 350 bp, Homo sapiens
gatgtgacagaatccctggagcctgggaagttgaggctgcagtgagctggaatcatgtgactgtactccagcctgggcaacagtgtgagatcttgtttaaaaaaaaaaaaaaamaaaaaaaaaaaaaacgggaaagaaagagagagtgaaagagtttgatctcactcataagtcgacactaataaacagtcaaatacatagtaacacagagtagaaagttggttaccagatgcagtggaagaggagatggggagatataggttaaagggtacaaagttaacaattatgtagaacgaatatctagagacttaaggtacagcatgataactatagttactactactgtattg

SEQ ID NO: 254746 - DNA, 546 bp, Homo sapiens
ctgtgctaactactttatgtatcttcactcatttaacctttcattgaccctgtcatacaggtacaataattatctacgttccatgaatgaaaagattgaagtttagaaaggttaaraaatgccgaaagccatgcagttagcaagtgacaataaattttatataaaccacctatgaagttcttgactaacagttctaaaagattcttcaggttttacttgcttctgagtctggcagctttttccactgacaaaaggatcacttctactactaacattaataggtcagaagtactcatctgtgcaaatccatgtcacatgtctcagatgagaagtgccatggtaccctgtgctaattatggcctcttctgcatggactatgagctaaaccataactcaaaatcctttcacgttgctctgacatcatccaacagtatactgggacagcgtggagaatgtgatgatgttcctcagccctaattcagtattctagcccagtgcctctcaatctgcatacagtgcctctaaagttgttgacagaacgcagat

SEQ ID NO: 254747 - DNA, 599 bp, Homo sapiens
taattatggcctcttctgcatggactatgagctaaaccataacycaaaatcctttcacgttgctctgacatcatccaacagtatactgggacagcgtggagaatgtgatgatgttcctcagccctaattcagtattctagcccagtgcctctcaatctgcatacagtgcctctaaagttgttgacagaacgcagattcttatccagttaagtttggagtggggcttgagattctacatttgaaacaaatatccaagggatctccatgctgctggtcagagaaccatactttaaatagaaaggttcaaaaacacctggatttagccaactgtgaattgatccattacttgagcagcaagcattgtaactgagaaagctgttggattaagccaaatcctatttttgtcatgctataaataatttatttgtttttcctaatttgtaaattgggtctaaagagcaactgctgctcaggctgcagaaaatgctcattgttcaaagccattctgatttacccatggtggagaaagtaagcaagagttctgtgcacagaagaaagataaaaggctgaacctggctattccctcccaagagtctgtc

SEQ ID NO: 254748 - DNA, 562 bp, Homo sapiens
tagcaattacacagattcaagagtctataaactggcttagcaaattgcacaagtctaagaataacatgtaatatgtacagaaaaccctatcacttatgtctggcaaaggactcataaagttatcacttttctccactggcaccttttccattgtatttacatctttcttgtagaaacaataccacaaaatggtatctatctattcttcacatctttatctttgtattgacacttacytctttgaaattgagggttgcatcttattcaaatgtgtaactacaaaagtgcccggcatagttgggtgctgattagtaattattatatttataataacagatgcttttggctagtcttttcttttacctagccttgggctaaatgcttaatagtcatcatttcagtttattcacaaaaatacctcataataactattattgttatgcagacaaggaaactaatgctgacattacttgttttactagtttacctgtagtattttgatagtgttgatcactccttagccccagaaatgctcttttctctgtgggttacactttttttg

SEQ ID NO: 254749 - DNA, 562 bp, Homo sapiens
tagcaattacacagattcaagagtctataaactggcttagcaaattgcacaagtctaagaataacatgtaatatgtacagaaaaccctatcacttatgtctggcaaaggactcataaagttatcacttttctccactggcaccttttccattgtatttacatctttcttgtagaaacaataccacaaaatggtatctatctattcttcacatctttatctttgtattgacacttacttctttgaaaytgagggttgcatcttattcaaatgtgtaactacaaaagtgcccggcatagttgggtgctgattagtaattattatatttataataacagatgcttttggctagtcttttcttttacctagccttgggctaaatgcttaatagtcatcatttcagtttattcacaaaaatacctcataataactattattgttatgcagacaaggaaactaatgctgacattacttgttttactagtttacctgtagtattttgatagtgttgatcactccttagccccagaaatgctcttttctctgtgggttacactttttttg

SEQ ID NO: 254750 - DNA, 562 bp, Homo sapiens
tagcaattacacagattcaagagtctataaactggcttagcaaattgcacaagtctaagaataacatgtaatatgtacagaaaaccctatcacttatgtctggcaaaggactcataaagttatcacttttctccactggcaccttttccattgtatttacatctttcttgtagaaacaataccacaaaatggtatctatctattcttcacatctttatctttgtattgacacttacttctttgaaattgagggttgcatcttattcaaatgtgtaactacaaaagtgcccggcatagttgggtgctgattagtaattattatatttataataacagatgcttttggctagycttttcttttacctagccttgggctaaatgcttaatagtcatcatttcagtttattcacaaaaatacctcataataactattattgttatgcagacaaggaaactaatgctgacattacttgttttactagtttacctgtagtattttgatagtgttgatcactccttagccccagaaatgctcttttctctgtgggttacactttttttg

SEQ ID NO: 254751 - DNA, 526 bp, Homo sapiens
catttttaaattcttccttcttgagcctgttctccattaaccttgctctccctttttcttaattgaccccttttccttgcttcctaattcaagatacttggtgagactggagatagggaaaggcagttagaagagtagattcaccaattctactccccacccatcacttctgtctatcacctagttgtgccaaatgtaccccttaaagatttcccacacatatcctctcttcttcactccagctgttgctcccatgctscagcctctcttccatcatccccttcctggattactgtgaaagccatgtagccaactttccaggctccagttctggcttccttctaatcaatccttctgtttccacaacaatatttctaaaatgcaaatctgaccttgtcagttcttttcaagagctccccgttgtcaattgattaactctaacttccttggtgtgactagtatgactctcaatgatcaagttctgtattcccaactcatccttcacttcttcatactgctgggtatg

SEQ ID NO: 254752 - DNA, 635 bp, Homo sapiens
gaattgttattagaaaataaagcatggaccttttgatactgatattcatctatccatccatccatccataaaaatgccagtattggaagaaaaaagtgatttcgactaagtcgaatgctggattaaccacactgcggtgtggtagaggcatcaccagctaccaacttcctggcatatttcagccgtggtttagtgtgtttcctgctaagctaaaatgaaaggttgacttagacagaatggtttctgatttatctttgtgcctgggagctaggcactgtgaacctgcctagctcytggtgggcaaaaggtagtcaacacatactgggtgaaataagtaagtatgtgtgtgcattggttagtgagccagttagttaaatcttttaggatttggtagtatttgggtcacatggaattttaaaagatctttgggcaacacctaatcactggtacaattcttgtcaattacttgtaataagagaacctaatgctaatgtgagttatctatttgctacttgaagttaagaagtggtttggctaaacaatgcaaaacaaggacagggtctgaggagctggaagtgtactttgtgatgcttgggatatcatagacaggagagaggcagcttggaattaagctt

SEQ ID NO: 254753 - DNA, 591 bp, Homo sapiens
ttcatattaggcagactttggagatgttgtggattctgcttcataccaccacaataacgtgattattgccataaagtgagtcacacaaattttttcgtttcccagtgcatataaaatttacgttgacattctactgtagtctattaaatgtgcaatagcattatatgtaaaagtaatgtacaaaccttaattataaatatttattgctaaaataatgctaaaaaattatcagagccttcagagagtcataaccttttggctgatggagggtcttgtcttgatgttgatagctactgacagggtggcagttgctggaggttggggtggctgtggaaatttcataaaataagacaataataaagtttggtgcatcaactgactcttcctttcatgaaagttttytctgtagcatgtaatgctgtttgatagcattttctaaatttatttcaaaattggagtccatcctctcaaacccagctgctcccttatcaactaagtttatgaaatattctacatcctttgttgtcatttcaacagtgttcacgacatgtttaccaaaagtagattccattttaagaaaccacttttcct

SEQ ID NO: 254754 - DNA, 571 bp, Homo sapiens
gaagtgagcccatgctgttgaaaaaaaatagtgtggatagatttagatttgcctaacttaaggttgctacaaactttcaatttgtaaaaagcataatatctacaaagtgcaataaagaaaagtgcaataaaatgatgtttgcttgtagttttaaagttttgtatgaaaacagtagttggataaattgtttgcctaagcctcttttgtagtcagagggctattgtatgtacttggaaaaagtgtacatgctagggacttccagggcagcttgcatccctgaggacgggactaaaaataacagagtcccctgctttgtgggacctaaagcttgtacaatttgtgtgtgtgtgtgtgtaacgtcttgagtaaaaagaattcaaaatataaaaatgatttcatttaaaatgaaaaaagataatgaaaaattacagattttaagaagttggtaaatatcaccgaaatggataaattaayttactatttgcaactaactgcttgacattcttctataacacttttttctataaaattaataatgttcgctatgaatgccttttcatgtgaaaattct

SEQ ID NO: 254755 - DNA, 583 bp, Homo sapiens
aatgctggcatcagatagaatgtccaaattgctatcactctgccagttttacacctacatccctattagttcctgtctaattaccaatgataaaagtactttgaagtcccactgatttccatgtaaatatcatacaaatttggatttgctttaacattataattccatcagcttagaagttaaaatttagaaaagctgtagttcattagtttaagtcacttcaaaacttaccttgcttagttttcagatagactcccatcctatacttctaggactgtacaaataaaaaaatgaattaaaagacatttcttgatgggtttaatgttttctactaattattttgacagacagtcataatctgttctgagttcttcttttctccttccatttcaattcttcataaaacatggaaaaaactttggagactgaataagatctatggtaatccacaatagatgaggccctgaacacaacatagggaaaacatrtaacccacccccaataagctcaacttactgtaaactcttgaggagtaattagggacttcagcagtctctctgaaaaagccaacgcattgtaaaac

SEQ ID NO: 254756 - DNA, 494 bp, Homo sapiens
ggcccacatttttttttcttayaccgtgcacacccctccccaactctatttcattctgtgttccttctgtccatatgctaaaatgactgagagtgactcctgtttgtttttgttttcttttccccactttgaacagcatcaggagacttttttttaagccaaagcagaataacaaaagcagaacacattctgagttaactgaacttcaagggagaatcttagcaatgctcttcctacacaccaaagaaacagataaaatggaccatgctatttatagctgccttcccgtttctaataatcctccatttaattaggactgtaaatagcacccgtgaatgctctgcaggaatgcatgggcagtcccagcccttcctcagaatatatcctaccctaggcaagaaaaggctatcagggcaagtttcatagctcacaaagatgctgagttatgaaaaaaaaaaaaaaacataatcttttgtgctatagagaaaagatga

SEQ ID NO: 254757 - DNA, 606 bp, Homo sapiens
gtatatatactcaaacatggaagcaatcatttcactgaggggtaatgatggaaattgggattaaaagccatcattgacacggaaaggaatctaaagtgatgggaaattctgctttagagagaaaaaaattaaggcaaaaactctgcaaaagttgagtcccaatgataaacaagcactttgatttttgttgttgttattgttaaataaaatatagagcctttcttcagttatttttatgttttgttaaaaactgaaacccaggtcatttaaattcagccactttaccttttatcctttcttgaacctcagcatcttatttcattttatttttctttcccctgaattcactctccctgctccactgcaaccatatttcaaataaatttgtttatgtcttcagttcttgttctccttaccacgcttccgtcttctactgaattcttggattccaagccccaggagkgcttagaagcctaagaagttttcttagcaagcctaagaagttttctgtttcagtagcaaactcagagccatgaacaattaggtacttaattgctttgtgatgactatgattgatggtgttttccgcctatactaattccagtg

SEQ ID NO: 254758 - DNA, 614 bp, Homo sapiens
ctaaagtagctattataggacataaatgcattgatattttagtggatctcagtctagaggtgagaagagggctaatcataataattgggactgagtgtgttagaattacacatctttcccctgctctgataaaaaatatcctgccatagagagtcactgatactaatcagagcatgtcatatctttcagatatttggggacagagaaaaaaaggtgatgaattacagtactagagatactatagcctttaaaataaatattatatacttttggttctacatacttttaaatgaagatggtccatgaagtaagttatgatcaaaactaatgcaagggcttacagcctaagargaaagtccagaatttagagaatggtgacctgtcttttcttggcaactaatattatgaacatcaatttctcatcactttgtggcttcaagaaattctcccatcatagagatgaatcacctttcttccaggtcttcaaaaaaaatatatatatatataaaggtctgtgggagataagcttagaaacagtggctgaaaaggagaaaaattcagatttcagtcctcgggggtttgcataacaaatgatgaagtatagttttatagct

SEQ ID NO: 254759 - DNA, 605 bp, Homo sapiens
tagtctcatttcctgtccaaggcaggaattttcccctgaacattcctgacagaagataacctgttttgtgctctaatcacccagtcttctaccagaggttgaagtgacattttggctccattttctcgtattttatgcaagaagctgggaattccagcatcttactctgctcatcagggatcctgagggagctggtaatatgcagaaaggatgtcaaagggccatgttactaatagctgtggaagctccgctatccacaaagcagagattatgaaacagtctatactttggctagaagcctaagcagaatctcttctacttccctcaaaatctatttcttagcaccagcaagactgggtctgtccagtgggttgtgggtttggrgagaagcagaggaaagattgacatcatgtggaatctggaagagacagaacacatctcttggtgcttttgaaggtacagtgactccatctagtagtaaaaggtgttcaaatgaatggcttcaaatttgaccagattatcaaatgctgcttccctgataaacagctcagacatgggttagaagaggtggccctgggatgggaagcagtgcagactctcatgta

SEQ ID NO: 254760 - DNA, 564 bp, Homo sapiens
aattattattggccttgtatgcaagactgagttgatcccagtctcaatttacctgataccatctatttcaacaataacaataataacaacaataatgaatatttatttagagctttctctgttccaagcactgttctgaccactttatgtatatttacttggttgactctaacaataattactgaggtgggccaggcacagtggctcatgcctgtaatcccagcactttgggaggctgaggcgggcagatcacctgaggtcaggagttcaagmccggcctggccaacatggcgaaaccctgtctctaccaaaaatacaaaaattagccgggtgtggtggtacacgcctgtaatcccagctgtccagaaggctgaggcaggggaatctcttgaacccaggaggcggaggttgcagtgagctgagattgcatcactgcactccagcctaggcaacagagtgagaatctgtctcaaaaaattaaataaataagtaaataaaaataaataattactgaggtggctattactaatttctctattttggtgatttggaaactgaacttag

SEQ ID NO: 254761 - DNA, 195 bp, Homo sapiens
tattgccctgtccctgcatatcttctggccttatagacctctgtgcctttatctatgtcgttccttctacctcaacaggtttctgtcctaccatggattgtctaatgccttctgcacatgttctttatcctagraagcaaaatatttattccttttcctgcattctttaatacctagtttatgcatgtctcattg

SEQ ID NO: 254762 - DNA, 637 bp, Homo sapiens
atagttgtggaatgagaatcaacaatatgcgtttgtaacaagttgccaggtgatgctggtggccagagactacactttgagaaccactcatctaagcaatgattcttgggagagtgatctaggctcttcgctccttagtactattgatttcaattcatagaactattgaaacccactgctatatttagaaccagtgtcttaggagagctatttttccaaaaatgtcatagattccagaattccagaatctgaaaatgcacacaacctcttattggttttacctattgatgtccaatctcatccaacagaaatggcatccatccagcaagtcacatggccatcatgctgcttttctattctctctactactgcacattattaagaagagatgctttaaagaaggaaacagaatcatcatacttctcagggcccactgcactcttgtttagatgttatcgtggcatttttcctctaatgctccagtgcatggaaacataatacygttaatgaacttataaacttttcaaaggtagggagcctgtgctcgcctactttgtgtacctagtattgtgctatcctgtagcgcttgttcaatgactcagaccccctgaggcaccattactacttagttactgac

SEQ ID NO: 254763 - DNA, 569 bp, Homo sapiens
ttataagttagaggagaaaaatatgtcctttcaactgaatacctgtgcctttaattttacagagcccttttctccttgggactatagggagggaagagacctctcttgtcacttgtcattccaaggactactagttatatcaaactttactttttttttttcttgccacaccaaaaaagtcactcactttttttcagagaagcctgctgcatagtttagttggctatccctgctctcctgtggccctttcctagctctgacttcttttaaaagaagattgtttgttctgaagggatctttgccaaaagagcgtttagggttctatcacttgtttgtttttcattaaagagaattacatttgactcacctctaatatttaaatagataaggcaccccaggaaagggagggagaaagcttaaaaagaggactgtggggtctttcttcacaaggatgcttgtggggttaggccctacagtgagaygggagaaaatgctattacaactatcagatgaaacagcttaccagacaaggaactttgcagttagctcctcttgtctttaaaatagat

SEQ ID NO: 254764 - DNA, 612 bp, Homo sapiens
tagtctttggctagaggcattaggagtaatagtcattttccagagatagatgtcaatttcacaattacagttccaaggttttcttgtgtctcttgagactcaccttgtcaggtacrtgagtgtctgggagaccttgccctgcctctttcctacctcatcaggcctatagctcatctttataccttgtagtgggttaaatagtgtctccccaaaagatatggaatgtatgaatgtgtcattatttgaaaaaagagtctttgcaagatggaattagtaaaggctgtctagatgagatcatcctggattatctaggtgggctctgaatccaatggcaagtatctttttttttgagatgagtttcgctcttgttgcccaggctggagtgcaatggcacaatcttggctcactgcaacctccgcctcctgggtttcaagcgattcttttgccatggcctcctgaatcgttgggattacaggcatgcgccaccacacccggctaatttttgtatttttagtagagacagggtttcaccacagtggccaggctggtctcaaactcaggtggtctgcctgccttggcctcccaaagtgctgggattacaggtttgagcca

SEQ ID NO: 254765 - DNA, 612 bp, Homo sapiens
tagtctttggctagaggcattaggagtaatagtcattttccagagatagatgtcaatttcacaattacagttccaaggttttcttgtgtctcttgagactcaccttgtcaggtacatgagtgtctgggagaccttgccctgcctctttcctacctcatcaggcctatagctcatctttataccttgtagtgggttaaatagtgtctccccaaaagatatggaatgtatgaatrtgtcattatttgaaaaaagagtctttgcaagatggaattagtaaaggctgtctagatgagatcatcctggattatctaggtgggctctgaatccaatggcaagtatctttttttttgagatgagtttcgctcttgttgcccaggctggagtgcaatggcacaatcttggctcactgcaacctccgcctcctgggtttcaagcgattcttttgccatggcctcctgaatcgttgggattacaggcatgcgccaccacacccggctaatttttgtatttttagtagagacagggtttcaccacagtggccaggctggtctcaaactcaggtggtctgcctgccttggcctcccaaagtgctgggattacaggtttgagcca

SEQ ID NO: 254766 - DNA, 612 bp, Homo sapiens
tagtctttggctagaggcattaggagtaatagtcattttccagagatagatgtcaatttcacaattacagttccaaggttttcttgtgtctcttgagactcaccttgtcaggtacatgagtgtctgggagaccttgccctgcctctttcctacctcatcaggcctatagctcatctttataccttgtagtgggttaaatagtgtctccccaaaagatatggaatgtatgaatgtgtcattatttgaaaaaagagtctttgcaagatggaattagtaaaggctgtctagatgagatcatcctggattatctaggtgggctctgaatccaatggcaagtatctttttttttgagatgagtttcgctcttgttgcccaggctggagtgcaatggcrcaatcttggctcactgcaacctccgcctcctgggtttcaagcgattcttttgccatggcctcctgaatcgttgggattacaggcatgcgccaccacacccggctaatttttgtatttttagtagagacagggtttcaccacagtggccaggctggtctcaaactcaggtggtctgcctgccttggcctcccaaagtgctgggattacaggtttgagcca

SEQ ID NO: 254767 - DNA, 493 bp, Homo sapiens
gatcctacatttctttctttttgttctctaaagttcaactcttyaggcaaccacctctggggaaagatgtcacaaaagtaaaacacaccatcctctcatcaaacacatttcagcaaagctggttgagcttctgctcatttggagagcacaagggtcaccatatgcagcagatggctgtgttgaaggtatcttattccacctataatcccactgggctctcgatagcactccaacacgtaactgaatacagaatgcctatcctggatacacacatatatctttgatagccttgttataggggcaaacccaactcaacacagtaaacctgccttagaaggctctgttgtgtcctggagagaccagaagttcctagtcagacaaacctagggtgtgttaaatccttggcatcatcacttagtagctgttcaattttacctccgtgagcttcagtttcctcaagtgatactgatggatacctttcaccacatgattg

SEQ ID NO: 254768 - DNA, 518 bp, Homo sapiens
ccttagtggttttattgatgatactaaagawcatgacctagacatacactatcttataattttcttaatactgattcatattgctttttctctgaccttattggtatttgccaaacctgaacataacattttctgcgaaatgtcatcaatgtttggcttttcccataagcatgctttataaaattaacgtactctaaaaatctcataacactatccctattcaccttttccatacctggatactgtgccatgtcatattattctactattaacaggtatatatctcaatgttctacccttcattaagttgatttagattaattttgcaagatgaaaaataagcaaatgctttaaatgaagctcaaatccaaagcaacaaactccacgtcctccatggaacaaaatgcttctgtggatcaaatatctagacttcttagagatcacatggggcagtcatatctgtactttctacaaagcttaaaaactagggtatgagcatagcattagctaaacggaag

SEQ ID NO: 254769 - DNA, 568 bp, Homo sapiens
tcttgactaagaacgatgacggcattatcattccttccaactcagtgggtcattcctcccctcttcacttgttcttcctctttcctgctcccccaacctccactttcctcactgggcctcatttatctgcagccattgggtggctgcctcataaacattcccttcctgattgctatatgatatcttgccctgcaatgatgtcatcaagctaggcaccatatagtctccaagaaaaggggtttcccttggagaaactcaatggggacaattcattattgagttcaaaatctgtgtctaaataaaccccacaaacccatagcagatcacttattttgtgccttggctttgccacatcaactccagcagtaaccacctcagcaatatcacacaaacaccacctscccctaaagttcaatcagttctgtgtccattgggggtagtttttctaacaaataccactgttttcaggaaaatatttttatctctgaatactttcagatgtgggctgtcttgtggaggttcagaggtatatcaaggtgacccaattttcatgtccctagctttgaaa

SEQ ID NO: 254770 - DNA, 632 bp, Homo sapiens
ctctgccaagagaagacacagtgagaaggtggctgtccgcaagccagaaagagagccctcactagaaactacattggccaacaccttcatcctggacttccccagcctccagaactgtgagaaataaatgtctgttatttaggccacactgtttattttgttatacatgccaagtgactaaaacagatacataagtggagcaatacaatagggactcttttgtctggcttccttcattcaacctaagtaagattcatccatgttattgtgttcatcaatagttcattcattttatgggtatatcatattccattgtatgaatataccacaatttgcttttctctttacttttttatggatattttatggattagttgtttacaatttttggtttcacaaataaagttgctgtaaactttcttgtacaagtctttgcatgggcatatttctgcagtaaaacgtataggtggaatgtctttgtttcacagtaggagtatttcagaaacttccaaacacttttccgaagtggctgccccatttttatctccattagygatgtaagtgttccagtcactccacaaccttgccaatacttgatatggtcagtcttctaaattttagtcagtccagtc

SEQ ID NO: 254771 - DNA, 600 bp, Homo sapiens
tgttattgtgttcatcaatagttcattcattttatgggtatatcatattccattgtatgaatataccacaatttgcttttctctttacttttttatggatattttatggattagttgtttacaatttttggtttcacaaataaagttgctgtaaactttcttgtacaagtctttgcatgggcatatttctgcagtaaaacgtataggtggaatgtctttgtttcacagtaggagtatttcagaaacttccaaacacttttccgaagtggctgccccatttttatctccattagtgatgtaagtgttccagtcactccacaaccttgccaatacttgatatggtcagtcttctaaattttagtcagtccagtcattctaattggtgggtagtggtatctcactgtgattttaattttaattttcctaattatycatgatgttaagcattttgtgatgttcttgtttgtcatttgggtatcttatttggtaaaatgtctgttgaaatatttttgtccatttttgtgccttctttgttgagttataagcattctatggttttagttacaagtactttgttagataaatgttttacaaagtttt

SEQ ID NO: 254772 - DNA, 612 bp, Homo sapiens
tgtttttatgttaatatgtaatgggcttggttttgttctttttaagtggatacataaacattttcttaattttaacttatgatgaatatcaataaatagaaaaacacaactacaatctctttgaggggaygcccataatttatgagtatcagtgagcgctgaaacgaaaacatctgagacctgctggtatggacatttacaagtatctttctgggtttttaattggggtgactattatgagtttataataatattaatctcttttttattggttgtccttttcaaaccacaggaaaacaaatgtgcattttcctgaccatgcatagtgactgtggtgtagcaccagacggcatttggaggaaagtctgttggaaaagggtggggatgggagataatgaggacacaaaaaaggaggaagagcttggttcaaaaactgtatttaaaaaatgaagagtaatctcacccaaaatgagatttattgtgattactccacaataaaaaaatgaggagtaatctcacccaaagtcttaatttaactataaaattttgcttaacatacagagttcctgtaaaacttgggaatcacaaagaaaaagcctaagttcgggggaa

SEQ ID NO: 254773 - DNA, 612 bp, Homo sapiens
tgtttttatgttaatatgtaatgggcttggttttgttctttttaagtggatacataaacattttcttaattttaacttatgatgaatatcaataaatagaaaaacacaactacaatctctttgaggggatgcccataatttatgagtatcagtgagcgctgaaacgaaaacatctgagacctgctggtatggacatttacaagtatctttctgggtttttaattggggtgactattatgagtttataataatattaatctcttttttattggttgtccttttcaaaccacaggaaaacaaatgtgcattttcctgaccatgcatagtgactgtggtgtagcaccagackgcatttggaggaaagtctgttggaaaagggtggggatgggagataatgaggacacaaaaaaggaggaagagcttggttcaaaaactgtatttaaaaaatgaagagtaatctcacccaaaatgagatttattgtgattactccacaataaaaaaatgaggagtaatctcacccaaagtcttaatttaactataaaattttgcttaacatacagagttcctgtaaaacttgggaatcacaaagaaaaagcctaagttcgggggaa

SEQ ID NO: 254774 - DNA, 567 bp, Homo sapiens
ctgggtgggtctgccaggcctggaactgcagccaccagcagggactatcgagccaatagcagctctgcaactccctagaacagagttcccagtgagaagggtgggtttccatctttgctatctcacagctcttgcccttgctgtctccagactctggagagtttgcagggaacagtggctggtccagatccctagcacagagcaactaactcacagaagagtggacagactgttctccatgctgttcctggttgtcacctcgccacaatgtgcagggccacctgaccagagwctccagcacaggcacccttcccctgcctcatctcctcaatcaggcagtccagcatttctccaaggaagaaatcccacagtcaacccacaacccatccaccactactgttgcagtgggacagccccagcagccctctggctggggaaggaacaaagggcctagtcactacactctcacctccagcacatcatagccactgtatgaagaggagtccagcccctcttccctgagaatccccatccctattcttcaggaggcagggcccccagcccatg

SEQ ID NO: 254775 - DNA, 567 bp, Homo sapiens
ctgggtgggtctgccaggcctggaactgcagccaccagcagggactatcgagccaatagcagctctgcaactccctagaacagagttcccagtgagaagggtgggtttccatctttgctatctcacagctcttgcccttgctgtctccagactctggagagtttgcagggaacagtggctggtccagatccctagcacagagcaactaactcacagaagagtggacagactgttctccatgctgttcctggttgtcacctcgccacaatgtgcagggccacctgaccagagtctccagcacaggcacccttcccctgcctcatctcctcaatcaggcagtccagcatttctccaaggaagaaatcccacagtcaacccacaacccatccaccactactgttgcagtgggacagccccagcagccctctggctggggaagsaacaaagggcctagtcactacactctcacctccagcacatcatagccactgtatgaagaggagtccagcccctcttccctgagaatccccatccctattcttcaggaggcagggcccccagcccatg

SEQ ID NO: 254776 - DNA, 649 bp, Homo sapiens
agtttacaaattattttctcatattaagcaaaattcaaagcttcatacactatgagaaaaattttaaaaaattattgattcatatatttagtagttttcaatgattcagtatgtaattacattcatattaacrtgtatttatatagcttttatattgcatatgtaatttgataaaatataatttacattaatgaattacactaaaagttattccagaaatatacttatcaaattaagttatatgtcaacagcttttaaacttagattttagtttaacttttctgtcattcttaactttacattgaataaaaagagcaaactttatagtttttatctgtgaagtagaggtatacgtagtatacataaatagatatgccaaatctgtgttattaaaatttcatgaagattccaattagtaaaaaataccataaaagtctttgagtgcaggggaaaaataggcaatgatgaacaaaatgaaaaacatatgtaaacacatgtagagagtgcataaagaaagcaaaaacagagatagaaagtaaaaccagggcatttagaaaatggaaattagtatgttcactatttaagaactatgcacagagcaaagtcttcagaaaacctagaggccaaggttcaagtttacccatctcca

SEQ ID NO: 254777 - DNA, 649 bp, Homo sapiens
agtttacaaattattttctcatattaagcaaaattcaaagcttcatacactatgagaaaaattttaaaaaattattgattcatatatttagtagttttcaatgattcagtatgtaattacattcatattaacgtgtatttatatagcttttatattgcatatgtaatttgataaaatataatttacattaatgaattacactaaaagttattccagaaatatacttatcaaattaagttatatgtcaacagcttttaaacttagattttagtttaacttttctgtcattcttaactttacattgaataaaaagagcaaactttatagtttttatctgtgaagtagaggtatacgtagtatacataaatagatatgccaaatctgtgttattaaaatttcatgaagattccaattagtaaaaaataccataaaagtctttgagtgcasgggaaaaataggcaatgatgaacaaaatgaaaaacatatgtaaacacatgtagagagtgcataaagaaagcaaaaacagagatagaaagtaaaaccagggcatttagaaaatggaaattagtatgttcactatttaagaactatgcacagagcaaagtcttcagaaaacctagaggccaaggttcaagtttacccatctcca

SEQ ID NO: 254778 - DNA, 421 bp, Homo sapiens
gaatggaccctggtagtggaattagcccatttcctyaacttctgtatcgtggagagagaaaatactcccagcttcaggcatgacatgtcatcttggggcaatggacagctatggggaaagacaaagggtcaggatgtgtccctttcctccagcctgcccagcctccccggggcctcctaacttatcccttcctctatggattgtgctacactaggaattagaacagcctgccaatctgggtgtagaacttcaagggaatttgacttttggtctctctatcaaggttgtggtagttttcatagatgatatcctgaaatatattttccaagttgtttgctttctccctgtctttttaaaggatgcaagtgattcttagatttggcctctttatacaatcccctatttcttggaggttttgttc

SEQ ID NO: 254779 - DNA, 421 bp, Homo sapiens
gaatggaccctggtagtggaattagcccatttcctcaacttctgtatcrtggagagagaaaatactcccagcttcaggcatgacatgtcatcttggggcaatggacagctatggggaaagacaaagggtcaggatgtgtccctttcctccagcctgcccagcctccccggggcctcctaacttatcccttcctctatggattgtgctacactaggaattagaacagcctgccaatctgggtgtagaacttcaagggaatttgacttttggtctctctatcaaggttgtggtagttttcatagatgatatcctgaaatatattttccaagttgtttgctttctccctgtctttttaaaggatgcaagtgattcttagatttggcctctttatacaatcccctatttcttggaggttttgttc

SEQ ID NO: 254780 - DNA, 421 bp, Homo sapiens
gaatggaccctggtagtggaattagcccatttcctcaacttctgtatcgtggagagagaaaatactcccagcttcaggcatgacatgtcrtcttggggcaatggacagctatggggaaagacaaagggtcaggatgtgtccctttcctccagcctgcccagcctccccggggcctcctaacttatcccttcctctatggattgtgctacactaggaattagaacagcctgccaatctgggtgtagaacttcaagggaatttgacttttggtctctctatcaaggttgtggtagttttcatagatgatatcctgaaatatattttccaagttgtttgctttctccctgtctttttaaaggatgcaagtgattcttagatttggcctctttatacaatcccctatttcttggaggttttgttc

SEQ ID NO: 254781 - DNA, 421 bp, Homo sapiens
gaatggaccctggtagtggaattagcccatttcctcaacttctgtatcgtggagagagaaaatactcccagcttcaggcatgacatgtcatcttggggcaatggacagctatggggaaagacaaagggtcaggatgtgtccctttcctccagcctgcccagcctccccggggcctcctaacttatcccttcctctatggattgtgctacactaggaatkagaacagcctgccaatctgggtgtagaacttcaagggaatttgacttttggtctctctatcaaggttgtggtagttttcatagatgatatcctgaaatatattttccaagttgtttgctttctccctgtctttttaaaggatgcaagtgattcttagatttggcctctttatacaatcccctatttcttggaggttttgttc

SEQ ID NO: 254782 - DNA, 632 bp, Homo sapiens
ctgcagggatagccatagtaaataactagtaacggtattgcaagttaaaggaacaatctcattgcttgaaattttaaattttgaaatacactgccaattttcatggtctctccttgtaagctagtttgggctttctcacagcatgacaggctcagggcagtcagaccatcctggccaaagagcagagtgccacagaccacaactgcttctaatcagccatcttcccaaagccttctcttttttctattaataactttgtatgagattccatcttaatacttttctgttgtttggtcttgtaagagcttatttttcctgaaccaggaagtggttcagggcggtttttctaacttcacagagctccctcttctgttagcttttgtgaaatggtcaaaaacatagcagcctgccttctgagttctccatcccaccctggttgggccttctctatccttgtctstgttgtttatatcctgctgaagtgtgattccacttgtggcagtttctcctctgtgtaggatcaaaagggctgtgactggttggtttgaaaatttcttataccctagactattccagtgcctttcagaagtttccaaggccctctcacactaatctattatcatattgggcaa

SEQ ID NO: 254783 - DNA, 632 bp, Homo sapiens
ctgcagggatagccatagtaaataactagtaacggtattgcaagttaaaggaacaatctcattgcttgaaattttaaattttgaaatacactgccaattttcatggtctctccttgtaagctagtttgggctttctcacagcatgacaggctcagggcagtcagaccatcctggccaaagagcagagtgccacagaccacaactgcttctaatcagccatcttcccaaagccttctcttttttctattaataactttgtatgagattccatcttaatacttttctgttgtttggtcttgtaagagcttatttttcctgaaccaggaagtggttcagggcggtttttctaacttcacagagctccctcttctgttagcttttgtgaaatggtcaaaaacatagcagcctgccttctgagttctccatcccaccctggttgggccttctctatccttgtctgtgttgtttatatcctgctgaagtgtgattccacttgtggcagtttctcctctgtgtaggatcaaaagggctgtgrctggttggtttgaaaatttcttataccctagactattccagtgcctttcagaagtttccaaggccctctcacactaatctattatcatattgggcaa

SEQ ID NO: 254784 - DNA, 576 bp, Homo sapiens
tgtacagcaagcttgcccccaattctcaaattgtgcccctaacacaatattgtccgaagcgtcctggtgaagcytgctcatatgtattttactttcaggaagtgattgagaaaagtttacaattgtggaaatgtggatgtctgaaatattaagctagatgctcatagtctagtcttgagtgcaaagtccactatatatgtggaaaaccagtgaggtgagaggatacttcaggaaagctagataataatggtgaactttaatataatgctatgggattagaagccagaggccattgtccaaccaactcatacaatggtaataaggatgaacaacttctgttctagctcattgtcccttgaaccaatcttgagccaggtgaaagttccaacgggttaaagaaatccaaggaccctattcattaaaaacacagaaattaagcaagaaaacttctaagttcctggtatttgaggatgtagcaaagaataagatgagatttatgcacaagaagaatgtatcttctggcggggcgcgttggctcacgcctgtagtcccagcactttgggaggccgaggcggg

SEQ ID NO: 254785 - DNA, 606 bp, Homo sapiens
aataattttctgatttacttgtactggttttgttagccataggcagtaacaacatagctggcaggccccattgccatggctggagagctgttcttacagaagtgaaaacaaaagatatggtctactacattccaaacctttccttgttggtacctacactcctctttctattgatactatttcaaagatgctcaattgttcaacaatatgctgccttcaaacgactcagtttagctttagaacataactaggctgaaagtgcaaggatggagaaaattatttcacacaattgatagccaaaagagagctggggtaaatatactagacaaaatagactttaggtaaaaaaaaaactataacaagaaggtcattatataatgttaaagggataatttcatcaagagaatacaacaattataaatatatatgtactcaacatcagaacaccaaaatatacaaagcaaatattaacagatctgaatggagaaataggcagcaatatgatcataataggagacttcaataycccattttcaacaaaggatggatcattttgaatggtttacagtaaaccaatgaagaagcaaatttaaaagattgaaatca

SEQ ID NO: 254786 - DNA, 606 bp, Homo sapiens
aataattttctgatttacttgtactggttttgttagccataggcagtaacaacatagctggcaggccccattgccatggctggagagctgttcttacagaagtgaaaacaaaagatatggtctactacattccaaacctttccttgttggtacctacactcctctttctattgatactatttcaaagatgctcaattgttcaacaatatgctgccttcaaacgactcagtttagctttagaacataactaggctgaaagtgcaaggatggagaaaattatttcacacaattgatagccaaaagagagctggggtaaatatactagacaaaatagactttaggtaaaaaaaaaactataacaagaaggtcattatataatgttaaagggataatttcatcaagagaatacaacaattataaatatatatgtactcaacatcagaacaccaaaatatacaaagcaaatattaacagatctgaatggagaaataggcagcaatatgatcataataggagacttcaataccccattttcaacaarggatggatcattttgaatggtttacagtaaaccaatgaagaagcaaatttaaaagattgaaatca

SEQ ID NO: 254787 - DNA, 577 bp, Homo sapiens
ctttcaggtaaacaaagaaattaaggcaaaaatcaagaaattcttggaaactaatgaaaacaaagatacaacccttcagaatmtctggggcacagctaaatcagtattaggagtaaaattaatagcattaaatggctacatcaaaaagtcagaaagatcccaaattagcaagctaacatcacaccaaaaagaactaggaaaacaagagtagaacaactccaaagcttgcagaagaaaagaaataaccaaaatcagagttcaactgaaagaaattgagatgtgaaaatctatacaaaaaagaaacgaaaacaaaggtttgatttttgaaagaataaataaggttgacatactgctagctaaattaatgaagagaaaaagagagaagatccaaataaacacagatatgacaaaagtgatgttacaccaacctcacagaaatacaaaaaacttcagagagtgttttgaacacttctatgaacacaaactagaaaacctagaataaatggatacattcctggaaacatttaacctccaaagattgaatcaagaagaaattgaatactcgaacatacccata

SEQ ID NO: 254788 - DNA, 609 bp, Homo sapiens
tgggttacatacaaatatatgaattttgcttaaatatatgaacatgcagatgcagggcaatatcagcacacatttgtatagtcttttttgcagtcaacaaaggtgttatttaggcattttaggtggcattaaacacgttcaagtattcagataacatctgatcaggaacttattcataaaatactcttaagaaaatgaaaagaacatgccacagactgggagaaagtatttgcaaatcacatatctgatagaagactcatctccagaatatactttttaaaatctctgaaaactcaataataacaaaaccactaataaaacaataaaatacataataaataaaataataaaaatggataatatattggaacagatgcttcatcaaagaagacatgcaaatagcaaattagtatattaacatggtaaaatctttctcaaggattgttggtggtgtaggtcagataatgaatgtgaaatgatttggtcccaggggagccctttccatcatggggacctgccatrgcttctgtcctttctgagcaaagttcaccagccctcttggccaagctctatttctgatgcatgagaggtctgccaagcacagactgt

SEQ ID NO: 254789 - DNA, 565 bp, Homo sapiens
catattggaagaagaagaattgtcttgagccacacataaaatacactaacactaatgataactgatgaaattctaamaattatgaaaaaaatctcataatgttttaaggaagcttatgaatttctgttggactccattcgaggctgttctgggttacatgcagcctgtgggctgtggattggacaagcttggtgtaaggtattatcttgcagattttttcatttttaggatatattatattaggaatcattggcaaattactgtgtttttaagtcactttgaatctctgtgtgattatggtaccaattcccttatttaattttattttttatttttatagatttttaccttaattttttagtgagtatgtaaaatatttacatggtccatgtcaagtctgtaaaacaagtctagtttctatccctgactactctattttctccctcctccctatatataaccacttcttcattttatgttttcttttttgtatacttttctatttctgtcattgcaaattactacaaaattagtggcttcaatacaacacacatttgttatttac

SEQ ID NO: 254790 - DNA, 565 bp, Homo sapiens
catattggaagaagaagaattgtcttgagccacacataaaatacactaacactaatgataactgatgaaattctaacaattatgaaaaaaatctcataatgttttaagraagcttatgaatttctgttggactccattcgaggctgttctgggttacatgcagcctgtgggctgtggattggacaagcttggtgtaaggtattatcttgcagattttttcatttttaggatatattatattaggaatcattggcaaattactgtgtttttaagtcactttgaatctctgtgtgattatggtaccaattcccttatttaattttattttttatttttatagatttttaccttaattttttagtgagtatgtaaaatatttacatggtccatgtcaagtctgtaaaacaagtctagtttctatccctgactactctattttctccctcctccctatatataaccacttcttcattttatgttttcttttttgtatacttttctatttctgtcattgcaaattactacaaaattagtggcttcaatacaacacacatttgttatttac

SEQ ID NO: 254791 - DNA, 599 bp, Homo sapiens
tatgaatttctgttggactccattcgaggctgttctgggttacatgcagcctgtgggctgtggattggacaagcttggtgtaaggtattatcttgcagattttttcatttttaggatatattatattaggaatcattggcaaattactgtgyttttaagtcactttgaatctctgtgtgattatggtaccaattcccttatttaattttattttttatttttatagatttttaccttaattttttagtgagtatgtaaaatatttacatggtccatgtcaagtctgtaaaacaagtctagtttctatccctgactactctattttctccctcctccctatatataaccacttcttcattttatgttttcttttttgtatacttttctatttctgtcattgcaaattactacaaaattagtggcttcaatacaacacacatttgttatttacggttctgtaggttaggagtcctgacgtggttctgactgggctaaaatcagcatgttggcagggctgtgtgcctttctggagactccggggaaaactccattgccttgctttttgcggcttttagaggccacccacattccttggctaa

SEQ ID NO: 254792 - DNA, 559 bp, Homo sapiens
gcagacagtgactacccccaaagctgtcttcaattcaagatcttatacccttttcctaaatgcacatgaaagccattaggtctgggaatctaaaactagcaatgtagtttgaacccggaacatctctgatttatggaaatttatagtttagcaaatggtaattgggttgaagatacggaacagaacaattaagtctaaagatccaaccaactaaaataaacattgtattatcagctagcccaaagtatgtcatcagcaatcagaagtcacatcctcatcctcattccttttccacctcttctctctcttatgctatgttcccaaatcaacagtgtcctttactttcaaaaaggaggttctagattttggacctttaaaaactttattcttttcagacctcctggagwtataaatcagattagaaaaaaagaaaaggagagagaaagaatatgaatgtgatgcttacaattgaaaagactttgcccctcccttactttccttttttccttttttcttttagttcagagaggggaaaccgtaaaattctctgcagcacacg

SEQ ID NO: 254793 - DNA, 535 bp, Homo sapiens
acaattctggacattttcagaaagagtaaaccaagaacagtaaagttggaatccccatatcttttctaatccttttttaaaaattgtcaaataataaatttctatttttcatgtagcagaagacttggttctacattttttgtttttttttyctcctttgtgatttttatatttcaacttcagtttcttaatctataaaatgggtgtatatccacccctaagtctgtactggtaaattttaaagatatcattaggagatctttacatggaattaaatttctcagaatagcatctgtgtagtatggcacataaaaattattaatgaactgacatttagtgatacatgagatatgaatttgctaggccaaattcttaaccccagaaacacagggagtaattttgttttattggctgcaatagaatgataatctatccaaacagatttaattctaaaaagtaatttcagagcaagtctttcttttaaaacaaattatgcatatatataaatttcatgcactaacttacaaatgagaaa

SEQ ID NO: 254794 - DNA, 414 bp, Homo sapiens
gatcttgactaaaaatcacccctgagggtacaatgaaatttgcttgttaractattttagtgttttttctggatatcatgcatagcatgctgctgtctctctgtggtggaaccaaaagctaatagcttttactgattctgcagataaatatcatatgtcactacccattaaaaatctgctctaaaccccaagttcccattaatcaacattgtttttgttttcaaataattaatttaaaaaacactcagaaaaacttatagagaatccacagttggttatggatagaaaaatttaacttaaatatcataaagtaattttataaattcagatttggctcctgcatgtttactttgtttcttttgaaatatggtggtatattctgttctgtagatcattgatccgtaagttacttga

SEQ ID NO: 254795 - DNA, 484 bp, Homo sapiens
tttctctaaaacatctgcacatctttagtacaccaagaggaatagagaagattctaagaagaggctatagggcaaggtttcctacgcttgtttaaccacagcttttctttgttgttagctatccatgtctcyagaaacaagttctaaaataacattaaagacagactgaacaacaaaaatacaggaaaaactaactaacaccaaaaatgaatgtaacacaaatatttctggatcttctttctcctcccttaaggctcatctcagtgttaaatgcctttcaaaatagtgtattttttttctaaagttcttttatggaaatttaagagagggtcagggaggatggagcacagcaaaactttctaaaaatccaacttacaatttcccctttcccaaaatttctatgcctcattgcatcaacacaaatctctctctaacttgttccctgtaccccactcccatgatccctcccagatatttttcccat

SEQ ID NO: 254796 - DNA, 569 bp, Homo sapiens
agaatgtctcttctacattcttcaggagccaccccctgggctgtggcatcttccgatttagaaaaccaatgaggtctcatgcttattagaattgcaaatgtaaacctcaagatgtgtatgttggaagtgcaggcgtgatatatttcattttttttcttataatcacttttatgcttatattttttgcattgctttatttttgctttgtggtcatcamaaaatatcctagtatattttggtgctaattccaagactgtattcactgcagtctacatattattatgcaaatagcccataacagctctttgtaatttcacaaatccagactgtgaagttatttcccacttaatgcaaaacataatttactttctagttacatgtaatatttctatattacatactctaagcttctcccaaattactttttgattaatatcgtttggataaaattcaattttgcaacctcaaaccatcttacagaatgtggaaaatgttattttatacctgcattaggcatattttcagatattcctaaaatgctaattgctgattttagagacgtatggcaa

SEQ ID NO: 254797 - DNA, 551 bp, Homo sapiens
gactaagatagttagaagcatctagagctaaggaggaggctgggttttaaacagagagtttcctcatataggtggtcactgaaactgtgastgaatgtgcaatccagaaacagtggataccattaggaaaaccttaagaaacatcactatttagtagttgagagaaggaaagtaagctcaccatggagagaaaatagtttgagaagcacaaggaatacagtaaagtacaatgacagggaagtattcatgcttcctctttacatgcttttcttcttctgtgctcctgtaacatcataagcatatcttttgttataataattactgcatggcattgacgatattgatgttttttcttttgcatctgtcttttcccaccagaccagaggctcctactgaactgaaactgtagcttagccatcattgtatctctaatgccaagtacagaggacacactcaatatataatacaccttcaatataataggcatacataacaacacgaacatacacacatactcttatatgagactattttggttgtaagttatagaa

SEQ ID NO: 254798 - DNA, 621 bp, Homo sapiens
gatatagggcaggcgtgacctgcagcaccatctggacaaagtgccctaggtctttctcttaattatctatgcatgactgaggtgtaacttttgtccatgtactcaatttaagagacagcgggaaagtgaagtgcaaggaactctgcgtcttctccctccatttcggccgtggcagctccacaattttctgttttatattttggggttgcaaatgaggttacatgtggaactgctggggaaaaagtgtttgagatgttccatttaaacaaatagctctaagacttaaaaaacaaaacaaaactagactaacaggtcagatttgtgcctttcctctaactttaatttacctcccatatgtgtttcaggaaaataaaaatggactggagagctaaggtgaagaaaagacgtgtatgtgtcccttatttacaacaatttctcaccaggaaaaggtggctgctcagaagtwggaagggaagaataaaacatccttgctttgagctcggtgtcttggcctggattttcttaatttctttggttctggtttagattggaatcctcatcaagctcatttgttgttgaataaaaaatttagtgattgttgcctttgttgtttaccagttt

SEQ ID NO: 254799 - DNA, 434 bp, Homo sapiens
attaaaaatcgtgccaacacaatccttttttttcactgcaactataaaygtcacaatatttttttccaaatgcgattaaaaaaatggagagtagaaatatgtggtacccaaagttattctacagactgttatttgacagtctcctttggaagatagtttagcttttgcagagttctactatcagagcttacatttttggtattacagaagttctttgcttaaggaacctcatttacatgctaaaatgcgtctgcttaacatttgtgaattgcatagttcactgaattgaacactgaactagttgtgagccaaaaataacacaaatatgcttgttcctatctaggaattcagcctgttctctacagattataatctgaatgacatggagaaaatattggtcagttatctatacaataaatgacttgtatccaaaa

SEQ ID NO: 254800 - DNA, 572 bp, Homo sapiens
atggcacatatgtatgcatgcttttgaattctytttttttgtgccagttataacagctgttttcctcattcattaatgggttaagtagaatttttgacatatattcattttatatttgtatgagaatcatgattttaccttttatactaattattctttaacaattttttatccctacttaaatggtgagagaattaaggttcaaagaaatctatcaaattgcccaggtttagaaaagtaatagatagaagcaacatttgagcctatatatttgaccttaagcccaagttcttaaattctatactacttcaagattaaacataaagaaatctgaaaaatatattataggtccacaggcaagcattctaaaaattccagaactgtcctataattgtttttctttaaaatgtataacaaccccagctttgtgcctttgttgagagaaaagttaagtccttcacattgtagttttaaagcaaaaagctgtagaactcactgtcatacctataattttataggtagccactcctgtcccatgcccacgttaaatggttgtctgagaaaaaatcctc

SEQ ID NO: 254801 - DNA, 545 bp, Homo sapiens
gcccttcttttctgtctgaaaggagaggaagtattatggcagacattggtttttgcccacctcacaatcattcttactagctaaaagaacttgagattgtattcaggtaacaggtggagcatcctgatgtcagtgagagtagatctctgctmagtcataggaaataaaaatcaagactggttaatcaagactggtataaatgaggtgtggttatctatgtcccttagccagtccaggtgtggtcatgactctcagattcagcaatgagatgcaatggagattctgctgggactaaaaagatctgggacggatcatgacgactggagaagcagcagccattttatgatcacagagcacaaagccaacatgctgaggtcgacagacagaaaggacagagagaggctagtaccctgaggatattactgagttgctgcaccaaacctggaaccacccaccccctccagacatttcctgtgagctaatgcaatgtctttattgcttaagtgactgagtgccctcccttcttatggctctcctaggtaagc

SEQ ID NO: 254802 - DNA, 545 bp, Homo sapiens
gcccttcttttctgtctgaaaggagaggaagtattatggcagacattggtttttgcccacctcacaatcattcttactagctaaaagaacttgagattgtattcaggtaacaggtggagcatcctgatgtcagtgagagtagatctctgctaagtcataggaaataaaaatcaagactggttaatcaagactggtataaatgaggtgtggttatctatgtcccttagccagtccaggtgtggtcatgactctcagattcagcaatgagatgcaatggagattctgctgggactaaaaagatctgggacggatcatgaygactggagaagcagcagccattttatgatcacagagcacaaagccaacatgctgaggtcgacagacagaaaggacagagagaggctagtaccctgaggatattactgagttgctgcaccaaacctggaaccacccaccccctccagacatttcctgtgagctaatgcaatgtctttattgcttaagtgactgagtgccctcccttcttatggctctcctaggtaagc

SEQ ID NO: 254803 - DNA, 545 bp, Homo sapiens
gcccttcttttctgtctgaaaggagaggaagtattatggcagacattggtttttgcccacctcacaatcattcttactagctaaaagaacttgagattgtattcaggtaacaggtggagcatcctgatgtcagtgagagtagatctctgctaagtcataggaaataaaaatcaagactggttaatcaagactggtataaatgaggtgtggttatctatgtcccttagccagtccaggtgtggtcatgactctcagattcagcaatgagatgcaatggagattctgctgggactaaaaagatctgggacggatcatgacgactggagaagcagcagccattttatgatcacagagcacaaagccaacatgctgaggtcgacagacagaaagsacagagagaggctagtaccctgaggatattactgagttgctgcaccaaacctggaaccacccaccccctccagacatttcctgtgagctaatgcaatgtctttattgcttaagtgactgagtgccctcccttcttatggctctcctaggtaagc

SEQ ID NO: 254804 - DNA, 628 bp, Homo sapiens
ttttagtaacttctgctaaagagtgggtttctttctattaaaaaataaataattaatttttccagtttggttaaaagtcaccttttatttctagcatctccaagtacaggaataacgtacatacatgttttatttaatagttttcttgcaaaacccagcatctcagcaaaagctgctgttagcacttcaaatttatcataacttaaagggagacacargaggtacagttatgagagtacaatggagccctaaagtaaaattagtccacaaagatctagaatatcatcatctaaattttttgaaagaaaagtaagttaagtatctaccatttataacaaaatgctccttttagagtcttaggagacctaattccaccccccaatgcatgagctgacaacatcatgatcaaacatatgcagggttagtgtttataatacctgatgcaggtgtgatggtcacatttttaaaattgtattgtagacttgcaggtggccagataattttttattcatggtcgtttattcatttttctggagatgtttccaataaaaagtgaattagagttatgttgcacttttcattttcaaagaacatttgaatccatgatcccacttgacctacaaaattg

SEQ ID NO: 254805 - DNA, 551 bp, Homo sapiens
  misc_feature (1)...(551): n = A,T,C or G
agtggtgggtttttaactgcagccctcacaacttcataaggaaaatagaatgatatatttttaaaattcacttttaaaaaagtgagtatgtgcttttttttttatcttgacatgatttctttctagaaatcctagtaaactaaagaaactgaaagaagcggttataactctgctgtttgatgcttgtgtttccagtgtttaccttggatcaggacaaccactaaggtatcagcagttccactgccatggctgctaagagcgtggaactgtgctcatccagatgggaacccttcagaggcaaacagaggagtggccaagatcatgacagaaatgatgtgaaagcccacaaacctcctcctctccatgatgtcctcatgaagtgaagagaagagtggrtagaacttacaaaatcacacgtgttactgactcttcctaaatgtgggagacacataagcagaaccttccagaattagaaaggtggactttctgacttaacgtttctactcagggtcatgtctacataggatcaaaataagannnnnnnnnnnnnn

SEQ ID NO: 254806 - DNA, 620 bp, Homo sapiens
ccagagagttttgtattttgttatttttaaattttaaattttaaatttttatttatttatttttttgagacagagtcttgctctgttgccaaggctggagtacagtggtgcaatcagagctcattgcagcctccacttaccaggctcaagcggcaattctctgcctcaacctctcaagtagctgcrgccacaggtgtgtgcaccattatgtctggctaatttttgtagtttttgtagagatgaggttttgccatgttgcccaggttgagctcaaactcctgggctcaagcaaaccacccatcttggcctcgcaaagtgctgggattacaggcatgagccattctgtctggccaggttttttattttgtttgtttgtttctttagctgttgttgaaatttcaagaagacagaattaatttatccaataactgtggggtttttgtttttgtttttgtttttttttaaaaaaacacagctgtttcagtaacgttatgtcttcattatttgcttctctctctctcttttttttttattgagttggaattctttttctaactaccagagataaaaggttaactcattaactttcaaccttggttcttgtcttatatacgcattta

SEQ ID NO: 254807 - DNA, 620 bp, Homo sapiens
ccagagagttttgtattttgttatttttaaattttaaattttaaatttttatttatttatttttttgagacagagtcttgctctgttgccaaggctggagtacagtggtgcaatcagagctcattgcagcctccacttaccaggctcaagcggcaattctctgcctcaacctctcaagtagctgcagccacaggtgtgtgcaccattatgtctggctaatttttgtagtttttgtagagatgaggttttgccatgttgcccaggttgagctcaaactcctgggctcaagcaaaccacccatcttggcctcgcaaagtgctgggattacaggcatgagccattctgtctggccrggttttttattttgtttgtttgtttctttagctgttgttgaaatttcaagaagacagaattaatttatccaataactgtggggtttttgtttttgtttttgtttttttttaaaaaaacacagctgtttcagtaacgttatgtcttcattatttgcttctctctctctcttttttttttattgagttggaattctttttctaactaccagagataaaaggttaactcattaactttcaaccttggttcttgtcttatatacgcattta

SEQ ID NO: 254808 - DNA, 638 bp, Homo sapiens
aaggttcaaacaaaacctggtgtgcccctgggcccagggagtggtttggaggtgggcacatggaccagttagaacaagctagactcagtagcaaggcttttgttggtcctgttaaaaatcagatatccctttctgctgggttggtgagtggagaggctataaggtagttgcttctggcagccatctggtgtcatcataaggaagttgactgccagagtaaatatggagtcagcatggcagataagtcaacataagagagaaatatgaagtgtgtgtgtgtgtgtgtgtgtgtgtgtgtgtgtgtgtgtgtgtgtgcgcgcrcgcgcatatgagagagagagacctgataacattatttagcccttggatccagctgtgcttaagctcatcctagtatttttcagttacacgaactaatatattttctttttaagcaagtttgagtgaaattttgcatcatatacagttgaaagggtcctaatataatagttattaccttataaaagcatcagttttcattatattcttaagtatttgagtcctagatggtagcaaatacattttctatgtacttaaggttattttccacacaacccaaaacaccaattggaaagtgatatattcaatgggtctattag

SEQ ID NO: 254809 - DNA, 638 bp, Homo sapiens
aaggttcaaacaaaacctggtgtgcccctgggcccagggagtggtttggaggtgggcacatggaccagttagaacaagctagactcagtagcaaggcttttgttggtcctgttaaaaatcagatatccctttctgctgggttggtgagtggagaggctataaggtagttgcttctggcagccatctggtgtcatcataaggaagttgactgccagagtaaatatggagtcagcatggcagataagtcaacataagagagaaatatgaagtgtgtgtgtgtgtgtgtgtgtgtgtgtgtgtgtgtgtgtgtgtgtgcgcgcgcgcgcatatgagagagagagacctgataacattatttagcccttggatccagctgtgcttaagctcatcctagtatttttcagttacaygaactaatatattttctttttaagcaagtttgagtgaaattttgcatcatatacagttgaaagggtcctaatataatagttattaccttataaaagcatcagttttcattatattcttaagtatttgagtcctagatggtagcaaatacattttctatgtacttaaggttattttccacacaacccaaaacaccaattggaaagtgatatattcaatgggtctattag

SEQ ID NO: 254810 - DNA, 532 bp, Homo sapiens
ctttgcctacttaatccttcattgataatttatatgtatcctcaagggctgaatcatttgggccatttattaatcatttcatcaaaaaagyctcttgagatgaagtgtttcaatctcaaggaagccttcaaaggcaaaaatacaggaagcaaagacaatataagtaaatttaaattacatgcagtcacattttctcaaaacagatttaagtttttgctcaggaattccagtgttttgtgttgcatgtaatattgccctctgcagtgttctttcaatcttagcagtaagtttcatactatggtattatattgtaatagaagcctcattccccaaagcacacaactgcagccaccggattggttggtggcacagatgtatcttatagtttactgtttatcagtgatttctagaaataaatttggaagactgtggaagaagagaaccaagattagcttctacaggtgacagagacagttgtgtggggaatgtgaatagcagaaaaatccctttatctagctttttacacttggat

SEQ ID NO: 254811 - DNA, 532 bp, Homo sapiens
ctttgcctacttaatccttcattgataatttatatgtatcctcaagggctgaatcatttgggccatttattaatcatttcatcaaaaaagtctcttgagatgaagtgtttcaatctcaaggaagccttcaaaggcaaaaatacaggaagcaaagacaatataagtaaatttaaattacatgcagtcacattttctcaaaacagatttaagtttttgctcaggaattccagtgttttgtgttgcaygtaatattgccctctgcagtgttctttcaatcttagcagtaagtttcatactatggtattatattgtaatagaagcctcattccccaaagcacacaactgcagccaccggattggttggtggcacagatgtatcttatagtttactgtttatcagtgatttctagaaataaatttggaagactgtggaagaagagaaccaagattagcttctacaggtgacagagacagttgtgtggggaatgtgaatagcagaaaaatccctttatctagctttttacacttggat

SEQ ID NO: 254812 - DNA, 532 bp, Homo sapiens
ctttgcctacttaatccttcattgataatttatatgtatcctcaagggctgaatcatttgggccatttattaatcatttcatcaaaaaagtctcttgagatgaagtgtttcaatctcaaggaagccttcaaaggcaaaaatacaggaagcaaagacaatataagtaaatttaaattacatgcagtcacattttctcaaaacagatttaagtttttgctcaggaattccagtgttttgtgttgcatgtaatattkccctctgcagtgttctttcaatcttagcagtaagtttcatactatggtattatattgtaatagaagcctcattccccaaagcacacaactgcagccaccggattggttggtggcacagatgtatcttatagtttactgtttatcagtgatttctagaaataaatttggaagactgtggaagaagagaaccaagattagcttctacaggtgacagagacagttgtgtggggaatgtgaatagcagaaaaatccctttatctagctttttacacttggat

SEQ ID NO: 254813 - DNA, 609 bp, Homo sapiens
aggaagagaaagctagagaagaaagggggagaaaaaagagctaaaaaggccaaaagaggagaccctgataccccctcatccctccccagctctcttggaccttcctatcactctccagtgatgtccccactgcaatttacggacaaaacttgagagtcagccagtaccttaggccactcagtttcaggtccactgatatttaatatatatgcaaaaacatatattctacactctaattttaaaaaggacgtttcccacctacagctgacttctatttacggaatgcctactctttgtgttttagggtcactgagcctggagctgcatgagcgataaatggataccaagagagtagaaacaggaccactggctaaggattgtttatgtaataaagaaaggggcggtggtggaagcctgacctatttcatagcaatgacaattgacatgagattcaagaccaatagataggggtgaagaatagcaagatgttatgaaaatcaaatgtagcaaaaagaggaataacataggttcccaagtttaaggacctaaacaatgcagttgcrctgtcacaaaactgacatttaaaaaggagcaattggatagaagatg

SEQ ID NO: 254814 - DNA, 561 bp, Homo sapiens
tttctcataggagtgtgaacacttttgttaactgcacaygcaagggatctaggttgtgtgctccttgtgagaaactaatgcctgaggtggaacagtttcatccccaaaccacccctacccaacctctctgttgaaaaattgtcttccatgaaaccagtccttggtgccaaaaaggttgaggaccactggtataacattacagagggataaaagtctagtatactcctactacctagataaaaattttgcattattaattaaacatatttgcttttgatttttttaaaggaaatagtaattgaaccctgttttcatctctccctaaatccatcttctcccttctactcaaatcatgggttaccactcactcatattttcataattgcactttatatgtatgcatttgccaaccctgtatattattattttatttaaaattttacctaaataatttaattctttctacattttgcttttaatttcactcatccttaaaggtttgttgtatagatataagtatagatatcttatatctccttggttagaagacactagtataga

SEQ ID NO: 254815 - DNA, 504 bp, Homo sapiens
  misc_feature (1)...(504): n = A,T,C or G
aaacaaatgtaacttgtctactttnnnnnnnnnnnnnnnnnnnnnnnnnnnnnnnnnnnnnnnnnnnnnnnnnnnnnnnnnnnnnnnnnnnnnnnnnnnnnnnnnnnnnnnnnnnnnnnnnnnncctatttcctgccttctattgaattatttaaatagtcatgattcccttttattcctcactattggtttcaatatttttgttatcttaatggatataacattatttttctgcagtcaatacttagatttacacatttctttgctcgctattaggtcttgmacttgggttcattttctttttgctaaaatcatcctttaaaaattatttccttgagggcttatgtataacagacttttgcacctgaactatggtttagttatatataattccattttaggttgccagaacactaccaatattattattatgcatgtgtatgtcatttgccttttctctttagcagcctttaagatttttctctttatccttaagattctgca

SEQ ID NO: 254816 - DNA, 338 bp, Homo sapiens
ggtacataatttgtcaaacttcatcaacatgtaaatgtaagatccgtgcattttactatatttaaactatacctcttcaaaatttttaaaaatagtaatttgcaaataaaggagagatccaccacctgtctgtaatcaactgagtttctaggtagtttctagctcaattgtctgcagtggcggaaacatattacccttaaattatgggaaacttcaaagggacaaggtcctcttcaaagcaaataattctcattttccactgggctagctgatctttgtggagaccactctaycagaaaaagtatgtatgctgatgcactgatgtggggacagaggtt

SEQ ID NO: 254817 - DNA, 596 bp, Homo sapiens
ggtctagtgatgggcctgagatctgtatatctaacaagctcctaggggatgcccaggctgtggggtcatgaactatattttgaaaatcaagaacctcttttccctcttgtggtgtgttttgtgatatagtctgtttctgatttttgtaagtcatgtkctactttgccttgcaattattgactgtacgatttagtgatcttgtgtcttccaagggaccaaaacaactaatagagaaatagagttttttaattatccagatgtttggtctatcccatggcaaacatttggatgccatgtagagcaagtatgtgaatcactgactattcatctttaacattttgaattagatatactggccttgtataagaacagactgagtaattagccattttctccccattaatctggcctatcatggactgttttacttgctcactaatctaggtttgtagttagcagttcacccctctgtactatcatcaaccagccagaatttcaaaaaggcttctggtgttaaaagagccccataggcaaatctgactcccttatctctgctttaatcagaaatgtgttgatcttattatcccctgactgtt

SEQ ID NO: 254818 - DNA, 538 bp, Homo sapiens
cacccaaatctcatcttgaattgtaatctccataatccccacatgttaagggaggaamctggtgggaggtcattggatcatgggggcaattttccttttgtattctcatgatagtgagtaagtctcatgagatctgatggttttacaaagggcagttgtcctgcactggtgcttctctctctcctgcagccttatgaagaaggcgccttgcttcccctttgccttctgccatgattgtaagtttcctgaggcttcaccagccatgcagagctgtgggtcaatcaaacctctttcttttataaattacccagtcttgggtagtatctttatagcagtgtgaaaacggactactacaatagagtaggggatagattatattttccaagaagctatgatagggttatattgttcatgtccctgattcagtatttattcaatatatacagagcatcctttggtacttaaaatataagtatattggagtaagtaggtatcatttagggagtcaagatgacttcaaatatgcatgtgtgattac

SEQ ID NO: 254819 - DNA, 543 bp, Homo sapiens
tataatgtaatgattgaaatgtaacagaagcagagcacaaacagtaaggtcaggagtcctttctgccctcctctttcttcctctcaggtttcacaggtttctctcattgcactgcatggggagaaaactgtaggtcatcggtcctagcacaacttagcttcaggacaatgtaggtgcttcatggagacccaaggcagcataataatcatttaacttgaaaacatatgtggcaaggtaagaacattcagactagttgaaacatagaaacataactgttttttattcttttattcagtgtamtagatggatgtgaaacaagtattttcacctgcttcctaggagggtttgataagaaaaccctccctgctcatgaggatagggtaactagttggtggctaaattgtgtgttcaacacttattcaataatgctttattgagcatctatcactggtacccattattctgggtactagtttactttttatgtaaatgtatagggagatatagagggagaaatgtttatacaggtagagcagtacaatt

SEQ ID NO: 254820 - DNA, 571 bp, Homo sapiens
agcttgcctataaaataatttgattggtaacagtatgtgtgattttctctgaaatacaaactttaaggagagaggtagaatgaattcccttctctattcttagcatcttcataacctcatcaaatttgttagatctctgagtgtttccttgtctgtaaagtgaagagagctataatatatgaaaaatattgtgaaaatgatatattaaaggaggctatcgcagtagaaggtggttttttataaatgtgagtttttaaaatatctttcagtttaagatgtcatcttgatgactgccagatttttggcttttcagcagcctttgccaaaataagattcagaayagtcgaccccaccctcctaaatcccccagcccactctgtttttcaccctgacacaggacaatttaacttctgctggtgtggggtttgtgaagtaatctcttccagagacactcagaacagtgttgagacttctctaagccacaggcaattacagaatttactccatcttcacttctttgcccttgaatctgacgtttctagttgtataagtggtcagatgctgggctatc

SEQ ID NO: 254821 - DNA, 611 bp, Homo sapiens
cattttagtagtcagtacagtgaaatgggttaaaactaattgatttctagatcactaaaggaaatgtcatatcattaaatgagcatttcattcaaagggtatgttattctttgctactctatttgcaaacaggcttctgcttatcttatgattgttccccaagcacacagtagaaattgggccaaaagccttttcccatctgtctttgtgttcaggatataatcctcaacaattacaaaatacagcaattatatcttttgacatttctggatctctgtgatcctttacaagattagtgtgatgattaagaagggagagattaatgtacaaaaggcctttgaatttgtaggccatggttctctcccaattaaagatgtctacatattgccttctttccccaaacaggagactgtgttgatttttactgtttattgactattaaaaaacagagattataggagtgaatgtgtaaygcaaaaggcttaaaagatattttcattctggttcttaagaagcttgatatctgagaatacaatttagtcttagaacaggaaaattataccccttctgtttctctaagtttcctttgaaatgcaggtaaaagttctact

SEQ ID NO: 254822 - DNA, 575 bp, Homo sapiens
tctctcaacattttgactgtaaaggttaaggtgccacttacggtttaggataattatgtgaagaaacttttcagtcaatatagaaacccatcacttcaaagtaacaaaatgcatagaaataggaaacatgaatttccactttaataaatttgagcacatgatcacattgaatctttcagcatattcctcaaaaaccccaaacaaaccagaaatagataactgaagtactctgttctcagagttatcagtgatattgtgcatctctgaagttcactgtcaataaacaatgtgaaacatttgggtcttgggtgcctatatggatctctactttatcctcaaactttcacaagtcaactactggaagaaaaatgatccaagtggtgtcatgctgccttagacacatgaatagtagaattcagccaagccactgaaggaaattttcttttctttctctacgaaattcagaaagaaaacttgtatttarttttcctaaatttatactttagggaaaaatgtcagtcctcaaatcatgctttataattgcaaccaaatatcttaagatatatataaaaata

SEQ ID NO: 254823 - DNA, 572 bp, Homo sapiens
cgtgggaaaaattatatagaattatacatacgcacacaaacacacataaacatatgaatgtaaaaatggtgaaaataaattctgtagtctagataatagtgtagctgacagcattttaccaatgtcgatttcctggttttgatattgtagtacagttttataagatgtcacttttgggggaaattagtttaagggtgcaagggagcctatgaacaagttttataacttcctttttgttattttaaaatgaacagttaaaaaaaacaacaacacccggtttgtttctgttttaatgttgcttgtcgaagatctccctccctctatagtatacacacttagtatgtctttggtcatttacagtgtattttgctctcttttggaggattatagtcactcgtaattatgtgagaaaaatgccactggttgtcagcaccaaatcaagatgtcaaaagtatgctgaactgaaacayagagtaagcaccacactgaggagaggagaagcaactctcttcactgggctctataaagctgcatctcacatctgtaccatactggattagtggacaaaggag

SEQ ID NO: 254824 - DNA, 402 bp, Homo sapiens
aatggcaatccatattgtaggggaaagaaacatgcaagaaaatagtgtaagattaaagttagccaagagaagcaagcaggtctttaatgttcgtttagaraggaaagggattatcttgaaagcaggaggatgaaatagcaaggtaaacataggaacattctgatggacatgaactataagtagaaacctaataaccaaatgaacttggactcagtgctttcattccctgttgtgtaataaccaccttaacaagctggaagccccatcagacaagatactggattcaatcaacaatgatttcctaattattttggctctcagtatgtctccagtgttttcagattgttaaaaatccaatagtcccccccgaggctgcacacatgagtacccctaccttgtttc

SEQ ID NO: 254825 - DNA, 402 bp, Homo sapiens
aatggcaatccatattgtaggggaaagaaacatgcaagaaaatagtgtaagattaaagttagccaagagaagcaagcaggtctttaatgttcgtttagaaaggaaagggattatcttgaaagcaggaggatgaaatagcaaggtaarcataggaacattctgatggacatgaactataagtagaaacctaataaccaaatgaacttggactcagtgctttcattccctgttgtgtaataaccaccttaacaagctggaagccccatcagacaagatactggattcaatcaacaatgatttcctaattattttggctctcagtatgtctccagtgttttcagattgttaaaaatccaatagtcccccccgaggctgcacacatgagtacccctaccttgtttc

SEQ ID NO: 254826 - DNA, 404 bp, Homo sapiens
ttttgactctgtttcacaattttttttttttwaattttatagacgaggttttgccatgttgcccaagctgatctcgaacttcttggctcaagtgatctgcctgccttccaaagtgctgggattacaggcatgagccaccaagcgcagccatgatttattagatcacttttaaaagccgtaagtgtcatttaggggctaaggccctgccctcctccctttttaaagaaaataagtaatttgagggtcaaccctaggcaaaatgatgtagcatagtcctttcctatcagcatgtccctctctctggtttccagataacaatcaacttcctgggggtgaaaggcgctccttgcagagctgagtcaacaaaaccagtagtagcagcttctgctctgttctgaacttga

SEQ ID NO: 254827 - DNA, 404 bp, Homo sapiens
ttttgactctgtttcacaattttttttttttaaattttatagacgaggttttgccatgttgcccaagctgatctcgaacttcttggctcaagtgatctgcctgccttccaaagtgctgggattacaggcatgagccaccaagcgcagccatgatttattagatcacttytaaaagccgtaagtgtcatttaggggctaaggccctgccctcctccctttttaaagaaaataagtaatttgagggtcaaccctaggcaaaatgatgtagcatagtcctttcctatcagcatgtccctctctctggtttccagataacaatcaacttcctgggggtgaaaggcgctccttgcagagctgagtcaacaaaaccagtagtagcagcttctgctctgttctgaacttga

SEQ ID NO: 254828 - DNA, 519 bp, Homo sapiens
tctccaagccagcaagtgcttctttgcaccccagctctaaaacaaagcccttggggacacaatcaaagacagtagttgccaagaggaatagggagcatggaaagaaggtgagatattgttggccttaacagcatctgggctcccactcagtgagacaaaaatgcttgataagctaacaaaaagggatttggtaaaatgtaatccttcacctgagtgaagaccttttcctctcttttattttcaactctccttggttgccctgtcccactgatttctgccaggaaatgggctaaaagctatcacctggcaactctaggagaggtggatgtcagggaaatggatttaccaggtctctggatctctgaagcygggggcacagtgcacttcaaagatcagactgttagtggatgctattgatgtgattttgctgctacctttgctcatgaaaagagatgagccagtcgggaaaaaggcaagaacaagaaattaagggggagaaaaccaataggagtagagaag

SEQ ID NO: 254829 - DNA, 526 bp, Homo sapiens
accagggaccagtttcatggaagacaatttttccacagatcaggggtgggcggagtttgggggaatggtttckggatgattcaagcggattacatttgttgtgcaccgtatttctattattattattgcattgtaatatgtaacaaaatagttatacaactccataatgtagactcagtgggagccctgagcttgttttcctgcaactagacggtcccatctgagggtgatgggagacagtgacaccaaagtgtgctgcttatgtccagtctacttcgtaatctcattttgattgctgtcactgcagaaaaccctgtaacattctcaaaattctattctctctagggtaaaattaaactgcgggacatagcgcagaagacttgtcacaatttaggaccaacctaccaagacttcttgatctctttccacttcttgcccctcactgtgtttgatttctgccttccagtctgaacttctcactatattccagaaaaggcctgttaaagagatctggtagtcaaaagca

SEQ ID NO: 254830 - DNA, 526 bp, Homo sapiens
accagggaccagtttcatggaagacaatttttccacagatcaggggtgggcggagtttgggggaatggtttcgggatgattcaagcggattacatttgttgtgcaccrtatttctattattattattgcattgtaatatgtaacaaaatagttatacaactccataatgtagactcagtgggagccctgagcttgttttcctgcaactagacggtcccatctgagggtgatgggagacagtgacaccaaagtgtgctgcttatgtccagtctacttcgtaatctcattttgattgctgtcactgcagaaaaccctgtaacattctcaaaattctattctctctagggtaaaattaaactgcgggacatagcgcagaagacttgtcacaatttaggaccaacctaccaagacttcttgatctctttccacttcttgcccctcactgtgtttgatttctgccttccagtctgaacttctcactatattccagaaaaggcctgttaaagagatctggtagtcaaaagca

SEQ ID NO: 254831 - DNA, 526 bp, Homo sapiens
accagggaccagtttcatggaagacaatttttccacagatcaggggtgggcggagtttgggggaatggtttcgggatgattcaagcggattacatttgttgtgcaccgtatttctattattattattgcattgtaatatgtaacaaaatagttatacaactccataatgtagactcagtgggagccctgagcttgttttcctgcaactagacggtcccatctgagggtgatgggagacagtgacaccaaagtgtgctgcttatgtccagtctacttcgtaatctcattttgattgctgtcactgcagaaaaccctgtaacattctcaaaattctattctctctagggtaaaattaaactgcgggacatagcgcagaagacttgtcacaatttaggaccaacctaccaagacttcttgatctctttccacttcttgcccctcactgtgtttgatttctgcmttccagtctgaacttctcactatattccagaaaaggcctgttaaagagatctggtagtcaaaagca

SEQ ID NO: 254832 - DNA, 502 bp, Homo sapiens
taaaggtttgttgaatgaaacaataaatggatgcaagactaaatgaacaaagaaaagccacggggaagataacaatgttatgtcataattcaggatcatctttttctgttttttcccctccagctttattgaggtataattgacaaataaaaattatatatattcaaggtgtccaacaagatgttttgatatacatatacattgtgaaatgattrccacaatcaaactaattagcatgtccattacctcacataattaccttttttatgtgtgctgagaatacttaagatttgctttcttagcaaattttaagtatacaatacattatgattaactatagtcatcatactgtacagtaagtctccagaacttacttcatctgcaggtttgtactctgaccaacatcatcttatttcactccccaccccactttcagcactggtaaccacatttctattctaagccttctggtgaaatttctttcttatttcactcccaatga

SEQ ID NO: 254833 - DNA, 579 bp, Homo sapiens
caggtgattgatacgttaattaacttgattttgtggaattatttcacaatttatatgtatatcaaaacattaacttgtataccacaagtatatataatttttacttgctaattatgcctcaataaaggtggagaaagasagagtactgcaaaagagataaatcatttttaagaaacattgtaaaagaaaaaagtctggaacaaaaactgtcagtgctactgctcgtaagacatgcagaaacataagagacccatggaaaattttctcccaatatgtgtatgtaatacagatttgagtttctaagtataaatgtaattttatatataacattagttatctaattgctaaatcttcatttcctaatcagctgtgatcacagactaaagaaagtttatttttatcatttgactgtattcttattttacgctccaaaaagaaatgatgtaaaaatttgttagagattatatctgctctagtttcttcatattatactatatacttactatttaaagtattgcatagatatttagtaaacatgggtactgtttttgagtaatttataaccaagaggtaaaataa

SEQ ID NO: 254834 - DNA, 483 bp, Homo sapiens
gtgagtcaggaatcaaaagcagtttggctaggtaattttggctctggatgtcttataaggttgtagtcaaactgtcagctgggactgcaaccatctcaaggctcaacaactcaaccgtgaatgaaggataaacttccaagttcacatatttattagcaagctttaattactcagggtctttcagattgaggaccttagtttctcaaaggctgytgggctgagaaactcagttcttccccacaccatgtagacctctccatattgctgctcaaaacatggcatcatgcttccccaaacacagatgttctgagatagagaaattgcacacactcaagattgaagtcacagtcttttttaacataatctcaaaaatgacatctcattacttccacctttaaaaatgggtcagtaagtccagtcaacactgaaagcaagatgattatacaagtacatgaataccaggagtgtttggtcattatggac

SEQ ID NO: 254835 - DNA, 483 bp, Homo sapiens
gtgagtcaggaatcaaaagcagtttggctaggtaattttggctctggatgtcttataaggttgtagtcaaactgtcagctgggactgcaaccatctcaaggctcaacaactcaaccgtgaatgaaggataaacttccaagttcacatatttattagcaagctttaattactcagggtctttcagattgaggaccttagtttctcaaaggctgctgggctgagaaactcagttcttccccacaccatgtagacctctccatattgctgctcaaaacatggcatcatgcttccccaaacacagatgttctgagatagagaaattgcacacactcaagattgaagtcacagtcttttttaacataatctcaaaaatgacatctcattacttccacctttaaaaatgggtcagtaagtccagtcaacactgaaagcaagatgattatayaagtacatgaataccaggagtgtttggtcattatggac

SEQ ID NO: 254836 - DNA, 604 bp, Homo sapiens
aaaattcagaaagcagttgaggttcttatgaaaccctgaaaccctgttttctttctggagagggaagggagcagaatgtacattcaatgttctgacttttaagaagggatgctcargagataggtcttgcctaatacaagcactgacaagaacaggaacatggtgacaccaggttcggggcctgtgacaagaaaggtgatcaacatgcacccatgtctgcagtatcaaaggtagaggatatatccttgcaaaagatttgaaaggtctctggaatatcttgccaagatgagtggagaaaatccttgctgtataaaaccagactgtaaagtataggagaggtggctgatttttcaattgccaaaatcccaacagaagataataagacacccaaagaaagagagaaataaggtccatttaaagggttaaattaaatcttcagaaatttacatcaaagaaacaggaacatatgaaaagctcacagacaacttcatactgaatgaaagcttttcctgtaagatcagaaacaagagagggatgcctaccaccactgctatttaacatagtacggaaatcttggccagaactgttagaccaaaaacaaggg

SEQ ID NO: 254837 - DNA, 552 bp, Homo sapiens
ctccttttcatactcaattttctttttttttgacagggttgtatacagccattttccaatgcctgtctccattgtatattgagtgtgtgtaagcrtgtgtgtgtgtgtgtgtgtgtgtagggtgggatagataaaagttctttttataatttcaggtctatagatcaagaggaattgtatttgaggagctgtgcttaaggaacttcacctgagaaacctcatcaatgcttggagctaatttagatgacaagattctgaactttgagctgatgctctaatgagttgaaactcttgggccttgagagaggatgaggaaattttgcatgtggggaagacatgaatcatagcaggccagagggcagactggagtagtcagcctctaatacggcttccattcatccaaaccatgtaatttcacccctggcccctcccaaatctcatgtcttcacatttcaaaaccaatcatgccttcccaaccgtccccgaaagtcttatttcagcattaacccaaaagtccacagtacgaagtctcatctgagacaaggcaagtcc

SEQ ID NO: 254838 - DNA, 539 bp, Homo sapiens
catcttctgaaatctaggtggaagttctgaaacctcaattcttgacttctgtgcacctgcaggcccaacaccatgtggaagctgccaaggcttggggcttccaccctctgaagcaacagcccaagctgtaccttggtcccttttagtcatggctggggtggctgggatgcagggcaccaagtccctaaactgcacacaacatggtgacctttgggacaggcccaagaaactattttcttctaagcctctgggcctctgatgggaagggctgccatgaagacctctgacatgcactggagacattttctccattgtcttgggggttaaygtttgaccccttgttacttatgcaaatttctgcagcctgcttcaatttctcctcagaaaatgggtttttcttttctatcacattctcaggctgcagattttctgaacttttatgctctgcttcccttataaaatggaatgcctttaacagcaccaagtcaccgcttgaatgctttgctgcttagaaatttcttccaccagataccctaaat

SEQ ID NO: 254839 - DNA, 539 bp, Homo sapiens
catcttctgaaatctaggtggaagttctgaaacctcaattcttgacttctgtgcacctgcaggcccaacaccatgtggaagctgccaaggcttggggcttccaccctctgaagcaacagcccaagctgtaccttggtcccttttagtcatggctggggtggctgggatgcagggcaccaagtccctaaactgcacacaacatggtgacctttgggacaggcccaagaaactattttcttctaagcctctgggcctctgatgggaagggctgccatgaagacctctgacatgcactggagacattttctccattgtcttgggggttaatgtttgaccccttgttacttatgcaaatttctgcagcctgcttcaatttctcctcagaaaatgggtttttcttttctatcacattctcaggctgcagattttctgaacttttatgctctgcttcccttrtaaaatggaatgcctttaacagcaccaagtcaccgcttgaatgctttgctgcttagaaatttcttccaccagataccctaaat

SEQ ID NO: 254840 - DNA, 539 bp, Homo sapiens
catcttctgaaatctaggtggaagttctgaaacctcaattcttgacttctgtgcacctgcaggcccaacaccatgtggaagctgccaaggcttggggcttccaccctctgaagcaacagcccaagctgtaccttggtcccttttagtcatggctggggtggctgggatgcagggcaccaagtccctaaactgcacacaacatggtgacctttgggacaggcccaagaaactattttcttctaagcctctgggcctctgatgggaagggctgccatgaagacctctgacatgcactggagacattttctccattgtcttgggggttaatgtttgaccccttgttacttatgcaaatttctgcagcctgcttcaatttctcctcagaaaatgggtttttcttttctatcacattctcaggctgcagattttctgaacttttatgctctgcttcccttataaaayggaatgcctttaacagcaccaagtcaccgcttgaatgctttgctgcttagaaatttcttccaccagataccctaaat

SEQ ID NO: 254841 - DNA, 619 bp, Homo sapiens
aatcttttctgtcctccattagaggtagaagatacagtaaacatctaacaaagcaggtaatattggcagctgcccaaaaagttggctcagacagcagcagcctgagcttcacaggaccacatgtagtgttggagatgaggaactaacaaaccacacaatgtccttctgactgattatagtggtgtggtacaattcctttccaaaaagcattagggtcaattccatgtgggtctggtgggaaaaatgaatggataaatcaaatttaaaaaaaacacagcaaacaaacagatcagactacaaagttgaaggacaaagtttcccccacaaaactggaaccaaatgcttctaataacaatcattcagtcctttaagtttatccctytgggggctgatgtgatctgggcaaagaatggttagtcttttcctgtggaaacttgctcgttttctaatcagaaaccacaggttgttattaaaatcactgagaaaccatgttttaaggtgtatctttaaatggaattcagctgctatgttgatgctcaaatttgcactatttgcatggagcaataataggggcaaccaaaatgtggtctatgcagacagacaatgcctgaatgtgcta

SEQ ID NO: 254842 - DNA, 382 bp, Homo sapiens
ctaaagtgccagaaaatccttaataatctttactttattttgtttatgctgttgttgttgaattatatatttgaagtcaatctatggcagtgaacattttggggattacatatagatttggtactgtagaagttaactgaagttcttatcaaaggaaaaactaggtaaataggaactagctgaatttttaaaaatactgatgyggctgctgaaatgtgttttgcaggtagaaatatgagtcacagcagtgaaaatatgaaaaaaaaagtgttgattgttatgaatgtttccacgaggcatactgaacctaagagcatttttcttttttttcatttggcttcctccttggatgattttctaggatttctggtagtaggctcat

SEQ ID NO: 254843 - DNA, 382 bp, Homo sapiens
ctaaagtgccagaaaatccttaataatctttactttattttgtttatgctgttgttgttgaattatatatttgaagtcaatctatggcagtgaacattttggggattacatatagatttggtactgtagaagttaactgaagttcttatcaaaggaaaaactaggtaaataggaactagctgaatttttaaaaatactgatgcggctgctgaaatgtgttttgcakgtagaaatatgagtcacagcagtgaaaatatgaaaaaaaaagtgttgattgttatgaatgtttccacgaggcatactgaacctaagagcatttttcttttttttcatttggcttcctccttggatgattttctaggatttctggtagtaggctcat

SEQ ID NO: 254844 - DNA, 600 bp, Homo sapiens
agagggaagggaaggaatgagctattaagatgggagaggataactccaggcagtggggacagtgagtgcagaggctctcagatggaaacatgtttaaggtgttgaaggaagagcaagtaggtcagccttgctgtgtggaagaaactagggagtgagtaataggagatgacattaaagagatggtgagctccaaattaggtcaggtcttgtagaccgggtaggaaattcagatttcactctgtgacagagagcaaggtgtttgagcagacataatctgattgtgttttaacagagaccttgtgatggactgctgtgtgcagaaagactatagggaacaagggggtggaaacaggaagaccagttaggagaccattacaattatccagatgagacattatggaaactcacatgagggtagcagtgatggaagtatttagaattgggatatattttgaaggtcagtcttacagaatttgtgacaaatttgatcatggagtgagagtgaaagagggtagtcaagggctactccagggttttttgcctrtgaaggaatggagttgacatttattgaattagggggaagaaccaggtagggtaaga

SEQ ID NO: 254845 - DNA, 528 bp, Homo sapiens
ttggcatatacgaacttaggcttcagatattatttgtatgtattgatattcagacaccacctgtctgaaatgatggctgtagattcaataagaacacagaaaagctaaaaatatagataggctcccrtataaaatttataccgggaatttaagcacctggtatacctctagagtgggtagcttatagctgcttaaaaatacatatctgaaaattgaataattgtgctttagtaacctgaagcatccagaagatataaatatgatccactaatatgtagatccatgatttttctggctggatacctctcaaaacagagacctcaagggaggatgacaactttactccctggagtttcctcagactctagcttctcagtgcattcctaggaggtgtccacacatgctcatgggtaagtggctgctgtcactgccctattgggtgtcactgccatactgggtggcactgctctactgggtgccacaccatctaccctgctgtagatggccgtgatgctctgctgcaactcc

SEQ ID NO: 254846 - DNA, 578 bp, Homo sapiens
gtattgatgctagtagatgtgttcagtctctgggcattgaagagttaggtatttatggtagtcttcgctgccagggcttgtttgtactcatccttgggaagactttccagaaattcaaaaggactagtgttctcatctaagctgtgacctaagactcgtagaggtattgccttgatggtgtggacaagatccagaagagttctctgcattaccaggcagagactcttgytttcttcctttgctttctcccaaagtctctctctctattctgagccacctgaagctggaaatggagtgacacaagcacccctgtggccaccaccactaggactgcgctgggtcagacctgaagccagcacagcactgggtcttgcccaagggcctgctgtaactactccctagctaccagtatgtttgctcaaggccctggggctacacaatcaacaagtagcaaagccaactaggcttgtgtcctttcccctcagggaaggtgagttccccccaggcaggtccatatgtgccatctgggagccaggtgctagagtaaaaaaccttaacagtttacctggtcttttact

SEQ ID NO: 254847 - DNA, 438 bp, Homo sapiens
tatgtttgctcaaggccctggggctacacaatcaacaagtagcaaagccaactaggcttgtgtcctttcccctcagggaaggtgagttccccccaggcaggtccatatgtgccatctgggagccaggtgctagagtaaaaaaccttaacagtttacctggtcttttactgtattgtggctgaactggcacccaggccacaatacacagtcctcactctggcagargagccttacctcatggacaccaccaccacagccctgtggggagtactgccagactactgtggatattcctttaaggcctaccgactcttcagtcagactgctgtgaatgctgcctggcctaggactcacccttaaggtcagtgggctcccttctggcacaaggcacgttcagaaatgccatccaagattcaaggcctagaatcaggagccata

SEQ ID NO: 254848 - DNA, 586 bp, Homo sapiens
ttttagttgttactgtccatcttaagaatacattcattatagctttcttctcagaagaacctctggacagtgtttttggttctaatataattgtagaaagaatgttgtaaatatacagtgaatatcccacagaccttcctattttagtcccagaggccctctctgccccaggctgggtcctcctggtcaggctctggatagtcctggtaatagtaatgccactatttctgttatgttgtaaaatagcaataaatttaaagagttaaatttgaatctgattcactgatttgttttttgagacagggtcttactcagttgcctcggctggagtgcagtgggttgatgagagctcactgcagcctccaactcctaacctcaagggatcctcccacctcaggctccagaatagctgggactacaggcatgccaccacaactggctaatttttatatattatttttggtagagactgggtcttgctgtgttgctcaggctggtcttaagttcctagcttcaarcaattctcccaccttgttctcccaaaagtgctgggattacaggcatgagtcacggtgtcctggcctaa

SEQ ID NO: 254849 - DNA, 629 bp, Homo sapiens
tatgcttgggctaggcttcttggagagaccagatgaacagagataagcagtccctgctgagtcatcttagactaggcagcccccagacacctggcagctgacagcaaaatgcatgagtgagcccaaccaagatcagctaaccctggtccaggtcagttaggtcaacccgttagtccagcacaaataattactgccccatataatcatgagctaaattaatggctgttgtttaaaaccactaagttttaaggtgctaatctactacgtttggtcaaatcagcyatgctaagtattttgctggcattatggtacaaaatatggttgcctgcctttctcagtggctatgggcaaggccgttttatttagaaatccatgtttgcttttgtttattcaacaaatactgagtgcctaaaaagtgtcaggaactgggcaacagaaatcaagggtgatcaaaaatatacattgtccttgctgtcaaggagttaatagtgttaaatttgatactaaatggaatttttgcttagcacaggaggtagatgttaatcacacaacgactccaaaaaagtatttaattacaaacctgagttgggcttttaagtgaagacatatatttttattagagcaacagc

SEQ ID NO: 254850 - DNA, 542 bp, Homo sapiens
catattaaaattaaccatcacaaccatttcttggatggccacatggaaacccccactattacagaaaagccaacactctcatagcttgtcctacatgctaggcactcttccaaatgctttacatgcactgagagtttactcaggcagcctggtttcwtgccccaaacaggatgttttaggtccttgccacacattcttgctatctcttttcaatcctggagataaaactgtctacttgtcttcttctagattcctcaatattttaagcattttctaatgggatggctgcaatctatgatattagaacttcttgtaattttattattgttaaacagtttataagaggagagacaccaggtaactggttttattaatccaaaatttggacccttcctcccatcctctgagtttattttagggatcaataatttgtactactaaaaataagatccaaagatattctgagatttaggacaggtttattggaattggaattatgagcaaaacctgtgccaccagtatttaactcaggtgtaaactcc

SEQ ID NO: 254851 - DNA, 542 bp, Homo sapiens
catattaaaattaaccatcacaaccatttcttggatggccacatggaaacccccactattacagaaaagccaacactctcatagcttgtcctacatgctaggcactcttccaaatgctttacatgcactgagagtttactcaggcagcctggtttcttgccccaaacaggatgttttaggtccttgccacacattcttkctatctcttttcaatcctggagataaaactgtctacttgtcttcttctagattcctcaatattttaagcattttctaatgggatggctgcaatctatgatattagaacttcttgtaattttattattgttaaacagtttataagaggagagacaccaggtaactggttttattaatccaaaatttggacccttcctcccatcctctgagtttattttagggatcaataatttgtactactaaaaataagatccaaagatattctgagatttaggacaggtttattggaattggaattatgagcaaaacctgtgccaccagtatttaactcaggtgtaaactcc

SEQ ID NO: 254852 - DNA, 598 bp, Homo sapiens
cacctgcatttcaacattctagcaaatcatatggcatatatttaatgtagggttcccagggaaacagagtctgggacagatattaacatgcaggaaaagattaggcagtaggctcaggagcaatacctatgggaaaataaacaaaagaggattgagcaaaggaacgtactgaactgtaaagcagttccaacaaaggtgttagcctatcccattggaaattttagagctggggcagtccttcagaattttccacaaktgccgtgagggggtaaggtttttataccccacattgaccatttattagatacaggatgctctggggaaaggagtgtgaccatcaaaggtggctctccttgaggggaaatcttggaataaaattcagctgagccccaacgactgttaactctcccatcggttgggaaaaagagtcctcagctctgaaggagggatttggacagcaaaccacagcatttatttcactgtgatagtaccatttgtacctgaaaaatggcagctctgtacttcccatttttgtttattaaacttatcatcaactaatgtgttacatattttatttgtatattttgtttatcatatg

SEQ ID NO: 254853 - DNA, 598 bp, Homo sapiens
cacctgcatttcaacattctagcaaatcatatggcatatatttaatgtagggttcccagggaaacagagtctgggacagatattaacatgcaggaaaagattaggcagtaggctcaggagcaatacctatgggaaaataaacaaaagaggattgagcaaaggaacgtactgaactgtaaagcagttccaacaaaggtgttagcctatcccattggaaattttagagctggggcagtccttcagaattttccacaagtgccgtgagggggtaaggtttttataccccacattgaccatttattagatacaggatgctctggggaaaggagtgtgaccatcaaaggtggctctccttgaggggaaatcttggaataaaattcagctgagccccaacgactgttaactctcccatcrgttgggaaaaagagtcctcagctctgaaggagggatttggacagcaaaccacagcatttatttcactgtgatagtaccatttgtacctgaaaaatggcagctctgtacttcccatttttgtttattaaacttatcatcaactaatgtgttacatattttatttgtatattttgtttatcatatg

SEQ ID NO: 254854 - DNA, 546 bp, Homo sapiens
gctttcttttcattgaaggtgaatccacaaccatgcaaagcttgcaatttacatcccacaggaggacctctcagtttacccccatattctagtctccctatagctccccttcctattaatgataagcctcctgtaatctccctcacccataaggaaacaagcaaagaaatctccaaaggaccacaaaaaaccctgtgctatcagttatgtccacttaagctgtagggggaggggaatttggcccaacccaggtacatgtccccttctccctctctgatttaaagcagatcaaggcagatctggggaagttttcagatgatcctgataggcatatagatgtcctacagggtctagggcaaaccttcgatctcacttggagagatgtcatgctattagatcaaaccctggcctttaatgaaaagaatgcagctttagctgcagcccaagagtggagatacctggtatcttartcaagtaaatgttagaatgacagccaaagaaagggacaaattccctactggtcagcaagtcatccccagtatggat

SEQ ID NO: 254855 - DNA, 411 bp, Homo sapiens
agcatatcaaaatagttatattttgcattgtgaagggcctgatggacaacctgggactattcaaccaattataacttctgtacctataaatttatgkggaagagatttattacaacaatggggagcacaagttctaattccagaacaattatatagccctcaaagtcaacatacaatgcatgaaatgggttatatccctggcatgggactagaaaaaaaaatttgcaaggtttgaaaaaaccacttcaagtggaaagacaaagttcccaccaaaggtttaagatatcatttttaatggcagccattgttaagcctccagaacctatacttttaaaatggttaacagataggccaatttggatagaacaatggccgctaagtaaagagaaactggaggctttagacaaatta

SEQ ID NO: 254856 - DNA, 571 bp, Homo sapiens
ttaatggaaaattctcagttatgatttcatacagatgaacaactgatgacttaatttacccaattgcaaacagcagttagaagtagaatgcaccctttctacatcactcacattagggctcatacacctcttccaggacctttgactgaagggaatcaaatggctgatcacctagttgctaatgcagtatctaatgctagacactttcacaatttaacccatgttaatgcctctggtctcaaaygcagatatagcattacctggaaagaagttaaagctattattcaactatgcccaacttgccaaatggtaccttcctcatcttttacaggaggagttaatcctcgaggattggaacataactctctttggcaaatggatgtcacacatattcccttgtttgggagactagcttatgtacatgtatgtgtggacaccttttctcactttgactgggctacatgccaatcaggagagtcttctgcctgtgttaaacatcacctcttgcagtgttttgcagtgatgggcattctagcctctattaaaacagataatgccccaggctatacta

SEQ ID NO: 254857 - DNA, 621 bp, Homo sapiens
tttgcattcacaattcctgtggtaaacaacctgcagcctgctacacattttctttgtttcacagatgggtctagtaatggtaaagcttattctggatcaaaaggtaaagttttccagatgccttatacttcagctcaaaaaggggagcttgtagctgtaattgaggtattgactgcttttgatatgcctattaatgtgatttctggttcttcatatgtggttcattacacagagttaatggaaaattctcagttatgatttcatacagatgaacaactgatgacttaatttacccaattgcaaacagcagttagaagtagaatgcaccctttctacatcactcacattagggctcatacacctcttccaggacctttgactgaagggaatcaaatggctgatcacctagttgctaatgcagtatctaatgctagacactttcacaatttaacccatgttaatgcctctggtctcaaacgcagatatarcattacctggaaagaagttaaagctattattcaactatgcccaacttgccaaatggtaccttcctcatcttttacaggaggagttaatcctcgaggattggaacataactctctttggcaaatggatgtcaca

SEQ ID NO: 254858 - DNA, 571 bp, Homo sapiens
ttaatggaaaattctcagttatgatttcatacagatgaacaactgatgacttaatttacccaattgcaaacagcagttagaagtagaatgcaccctttctacatcactcacattagggctcatacacctcttccaggacctttgactgaagggaatcaaatggctgatcacctagttgctaatgcagtatctaatgctagacactttcacaatttaacccatgttaatgcctctggtctcaaacgcagatatagcattacctggaaagaagttaaagctattattcaactatgcccaacttgccaaatggtacmttcctcatcttttacaggaggagttaatcctcgaggattggaacataactctctttggcaaatggatgtcacacatattcccttgtttgggagactagcttatgtacatgtatgtgtggacaccttttctcactttgactgggctacatgccaatcaggagagtcttctgcctgtgttaaacatcacctcttgcagtgttttgcagtgatgggcattctagcctctattaaaacagataatgccccaggctatacta

SEQ ID NO: 254859 - DNA, 575 bp, Homo sapiens
gttattagcagctgaacagcatctgcagaaaccagctgcagagacagaagcagaacaactgatttggtggagagatccaataacaaaaagttaggaaatagataaaataataacttggrgtagaggttatgcatgtgtttctccaggtcaaaatcaacagccgatttggataccatcaagacacctgacatcttatcatgagccaggtgctgaggaagagatgctgggaggatcccgaggaccccccatttgcagtcatgttgagactgacactgaggaggaccccaactgtcatgagcaacacgagtcaaacacaagccacccacctagggacagatcaagaagctgtcacagatggtggaaggaaacctgaggaaagcaggaaaaacagtcacaatgagaaatttaatggtagctatgagagtggttatcaccactgctatgagtattccttcaacaaaggctaacacagggaccagttatacttattgggcatatttatcaatcctgactggtaataatgcctagatataatcactccatgacacagttacacatactttctgatctcagta

SEQ ID NO: 254860 - DNA, 575 bp, Homo sapiens
gttattagcagctgaacagcatctgcagaaaccagctgcagagacagaagcagaacaactgatttggtggagagatccaataacaaaaagttaggaaatagataaaataataacttggggtagaggttatgcatgtgtttctccaggtcaaaatcaacagccgatttggataccatcaagacacctgacatcttatcatgagccaggtgcygaggaagagatgctgggaggatcccgaggaccccccatttgcagtcatgttgagactgacactgaggaggaccccaactgtcatgagcaacacgagtcaaacacaagccacccacctagggacagatcaagaagctgtcacagatggtggaaggaaacctgaggaaagcaggaaaaacagtcacaatgagaaatttaatggtagctatgagagtggttatcaccactgctatgagtattccttcaacaaaggctaacacagggaccagttatacttattgggcatatttatcaatcctgactggtaataatgcctagatataatcactccatgacacagttacacatactttctgatctcagta

SEQ ID NO: 254861 - DNA, 575 bp, Homo sapiens
gttattagcagctgaacagcatctgcagaaaccagctgcagagacagaagcagaacaactgatttggtggagagatccaataacaaaaagttaggaaatagataaaataataacttggggtagaggttatgcatgtgtttctccaggtcaaaatcaacagccgatttggataccatcaagacacctgacatcttatcatgagccaggtgctgaggaagagatgctgggaggatcccgaggaccccccatttgcagtcatgttgagactgacactgaggaggaccccaactgtcatgagcaacacgagtcaaacacaagccacccacctagggacagatcaagaagctgtcacagatggtggaagraaacctgaggaaagcaggaaaaacagtcacaatgagaaatttaatggtagctatgagagtggttatcaccactgctatgagtattccttcaacaaaggctaacacagggaccagttatacttattgggcatatttatcaatcctgactggtaataatgcctagatataatcactccatgacacagttacacatactttctgatctcagta

SEQ ID NO: 254862 - DNA, 575 bp, Homo sapiens
gttattagcagctgaacagcatctgcagaaaccagctgcagagacagaagcagaacaactgatttggtggagagatccaataacaaaaagttaggaaatagataaaataataacttggggtagaggttatgcatgtgtttctccaggtcaaaatcaacagccgatttggataccatcaagacacctgacatcttatcatgagccaggtgctgaggaagagatgctgggaggatcccgaggaccccccatttgcagtcatgttgagactgacactgaggaggaccccaactgtcatgagcaacacgagtcaaacacaagccacccacctagggacagatcaagaagctgtcacagatggtggaaggaaacctgaggaaagcaggaaaaacagtcacaatgagaaatttaatggtagctatgagagtggttatcaccactgctatgagtattccttcaacaaagsctaacacagggaccagttatacttattgggcatatttatcaatcctgactggtaataatgcctagatataatcactccatgacacagttacacatactttctgatctcagta

SEQ ID NO: 254863 - DNA, 607 bp, Homo sapiens
tggctttcccatgtggtctttacctgcttcttgacctaaaattaatggcggtgtcactatgccactagtgacacctgttctttgccttcagcactaagcagctacgtttctcataagccttcttcattaagaatacatttatgtcaatgcttttccactcaagcttttcctcctcctttcaagtggtttataaaagcacaacatttgttatcagtgtttataagaggccatagatctgtagtatggcttatgcagataatgccatcttaaagtaccacacctatttttcaaaacagcatctttgaaaaggatccagtattaaaaacaaagaaaaatacacaaaataaagaaaygatgattcatttctgccctgtttccactgtgtctcaaaaccaaattcaactcctgcatgtctatgattctctccatccactatagctccatggagactatagtggcctctccctccctgctctctctcctctctctcccatcactcccctccctctctctcctctctatgccctcttctacctaaaggtggttttctccattttgggtccttgtttgttcatcattgtcatgtggtatgataattatttctcct

SEQ ID NO: 254864 - DNA, 562 bp, Homo sapiens
tgatactagcctgaccaacatggtgaaactccatctctactaaaaatacaaaaattagctgggcgtggtggcgcacgcctgtaatcccagctacttgggaggctgaggcaggaaaatcgcttgaatctgggaggcagagtttgcagtgagctgagattgcaccactgcactccagcctgggcactagagtgagactccattgaaaaaaaaagtcaagtgtatgttacagtattgttaactataagcaaaatgttgtacagtggacctctaaaatttttcttctttcatgactgaagctttatacccattgaacaacaacgtgccatttctttctatccccagaatctagygaccatcatactagtttctgtttctgtgagtttgactattatagacaactcatgaatggaaccagacggtctttgtccttctgtgactggtttatattccacttagtgtaatgtccttgaggttcatccatgttgcagcatacaaaagaatttccttcttttttatagctgaataatagtctgttggatgtatatactatatgttctttatc

SEQ ID NO: 254865 - DNA, 579 bp, Homo sapiens
ttggtattccattgaaaagccatttagctctacaacgtaatgaaacaggaatactatctcatgcagataattataataataatttctactcctttaagaaaaataagtgttcaaacaccacagtaaggtacttaccacatacaatcttgtggtccaggttacattttggccttgtcttcctaaacacaatgggcaagtttcacagcctttctgcatccaggacctctgtcttaccttggctaattcactatcacaatttcagatatctctctgtagagaaaartgcaaaccaatccaaggtgctgtgtcatgaattttatagcaacaataaacaattcttacaaataaatatcacaagtgaatttggataatgaaaatgcatttgaaataattgatttgagcacttgtacagctcaattctgacattcccaatcttatcttcattttgtttttaaggagatttccattccttgacatgtttattattttgaaactaagccagtgttttcaaagcattttcatgccaaggattctaaactaagcaaataaatattatgctacttgaaacattcttagctt

SEQ ID NO: 254866 - DNA, 619 bp, Homo sapiens
ccatactggatgatttttcagtaaagaattgcgcaatacaaagggtgaggtgagttaatttgtttattttatttgaaaaaagaagaaaagaatttgaggcagtttatttcaataattgattgggaggcaattttaggtaaatttaatatctagcaaaatagaatagatgtagttgaaatcaaaactacatttttatgcttcagtgagtcatgctaaatgccatataaaacactattcagtggatggcgtggcatgtctctgactgtgtggggaacaaggcaattatgcttattgatcaaaataaaaaacaggatcttaagagaacatytatttcagaagtatttactactattaccagtaaagaaaacaaatgtaggtaaagacttaacattttgtcctatatacatgttaatcatcctaacggtaaaaactcacatgaaactttaagctacaagatgatatgagattctcaacatggaaagctgtcactataactacaagcctcttggaaattattaaaatattggcaagaaaagaagaatagttgtttaaatattttttaaaaacatttgaataagaatcagtagggtataaactagaagtttaaaaatgcttcata

SEQ ID NO: 254867 - DNA, 619 bp, Homo sapiens
ccatactggatgatttttcagtaaagaattgcgcaatacaaagggtgaggtgagttaatttgtttattttatttgaaaaaagaagaaaagaatttgaggcagtttatttcaataattgattgggaggcaattttaggtaaatttaatatctagcaaaatagaatagatgtagttgaaatcaaaactacatttttatgcttcagtgagtcatgctaaatgccatataaaacactattcagtggatggcgtggcatgtctctgactgtgtggggaacaaggcaattatgcttattgatcaaaataaaaaacaggatcttaagagaacatctatttcagaagtatttactactattaccagtaaagaaaacaaatgtaggtaaagacttaacattttgtcctatatacatgttaatcatcctaacggtaaaaactcacatgaaactttaagmtacaagatgatatgagattctcaacatggaaagctgtcactataactacaagcctcttggaaattattaaaatattggcaagaaaagaagaatagttgtttaaatattttttaaaaacatttgaataagaatcagtagggtataaactagaagtttaaaaatgcttcata

SEQ ID NO: 254868 - DNA, 527 bp, Homo sapiens
tcatgcaggccttatttcagataaagaagcacatcatctctcagtttcccttcaaacacaccagtctctcaatattctattaagataatttctttatacctgccaaatggtaaggattcagtattttttttgaaggaatgagccagccaacacagaggaaaaacaaggagtttagaagataaactgaggcaggcatcgataaatagatggcacggttaaagaattttaaactttaccttttgatctgtagtagtaaatctgacagcctgtctagagacagtccctgaatccagaagatttagcaaaattaaaacttcatccccatccaaaccatctatctgtctatccattcattcatcaatccatctaatcatttmtttattttcatttactcattttaatttcagaatatatttgtaatgttatatattaatagacggcctagataataaaataaaatcaacaataaaaccaccatatctggctcataaactagacattcataaaatttggtggttcaagtttaa

SEQ ID NO: 254869 - DNA, 390 bp, Homo sapiens
ttcccaaatgtgttctgccaaattacaaaaggatagattatattctaacttttaaagacagaaaaatgaggctaaccaaaaaaaaaaaaaawaaaaaaataaaaaactaataataatcagtatcttactgaaagccccgggaaacacttttagaactgtacattttacatgatattgtcatgccattgcactgttgttctgtaagcaagagcccgctactactacgcagacgctgagggaggcctcggaaaacaatttcatgcagctttcactttcaggtgtataggctctcacaaaaagttcagaagttcaatttgatgacataataagaagttcaagggttcccaatctatgactgagagtaataccatgaaattaaagtatgtagat

SEQ ID NO: 254870 - DNA, 576 bp, Homo sapiens
atatttatgacacactttaggtgttagattcttaaaacattatcttacttaatgattctcttggttacaatagagccatgccaattctaaatttgtttcaaaataagaagaggaaatgttccttccactcaatgttacacactgttataggtgtcccacagmaggtttgcttgggcacaaggtatgagggttgaacatgatggtttattcgcaacatgtctgcagtaactctttcagtctcaggatgcataacaggcccagggtatctggttcaataaggctttaaatagaaaatgtagaaaacacagagagccaaagcctgctaacttttatgctttgttactgaatcttccctgtttttttttttttttcctgttacggccttattttaatattaaattttctcccagagtcatagattcactaatagtagattttgtcattacctttctggagttctttttgctaattagcttaaagctagttactatcccttccatcaccaacatgaacaaaatgagctttctttgtctaggagaacccatgtaattacttataccaagagattaaaaatca

SEQ ID NO: 254871 - DNA, 576 bp, Homo sapiens
atatttatgacacactttaggtgttagattcttaaaacattatcttacttaatgattctcttggttacaatagagccatgccaattctaaatttgtttcaaaataagaagaggaaatgttccttccactcaatgttacacactgttataggtgtcccacagaaggtttgcttgggcacaaggtatgagrgttgaacatgatggtttattcgcaacatgtctgcagtaactctttcagtctcaggatgcataacaggcccagggtatctggttcaataaggctttaaatagaaaatgtagaaaacacagagagccaaagcctgctaacttttatgctttgttactgaatcttccctgtttttttttttttttcctgttacggccttattttaatattaaattttctcccagagtcatagattcactaatagtagattttgtcattacctttctggagttctttttgctaattagcttaaagctagttactatcccttccatcaccaacatgaacaaaatgagctttctttgtctaggagaacccatgtaattacttataccaagagattaaaaatca

SEQ ID NO: 254872 - DNA, 576 bp, Homo sapiens
atatttatgacacactttaggtgttagattcttaaaacattatcttacttaatgattctcttggttacaatagagccatgccaattctaaatttgtttcaaaataagaagaggaaatgttccttccactcaatgttacacactgttataggtgtcccacagaaggtttgcttgggcacaaggtatgagggttgaacatgatggtttattcgcaacatgtctgcagtaactctttcagtctcaggatgcataacaggcccagggtatctggttcaataaggctttaaatagaaaatgtagaaaacacagagagccamagcctgctaacttttatgctttgttactgaatcttccctgtttttttttttttttcctgttacggccttattttaatattaaattttctcccagagtcatagattcactaatagtagattttgtcattacctttctggagttctttttgctaattagcttaaagctagttactatcccttccatcaccaacatgaacaaaatgagctttctttgtctaggagaacccatgtaattacttataccaagagattaaaaatca

SEQ ID NO: 254873 - DNA, 531 bp, Homo sapiens
aaagcctgctaacttttatgctttgttactgaatcttccctgtttttttttttttttcctgttacgrccttattttaatattaaattttctcccagagtcatagattcactaatagtagattttgtcattacctttctggagttctttttgctaattagcttaaagctagttactatcccttccatcaccaacatgaacaaaatgagctttctttgtctaggagaacccatgtaattacttataccaagagattaaaaatcatatggaaggggaggaaattgcctttgtaaagtggttacaccagtgctaagcatttcctaggcactatgtaagtacttgttattaaatgattggatgtataaattaattcatcaatgaagtgaatgacataagagatttacctgattgaatctccactcgtaattcagcaagtaaccataacaataaaaaataatcaggcaagagaaataaataaaaggccttcaaataggaagagaggaaataaaattgtctctatttgcagatgacat

SEQ ID NO: 254874 - DNA, 576 bp, Homo sapiens
atatttatgacacactttaggtgttagattcttaaaacattatcttacttaatgattctcttggttacaatagagccatgccaattctaaatttgtttcaaaataagaagaggaaatgttccttccactcaatgttacacactgttataggtgtcccacagaaggtttgcttgggcacaaggtatgagggttgaacatgatggtttattcgcaacatgtctgcagtaactctttcagtctcaggatgcataacaggcccagggtatctggttcaataaggctttaaatagaaaatgtagaaaacacagagagccaaagcctgctaacttttatgctttgttactgaatcttccctgtttttttttttttttcctgttacggccttattttaatattaaattttctcccagagtcatagattcactaatagtagattytgtcattacctttctggagttctttttgctaattagcttaaagctagttactatcccttccatcaccaacatgaacaaaatgagctttctttgtctaggagaacccatgtaattacttataccaagagattaaaaatca

SEQ ID NO: 254875 - DNA, 558 bp, Homo sapiens
gcatataccatatatttcttaatatacccagcagattctaggggagcatgccaatattaatcagagttcagttgagaaaaaagaaatctcagctaagtaaaagaagccagatagagaaagtcaaataccacacgattgcatttatctgtggaatctaaaacggtcaatggtggttgctaaggagaggggaagggggaaagggagagatgttgtcaaagggtacaacatttcacttatgcaagatgaataaattctggggatctaatttgcaggattgtgagtgctgtggtttgaatgtgtctccttcaaaattcaggtattgaaatttaatggcctgtgtcacagtatgaagaggcgaagcccttaaaagtaattaggtcatgagggttcctctcttaagacccctataaaagatgtttcacacactgtctggctttcttgccgttctgccttccatcatgtaaggacacagcattcctgtccttccaggagtgcagcaacaaagtgscaccttggaagcagagagcagccctcaccaaacaactgaacctaccggca

SEQ ID NO: 254876 - DNA, 579 bp, Homo sapiens
gtgtagctgacctaagccttttttaaaaatatcctttctattgccatctcaccatcaaatagttcctctatctaagattggtggtgaaattcaggtctaggcgagttttttaacttatgaatagctactatctcagtttgatgggaaaaatacttgaagattctatrggatgagttgtttaattaaataatctttgaatcataacatttcagaataaatattgccttaaacatcatctaattggcttagttcctaatgggtaagttgtttattgtcaaaatgtttaagaacacagctaaagtgcacaataaaattatttttgaagctaataaaaaccagaagagaagagaaataagcagtcattagcatctaatgatttttggggggcaaattttggtaaaaaaaatttttatgttcattttgcaaagaagaaaattgatacaataaaagaaatcctattataagcttgacttatattactgactaatcatcttgaattaaaaacagttgaaaatttcagcttgttgtttaattcatattgtgaaatgagagaagtcgttatatttcttataagaccct

SEQ ID NO: 254877 - DNA, 622 bp, Homo sapiens
aatgtttcataatgttcaagtcattatctacagagcagtttaggggagctataatcttgtaatagggtctatgtgattccaggacaataggcacaaacaactwttaggaagcaggttagagtatgctgacttcgtgattaacgctgaatgtgctgcaagcttggttgatttttgtttctccccatcccttcttccaagatgaattttataaagtttataagggcagtttcaatagtataaaatgttcatcttctgtaagttcagagtccacattagaactagccattagaaattaccacaggttgagttttggtatagtatcaatgaaaaaatatactctattttcctaaaaggttgttaaaatactctttgattttcaaactatattcttgagcaacatcaaattttcctcatacagttcaacaaagccagcatactgaattagattaaatgctgaagtagttgagaaagtctatgttctattaacccagacattaaaaaatgtgaacaatgctattcatctcactattttgtttggggaaatacagttattttaaataaataatatgttatttatattaacatgtaataggtttatttctgttacttttaaatgaaatta

SEQ ID NO: 254878 - DNA, 586 bp, Homo sapiens
taaactaggtagacaggtggcaattccatgacaactttcttttcctacctgattactcaaaggtgttgctaaaaattttattttaaaaatttatgtgtgttttctgaatttagaacagcaaaaacaaaacaaaaaaatcaccaatcatctttaatcaaattgtgctacagatatgattctagtattacatagtaagaaaagcaggaagcaaagactgaaggcctatttttcaaagcataagaagcttattactctatgtctgttttctctcaaatgcttccctacttattctcatctatttttcagtttggtgtttccttatattgtcaaagcaggtgccttgctcacactaacaggagtacgtgttttaaaaggtcccacagggaataatttaccatacaagattacttcatgactaatgatgttctctataaacattgaggtgctatttgactgcctggttggtggtggtccaaactggtgacagttggcatgtgttttatctcatcttgccttctacattcttgayatagtctaatatatgttggaaagaagctttgggatgttataagacataaaatgatga

SEQ ID NO: 254879 - DNA, 600 bp, Homo sapiens
gtaaataacaatgccaaatggcaatggatggacatgataacctaataggtcttttctggctctaatawctgtgattgtatgattcaattcaaatgcagtagtttgctgtatctcgagtgtgtaatacacttcaattgtgaagtgctacaatttcaacactaatacgtttgaagtgacagacatgtcacctaagtacctagtagagttgtttgaaatgctacagaaaacaaaccttccccctgtggatatatacatcccaataatccatcaggcagacactataccaataatcagttgtagttcattaacaagacccacattaaatcttctgaaagtccacatgtgtgaaattagtacataaaaatcaagaaactgagtcttgatagtttcatgtaaaataatatttgtctgaacaaagcctgatcaaaaggcaagtagataatctcaattttaagggaagtctgtccctatcaacatcaaaatcactgaactgagagaaatctacagggtctaaatgatgttgggacttttgctgttatgtctctattcagtgatacagcacatgtggctatcctctgaaatataccagtcatgccattc

SEQ ID NO: 254880 - DNA, 468 bp, Homo sapiens
agttaatgtgtgggatatcgctgtgggtaaagggggcccagcccactgggcatcatctgagcaaccacgtggagcamctcagaagtctcttacctgaggatacaaaagctctggcatttatccgtggattcccttgacccactggaggctttaactacttctcacttctgggttgcccctgctgtggctgagtaagctcctgtgaagctggagaaaactctcagccagacagaagaaacattgggacgttcgagggggaaactgcctactttgggaaggggaagataatatatgcattgcaagataactcaggatggacctggatactaaatgccagtggtatctccaattcattgtgacttcaagaaagatgcccacaaatttttaaaatacatcctaagttatcaccccctcagataaccacttgtacatgcatttaataaataatttgttgaataagttacctaa

SEQ ID NO: 254881 - DNA, 580 bp, Homo sapiens
cgctctgtcgcccaggctggagtgcaatgaagcgatcttggctcactgtaacatccgcctcctgggtgcaagcaattctcccgcttcagcctcctgagtagctgggattgcagggcctgccaccatgcccagctaatttttgtatttttagtaragtcggggtttcacaatgttggtcaggctggtctcaaacccctgacctcatgatccacccgcctctgcctcccaaagtgctcggattacttgtgtgagccactgcgcctggcccaaaattttataaagtttttttgtttgtttgtttaaagtgttcttatctgaaggttacatgtgttcttctgatgtttttacttttgctaacaatagtcatatgctgcattataatgttttggtgaaagatggaccacatatatgatagtgctcccataagattataataccatatttttactgtatcttttctatgtttagatatgctttgacacacaaataccattgtgctacaacttcctacagtattcagtacagtgacatgctgtacaggtttgtagcctagcagcaatagcttataccatacagcaat

SEQ ID NO: 254882 - DNA, 616 bp, Homo sapiens
gtgctaagcactctccttgtacatcttcttcttacttttcccaacagccctatgagtcaagcaccactacttgccccatcgtagagaagattaaatgagagaaaaggtttcataacttcctccagggtgtagaagcttgtgttccactatcttggacttgaactctgaagctctcattctagatcctgagtcctctaccattacattttactacctttcttgcaacacaataaacttgatatttgtcaaattcaataaactaacgacataattaattaaggaaaaattcaatgtattcaaccattccatagacttttctttggtttttggttcttccaaaaaactgaggctgtctccaggtgacacgagacctggaaagtcatttagcacaatttctcagctatatgttcttgtagtattcatttcatctctcagatttatttaycatacctgaatgatgaggctagatctgagaatgcataatgtactttccaactctggtatttatgatttttattaagttctcagcactcattgaaatataaggcatttgagataatccattacagtacttgaaatcattgcttgataggtgttaataactcaaaactatatt

SEQ ID NO: 254883 - DNA, 542 bp, Homo sapiens
tgcttctgagattggtacagataaggagatgaaggggctgtagggaaataagaggcaaggtggtagggttttaactgagcatttttcttaaaatgttatctgtgaaatacctgagtttcacagagttagaaatgctaatcatctttggtttccagcttcagagtaagaggctgtactatatggtgatattaacattgtttccagtgctaaacattctgtgatgctaaattgagcacaggattttcaacagataaactgaagtatagataatcaacgtgagaatttgtggaattcttttacatatgttaaatgttcacygtactcatggtggggttactcaaaatgtagttgatataaggaacatgtgttctagtggcaaaaaaaatacgtatagaaacattagccattgatgtgaaaaattacagcattctgaaaagataatgtttaaaaagatagtgagctaggcatgttagggcatgcctgtagtcccaactactttagagactgaagcaggagaatctcttgagcccaggagtttgagg

SEQ ID NO: 254884 - DNA, 495 bp, Homo sapiens
atccctcagtttttcctacttgtagttccttgagcttcttgaatatgcagattgtttttcatcatgtttgggaagtttggggccatcatttcttcaaatattctttctccttttttctgtttttcttctcctgggaygctcattatgtgtatgttagtaagcttgatgatgtgttccacaaacaggtctctgagattccattcactttcattcatttttatttctgttcctcagagtcaacaatctcaattaaccttcaagttccccattctgtcttcagcctgctgtaatgtgccattgagaacctctaataatttttccatttcagttaccatacttttcaactctagaatttctatttgactcctttttatggtttctatctctttattgatattctctatttgatgagacattgctttcatactttcctttagttctctagtctacagaactgaatcgtttctcttatctctttgaacatattttaaatag

SEQ ID NO: 254885 - DNA, 495 bp, Homo sapiens
atccctcagtttttcctacttgtagttccttgagcttcttgaatatgcagattgtttttcatcatgtttgggaagtttggggccatcatttcttcaaatattctttctccttttttctgtttttcttctcctgggacgctcattatgtgtaygttagtaagcttgatgatgtgttccacaaacaggtctctgagattccattcactttcattcatttttatttctgttcctcagagtcaacaatctcaattaaccttcaagttccccattctgtcttcagcctgctgtaatgtgccattgagaacctctaataatttttccatttcagttaccatacttttcaactctagaatttctatttgactcctttttatggtttctatctctttattgatattctctatttgatgagacattgctttcatactttcctttagttctctagtctacagaactgaatcgtttctcttatctctttgaacatattttaaatag

SEQ ID NO: 254886 - DNA, 495 bp, Homo sapiens
atccctcagtttttcctacttgtagttccttgagcttcttgaatatgcagattgtttttcatcatgtttgggaagtttggggccatcatttcttcaaatattctttctccttttttctgtttttcttctcctgggacgctcattatgtgtatrttagtaagcttgatgatgtgttccacaaacaggtctctgagattccattcactttcattcatttttatttctgttcctcagagtcaacaatctcaattaaccttcaagttccccattctgtcttcagcctgctgtaatgtgccattgagaacctctaataatttttccatttcagttaccatacttttcaactctagaatttctatttgactcctttttatggtttctatctctttattgatattctctatttgatgagacattgctttcatactttcctttagttctctagtctacagaactgaatcgtttctcttatctctttgaacatattttaaatag

SEQ ID NO: 254887 - DNA, 557 bp, Homo sapiens
ataaactgtcccccacaaaaaggaaatataaaacccattaagagtatcgcaacagccgggctcagtgcctcacgcctgtaatcccagcactttggtaggccaaggcaggcaaatcacttgaggtcaggagttcgagaccagcctggccaacatagcaaaaccctgtctctactaaaaatagaaaaattagctgggtgtggtagcacaggcctgtaatcccagctactagggatgctgaggcaggagaattgcttgaacccagtgagtggaggttgcagtgagccaagatcgcgccactgcactacagcctgggcaacagaacaagactctgtctcaaaaaaaaaaaaaaaaaaaaaaaaaaaaamcagttttgcaacaacaacaaaaacatttgataaaattcaacatcccttcatgattaaaaaaactctcaacaaattaggcatagaaggaatatatctcaaaataataaagtctatacacaacaaacccagagctaacatcatactgaatgaggagaggtgagatctttcttctaaaagctggaatgaggcagg

SEQ ID NO: 254888 - DNA, 557 bp, Homo sapiens
ataaactgtcccccacaaaaaggaaatataaaacccattaagagtatcgcaacagccgggctcagtgcctcacgcctgtaatcccagcactttggtaggccaaggcaggcaaatcacttgaggtcaggagttcgagaccagcctggccaacatagcaaaaccctgtctctactaaaaatagaaaaattagctgggtgtggtagcacaggcctgtaatcccagctactagggatgctgaggcaggagaattgcttgaacccagtgagtggaggttgcagtgagccaagatcgcgccactgcactacagcctgggcaacagaacaagactctgtctcaaaaaaaaaaaaaaaaaaaaaaaaaaaaaccagtwttgcaacaacaacaaaaacatttgataaaattcaacatcccttcatgattaaaaaaactctcaacaaattaggcatagaaggaatatatctcaaaataataaagtctatacacaacaaacccagagctaacatcatactgaatgaggagaggtgagatctttcttctaaaagctggaatgaggcagg

SEQ ID NO: 254889 - DNA, 428 bp, Homo sapiens
acaacgtgggcactgacctgtcccccgagcccaaaagcttcaattacccattgctctcgtccccaggtgatcagtttgaaattcagctaacccagcagctacagtcccttatccccaacaacaatgtgagaaggctcattgctcatgttatccggaccttgaagatggactgctctggggcccatgtgcaagtgacctgtgccaagctcatctccaggacaggccacctgatgaagcttctcagtgggcagcaggaagtaaaggcatccragatagaatgggatacggaccaatggaagattgagaactacattaatgagagcacagaagcccagagtgaacagaaagagaagtcgcttgaggtgaggaccacacagaaacatgagacccagatttcccatcatttagcatatcccaggaaagtgccc

SEQ ID NO: 254890 - DNA, 608 bp, Homo sapiens
ggcagtttagtctgaagttacccaaatcattcgttgccaggagagttcacttcatttagaacttggaaccaccayggttttcaataggacgcttaatgaactgggccctacgaaataggcaaacttcctggcctgcttaacccagtattgtctctcttgttctgactgcagtcatgtgttttattttcccattttttgttagcttccagctgaaggccaagctacatgagccccctgtggccttccttttgggaaaggtggaactcggctgtacattcaccttctgagctcctcaaatgtcttccaacactgctccaacggtagacaaaatattattgaaaatgagatttccattgtggcagtggtttactgtcttccattttagaatgcaattttttttttaatgtatttttggatttttattaatttagattatgtaaactagcagggtgttttttaatgagattggtgatgccaaacctaaaagagttaaaatccccttgtaatcacatataactcagagaaaggtagggaatgccccacagagagacaggggatgcgtttgtttgatttttgctcttttccaaagtgtggcttccttttgaaat

SEQ ID NO: 254891 - DNA, 608 bp, Homo sapiens
ggcagtttagtctgaagttacccaaatcattcgttgccaggagagttcacttcatttagaacttggaaccaccatggttttcaataggacgcttaatgaactgggccctacgaaataggcaaacttcctggcctgcttaacccagtattgtctctcttgttctgactgcagtcatgtgttttattttcccattttttgttagcttccagctgaaggccaagctacatgagccccctgtggccttccttttgggaaaggtggaactcggctgtacattcaccttctgagctcctcaaatgtcttccaacactgctccaacggtagacaaaatattattgaaaatgagatttccattgtggcagtggtttactgtcttccattttagaatgcaatttttttttwaatgtatttttggatttttattaatttagattatgtaaactagcagggtgttttttaatgagattggtgatgccaaacctaaaagagttaaaatccccttgtaatcacatataactcagagaaaggtagggaatgccccacagagagacaggggatgcgtttgtttgatttttgctcttttccaaagtgtggcttccttttgaaat

SEQ ID NO: 254892 - DNA, 574 bp, Homo sapiens
ccttccctgccacacacacacacacaaacacacacacatatgcatacaacacacacagttataaacatacactcataccgcataaacacacgcaacacacaaacacaaaacccacacattaacatactaagtcacaaactcatacacaatcacacacccactcataaatacatatgacacaaacacgcagtcacaaactcatacacaaacatatattcttacacatatgcacaaaacacacaatyacaacacacacataaacacagatgtgaaagagacatttggcaaatgaacttgaacctgaacttgaacccaagaagaggggttccagccatctcaccagcatatagagcctttgaattaacacacaagttgggaagaaaccaagaactaacaatatcccttgagcctctggatcaagccacacctgaagctagacttaccccatgggcatttcattatgtaagccaataaactcccttctttattgtggttcttttattgaggtttagccaagctgggttttcatcacttgccaactaaagatccagactgaatagacacccaggaatca

SEQ ID NO: 254893 - DNA, 574 bp, Homo sapiens
ccttccctgccacacacacacacacaaacacacacacatatgcatacaacacacacagttataaacatacactcataccgcataaacacacgcaacacacaaacacaaaacccacacattaacatactaagtcacaaactcatacacaatcacacacccactcataaatacatatgacacaaacacgcagtcacaaactcatacacaaacatatattcttacacatatgcacaaaacacacaatcacaacacacacataaacacagatgtgaaagasacatttggcaaatgaacttgaacctgaacttgaacccaagaagaggggttccagccatctcaccagcatatagagcctttgaattaacacacaagttgggaagaaaccaagaactaacaatatcccttgagcctctggatcaagccacacctgaagctagacttaccccatgggcatttcattatgtaagccaataaactcccttctttattgtggttcttttattgaggtttagccaagctgggttttcatcacttgccaactaaagatccagactgaatagacacccaggaatca

SEQ ID NO: 254894 - DNA, 599 bp, Homo sapiens
cacactgtattttaaaatcaaatttgtttaaataaacaaaataggtgttataattagcaatatataacaggaaacatgttcaagaatattcatagtggcactgtttataacaagaaactggaaacaacccaaatgsccactaacaagacaatggatacataatatgtggaatatccacacaataaaatattcatcagtgaaaaggttggccaggcgcagtggctcatgcctgtaatcctagcaatttgggaagtcgacatgggcggatcacttgaggccaggagttcaagaccagcctggccaacacggtaaaaccctgtctctactaaaaatacaaaaattagctgggcgtagtggcaggtgcatgtaatcccagctgcttgggaggctgaggcaggagaatcacttgatccagggaggcggagcttgcagtgagccaagatggcaccattgcactccagcctgggtgacagagctagactccgtctcaaaagaaaaaaagaaaaagaaaaagaatgaattacagccacatgcaatgacatggatggatctcagtatcataatgttgaatgaagaactcaagtgttaaaagattacat

SEQ ID NO: 254895 - DNA, 599 bp, Homo sapiens
cacactgtattttaaaatcaaatttgtttaaataaacaaaataggtgttataattagcaatatataacaggaaacatgttcaagaatattcatagtggcactgtttataacaagaaactggaaacaacccaaatggccactaacaagacaatggatacataatatgtggaatatccacacaataaaatattcatcagtgaaaaggttggccaggcgcagtggctcatgcctgtaatcctagcartttgggaagtcgacatgggcggatcacttgaggccaggagttcaagaccagcctggccaacacggtaaaaccctgtctctactaaaaatacaaaaattagctgggcgtagtggcaggtgcatgtaatcccagctgcttgggaggctgaggcaggagaatcacttgatccagggaggcggagcttgcagtgagccaagatggcaccattgcactccagcctgggtgacagagctagactccgtctcaaaagaaaaaaagaaaaagaaaaagaatgaattacagccacatgcaatgacatggatggatctcagtatcataatgttgaatgaagaactcaagtgttaaaagattacat

SEQ ID NO: 254896 - DNA, 599 bp, Homo sapiens
cacactgtattttaaaatcaaatttgtttaaataaacaaaataggtgttataattagcaatatataacaggaaacatgttcaagaatattcatagtggcactgtttataacaagaaactggaaacaacccaaatggccactaacaagacaatggatacataatatgtggaatatccacacaataaaatattcatcagtgaaaaggttggccaggcgcagtggctcatgcctgtaatcctagcaatttgggaagtcgasatgggcggatcacttgaggccaggagttcaagaccagcctggccaacacggtaaaaccctgtctctactaaaaatacaaaaattagctgggcgtagtggcaggtgcatgtaatcccagctgcttgggaggctgaggcaggagaatcacttgatccagggaggcggagcttgcagtgagccaagatggcaccattgcactccagcctgggtgacagagctagactccgtctcaaaagaaaaaaagaaaaagaaaaagaatgaattacagccacatgcaatgacatggatggatctcagtatcataatgttgaatgaagaactcaagtgttaaaagattacat

SEQ ID NO: 254897 - DNA, 530 bp, Homo sapiens
aggggtgcagtcagggtgcatttcacctttctaccactagacagcacgaagcaaaggtgcactgcggtgagcacaaaagaatgaggctgcagcttattggaacttgcagcaaaactgggcagaaactgcaggcctagggagagaggcaaaaaatcccatagaaatctgcaaaatccaggggagttccaggcascctcaaagaacctgagactaggccagccacaggatcagaaggccaggacacaggccaagccgaaatggtgggaaagagcaaggccaatgttagcaaagaaaatccaactgaaaataaggtagagaaagagaaggagagccgagctctggggcctgctggtaacagagaacaggcaggaagggaggtccatggtaacctgccagagagcctgggggactcccacatgagaacctgtgctctgagagggcatggggatgaggattcctgagcagtcaggggcctcacttcctttggggaaaactaggggtgccttctcccaggagggctgtgaagtgtt

SEQ ID NO: 254898 - DNA, 497 bp, Homo sapiens
tacttcctctaccttaaattattttataatttagtggaaaaagatatatacataaataattatagcacaatgtgataagttctcaagtgagwtatgtgccaagtatacttgagtacagtgctaaaggactatttcacatctcccctctcttcattcccagattatgaccgtgcttcctattttactgagaaaatagaagcaaatggaaggaaatttgtagcacgtcttgtcagtatacctgcatgtatacctgtgaactcttactttttctcttcctaattccagataaatttttttgtttttcttatctagggccaatccacttatttatgtactggattttatcccttctcaactactacattgcctcttctctctatattattattttttgctcttctttacaggattattcttattagcatacaaaaatatttatataatatatcaacagcaaatcttggcattgcatctcccctctagccctgtgtccagtt

SEQ ID NO: 254899 - DNA, 515 bp, Homo sapiens
attcacaaaccagaatagccctgatagtgctcaaggatctatttaagaatctaccacaacacactggagaaaaaaaagaagaatatccacagaaaggattgctgttgaaattggcatacttgaggcaccaggagatggttaggaacgaagaaatgcagaggatattggtatcagctgtacaggtgaactgctgtggttcccaggagcctgctttgcagaggacagtggcatcttttgcaacagaggtaaccaacagccattcctgtccaggaaccccatagagggagatgtggctgcacactcccataacccctaagaatcagttgctcttgtgctrttctgggactggagctgccacatttcccatccctgtgcatgcccccaacctctgagctgtggctgttccacaagtgcccacattcctgaccccttctctgagggtttattctgtgtacccatgtctcatacaccagaaccatagcaagctagatcatgtgtgggtcccagagccaagg

SEQ ID NO: 254900 - DNA, 578 bp, Homo sapiens
gccgaggtgggcagatcacctgaagtcaggagtttgagaccagcctgcccagcatggtgaaacccygtctctactaaaaaaaaataccaaaaattagccaagtgtggtgtcaggcgccataatcccagctactcaggaggttaaggcaggagaatcacttgaacctgagagacggaggttgtggtaagccaagatcgccccattgtactttagcctggacaacaagaacgactctgtccccccaaaaaaaaaaaaaaagagatttgagggtcatatttatatttttttggcttggattctacgttgcctagtatcaggatcacctcccctattttcttattgttctcatttcccctatatttcattgtccatcccattatttttagtcttcttacatcactttgtttcttgtatacagtatactgttggttctagctttgtaagacaaattgaaataagctgaataggtgagtcaagcccactcatcattcatatgactgaatgtttggtttgaagcctgtcataaaattgtattgttatatttgctatatttattttctgtgcaatgtgtactattt

SEQ ID NO: 254901 - DNA, 578 bp, Homo sapiens
gccgaggtgggcagatcacctgaagtcaggagtttgagaccagcctgcccagcatggtgaaaccctgtctctactaaaaaaaaataccaaaaattagccaagtgtggtgtcaggcgccataatcccagctactcaggaggttaaggcaggagaatcacttgaacctgagagacggaggttgtggtaagccaagatcgccccattgtactttagcctggacaacaagaacgactctgtccccccaaaaaaaaaaaaaaagagatttgagggtcatatttatatttttttggcttggattctacgttgcctagtatcaggatcacctcccctattttcttattgttctcatttcccctatatttcattgtccatcccattatttttagtcttcttacatcactttgtttcttgtatacagtatactgttggttctagctttgtaagacaaattgaaataagctgaataggtgagtcaagcccactcatcattcatatgactgartgtttggtttgaagcctgtcataaaattgtattgttatatttgctatatttattttctgtgcaatgtgtactattt

SEQ ID NO: 254902 - DNA, 540 bp, Homo sapiens
agaaaattagaccaacatacacttctgtggtgttatgatatgcgttggttttcattcacagttcctgattcataactcccatagctattgttacagtcttgtattacaatgttgggtatctcaagcctcagaggcaggcctcaggaaacagagtctctctcctgccctcctttcacctgccccaaggcaggactctaatcttctcctaccttttttattgtgggtcttaagaccatccccagagagggtcacaccctatgcaatgrgggaaggaatactgaagtcaagaagccttcataaaaacccaagaggactgggttcagagagtttctggatacctgaacacgtagaggttcctggagggtggcactcccagggatggcaaggaagcgtgctctgcacccccataccttgccctacgcgtctcttcacctatatcctttatgataacctttataataaaccagtaaatgtaatttaagtgtttccctgaattctgtgagctgttccagcaaattaatcgtacccgaagtggggggg

SEQ ID NO: 254903 - DNA, 540 bp, Homo sapiens
agaaaattagaccaacatacacttctgtggtgttatgatatgcgttggttttcattcacagttcctgattcataactcccatagctattgttacagtcttgtattacaatgttgggtatctcaagcctcagaggcaggcctcaggaaacagagtctctctcctgccctcctttcacctgccccaaggcaggactctaatcttctcctaccttttttattgtgggtcttaagaccatccccagagagggtcacaccctatgcaatgagggaaggaatactgaagtcaaraagccttcataaaaacccaagaggactgggttcagagagtttctggatacctgaacacgtagaggttcctggagggtggcactcccagggatggcaaggaagcgtgctctgcacccccataccttgccctacgcgtctcttcacctatatcctttatgataacctttataataaaccagtaaatgtaatttaagtgtttccctgaattctgtgagctgttccagcaaattaatcgtacccgaagtggggggg

SEQ ID NO: 254904 - DNA, 540 bp, Homo sapiens
agaaaattagaccaacatacacttctgtggtgttatgatatgcgttggttttcattcacagttcctgattcataactcccatagctattgttacagtcttgtattacaatgttgggtatctcaagcctcagaggcaggcctcaggaaacagagtctctctcctgccctcctttcacctgccccaaggcaggactctaatcttctcctaccttttttattgtgggtcttaagaccatccccagagagggtcacaccctatgcaatgagggaaggaatactgaagtcaagaagccttcataaaaacccaagaggactgggttcagagagtttctggatacctgaacacgtagaggttcctggagggtggcactcccagggatggcaaggaagcgtgctctgcacccccatacctygccctacgcgtctcttcacctatatcctttatgataacctttataataaaccagtaaatgtaatttaagtgtttccctgaattctgtgagctgttccagcaaattaatcgtacccgaagtggggggg

SEQ ID NO: 254905 - DNA, 397 bp, Homo sapiens
gaggctagacaaattatgagatactatctgaaaatgtataaaagacaaaggattgaaaacataaataacttctataaatcagttagaaaaagacaaacaaccctggtagaaaagtaagcaaaaaacataaaygagcagctcccagtacaagaaatctgaatgaccaaaaaacatgaaaagacctctctggtagcaatcagataaatgcgaacaaaaacaatgaaataccatttctcacccatttattaggctgataaaaaaatatataaagtttgacaattacagatactgagtactggaaaagaaacatatgctcctggtacagtataaattggaattccagattaccaggattgtgtgatgcccctaggaaagtcatcagcttcagcacttcctt

SEQ ID NO: 254906 - DNA, 572 bp, Homo sapiens
gcataacgacgtttcactcaacgacagaccacatgacagtaatcccgtaagattataatgctgtattattactggaccttttctatgttatgtttagatacacaaatacttatcattgtgttacaattgccaacaatgctcaatacagtaacatgttctactttgcagcctagaggcaacaggctgtaccatatagtgtaggtatgcactaagcttaagtacacactacgctgtccacacaatgacatcacctaataatgaatctgcctaatgacaatttctcagaatatatccccactgttaagccacatataattttattattcttgtgctggcagtgttcacagatctcccttatttaccagctgctctcatrtttgcttccttgcttaaagatctcacaactatactcaaagccttcagaatctagcatcctttgcttgcccttctgggctacagtaacaaactctgccaagaatgacatccaaaggttaaaatattatataaaatgggttagtttctgatattaaatttgtaaaaccaaaattaaggacttctcattaatttttgtt

SEQ ID NO: 254907 - DNA, 573 bp, Homo sapiens
atgactagtgaaataaggcagtaaataaagtaataattgccctgatttgaaagaattaattgtcataaagcaagtaaagtgaggaaatgggagaaagtgatgggggtatttttttcacaaggtagtctggaaggcttctctgaggaactttagtaaagrtgcataaaatgggaaggacaagtaacctgaagataggaatgaataatgtttcaggaaggactgtcagtgaaaagccctgaggaggaaatgagcttagcattggtggagcagaaagaaggcaggagtggagtcagtgagaaaagtagaagaagttgaatgaatgaatgaatgctagtttcaggaacgaatagtttgggaaacatacatgtacatatttatgttgtttattgtatacatacacatacccctagtctttaatatctttaggttgttgaggtggttacatcagtgtccattctggcttcttttgatttattttcttatcttcttttcttctcttttcctttatacttaacaaaaagataaatgtcaaaatcccattcaaaattaaataatttttaaaaatccatctta

SEQ ID NO: 254908 - DNA, 556 bp, Homo sapiens
tacaatcattttgaacaggcaagaaaataatttaatttcatcttaatttaaaaggatgtattctgagagaaaaaaaaaaaccacattctaaaaaactttcaatctctgatgaaataagaccaagaatatgtctaaataaataaaatctttcaggaaatcttaacacaccttctataatatatgcactatcaataaatcatataactgagacttcttaccagaaaaatactgggaaaattttggctttatttgtagattaatgtgacaaatataatcaaataaacacatatatacacaaacatgtatacatgcatctatacacacacaaacacacatacatataatatccctctatggtctccccaaaaatttatacaagactattaggccataaaaaatataacaagatagcacaaattaaaattataggaagaggctaggggaaggagcaaggatagggaaagggaagatgttgatcaaagsgtacaaagttttcatgacactagaaataagttttagtgatctattactgatgaccacatttaataataaggta

SEQ ID NO: 254909 - DNA, 610 bp, Homo sapiens
ggggattagatttcaacataagaattttggggaaacaaacattcggtctagagcaatgtgcaaagttatatgaagaaaactttaaaatcttgcataagctccccaaaaagactagaacgaatggagaggtatactatgtgcttaaagaagaaaacatcataaaaaatcatttctcaattaatttgtaaataccatgcaatacaaataaaactgcccaaaaaaaagttggggttagagaggggaactagatatgttaaaatagaaaaaagaaaagaaaagaaaagaaagaaaaagcaggttattttggctaggtttgcatttggccacacctaatgcgaatccagtcacatggcttaatcaaataaaggataacgtaacaaggagcctaaaagtaactggtccaggcttggtgcaattgctgaaggagccaaatagtttatcctttttcgctttgttgcagtctgtgactttagtatttgtagtcacaagcaggktatcatattctttcacatctgttcacggcatctgataaacaagaataaagagaaaggacaaagggtaaacgttgttagctaagctggcctcattttttattagaaaaatgatggct

SEQ ID NO: 254910 - DNA, 581 bp, Homo sapiens
cggagggaatctcctggtctgtgggttgtgaagaccatgggaaaagcatagtatctgggctggatagcaccgtccctcatgacacagtctctcatggcttcccttggctaggggagggagttcactgaccccttgcactttccragtaaggcaacaccccgcactgcttaggctcgccctctgtgggctgcacccactgtctaaccagtcccaatgagatgagctgggtacctcagttgaaaatgcagaaatcacccgccttctgcattgatctcacagggagctgcagaccggagctgtttctatttggccatcttgccagactctcctatagtaagtcttaaaattaggtaatgtgagtcctccaactttgttcttcttcagttattgtgctggctctttgaggcttttttttccttccatataaaattaagaatcagttcgtcaatatcttcaaaattgcttgctgggcatactgtcacattttatataaatagtttatatttttagaaaactagattaagtttttccaaatatggaaatatgttgtaatactaagtatgcttataatattaaatata

SEQ ID NO: 254911 - DNA, 581 bp, Homo sapiens
cggagggaatctcctggtctgtgggttgtgaagaccatgggaaaagcatagtatctgggctggatagcaccgtccctcatgacacagtctctcatggcttcccttggctaggggagggagttcactgaccccttgcactttccgagtaaggcaacaccccgcactgcttaggctcgccctctgtgggctgcacccactgtctaaccagtcccaatgagatgagctgggtacctcagttgaaaatgcagaaatcacccgccttctgcattgatctcacrgggagctgcagaccggagctgtttctatttggccatcttgccagactctcctatagtaagtcttaaaattaggtaatgtgagtcctccaactttgttcttcttcagttattgtgctggctctttgaggcttttttttccttccatataaaattaagaatcagttcgtcaatatcttcaaaattgcttgctgggcatactgtcacattttatataaatagtttatatttttagaaaactagattaagtttttccaaatatggaaatatgttgtaatactaagtatgcttataatattaaatata

SEQ ID NO: 254912 - DNA, 658 bp, Homo sapiens
gctgcttttcataccagaccctggcagtcagccctgagttaggctcagtctgaacrtttgatgattgctctaagcagccagcacactggttgtgagctctggagtccagcagaactgggctcaaaccctcaccccagcacttactaagtatctataaaacaaagacgatgatcatggtacccacgtcactgggtttttgagcgactccatgtacagcttagccagtgcttaacataaagcaagccttcaagtgacaattggcattgctgttattgttttgcattgatatatctttgtgtaggtcaataaatcccctaattcccctaattcattaaaccattgatccagcataactctaatttcaatattaataagaattgagtgatggatatattagcatattgatgtaacccacaatgtatgcatttatcaaaacatcacattgtacatggtacataattttttttttttttttgaaacagaatcctgctctgtcacccaggctggagtgcagtggcatgatcacagctcactgcagcctcaaactcccatgctctagcagattatcccacattagcctccagcgtagctgggactacaggcatgagccaccatgcctggataatttttttactgttttgtaaaaacagggtcttct

SEQ ID NO: 254913 - DNA, 658 bp, Homo sapiens
gctgcttttcataccagaccctggcagtcagccctgagttaggctcagtctgaacgtttgatgattgctctaagcagccagcacactggttgtgagctctggagtccagcagaactgggctcaaaccctcaccccagcacttactaagtatctataaaacaaagacgatgatcatggtacccacgtcactgggtttttgagcgactccatgtacagcttagccagtgcttaacataaagcaagccttcaagtgacaattggcattgctgttattgttttgcattgatatatctttgtgtaggtcaataaatcccctaattcccctaattcattaaaccattgatccagcataactctaatttcaatattaataagaattgagtgatggayatattagcatattgatgtaacccacaatgtatgcatttatcaaaacatcacattgtacatggtacataattttttttttttttttgaaacagaatcctgctctgtcacccaggctggagtgcagtggcatgatcacagctcactgcagcctcaaactcccatgctctagcagattatcccacattagcctccagcgtagctgggactacaggcatgagccaccatgcctggataatttttttactgttttgtaaaaacagggtcttct

SEQ ID NO: 254914 - DNA, 573 bp, Homo sapiens
atactgagcctatcccaacactgattactgccaatggtgtgcctgaaaatgcattgccacttccacctgcagagatgaattcagcctcaaggaccacaaggagagaaggacgggcacaacctcagctgcatgcataaataggaaaggacttcctgggggcttgggcagagggcagggcatggcaaatctggttcaaaaaagaatacacttcgtcttaccatgtttctatttggggraaaaaaaaagacaattttttttcttaaaacaaactacaggaaatagcaggagaaaagtctttcccaatagtgggtgggttaaactaagcttgaaagatgatggtattactctgtcttcagaggcagcccagtatcccctgtaccccctgaggtggccctgagcagggcagtttcataaaacacaagttctagaggtaggagggtgggtctggataccttctggaaacttctcaggtgccaaggattcttcaagaccccagatttgccacatggcaccgcactgtgggcagtcagcccaggcaatttcctagaatccccgcatggtcaagccagagga

SEQ ID NO: 254915 - DNA, 599 bp, Homo sapiens
gaggcatgtctcctgactcccaagagtggggytcccagaacagagccagctatagatggttcccagagagtagaggggcaaggggaacgcggctttttctaaagaagagagggctaaaatcatgtctgtatcttctctcctccagcacttcaataataataataacagacacaaatcactgccagcatggcatgcgccactctgcttttcacatttcatgtatattacctcattgtatatcagacaataatgctataatgaaagtactgttattgaacccattttacaattaagacatttggatctcagaaaggcaaagttacttggccaagaaacacacctataaacaatagagcttagaaccagatcttctggttctaggtcccatagccttaattcctagagattggtctgttcaaccttatttccagcttctcatcctctatgcacaacttccttgccccctttgaagctaggcatgggtgtttggcttgttttggccaattaaacatgagcggaaggaaaacatgtgagttctaggcaggagcagtgtgcaagccatggtgtcttcttcccacagctgcagcagtgaaggaagc

SEQ ID NO: 254916 - DNA, 599 bp, Homo sapiens
gaggcatgtctcctgactcccaagagtggggttcccagaacagagccagctatagatggttcccagagagtagaggggcaaggggaacgcggctttttctaaagaagagagggctaaaatcatgtctgtatcttctctcctccagcacttcaataataataataacagacacaaatcactgccagcatggcatgcgccactctgcttttcacatttcatgtatattacctcattgtatatcagacaataatgctataatgaaagtactgttattgaacccattttacaattaagacatttggatctcagaaaggcaaagttacttggccaagaaacacacctataaacaatagagcttagaaccagatcttctggttctaggtcccatagccttaattcctagagattggtctgttcaaccttatttccagcttctcatcctctatgcacaacttccttgcccsctttgaagctaggcatgggtgtttggcttgttttggccaattaaacatgagcggaaggaaaacatgtgagttctaggcaggagcagtgtgcaagccatggtgtcttcttcccacagctgcagcagtgaaggaagc

SEQ ID NO: 254917 - DNA, 561 bp, Homo sapiens
ccccggaacactatggaggaatttggagcctgctttatacagcagaggcaaaaacacagcgccacccctacccatggggacctggaatctgggcacggggcatcagaactcaggccaagttgctaatggggtttctggaggctgcaaaactggtgttagccagagcactgagccggcaggctccagatctaactggagagaggcagaggtgcccgcaaggagggaaccagacctctccccaccacctgtccttgacctttccttcctcccactcaggatcaaaggcctggggcatccaaatacatgtgacccagaaaactccttctcaggtgtgacgagctgaactgttcccccattcagattcctgttttgcaaccctaacccccagcagctcagtatgccactgtatttggagatacagcctttaaagaggcaattaaggtgaaaagagatcattagggtgagcactactccaatacgtctggtgtctttataagaagagatgagggtaagaatacaagcagrgggaagatgatgtgaagatacagggagaaaacagca

SEQ ID NO: 254918 - DNA, 544 bp, Homo sapiens
gaacctctgaactcctccttcctctgggctctctgtaacatttcaccacacgtcagcatctaatcccaagacaaacattcccgctgctcgaagcagctgtatagcctgtgactctccgtgtgtcagctccttccacacctgattagaacattcataagccacatttagaaacagrtttgctttcagctgtcacttgcacacatactgcctagttgtgaaccaaatgtgaaaaaacctccttcatcccattgtgtatctgatacctgccgagggccaagggtgtgtgttgacaacgccgctcccagccggccctggttgcgtccacgtcctgaacaagagccgcttccggatggctcttcccaagggaggaggagctcaagtgtcgggaactgtctaacttcaggttgtgtgagtgcgttaaaaaaaaaaaaaaaaaagaatccctatacctcatttgtatttttaaaatgcgtgatgttttatgaaattgtgtccattttttaggtattagatatggcagaaaaaccatttccactatgcaaag

SEQ ID NO: 254919 - DNA, 579 bp, Homo sapiens
gaatagaacaggaggcagctttgctctaagcagttcccagcctgacttttccctttagcctatgattctggggtcctgagatgttttcctttcayagagccctatcctctgatacctgggagtgagacctcgctggaacacggggctgctgcagatgtagtcaagatgaactcgtaccagagaaccccgggacctgaacccagtgactagagtccttttgaaaagacggaaggcagagatgcagaggccaaggccatgagaggccgaggcagaggcctggccaggggtctgtgggatccccagccacaaggccgctgaagaggtcctggaggaagcattctccccagcctgcagagggagcagggcacgcccaagccctaccttggactgcaggcttctgaaccctgtagttgaaggctgtagtttgcagctctttgttacagcagccacagggaatgcgcctccagcctgtctggaagtcagctcttcccacagggtgttcaaggtcaggtgggctgctcccagaggagcaggtgcaggcagagaccacaggctgctggagggaaggggatacccagc

SEQ ID NO: 254920 - DNA, 452 bp, Homo sapiens
agaatgactttctgtggatgtttgttaaaagcatttcccaagcccctctcctaaaaaatcggagtcagtaagtgtggggtgggggtagagggaggtgggggaggtgacttttttttttttttttttacaggtaagaggagaaacaatttggtatcaaaagagcgtcctgactggcctccctgcctccagcatcccatccaatccacggccactcactccagaagcccgtccaatccgyaaccactcactctttccaaggccagcgctccgatgatgctgtagcctcagtcccggcctctgtcaaaggccctccagcccctgacgccaggccacctttgagctcctcttctaagcgccccctttagtatcttgcacacggctgtccccgtgtgagcagctggtgtgagtagagcgtagggagcttatttggcaatctcttcgatgatccttgt

SEQ ID NO: 254921 - DNA, 452 bp, Homo sapiens
agaatgactttctgtggatgtttgttaaaagcatttcccaagcccctctcctaaaaaatcggagtcagtaagtgtggggtgggggtagagggaggtgggggaggtgacttttttttttttttttttacaggtaagaggagaaacaatttggtatcaaaagagcgtcctgactggcctccctgcctccagcatcccatccaatccacggccactcactccagaagcccgtccaatccgcraccactcactctttccaaggccagcgctccgatgatgctgtagcctcagtcccggcctctgtcaaaggccctccagcccctgacgccaggccacctttgagctcctcttctaagcgccccctttagtatcttgcacacggctgtccccgtgtgagcagctggtgtgagtagagcgtagggagcttatttggcaatctcttcgatgatccttgt

SEQ ID NO: 254922 - DNA, 462 bp, Homo sapiens
cagtttgtgaaaagactagagaattgactcccaaactttttgatctaaggtctcctttacactctgaaaaattaaggaccctcaaaagctttctaaattttatatctattaatagttatgatattcaaaattaaaatgaaattttttaaaatattaattcattttaaaataataaacctattacatattaacatacataacattttcaaaaaattaatgagtgtcrttgttttacattttgcaaatctttttaatgtttggcttaattgaagaaagctggattctcatctctttctatattctgtcagttgtggtatcacacatcatgtaacctctcaattactccactgtatacgcatgagagaatgagaatgaaaaaggcaaataacattttagtattattacgaaaacagttttgattttatagactccctgaaatggtcttaaagaccccaggggtgc

SEQ ID NO: 254923 - DNA, 601 bp, Homo sapiens
tatttatgaatgtgattagtttcatcataaccctgtgctaatgtttgaaaaccttaagtgtgacattttaattctataggcctgtggactttctcctcgagacattaccactattaaacttctcaatgaaactagagacatgttggaaaggtatgtatacttcatgtagcaggaaaaatatgtgtgtatgttgaatgtacttgagactattttttagtttttcttgaacaacatggtcggtataatattatattaaaattaaatttttgactctgttccccagcctttagataagatttcctactcaaactggagggaagcagggatttcttagggtaactcagctactaactctactatctgaattcatcgagttccagtcttttgtttttcctcagtaggattgtccacttttttsttattcagatttccacctcatcatttcatgaagctctggagaaggtcatcagtgatcttttgccatatccaatgaacctgtaatgttcatcttacttgacctttctctgatatttgacactgcctttcttgaaattctttgctcacatgactttcatgacagtataatctatatttttctccc

SEQ ID NO: 254924 - DNA, 500 bp, Homo sapiens
attctttttaattttttattctttttctttcctctttttgtctgaatgggttatttcaaaagacctgtcttcaagttcaaaaattctttcttcgacttgatctagttcattgttgaagatcttgattatatttttttcattcatggaatctttcagttccaggatttctgtttggttcttatgcatgatatttatctcattgttcaatttctcattccaaacataaattgtttccctgatttctttgtatcatttttctgtgttctctttcatctacctgagttttcttaggatcaatattttaaatttttttgaggcatttaataatttctttttcttaggcgtctgttactgatgaattattatgtccttttggagrtatcatgtttcctttctttttcatgtttcttgtgtccttacattaatatctgcacatctgatgtaaaagtcactttacagtctcttcttccaatattatggattggctttggtagggtaag

SEQ ID NO: 254925 - DNA, 463 bp, Homo sapiens
cacacatgcatgcacacatacatgactataaataactagaaaaatggtaaaatataataaaaaacaattttcagacattaatcagaactgtttaggcctgtgatctctgaagaaagggaaataaacgatgtgagccctctgtgagcactggctttttgcctagaggcaattcccagattatagcactaagaggagaatcccaaacaaagcctggtggtctcactgggttaaggagaccaaagttcagggagactkaagtgactagaatttgtggtgaagagaaagagctccagaaatctgtctggcatcccctctagtctttggctgactcagtctgcacatgaattaggtaaaactctacaattttggggaaagaacagttgctgaggcaccataagctgaataaatagaagagttccataaggccagaaaccattcaagttaccactagccagagtgaaga

SEQ ID NO: 254926 - DNA, 595 bp, Homo sapiens
aactgtttaggcctgtgatctctgaagaaagggaaataaacgatgtgagccctctgtgagcactggctttttgcctagaggcaattcccagattatagcactaagaggagaatcccaaacaaagcctggtggtctcactgggttaaggagaccaaagttcagggagactgaagtgactagaatttgtggtgaagagaaagagctccagaaatctgtctggcatcccctctagtctttggctgactcagtctgcacatgaattaggtaaaactctacaattttggggaaagaacagttgytgaggcaccataagctgaataaatagaagagttccataaggccagaaaccattcaagttaccactagccagagtgaagagggctcattgaacatacagggcattcagtaaagaccctggaagagtcagatgtttgttacaaatcttgagtaaaggatactctagacccactcttaaaaagctttaaaagaagcctcaaaattattaaactaatctttagcaatttaaccacctgccagaataaatcacaattctctttaaggaagacaaaaaaaaaaatccaacactcaagacata

SEQ ID NO: 254927 - DNA, 537 bp, Homo sapiens
tatgtaattgggcacccacaaaaagcggagaaaaaggggagaggaaggaaaaatatatgaagaaataatggcagaaaatgtttcacattggttagaaactataaacccccaaatccaaaaagctcaacaaaccccatgcagaataaaaaaccaagaaaacttcaagagaaataataatcatattgctgaaaacaagtgataaagagaaaaatcttaaacgcatccacagaaaaaaaggtacacttagagaggaacaaagataaaaattattatagatttctcatcagaaatgatgcaagcccaaagaaatggaacaatatctttaaagtgctgaaaaaacctgtcaacctagaattacatayccagagaaacatttttcaaaaattaagacaaaagatttttacagacaaacagaagttgactctttgtcaacaaacttgtgctataggcagaaggtaaatgcaaccagacggaaacttggatctctacacagaatgaagaacattaaaaatggcaaatctgcagttacatataagt

SEQ ID NO: 254928 - DNA, 639 bp, Homo sapiens
gcctggcaaaaaatatttgtctggagctctacatattttagacattcctgctaatatcaaaaccaaacaaaccaagcaaaaaagaaacctacagagcggcatccctcaagatcataaacacaaaaattcttaacaaaacattagcaagttgactccagcaatataaaaaaaaagataatatgccacaaacaagtagcgtttatcccagtaatacattatttgtttgctgtcataaaataaatcaatttgctatattagttgaataaaaaagaaaaccatatgataatctcaacagatgcagaaaaagcatttgacaaaattaaatatctattcatgaaagagttgttttatgtctggcagacacaggggccttctgaaatagagacaggcctgatcctggggtgagayggattcataatggtatgtctatcacatatcttccagaaactgaggggactgagattgtaggaccagtgacattctgaagagcccactgcagtcggtggcagtgctaagattcagtgttttcctgtctgtccccagagcatctctttccctataccacagtgtctccatataaagaatgactgatttcatagagtgaaactgcatttagtactattaggaaaaaaagaaaac

SEQ ID NO: 254929 - DNA, 638 bp, Homo sapiens
taatttttttttctataactgaatcaggagcagatacagtgtggtaggacagcagakttaagtatgttggaggccctatttaagaaaaaatgtaatatgaaattagtaacatgaacatttcttcaaaaaattattagttttacaaagctgacaaatgccacacacaaaaatccagaacaggggcagggtgtggtggctcatgcctgtaatcccagcactttgggaggccaaggtgggcagatcacctgaggtcaagagttcgagaccagcctggccaacatggtgaaaccacatctctactaaaaatacaaaaaattagccaggcatggtggtgtgcgcctgtagtcccagctactcaggaggctgaggcatgagaattgcatgaacctgggaggtggaagttacagtgagccgagatggtgccactgacctccagcctgggtgacagagtgaggctctgtttcaaaaaaaaaatccagaacagtaacaaatattctcattcactgagtgcctgccacacctctatgctactttttccttgcctttcttttttgttggagttgggattgtatatattttattggctttatattatgattttcaatagagaaaatagaaagataatttaatttttttct

SEQ ID NO: 254930 - DNA, 638 bp, Homo sapiens
taatttttttttctataactgaatcaggagcagatacagtgtggtaggacagcagatttaastatgttggaggccctatttaagaaaaaatgtaatatgaaattagtaacatgaacatttcttcaaaaaattattagttttacaaagctgacaaatgccacacacaaaaatccagaacaggggcagggtgtggtggctcatgcctgtaatcccagcactttgggaggccaaggtgggcagatcacctgaggtcaagagttcgagaccagcctggccaacatggtgaaaccacatctctactaaaaatacaaaaaattagccaggcatggtggtgtgcgcctgtagtcccagctactcaggaggctgaggcatgagaattgcatgaacctgggaggtggaagttacagtgagccgagatggtgccactgacctccagcctgggtgacagagtgaggctctgtttcaaaaaaaaaatccagaacagtaacaaatattctcattcactgagtgcctgccacacctctatgctactttttccttgcctttcttttttgttggagttgggattgtatatattttattggctttatattatgattttcaatagagaaaatagaaagataatttaatttttttct

SEQ ID NO: 254931 - DNA, 599 bp, Homo sapiens
ggtgagggggcctgagacaagggtgtgggtgtgggttcagagtggacctgggattctgccaggccccctgctaaccttgaacagtattctattgtgctccccaccatacgggatagcaatggaaagmagttatttctggacattggacattttactgttaaattgtttgaagattaagtgattagcatattggtaattgccagagacccgaaaactctgtccccaacatcctccaacattctcttatttctgtcactgtcccagccatgggacagtggaaaggggcaatcttaagaaacagcagagagataagaaaagagagaaatgaacagaataacacctttcattgccttttgtgacatattcccaagctgacctttctgaagctgaaagaaaactattctgtctgaaacaaaaggaaatgaatagtcagttcaaatagcatagttcttaggaggagctccagctgtagatccagacaggcatggctctgattcccagttctgccattcactggctgggggaccctgttactaacctctgtaaacctcagttttctcatccaaaaagtggagataataatgtctccttcctcgcag

SEQ ID NO: 254932 - DNA, 599 bp, Homo sapiens
ggtgagggggcctgagacaagggtgtgggtgtgggttcagagtggacctgggattctgccaggccccctgctaaccttgaacagtattctattgtgctccccaccatacgggatagcaatggaaagaagttrtttctggacattggacattttactgttaaattgtttgaagattaagtgattagcatattggtaattgccagagacccgaaaactctgtccccaacatcctccaacattctcttatttctgtcactgtcccagccatgggacagtggaaaggggcaatcttaagaaacagcagagagataagaaaagagagaaatgaacagaataacacctttcattgccttttgtgacatattcccaagctgacctttctgaagctgaaagaaaactattctgtctgaaacaaaaggaaatgaatagtcagttcaaatagcatagttcttaggaggagctccagctgtagatccagacaggcatggctctgattcccagttctgccattcactggctgggggaccctgttactaacctctgtaaacctcagttttctcatccaaaaagtggagataataatgtctccttcctcgcag

SEQ ID NO: 254933 - DNA, 577 bp, Homo sapiens
aaaagggaaaactggaataaactgttaaaaagattattttcaagggggttatgaggttgctcgccccattccatgatcttagacatcttgtagggacggtcaaccactgataataccagctcctattacacatctcttttaggtgttcttcaagctaatcaaccacaagtcaaggtcacctttcagacattccataccaccatgtcctcaactcttgtgttgcctgcaaggaccaatccagatcaggtgataaaaaaaaaatttgtcctcaaataaatttattattattaattatttcacatattaataaatgtaaaatttgattaataaagagtagtcattgttcctctaatatttttaaaatctcyttgcctttttgctctactttcttggaaatttcttgattttatcttctaattcttcaattgagttcttcaactgctaacagctttttaatttccaaaagctcttttttagtttcctggatgttcctatcctatagcatcctgttcttgctttctgcatacaatgtcttcttttgtttcttgaggatatcagtaaagttttaaatacattc

SEQ ID NO: 254934 - DNA, 577 bp, Homo sapiens
aaaagggaaaactggaataaactgttaaaaagattattttcaagggggttatgaggttgctcgccccattccatgatcttagacatcttgtagggacggtcaaccactgataataccagctcctattacacatctcttttaggtgttcttcaagctaatcaaccacaagtcaaggtcacctttcagacattccataccaccatgtcctcaactcttgtgttgcctgcaaggaccaatccagatcaggtgataaaaaaaaaatttgtcctcaaataaatttattattattaattatttcacatattaataaatgtaaaatttgattaataaagagtagtcattgttcctctaatatttttaaaatctctttgcctttttgctctactttcttgraaatttcttgattttatcttctaattcttcaattgagttcttcaactgctaacagctttttaatttccaaaagctcttttttagtttcctggatgttcctatcctatagcatcctgttcttgctttctgcatacaatgtcttcttttgtttcttgaggatatcagtaaagttttaaatacattc

SEQ ID NO: 254935 - DNA, 609 bp, Homo sapiens
aatatggaaggactctgaattttatcagctatttctttgtctgctttaaggataaaaatgcagcaataaaactccataaaaccttatgccatttttgtttattttttgcaatttcaacactatataaagaaccacacagctaaagcaaaagttttagaatgggaatgggaagtaagaaattcagaaaatgattcagggcacagaaaagaataaagcagtttctgtactatggttcttcttttgcctcaagggaagcgctgtcaactcttcctggagcattttttgcataaaatttgggttacttccaataaattaccattaggttccactgtccttgaaaatttcaccctgagattaaaaattttctgcaygtactgcttttttgtgttttgttttcagtttacacattttaccacttaaaattggtgtgtcagcagatttctgtctgaaacacatatgtgctaacacgggtaagttaactattttcaatatttctgagaaatagacaacaatttggcagaaatttaatggagaagaattttctctctcgcacactgcccctcccccgccccccaacacacaactttttttttaagaaacagggtctcc

SEQ ID NO: 254936 - DNA, 609 bp, Homo sapiens
aatatggaaggactctgaattttatcagctatttctttgtctgctttaaggataaaaatgcagcaataaaactccataaaaccttatgccatttttgtttattttttgcaatttcaacactatataaagaaccacacagctaaagcaaaagttttagaatgggaatgggaagtaagaaattcagaaaatgattcagggcacagaaaagaataaagcagtttctgtactatggttcttcttttgcctcaagggaagcgctgtcaactcttcctggagcattttttgcataaaatttgggttacttccaataaattaccattaggttccactgtccttgaaaatttcaccctgagattaaaaattttctgcacgtactgcttttttgtgttttgttttcagtttacacattttaccacttaaaattggtgtgtcagcagatttctgtctgaaacacatatgtgctaacacgggtaagttaactattytcaatatttctgagaaatagacaacaatttggcagaaatttaatggagaagaattttctctctcgcacactgcccctcccccgccccccaacacacaactttttttttaagaaacagggtctcc

SEQ ID NO: 254937 - DNA, 435 bp, Homo sapiens
tgtgcccggccccattttcacctttctaaatgaagaatttaaaaacaaatttaaacacatgtagactttaagccgagcttctcttttcatctgaggctgtgaggctccctggacctgggtgcagtttcctgggcacaggctccacatggcatctgccacaagctgggtgtgctcctgggcattctgccctctcccgaagagtttttagagcaaattcttataattctaggaaaaattactcatgttgacaaaggaaatctctgtaccycttcacttagtgataaagctgagaaaattccttttattcaaaaacatatttgtgatacatccaagcactctacttaacacgggtcattttccctcatctcataaactctgccctgtgtaaaacaacagcactccatccatccatccatccatccatccatccatcca

SEQ ID NO: 254938 - DNA, 531 bp, Homo sapiens
cctacacacagccttgctagcggacatgggtaagacagaacattaaaacaacaatagtaaatatatagcaggtcatataaagataagtgctacagcgaaaataaaatcaaataagggtgataagaattgccagaggaatgagagaagttattttatcaagaaagtcactgataaggtgacatttgattatatttttgcagctaatggaatcagccatgtgaatatttaaggaaaacgccctgaggcaagatttttttggaggggtggggtgtatttgggacyggctggggctgagcaagctggaagtcagggatgggagcagggagtcagaccataaaaggcatgggaagtattattacaaggactttggtttttaccctaacagacatcaaaagttattggaaggtttcaaatagagttgtgatgttatccagcatatgttatttgttgtttttttagagacttggtttctctctgtcgcccaggctggcatgcagtggtgtgatcatagctcactgcagcctccaactc

SEQ ID NO: 254939 - DNA, 581 bp, Homo sapiens
caaattaaaaccacagtgagataccacctcacaccagtcagaatgcctagtattataatgtcaaaaaaacaatagatgttggcaaggatgcagagaaaagggaactcttacacactgttggtgggaatgtaaattcgttcaacccctatggaaaacagtacagagatttctcaaagaactaaaaatagaactacctttcaacccagcaatcccactactgggtatctacccaaaggaaaaggaatcattatatcaaaaagacacctgtactyctatgtttattgtaacactattcacaagagcaaagtcacaaaatcacataagtgtccatcagcagttgattgggtaaaggaaatgcagcatttatacatcatggaatactacgcaaccatagaaaaagaataaataatgtccttttcagcaactcagatggagctggaggccattatcataagtgaaataactcagtaacagataatcaaataccacatgttctcacttataagtagaagctaaacaatggcacacatagacataaagatggaaaaaatagacactggaggctccaaaagaggggagga

SEQ ID NO: 254940 - DNA, 576 bp, Homo sapiens
tcaacccctatggaaaacagtacagagatttctcaaagaactaaaaatagaactacctttcaacccagcaatcccactactgggtatctacccaaaggaaaaggaatcattatatcaaaaagacacctgtactcctatgtttattgtaacactattcacaagagcaaagtcacaaaatcacataagtgtccatcagcagttgattgggtaaaggaaatgcagcatttatacatcatggaatactaygcaaccatagaaaaagaataaataatgtccttttcagcaactcagatggagctggaggccattatcataagtgaaataactcagtaacagataatcaaataccacatgttctcacttataagtagaagctaaacaatggcacacatagacataaagatggaaaaaatagacactggaggctccaaaagaggggaggataagagggttgaaaaattacctattggttgcttgaaattgcttatagggggagggtgtgcaacacagaaatcaacaaacactacaaatcaaagattttcttgttttgctagagagtttcttaaccagcacacc

SEQ ID NO: 254941 - DNA, 590 bp, Homo sapiens
taaaggaaatgcagcatttatacatcatggaatactacgcaaccatagaaaaagaataaataatgtccttttcagcaactcagatggagctggaggccattatcataagtgaaataactcagtaacagataatcaaataccacatgttctcacttataagtagaagctaaacaatggcacacatagacataaagatggaaaaaatagacactggaggctccaaaagagggkaggataagagggttgaaaaattacctattggttgcttgaaattgcttatagggggagggtgtgcaacacagaaatcaacaaacactacaaatcaaagattttcttgttttgctagagagtttcttaaccagcacaccactgcgggaagtccttacttctgagccttcccaaagctctgtagcacacatcaactgtttctttcatattctctttctgcagattgttcgatttcagttgtccatattctgctgtcagtcaccaattaatctcctttcttgatcctagaaagacttgttgacatctatcaccaattgtcatctcctctcccaccaatcagcctatattactgatatggttta

SEQ ID NO: 254942 - DNA, 590 bp, Homo sapiens
taaaggaaatgcagcatttatacatcatggaatactacgcaaccatagaaaaagaataaataatgtccttttcagcaactcagatggagctggaggccattatcataagtgaaataactcagtaacagataatcaaataccacatgttctcacttataagtagaagctaaacaatggcacacatagacataaagatggaaaaaatagacactggaggctccaaaagaggggaggataagagggttgaaaaattacctattggttgcttgaaattgcttatagggggagggtgtgcaacacagaaatcaacaaacactacaaatcaaagattttcttgttttgctagagagtttcttaaccagcacaccactgcgggaagtccttacttctgagccttcccaaagctctgtagcacacatcaactgtttctttcatattctctttctgcagattgttcgatttcagttgtccatattctgctgtcagtcaccaattaatctcctttcttgatcctagaaagacttgttgacrtctatcaccaattgtcatctcctctcccaccaatcagcctatattactgatatggttta

SEQ ID NO: 254943 - DNA, 590 bp, Homo sapiens
taaaggaaatgcagcatttatacatcatggaatactacgcaaccatagaaaaagaataaataatgtccttttcagcaactcagatggagctggaggccattatcataagtgaaataactcagtaacagataatcaaataccacatgttctcacttataagtagaagctaaacaatggcacacatagacataaagatggaaaaaatagacactggaggctccaaaagaggggaggataagagggttgaaaaattacctattggttgcttgaaattgcttatagggggagggtgtgcaacacagaaatcaacaaacactacaaatcaaagattttcttgttttgctagagagtttcttaaccagcacaccactgcgggaagtccttacttctgagccttcccaaagctctgtagcacacatcaactgtttctttcatattctctttctgcagattgttcgatttcagttgtccatattctgctgtcagtcaccaattaatctcctttcttgatcctagaaagacttgttgacatctatcaccaattgtcatctcctctcccaccaatcarcctatattactgatatggttta

SEQ ID NO: 254944 - DNA, 535 bp, Homo sapiens
tcagaaggaaggagaaaggattggggtgtcagcaccctagtaactgtactgggtgggtattaagatgcaaaggccagagcatgatcaatagtctcattagctgtttacaatgctaaagtcaccaggagaaataaaagttgaatgtctatttatttaatggcatttgttaagctcctcatcaaatgatgtgcccagtatgtgctagattctgaatatgaaacggtgagagraaaaaaatgtgcttcctgtcctccttgagctaacagtgttgggtctaaatattgcttataaacagtactgttggttttgtggtagtggagaacccaaacacttctgtagttttaagacttgtccaattatgtaatgggccacagatcacacacaagagaatactcagagacctgtatggcagatttcacatccaacctaaagattcactggcttaactttgagtacagtcacttgaattacttactgttacttgaattagttacttgaatagctactaaataggaactggtttaaatagtcatga

SEQ ID NO: 254945 - DNA, 559 bp, Homo sapiens
gtaataattattttatgtgttactaacatcctccttacccaacacatttctttgagtaggcactgaatctggtccaaataaccatttttaaacaaattgccaatttggattttatcaatgcagggtggaaaacttccatccttatatttgcaactgctgaaagtgattagtgcacacatagacacagtcatggctgaaagaacattagcattttaggttgaaatgttttcctgcattttctataaytgcaattaaagagagagactgtgatttcttattggtcttcagactgaagactgatgccaaagcctttattcataacagactggcgtggacacgtgctttacttgtgtcctcaacctcctgctattctaccatattgtttctggacatactcacagccattatcaagggctccttctatgttccctgcttgatatttaccctaatgttgacctttatttcagtagctttgcctatgttaattatcagagacaagggggaaaaatcaaacatggtcttcactcaaacttcattagaagtctcaaataaaagaatt

SEQ ID NO: 254946 - DNA, 583 bp, Homo sapiens
ctctctgaaccatgtcctatctgtgtrtgagcgaggtactaatctccctgaacaatattttcaaataaactgtttttcatgactaagatacagttttgtcacacagagcgagattacgagtagaagccacagatgagaaagagagaaaagatgggaaattctattttaacaacccctaatagacacatctggatatacatacagtctctttattttttaattgacacattgtaattgtacatacttatggagtacaatttgatgttttaacacgtgtagatattggataatgaccaaattagggtagttcatatatccatcacctcatgcatgtaattgtttctttgtggtgaaaccactcaaaagcctctcttctattttgtaatatacaatatcctaccgttaagcatagttgccctattttgcaatagagccccagaacttattccccccatctaactgtaactttacacttgttgacaaacgtctccccaccctcccttcccaatctctggtaactactgctgtaatctctgcttctatgataactttttaaaatagatcccacacgaataagatcata

SEQ ID NO: 254947 - DNA, 558 bp, Homo sapiens
atttgtctcaattctcaatataccttacttaacatgccatcagtttaatatcatatacctccyagataaaaagcagatctagttcaactatttatagagtattgatatccaggaaccatccttgaggggcttacagtaagtttggggaagcaaatagggaaccctgtgacaagtacagtcacagactcttcagagtcctctacgagggggaaagagtgtgatggggtaggggagggcagggacttgggatagcccagagggaggaggggagggaagagaaaggaggatggaatgtgaacaaagacttgtgtaatcagaggggtaagccaaggtaggaaggggtgatagcacttaggtctaccagtggcaaaacagagctgctacggggggataaagcaaacctttcccataacaaagtgaaatattattctttctagtacagccaaagcttttcttggttaaaaaaatacagaaggagaatttctggacactgcatactacataattttagtagaaattaaatactttaaaggctaaaaatattttaaaaatcattcc

SEQ ID NO: 254948 - DNA, 558 bp, Homo sapiens
atttgtctcaattctcaatataccttacttaacatgccatcagtttaatatcatatacctcctagataaaaagcagatctagttcaactatttatagagtattgatatccaggaaccatccttgaggggcttacagtaagtttggggaagcaaayagggaaccctgtgacaagtacagtcacagactcttcagagtcctctacgagggggaaagagtgtgatggggtaggggagggcagggacttgggatagcccagagggaggaggggagggaagagaaaggaggatggaatgtgaacaaagacttgtgtaatcagaggggtaagccaaggtaggaaggggtgatagcacttaggtctaccagtggcaaaacagagctgctacggggggataaagcaaacctttcccataacaaagtgaaatattattctttctagtacagccaaagcttttcttggttaaaaaaatacagaaggagaatttctggacactgcatactacataattttagtagaaattaaatactttaaaggctaaaaatattttaaaaatcattcc

SEQ ID NO: 254949 - DNA, 558 bp, Homo sapiens
atttgtctcaattctcaatataccttacttaacatgccatcagtttaatatcatatacctcctagataaaaagcagatctagttcaactatttatagagtattgatatccaggaaccatccttgaggggcttacagtaagtttggggaagcaaatagggaaccctgtgacaagtacagtcacagactcttcagagtcctctacgagggggaaagagtgtgatggggtaggggagggcagggacttgggatagcccagagggaggaggggagggaagagaaaggaggatggaatgtgaacaaagacttgtgtaatcagargggtaagccaaggtaggaaggggtgatagcacttaggtctaccagtggcaaaacagagctgctacggggggataaagcaaacctttcccataacaaagtgaaatattattctttctagtacagccaaagcttttcttggttaaaaaaatacagaaggagaatttctggacactgcatactacataattttagtagaaattaaatactttaaaggctaaaaatattttaaaaatcattcc

SEQ ID NO: 254950 - DNA, 567 bp, Homo sapiens
aatgcaaacaattcagcagtggggtgcatttggagtctggtttcctgtcacccctattgttcccaggaaggacaaaaaaatacattctgaaggacaccacgtaactattttatgcccctcctgcacatataaacttcaaaataatatttctggggctcatgacaaaccatgagccattagagtgagcctttcttgtctgagatatgaaactgtcagtaaataacctggtaagaaaactttgtcctagtcctctgtctcatttaattccagtaagaaaaatgttatcgcaatgagttgaacattttggttaaaccaaactgttataaatttattarttaccctttataaattcatgtatatttgaatttatcctgcggacacgagaatttccagtaaaagtttttgtcatttgatttagaactccacaatgtcttcctggaaactataaatgtagacattgatgacaacagattttaagtgcccaaacagagaagctaaatgtcaattgattctgcagctttttctgacacagagcaagtgaattagatgatggaatatcccagacac

SEQ ID NO: 254951 - DNA, 560 bp, Homo sapiens
caaatacatagtttgtcagggtacaagtagctgaaatcttcatagaaaataatttggctatatatatccagaatatcttaaaataactctctaccttcaaagtcacttttacggttatctatcttttaagaaataaaggttaccaacaaagatttaagttcaagaatgctttctcaatactatttctaatggttttaaaaaatgattaaaaatccatatctatagtggtagaacattattcatacattaaaatcatgtcttttatctagtgacatgagaacattctcacaacttaatgaaaagtgacaaaagattaaaaaaaaaaaaaaatttgttgagacagggtctcactccattgcccaggatggagtgcagtggtgcaatcatggctcactgaatcctccacctcctgggctcaagcgatcttccaacctcagcctcctgagtaactgggaccataggcatgcaccatcatgctcggttaatttttttaayttttatttttaatagagacgaggtcttgctatgttgcctaggctagattaaaaattacgtacagt

SEQ ID NO: 254952 - DNA, 609 bp, Homo sapiens
tgttgatgttttacttatgtttatgttagacttaatttatatttgtagaatctactgtttctgattatttagagaatgattgaaactgaaagaaattttraagacattaagtgaacattatttgttctaatgggtttctagtgaatttccttcaagatggggcatagagattgaggggagaggttttctaggagagtctcaaacaggaagaccacccatataagtgtttattcctcttggttgtcagtgcatcagtaaagcttatttctttcttttttctagcaggcagatagaaattcctgtcactttctccttttttatggagtaggatgtgatactccttctagtggaaataccagtcaaatgtccgtgggtcttgaagtgtcactgcatactcctgagcctctctccagaagggaaaagggaactcctctatggtcagcttcttttgtaattttcctgtatcatctcgtgtgctctatttgttttctgaatgaactttggtaaatttcatccaggtaatatagtgtaatagtgaaaaactgcttagactctagttctatcactgctctttatggaactttgggcaaattcttaacacccttgttc

SEQ ID NO: 254953 - DNA, 609 bp, Homo sapiens
tgttgatgttttacttatgtttatgttagacttaatttatatttgtagaatctactgtttctgattatttagagaatgattgaaactgaaagaaattttaaagacattaagtgaacattatttgttctaatgggtttctagtgaatttccttcaagatggggcatagagattgaggggagaggttttctaggagagtctcaaacaggaagaccacccatataagtgtttattcctcttggttgtcagtgcatcagtaaagcttatttctttcttttttctagcaggcagatagaarttcctgtcactttctccttttttatggagtaggatgtgatactccttctagtggaaataccagtcaaatgtccgtgggtcttgaagtgtcactgcatactcctgagcctctctccagaagggaaaagggaactcctctatggtcagcttcttttgtaattttcctgtatcatctcgtgtgctctatttgttttctgaatgaactttggtaaatttcatccaggtaatatagtgtaatagtgaaaaactgcttagactctagttctatcactgctctttatggaactttgggcaaattcttaacacccttgttc

SEQ ID NO: 254954 - DNA, 609 bp, Homo sapiens
tgttgatgttttacttatgtttatgttagacttaatttatatttgtagaatctactgtttctgattatttagagaatgattgaaactgaaagaaattttaaagacattaagtgaacattatttgttctaatgggtttctagtgaatttccttcaagatggggcatagagattgaggggagaggttttctaggagagtctcaaacaggaagaccacccatataagtgtttattcctcttggttgtcagtgcatcagtaaagcttatttctttcttttttctagcaggcagatagaaattcctgtcactttctccttttttatggagtaggatgtgatactccttctagtggaaataccagtcaaatgtccrtgggtcttgaagtgtcactgcatactcctgagcctctctccagaagggaaaagggaactcctctatggtcagcttcttttgtaattttcctgtatcatctcgtgtgctctatttgttttctgaatgaactttggtaaatttcatccaggtaatatagtgtaatagtgaaaaactgcttagactctagttctatcactgctctttatggaactttgggcaaattcttaacacccttgttc

SEQ ID NO: 254955 - DNA, 533 bp, Homo sapiens
acacacacacacacacacgcatacacagtttattgcgtcattgggttttttacatgaaaytacccaagttgcaaatatacgtctaccacccttgactctcaggatagtgcagcaggatgcagcggagccccccgacttgccgacaagcgcagaccagtctagaagtggccctgtacatgtttctgcagaaccctgacactgaagctgttctggttgccatgtcctgtttctgccacctctgtgaggaagcagatacccagtgtggggtggatgaagtgtcagtgcataacctcttgcccaactctaacacattcatggagtttgcctgtcagcaatgtgatgtcaacaggtaaatgggaatagtggtttttttactcaacctgcctgaagcacatggcatctgattgtgagaatgtatttaaggttactattctgtaagtttacaggggaaattcaagtagcttacttgaaatccttttctgaacaaagtaggatgaaaataaaaagcatttgaaataaattgtgagtctccc

SEQ ID NO: 254956 - DNA, 546 bp, Homo sapiens
ggctgtttctttcagagtatttaaattaggtactcacagtttttaaaaattgtcaaaaaattgtagaaagaagaatcatctcaatgaatggtcagcttgcttctaggaactctgatgtgtatgtgtgcctgagggtatacgtgccttgtatatgggtatgagtgtctgtgtatatctgtgtgcctgtttgactgcgtgcctgtgggtgcatgtctctatttgtgtgtttagatcagtcagtttcatctctctagggatctgtcttctgggcattgatggcaaatcattaatatatttgttctctctataggttttattgactgataccaatactcaatttgtagagsaaaccctagatataatgaagaacttgctagataatcatactgaaggcagccctgaacatctagagcaagctagcattgaaacaatgatgttaaatctggtcaggtaagccttctactgaaatgtagcagaaacatactttaagatttaagagacaagaaaaacctctcacacattgatattgatagtaattgataaaat

SEQ ID NO: 254957 - DNA, 546 bp, Homo sapiens
ggctgtttctttcagagtatttaaattaggtactcacagtttttaaaaattgtcaaaaaattgtagaaagaagaatcatctcaatgaatggtcagcttgcttctaggaactctgatgtgtatgtgtgcctgagggtatacgtgccttgtatatgggtatgagtgtctgtgtatatctgtgtgcctgtttgactgcgtgcctgtgggtgcatgtctctatttgtgtgtttagatcagtcagtttcatctctctagggatctgtcttctgggcattgatggcaaatcattaatatatttgttctctctataggttttattgactgataccaatactcaatttgtagagcaaaccctagmtataatgaagaacttgctagataatcatactgaaggcagccctgaacatctagagcaagctagcattgaaacaatgatgttaaatctggtcaggtaagccttctactgaaatgtagcagaaacatactttaagatttaagagacaagaaaaacctctcacacattgatattgatagtaattgataaaat

SEQ ID NO: 254958 - DNA, 574 bp, Homo sapiens
aatactgcctacaatggattaattaccaagagtcaaaaaaccacaaagcatcttttgttttcaagtatattctgattaaatagtacaacatgataagcgggaactttttttaaaagaagaaataaaactgtaagagcctgtttctgagaacttttaaaaatatgctgtgtaagacagcatcagggtgatttagmaaataattcaaaggggtggtgggaaatcatgaagatggtgcaaggggtggcctggaaaatggtgcttgttcgtgctgccctcagtcgaggctggttcctagaaagcctttctggaaatgttgtgagctcttccttaataatagatatgatgcttgcattgccttccctatcattgtctttttttcttgcctcattttaccttccttttgaaaactcttctgtgacattatttggtcccatttaccataacatacattcatggtcattgagccttagagacaacatgatacgtatagagaccactgattttggaatctcaaggatcatgtttagacttagttctgccactcattagctatagacttaatctttaccagttt

SEQ ID NO: 254959 - DNA, 306 bp, Homo sapiens
attgtctttttttcttgcctcattttaccttccttttgaaaactcttctgtgacattatttggtcccatttaccataacatacattcatggtmattgagccttagagacaacatgatacgtatagagaccactgattttggaatctcaaggatcatgtttagacttagttctgccactcattagctatagacttaatctttaccagtttcctggatttaacagtgtttaacatccatgaccattaagttagtagacatacattgttagtcaatttgctggccacaggtggcagtgtgtaggaaaca

SEQ ID NO: 254960 - DNA, 306 bp, Homo sapiens
attgtctttttttcttgcctcattttaccttccttttgaaaactcttctgtgacattatttggtcccatttaccataacatacattcatggtcattgagccttagagacaacatgatacgtatagagaccactgattttggaatctcaaggatcatgtttagacttagttctgccamtcattagctatagacttaatctttaccagtttcctggatttaacagtgtttaacatccatgaccattaagttagtagacatacattgttagtcaatttgctggccacaggtggcagtgtgtaggaaaca

SEQ ID NO: 254961 - DNA, 306 bp, Homo sapiens
attgtctttttttcttgcctcattttaccttccttttgaaaactcttctgtgacattatttggtcccatttaccataacatacattcatggtcattgagccttagagacaacatgatacgtatagagaccactgattttggaatctcaaggatcatgtttagacttagttctgccactcattagctatagacttaatctttaccagtttcctggatttaacagtgtttaacatccatgaccrttaagttagtagacatacattgttagtcaatttgctggccacaggtggcagtgtgtaggaaaca

SEQ ID NO: 254962 - DNA, 306 bp, Homo sapiens
attgtctttttttcttgcctcattttaccttccttttgaaaactcttctgtgacattatttggtcccatttaccataacatacattcatggtcattgagccttagagacaacatgatacgtatagagaccactgattttggaatctcaaggatcatgtttagacttagttctgccactcattagctatagacttaatctttaccagtttcctggatttaacagtgtttaacatccatgaccattaagttagtagacrtacattgttagtcaatttgctggccacaggtggcagtgtgtaggaaaca

SEQ ID NO: 254963 - DNA, 331 bp, Homo sapiens
ggtaccttttctgcgtcaagcagtgggttagaggctagactcagagatgagtaaaaccagaccccaccccctgacctagcccttcttgctcaagaagccaacacttagtgagagcatcggaaagcctggtgggcttctgagccctgggactggagaagtgggggtcccaaaasccattacaagatcaaagagaataacaacaggaaactgccagaaatacccagtcatgggcaaaggagcctgtccacataccacttgatgcccaagaacccgtgtccttacttgagagtacatgtgtgttcacaagcatgtggagcccaagggcctgtgc

SEQ ID NO: 254964 - DNA, 331 bp, Homo sapiens
ggtaccttttctgcgtcaagcagtgggttagaggctagactcagagatgagtaaaaccagaccccaccccctgacctagcccttcttgctcaagaagccaacacttagtgagagcatcggaaagcctggtgggcttctgagccctgggactggagaagtgggggtcccaaaagccattacaagatcaaagagaataacaacaggaaactgccagaaatacccagtsatgggcaaaggagcctgtccacataccacttgatgcccaagaacccgtgtccttacttgagagtacatgtgtgttcacaagcatgtggagcccaagggcctgtgc

SEQ ID NO: 254965 - DNA, 331 bp, Homo sapiens
ggtaccttttctgcgtcaagcagtgggttagaggctagactcagagatgagtaaaaccagaccccaccccctgacctagcccttcttgctcaagaagccaacacttagtgagagcatcggaaagcctggtgggcttctgagccctgggactggagaagtgggggtcccaaaagccattacaagatcaaagagaataacaacaggaaactgccagaaatacccagtcatgggcaaaggrgcctgtccacataccacttgatgcccaagaacccgtgtccttacttgagagtacatgtgtgttcacaagcatgtggagcccaagggcctgtgc

SEQ ID NO: 254966 - DNA, 331 bp, Homo sapiens
ggtaccttttctgcgtcaagcagtgggttagaggctagactcagagatgagtaaaaccagaccccaccccctgacctagcccttcttgctcaagaagccaacacttagtgagagcatcggaaagcctggtgggcttctgagccctgggactggagaagtgggggtcccaaaagccattacaagatcaaagagaataacaacaggaaactgccagaaatacccagtcatgggcaaaggagcctgtccacataccacttgatgcmcaagaacccgtgtccttacttgagagtacatgtgtgttcacaagcatgtggagcccaagggcctgtgc

SEQ ID NO: 254967 - DNA, 544 bp, Homo sapiens
gaatccaacaatatattttttaaaagtattacatcacagcaaagtgggatctgctccagacatacatggctgtctcaagattcaaaaatcaatcacacaatctaacaaatcaacagactaaaagtgaaaaatcatatggtcatatcggtggttgcagaaaaagcattagataaaattgaataytattcacaataaaaaaaaaactatcagtacactaggaatagaagggaacttactcaatgtcataaaaagcacctaccaaaaaacctacagttgatgtcatacttaacagtgaaacaacaaatgtttttgctgagctcagaaacaagtcaacaatttcactctcaacactctaacacagtactgaaacacagtactgaaagttgtaactactgcaataaggcaaggaaaagaacttaagggcatactgtctagaaaggaagaaataaaactccctctatttgcagatgacatgctggtatacggaggaattccgaaggaatctttaaaaaaaaaaaaaaaagaagcagcagcagcagccccc

SEQ ID NO: 254968 - DNA, 563 bp, Homo sapiens
tccccaataaaaagttctttttttaaatttttaccaatttgaaatatacaaacctttccatgtacatcatacagtccaatatatacttttattaatttagtcttatgaatgttttaaaatcacaaagcacataaattttacaaaataactttattcaaactttacctacatcttcaccaagtatcatctcgttactttctttttgagtgacctgtaagtatcatgaagtgaataatctttacttccatttaagttgttctgagaaacaatacttttagaagtcataataccatcattgaaaatgtttttccaagccacaaatatccattcacatgattctaagatggttggttttttaattgtgctacargtacatactatgatcttcacaatgtaactgcttacatatctcttttaaaagtgattgtaaaggcttttttcacaacaacttataagagtataactccctgcccacaaataatttctaatttgtttaaactttttactatacccttttatctattccctcaggaaacctctacagacttttaaaacaagtactg

SEQ ID NO: 254969 - DNA, 383 bp, Homo sapiens
ttcattcacaagtcagacaatttactaaagcaaacaaaatcaagtcactaccccaacttaaagccattcaatggcttcccactacccttggccttaaaatcaaaatctttaacaaatcttacaggcctttccacagtttggctcttctttagcctcaactcacatgagacaagtggacactctttgaacatcaaactatctcaggccttgatacattctttctaccactttctccccatccctaacttccttttaataggtgagataatggagtggactwaaacattgagaaaatgtttgaaaaagtttgctatggtttaaatgttcaccccttccaaaatttatgttgaaatttaattgccagtgtattgagaggtggggcc

SEQ ID NO: 254970 - DNA, 589 bp, Homo sapiens
ccttggggaatctgcaattcattctgaatatcaaacatatcaaaaatttagaaatttattgaaaataatttatagcttattggcaaacaaaatacatgaggaatgtgaataaagactaaaaggaataaaaaagattaattaaaaaaggcttcatagaagcagtatatgaaaaagattctagctatatttggaaagtataaaaagaagtatataaagaaggaagagggtactcagggaaaagaatggcacatatgcagaaagcagtctgtactgagaagtaatgaaaaaggaaactcattaaaagggaagaaggaaaaatggggttgtcttcacgatatagtcagtggattaaacaggagaatgaaatgagataaatcagggtaaacagttcttgcaactaaaagactcacgacaattatctatgatattcagagttactgcatactgactttayaggttaccaagcctgaagacgtaagggttaatgcatagatctccaatatttagtgccaactccataccgggcagcccacagggtactagacaggccaaagaattgtacgaaatgtgacatctgctctcaagactc

SEQ ID NO: 254971 - DNA, 550 bp, Homo sapiens
gcattcatataacaaagtacacaaagtgtattgctcaaataattttaataaatgaatacacctgtgcatccatcattcaggtcaaaatatagaacgttaccaacatcctagaatgttctcttatgttaatacctcctcctcaaagataactactgttgtgactttcattttaactatcttagaagttcacataaataaaatcatagtgtacactcttttgtatctggcttctttggctcaacatatttctatgagattcatctatgctgttgcatgaagcagttgttcattctttttcttactataggctatttcaatttaagaaaacascaaaatagaagcacttgtagaacgacaaagtaaggacctctgaaaatgtctacctctacaaaagcaaaaggacactagtaaaactggtcaaaactaactttttcaaaagtctggaaacaaaaaatttacaccaatctgagcagcattaattaaaaacacaactggattttggtaaaaacagtgagttttgtggcattttaacttgactttttaccatagt

SEQ ID NO: 254972 - DNA, 618 bp, Homo sapiens
tgtaccttcaactgattttgaaattagtatattgctttcaataataaggaaaaatgattttagaaacaaaactgtaaaaatgataaactatcttttcccagtatgcaattcatattaaattgatggtgtctgaagaataccaaactgagattttatcaatacatgcagtaccacacatttcttattttagttgctaattagtattcaggtgtgcagtggaatacataaaattaaatgctaatgctgcttcatttgtgatttaacatgtacaagttactatatgctacattaccctgtctatgcacatgtataatagttgttttttctttgcaatcataatatcttcatgtagttattttattcaatcttctaaggccatgatatgaataaatctttttggtttaaaaaatcattaccttctgtagtttacaaatgaaaaaaaatatctgagagtcatttttaaaaggcttcaattgaggacttagtttaattgacccaacrgcaaggaaattttagtttttctctctactttgtttcacttaagttgtgattaacagctacataaaattgtgagccacctaatggaagtagttttataaatattgcatgccattttat

SEQ ID NO: 254973 - DNA, 656 bp, Homo sapiens
atgataaatcctttagtacttttagttgtgaaatggtttcagtactttattacttctggattcacattctgtctggaaaaaaatcattaagaaaaatagccatttaaagtyatgctgtaaaaattagtttttaccaatttacctaaaagtaaaatccattacaattagaggccattcttcactgttagaagcctctccattcacataaacacacacatgtataagattatgagaaaattcatataaaaatatgagttgtgaatgaccaatgtgtaacagctgtatgcatgattatttgttaataaaaaaaatcccaaacaaaagcaaaccactacaagatatcacttggacattagatttcttttatttccctcaaagctaaagctggctataaagagttcatctggtggcaattttttgaatgtattttaaattggtatagtagtagacggagctatctatagaaaattgcatttggttctattgccagtgtgtgtttctctccttacattccatctgttatcagaaaactaataaaggtgcttctttatgccactgctgtactttctagaaaagggaaaataacaacgtaagtgtcaacatcctccctctctcaattaaaggaggtacaattatttcccttaaagtacatttga

SEQ ID NO: 254974 - DNA, 587 bp, Homo sapiens
atcaatttgttgaagtcacctggaagaaggggcagaattgagctaggtctaattgtagctgctctaacatacagtatctgatcctgtatgttcttcaagccagtctctctacatgatgatttttaatgctcacacacacacatccctgcaaaacttctctaccacatgaagctaagagtggagctgctatgaaggctgagtaattctcccaaggcagttctgaggtgagctttggacacagactctctgaagaaggcagagtaggtaccatcttgttcttgggactggggaaaggagatatgaatgggtatctttttcacattgttcaaaaaaaaaattacggtagcttatgtrcaatatagcatgataaaaaacaggaaattttagagtaaaattgaaataagaataggaaaagaagattcaggatggtttaggaggacttcaggagaatttgctggactgttaaactggaagaaaattgagctaattcaattttaagctaacagagaattgatcaagatacttcatatgaatggctggcctttgtctttatttttcttctcttaacagtggcaattttttttcgt

SEQ ID NO: 254975 - DNA, 441 bp, Homo sapiens
gtgtttttcttgtgagaatgtaggttgtctatttggaccattagaaaagtcagtctttggagatgaatgctctaatttgaacagggctctgcaggaacagtaacttgttggaggtgggtgcaggycatctttaagtgttcaaatagccaggggtagagaagtcccttctttgtattttctcctttcttttgtcatcacaaacatgtttgaggccataaacagatcccattgactcagccacgagtaggggagtttgaacctgtgacagccaccctacctgtttccaccacgtacatttgtgggtgcacattccagggcagaggagagaacacaaggaagggaaagctgactaatcactcattcagagatgaagccatgtagccacagaacttcattctttctttctggaaaggcataaaggtgtgcttctttgcaactttg

SEQ ID NO: 254976 - DNA, 605 bp, Homo sapiens
aacttggattttaaaaaaaaaacttgactgttcaagcaataagacaatttttagactttcaagttgctctaaccggaagcagcctataaaagctatgcagtctgcaagaaggaaatactccctagtgcccattttagacatggctagagaacctgttggataagggatagtggctgtggataaaatggtcaactcccaaagagtagaatccagrtctgcacactaaaatcttctcctacccccaccccttccccactccaggataggaggccctcacagtgcctggccagcacaattttagaattgctttaactcatgcctgctttctcttcccaaatgggaggtgttttttgatggtcattctgtgatcattctaccaatgaattttgggagtgtgtgtgtgttgaggggcagacaccttgtgtctcttttagttcatagtttgtaagaacttgaggactcttagctggacttgatggagcatctgatcatgacttagagatcctggtcttcgggctggatgtggtgattaaatggggactgggattgtctcttgtggggagggggtgattttgttctgtgtataggaggaggggctgaaacag

SEQ ID NO: 254977 - DNA, 605 bp, Homo sapiens
aacttggattttaaaaaaaaaacttgactgttcaagcaataagacaatttttagactttcaagttgctctaaccggaagcagcctataaaagctatgcagtctgcaagaaggaaatactccctagtgcccattttagacatggctagagaacctgttggataagggatagtggctgtggataaaatggtcaactcccaaagagtagaatccagatctgcacactaaaatcttctcctacccccaccccttccccactccaggataggaggccctcacagtgcctggccagcacaattttagaattgctttaactcatgcctgctttctcttcccaaatgggaggtgttttttgatggtcattctgtgatcattctaccamtgaattttgggagtgtgtgtgtgttgaggggcagacaccttgtgtctcttttagttcatagtttgtaagaacttgaggactcttagctggacttgatggagcatctgatcatgacttagagatcctggtcttcgggctggatgtggtgattaaatggggactgggattgtctcttgtggggagggggtgattttgttctgtgtataggaggaggggctgaaacag

SEQ ID NO: 254978 - DNA, 627 bp, Homo sapiens
aaaatttcaggcctaattatcactttcaaaatagaacctggaaatcagccattggtaactgaagattacagattgttttttaaaaagcaaatcttgagttcagctcaaatgttacccttaaaactggattgtattattttgccacatcaaatcaagtgcctttttggcatcaaagaaagcagctcccaagctaattcataactcaagtgctgtcaatttaggtgattctaaagctttagctttttaaaagctaaaataataaaagacaattgtgcttatattgtttctaatgacaatttkcccaggtggttttctacacagttttttgtaaagaccaagacagtagttgaaaaccaaaaataaattctttttcttcaatccatgctttattacggttacagtagaggaggtggttaaaagtacaggctctgagctcagctgcctaaagttatattccagttctcttctctttaataagagaatatttttctaaaatatgtggacaatggcctgactttattgtgtagtttgatttgtaaacaataaatattcttacagaggacaagagactgtgctaatatctatagacaaaggtggtagtggtgattgagaaagtcacatatataa

SEQ ID NO: 254979 - DNA, 588 bp, Homo sapiens
ttttccagctggcttattagattaaagtacagcaggctgactagctgcaaaaattgtgctgtgtatctatgaccacaagtacagaaatagcatcagtttttagatttaaacatccttgataatttattgaaaaatcttataaagtggatactttaagcaattatatgttcactgattaaaccagagaaactaaactttaatgaaagaaaatcagcttaactcttaagtatatcaacccaatggattccaagtcagaaaatgctaaatttaaatcctatgaaactgaaaaataagcacatgaaattgcctgtaaatatcaattgaatgtcattttgatttcttaaccagttttatatatgtaaataacatctatttgcataaagagaatattagttagatgaaaatgcaatcttacccagaaaaatttacaggaaaataatctgtagggagaaaaagggacagtgctcgttaaatcagatggaggtgaaaacrtgagtgccctgagctctcaaagatgacattcctctaattaaatgttagaagaatagtcacattttcctctactaaatattaaaatgacccttgaca

SEQ ID NO: 254980 - DNA, 478 bp, Homo sapiens
agaatttatatactacaggagagtgtagcatcctgattgtttcctttagaaaactgtgccttacgtrtgcctcgtgtaactcaaatacttatgttacttggtgaaggcaacacattagtacaagtattagagttattctggcttccccttgattggtctcagtcagggatgccactcctggaaccatagatgggtctccgtttttgctgacttccctggggctttttctggtgccatcgccaatgttgccttcatatcatttttgtcatcttccacatcaatgctcttttcctcccagagccaattggtgattctctgattctgattttgggaaacaaacaactcaaaaattaagaacctcttggaagggcatgttctgggatcctataagattctcctcctattctgatactcttgggtactgagaaaacaataagtacaaaccagcatggccactaacagtttcctgtttgttggt

SEQ ID NO: 254981 - DNA, 478 bp, Homo sapiens
agaatttatatactacaggagagtgtagcatcctgattgtttcctttagaaaactgtgccttacgtatgcctcgtgtaactcaaatacttatgttacttggtgaaggcaacacattagtacaagtattagagttattctggcttccccttgattggtctcagtcagggatgccactcctggaaccatagatgggtctccrtttttgctgacttccctggggctttttctggtgccatcgccaatgttgccttcatatcatttttgtcatcttccacatcaatgctcttttcctcccagagccaattggtgattctctgattctgattttgggaaacaaacaactcaaaaattaagaacctcttggaagggcatgttctgggatcctataagattctcctcctattctgatactcttgggtactgagaaaacaataagtacaaaccagcatggccactaacagtttcctgtttgttggt

SEQ ID NO: 254982 - DNA, 478 bp, Homo sapiens
agaatttatatactacaggagagtgtagcatcctgattgtttcctttagaaaactgtgccttacgtatgcctcgtgtaactcaaatacttatgttacttggtgaaggcaacacattagtacaagtattagagttattctggcttccccttgattggtctcagtcagggatgccactcctggaaccatagatgggtctccgtttttgctgacttccctggggctttttctggtgccatcgccaatgttgccttcatatcatttttgtcatcttccacatcaatgctcttttcctcccagagccaatyggtgattctctgattctgattttgggaaacaaacaactcaaaaattaagaacctcttggaagggcatgttctgggatcctataagattctcctcctattctgatactcttgggtactgagaaaacaataagtacaaaccagcatggccactaacagtttcctgtttgttggt

SEQ ID NO: 254983 - DNA, 540 bp, Homo sapiens
gatgaacttaatagacagaaatacagagtaatttagaggaagtaaactgctgtaaatataagtgagaagacttggctttgtgggaaaaggtgggaatcagtaaaccacaaatgaaacatgaattagccatattatacagttgttttattaaaaaccaaaactttgtagagtacattaacagaractgtatttaagagaaaggcagtcatcccttagtcatttatacaattatttattaagcacttatgtgctagttgatacttctgggtgctggaataaaataaggaaaaaatcaagatctctaccttcacgaagctcactaaagtgtggtaaatgacagagcaactaccttcaatagtctctagtttgtattctgcaaccaactgaatacagcaaatactaaaagctacttgaggtagggatccatcctatttttacctgttggatcccattccgtgcctagcacaccagcttgtaagcaatcgacatggattaaggggtaaaaacaggcccttaaatagctaaaattttgacaagtaa

SEQ ID NO: 254984 - DNA, 586 bp, Homo sapiens
tttcaatgtatttaaataattttaaatttctcaaaaatatatcgtgtatctcttgatatccttggtaccttatttatttgttgactacctattatctctcttattctctacatttacaggcataccttggagatattgcaggttcagttctagaccaccagagtaaagtgtatattgcattgaagggagttacatgaattttttttattttctattgcatctaaaagttatgtttacaccatattgtaatttattaggtgttcaataacattatgtataaaaacacaatgtatgtactttcattaaaaatacttwattgctaaaaaaaagctagtgatcatctgggccttcaatgagtcctcatctttttgctactggaaggccttgccttgatgttgatggctgccgactgatcaaagtgttagttgctgaaggttggaatatctgtggcaatttcttaaaataagacaataaagttggctgcatcagttgactttcccttttatgaatgatttctctgtagcatgtgatgctttttgatagcattttacccagagtagaacttcttgcaaaattcaagtcaatc

SEQ ID NO: 254985 - DNA, 586 bp, Homo sapiens
tttcaatgtatttaaataattttaaatttctcaaaaatatatcgtgtatctcttgatatccttggtaccttatttatttgttgactacctattatctctcttattctctacatttacaggcataccttggagatattgcaggttcagttctagaccaccagagtaaagtgtatattgcattgaagggagttacatgaattttttttattttctattgcatctaaaagttatgtttacaccatattgtaatttattaggtgttcaataacattatgtataaaaacacaatgtatgtactttcattaaaaatactttattgctaaaaaaaagctagtgatcatctgggccttcaatgagtcctcatctttttgctactggaaggccttgccttgatgttgatggctgccgactgatcaaagtgttagttgctgaaggttggaatatctgtggcaatttcttaaaataagacaataaagttggctgcatcagttgrctttcccttttatgaatgatttctctgtagcatgtgatgctttttgatagcattttacccagagtagaacttcttgcaaaattcaagtcaatc

SEQ ID NO: 254986 - DNA, 497 bp, Homo sapiens
tttacaccatattgtaatttattaggtgttcaataacattatgtataaaaacacaatgtatgtactttcattaaaaatactttattgctaaaaaaaagctagtgatcatctgggccttcaatgagtcctcatctttttgctactggaaggccttgccttgatgttgatggctgccgactgatcaaagtgttagttgctgaaggttggaatatctgtggcaatttcttaaaataagacaataaagttggctgcatcagttgactttcccttttatgaatgatttctctgtagcatgtgatgctttttgatagcattttacccagagtagaacttcttgcaaaattcaagtcaatcctttcaaactctgctgctgctttgccaactragtttatgtaatattctaaattttttgttgtcatttcagcaatgttctcagcatcttcaccaggagcggattccatctcaagaaactagtttctttactaatccataagtag

SEQ ID NO: 254987 - DNA, 598 bp, Homo sapiens
ttagggccctaggattttcggaatggtcagtgagcactgacttcaatgtaaagttcatcaggtgcattagcccctaacaagagagtcagcctgtcctttgaagctttgaagccaagcattaacttctcctctcaagctacgaaagtcctagatggcattttccttccaatataaggcttttctttgttgggggtcaatattgacaatctgttgtttagtgtagccatcttcatcaattacctatatcttctggataatttkttgtagcttctacatcagcacttgctgtttcactttgcatttttatgttatggagaaggcttctttgcttaagcctcatgaacaaacctctgctggcttcagactttccttctgaagtttcctcacctctctcagccttcatagaattgaagacagttagggtcctgctctaggttagactttgacttaagggaatgttgtggctggtttgagcttctattcagactactaaaactttctctgtattagcaataagaacaagaagcctgtttcattcttatcatttgtgtattcactggagtatcatgttcaatttccttcaagaacttttccttgg

SEQ ID NO: 254988 - DNA, 602 bp, Homo sapiens
cttaacttctggttcatgataatttctgaagaaaagtttgatatttgctgcttattaattaaaraaactttgtcttctggcttttcttggataattgtaggaactcagggcataagggtaacaataagaataaaacgttcatctgtctagtatgaatttattcaactattatatttgtatattttgccttaagcattttttaatatttcctgaatgcattttatggtttatctgtctttggttgtgattttcaagagaatagtattcgtggtggttgtttgtgccctctttaagcaagttagttgtataataaatactgcttgaaattaatagtggtggttactcctatatccatttgtcttcagtattagcgtaatggacctgatttggagctggctgattttgggtttgaatgtgactctggaaatgtcttagtgagtctccatacaataataaaattttcagcttgaatgccaaacagtttttttgacaaagaggtacaggataaatagagcttcagaaaatgcctgagaattcacagaaagaagcaaaatgtgaagatgcaggacagaggattcaaattacactggagagacagcagt

SEQ ID NO: 254989 - DNA, 564 bp, Homo sapiens
gaaatcttagggtgctaaggactgggagttaggaagatgtgaacctgggatccagactactcctgccactcaggcttaaatcatgtaatctttctgaaactcccgagtccttatctgttaaaataggagttgggtcacggatggttctagaattaccttattgttctacattttatggtttctcggtcacaaaagaaggaagaattaaaccaaactttaaggaagttaagattttattataagggtgtaggtacaggatatttcagaaggtgggaatcacacaaaccaaatgtagaacaagagagtgtgaacttcctgttagaggatgcagagtggtttgtggttcgtcctaaatattataaagatcagaaagcagatattttgaaatataaaccatcagtactacactgtggatgaagrtaacagtatgattggatttgggcttatgatgaaaggtgttgatgtccatctatccctaggtaactggttcacttgaatcctttaagtttcttacatttggcctttggtcaatatcattcctctaattctgttgctacttatcaa

SEQ ID NO: 254990 - DNA, 619 bp, Homo sapiens
ttgctacttatcaaatcaaaaaaggcatggtgaagaattattctgcatccttgtatttttaacattaaaggaaatgaagatatatctctggttactttaaggaagttttctgtcatagtgacctgtggtctgtaaatagcacatcaccacccccgttatctagccccataggctaatggagtgcttgggactatatcatgaatatttttgagcatatacatttaggagaaaaatgtattgactgtatgacgtttggtgcaacaacaaattgacaaaaacttgtaaatgttctcacagtctgagggagagagagggtgacgacacttcagtattcttgaatttacaattgtaatggaaacacattagcagaagcactgtttaaggggttaacagtttttgggcagaattgaggccaagtggtttgttttggttttaataagtcatcctcacaagattgctttttttcttattagttgcctttttatttcagaggctataaggtaacatttaagaggttattttgattaaaatactaagtagctrctttctatttatagttttaatcaggctttcaaatgattcatgtctaacattagatgtagtaaaacaatgagtgttg

SEQ ID NO: 254991 - DNA, 604 bp, Homo sapiens
caattagaattgcctctaacttgtttcagtgactccagtttctccctgttcaagtcagttttgcaatctgctatttgattaatctttgggaaactctgatacactcatctgctcaaaacttggaataagctcacattgtttctataacaagagtcaaatgttttttctgttatttgaaaatgttaattttaccttaataatattatttattattttattttattggttctgtttcaaccaaatgaaactactgcaatttgccataccaaacacaaactttyccctttccaagccctttctttaagtgtactctctgttttattagatgagctccctctgctcttcttacatctaaaggctttctactgaaagactgaaagaccactatttttacaaggtttttccagaatcttcactatcataagatatttttctctttcccaaactcccaatgtaccttatacatatatgtatacatacgtaatctctctctgtctctctttccctctatctgtaagagaatgacttgaatctcctagaagagaataacaatgtaatcttcattgtacctcttggttgtgttctgcctttcatacaatagaca

SEQ ID NO: 254992 - DNA, 604 bp, Homo sapiens
caattagaattgcctctaacttgtttcagtgactccagtttctccctgttcaagtcagttttgcaatctgctatttgattaatctttgggaaactctgatacactcatctgctcaaaacttggaataagctcacattgtttctataacaagagtcaaatgttttttctgttatttgaaaatgttaattttaccttaataatattatttattattttattttattggttctgtttcaaccaaatgaaactactgcaatttgccataccaaacacaaacttttccctttccaagccctttctttaagtgtactctctgttttattagatgagctccctctgctcttcttacatctaaaggctttctactgaaagactgaaagaccactatttttacaaggtttttccagartcttcactatcataagatatttttctctttcccaaactcccaatgtaccttatacatatatgtatacatacgtaatctctctctgtctctctttccctctatctgtaagagaatgacttgaatctcctagaagagaataacaatgtaatcttcattgtacctcttggttgtgttctgcctttcatacaatagaca

SEQ ID NO: 254993 - DNA, 604 bp, Homo sapiens
caattagaattgcctctaacttgtttcagtgactccagtttctccctgttcaagtcagttttgcaatctgctatttgattaatctttgggaaactctgatacactcatctgctcaaaacttggaataagctcacattgtttctataacaagagtcaaatgttttttctgttatttgaaaatgttaattttaccttaataatattatttattattttattttattggttctgtttcaaccaaatgaaactactgcaatttgccataccaaacacaaacttttccctttccaagccctttctttaagtgtactctctgttttattagatgagctccctctgctcttcttacatctaaaggctttctactgaaagactgaaagaccactatttttacaaggtttttccagaatcttcactatcataagatatttttctctttcccaaactcccaatgtaccttatacatatatgtatacatacgtaatctctctctgtctctctttccctctatctgtaagagaatgacttgaatctcctagaagagaataacaatgtaaycttcattgtacctcttggttgtgttctgcctttcatacaatagaca

SEQ ID NO: 254994 - DNA, 568 bp, Homo sapiens
ggtttctgtttaataatgatagatccctatctactaagctacctccacattcctaagaatcatatatcaacagaaatattcaatcagaacaccttggcctttggttgtattataactaggagaaattgctttaatttacagtgagcaagggaaataaacactataaacaagcagagtcatctttggagcccacacccaagcagagtcagggggaggttgtgtgaaaaagagttaaatacrgagagtataataggtggtggaacacagagatcatacagtgttaaccccagaacaagagggctgtaccttgagtggaaatatcaagaatatgtgtaaggtcttgtgggtcggggcactggctaatgaggagtcagtaaaaagaagcttgaaaagtgatcaagacaagaattggcaaaatagagaagatgccacttctgggaaagaggaagatacattggaaggaggagtgtctccttgtagccttagtggttaaggaaagaaggcagaggcggaagagatgagtattgctgaaataatgtagtatgaaaaagaagaagaggaagaagaa

SEQ ID NO: 254995 - DNA, 568 bp, Homo sapiens
ggtttctgtttaataatgatagatccctatctactaagctacctccacattcctaagaatcatatatcaacagaaatattcaatcagaacaccttggcctttggttgtattataactaggagaaattgctttaatttacagtgagcaagggaaataaacactataaacaagcagagtcatctttggagcccacacccaagcagagtcagggggaggttgtgtgaaaaagagttaaatacagagagtataataggtggtggaacacagagatcatacartgttaaccccagaacaagagggctgtaccttgagtggaaatatcaagaatatgtgtaaggtcttgtgggtcggggcactggctaatgaggagtcagtaaaaagaagcttgaaaagtgatcaagacaagaattggcaaaatagagaagatgccacttctgggaaagaggaagatacattggaaggaggagtgtctccttgtagccttagtggttaaggaaagaaggcagaggcggaagagatgagtattgctgaaataatgtagtatgaaaaagaagaagaggaagaagaa

SEQ ID NO: 254996 - DNA, 550 bp, Homo sapiens
acgtgccctcttattatcccagtaatcaaaataagagccagcaatcaaaggtcctaacaaattctttgaggaaagcatgcaagttaaaaaagaaatgattaactaccactcagttttgcattaacaccatgtttctcagcccacataactgtatcagtttactagctgtgtggcatatcttgaggtttctgtcgctggactttagacggatacctacaaatcaaatcttyaatatttctttccttgaatcaattcattctgttctccaagtttctttcttgaaaataaaaatccctctgagtaattcaagctttccttaaccatccatggcatgagtttatcaatttgctttttttttaagaatgtaattcagaacaattattgagggaattctggaggtcatttctgcaattcaaatctaagtttcaatgcatagaaactttggctctgcagtaatagctataaaaagcatagataaatgggaatgttgcagtgcaatttatttcagtacaaaaaaaattgtaaacttctgtgtccattaacagatgac

SEQ ID NO: 254997 - DNA, 494 bp, Homo sapiens
acttttctgtctttgattctaagctatatatgttaccatttatcatcacatgcatggtgatttcttattacagagttaagagaaaagtgaatatatakagagagatactttttcatgcagcccccagcttggcccttataagcatttgtgtttgtcatccctgccatagaggaaagacactgaagacccaagcggaatttctaactccttcccttgtcatatatgtgactttagattcaacattcagcctttactgatttcagttctgtttgtattaacatgaaacttagttcatggcctagacatattaccttaacaacataacacattttaaaaattgattgtatatttaaagcctatgccttaattcagtatgcaagatacaatctccctgcctcaaagtaattacattccttgaccaaattagtcaaagcatctagactttatcttgaattaggatcaatttggaatctgatgttaaagacagtaaatcc

SEQ ID NO: 254998 - DNA, 494 bp, Homo sapiens
acttttctgtctttgattctaagctatatatgttaccatttatcatcacatgcatggtgatttcttattacagagttaagagaaaagtgaatatatatagagagatactttttcatgcagcccccagcttggcccttataagcatttgtgtttgtcatccctgccatagaggaaakacactgaagacccaagcggaatttctaactccttcccttgtcatatatgtgactttagattcaacattcagcctttactgatttcagttctgtttgtattaacatgaaacttagttcatggcctagacatattaccttaacaacataacacattttaaaaattgattgtatatttaaagcctatgccttaattcagtatgcaagatacaatctccctgcctcaaagtaattacattccttgaccaaattagtcaaagcatctagactttatcttgaattaggatcaatttggaatctgatgttaaagacagtaaatcc

SEQ ID NO: 254999 - DNA, 494 bp, Homo sapiens
acttttctgtctttgattctaagctatatatgttaccatttatcatcacatgcatggtgatttcttattacagagttaagagaaaagtgaatatatatagagagatactttttcatgcagcccccagcttggcccttataagcatttgtgtttgtcatccctgccatagaggaaagacactgaagacccargcggaatttctaactccttcccttgtcatatatgtgactttagattcaacattcagcctttactgatttcagttctgtttgtattaacatgaaacttagttcatggcctagacatattaccttaacaacataacacattttaaaaattgattgtatatttaaagcctatgccttaattcagtatgcaagatacaatctccctgcctcaaagtaattacattccttgaccaaattagtcaaagcatctagactttatcttgaattaggatcaatttggaatctgatgttaaagacagtaaatcc

SEQ ID NO: 255000 - DNA, 627 bp, Homo sapiens
gaatatatatagagagatactttttcatgcagcccccagcttggcccttataagcatttgtgtttgtcatccctgccatagaggaaagacactgaagacccaagcggaatttctaactccttcccttgtcatatatgtgactttagattcaacattcagcctttactgatttcagttctgtttgtattaacatgaaacttagttcatggcctagacatattaccttaacaacataacacattttaaaaattgattgtatatttaaagcctatgccttaattcagtatgcaagatacaatctccytgcctcaaagtaattacattccttgaccaaattagtcaaagcatctagactttatcttgaattaggatcaatttggaatctgatgttaaagacagtaaatcccttttgctaaagaagaccactcaatatttttctacttgtcaattaattaattgtgaaatattgctaccttttccttttcatattaccatccactgggacaacacccttaatccagcaactctagtaaacttacccagtgaaaaagaatttcgtaattctgtttttataacacagtaagtgttcatgtccagaacaaaacttttgatcactctagtaccaaa

SEQ ID NO: 255001 - DNA, 627 bp, Homo sapiens
gaatatatatagagagatactttttcatgcagcccccagcttggcccttataagcatttgtgtttgtcatccctgccatagaggaaagacactgaagacccaagcggaatttctaactccttcccttgtcatatatgtgactttagattcaacattcagcctttactgatttcagttctgtttgtattaacatgaaacttagttcatggcctagacatattaccttaacaacataacacattttaaaaattgattgtatatttaaagcctatgccttaattcagtatgcaagatacaatctccctgcctcaaagtaattacattccttgaccaaattagtcaaagcatmtagactttatcttgaattaggatcaatttggaatctgatgttaaagacagtaaatcccttttgctaaagaagaccactcaatatttttctacttgtcaattaattaattgtgaaatattgctaccttttccttttcatattaccatccactgggacaacacccttaatccagcaactctagtaaacttacccagtgaaaaagaatttcgtaattctgtttttataacacagtaagtgttcatgtccagaacaaaacttttgatcactctagtaccaaa

SEQ ID NO: 255002 - DNA, 437 bp, Homo sapiens
ccatcagtggtagattggataaagaaaaatgtggaacatatacaccatggaatactacacagccccgcccccccccccccaaaaaaaagaacaatccatatcctttgcaggaacacggatggagctagaggccattatcctcagcaaaataactcagaaacagaaaaccaaaccctgcatggcctcacttataagtgggagctaaacaatgagaacatagggacacatagagggggacaacacacactggggcctattggagggtggagggagggaggagggagaggatcaggaaaaatatctaataggtaccaggcttaatacctgggtgacaaaataatctgtacatcaaatccctctgacacaagtttacctgtataacaaacctgtgcatatamccctgaacttaacacacacacacaccatataacatccca

SEQ ID NO: 255003 - DNA, 583 bp, Homo sapiens
tgtttgttttctaaaaagagctgttttgcctaaaagctcaatgtgaatcaacagtgtgatgagatagccaaaatatattgaccttcggctgcattaaaaaaaataaaatatcaagagtgtgaagtctacgggaatattgacaaatgatcattcagcccctggccatgctcttccatcctggtgcctctgccttctgctgtctgtctctttctctgtttttctatgttcatctcttttatacatgtttctctccctatctagctctttcgctctttctatgccacttcttttccgccctttasaggaaacctcaatacccctgagcgcatctagaggagagcaaaaactcctcttgatgcactcctccttcttctctggtgaaggcagaaagtgggaaaatggaatggccactctataaacagagaccacgaggcagagggaggaaaacttctctgaagagccacacaggctgctgtcaagaacacccaagacagacagtttaaaccaagctttgcagcttagcagggaacaagaagactcagtggaacaattacaggaagaagatatttggattaaaaataga

SEQ ID NO: 255004 - DNA, 497 bp, Homo sapiens
ttattacagatatcagtttatgtaatttttctttgtatgtgttatatttatactacagtttttttaaaagtcacactattaatgcaataacgtttatgatcacacatgtgccagaaatctaagcgcttaatataaattgtctcattcatttttgaaaacaacccctattttatagatgaataaccatagtcattaaaaggttaaataatgtaccataatgacaaatgacagtgccaaaaatagacacagtcttgattatagaactgtgcagagtatacagtctgtcttatatgcatcatctcatttaatcttaacctgcaatgtaggagctcttatttctatcatctatgagaaaaatgagccctggggagattcaatcaaacgcttagggtcacaaagctaagaggagcccaggcctctaccagctacactacawtgcattgccttcatttagtcacacaaacaggcaccttttcattttttattctatacaagtc

SEQ ID NO: 255005 - DNA, 517 bp, Homo sapiens
cttttcattttttattctatacaagtccactgaaataaattagcatactggcttataccaagtaaacgaatgtttggggaatgaaacatgcyatactgagccattcaacccagttattcaaaaaataaggtctatctctgtttcctaaataagaattgagaattaacatgcagatagccagaaacatttggttctggcttttcatggcagcatgtgactaatgatttcacatttgtgatatgggatttctgggacctaaccacaactagctctggcaattacgaaatccagtttgaaagaacagtgcagagcaactaaacagagaaacagtcagtggcacttgtgggatacaggtggctaattcctcaaaacagtagcagaatcttgcattcctagtgtctttatcacaaactgcaaatgtgacaatgaaggaaaccatgtgaggaaggtctaaggaaaagaagaacaactgtgcagagagaagtacagaaagggagaagggggagtaaacagacaa

SEQ ID NO: 255006 - DNA, 486 bp, Homo sapiens
accatgcctttatttcttgctttaagatgaacactcctttcaagtaatctctaaagattcaggccaaggtcagcttctccaatgctagcacaaataggaaaataaattgcaggttatgttacaagcaagtttaggttttatacttctatctataaaatagtgccataatattgatatggctgatatttaaaatattattaaataatttgacttccgtgattggagaatagtattaattcaytacaactgaatatgtatgactttttaaacactatttcttgtctaagaagatgacttagacaatgcttggagagtagcagaatagtaatataaagcacagcattaagtaagagcttgttaaatgttattgaataaatagtaatgattctactggatatttttttaaaccaaaagcctgctcaaaaaggaaagaacagattttggtggctacaaagcctgatccaaatttgagctcacctaaaatag

SEQ ID NO: 255007 - DNA, 634 bp, Homo sapiens
gctcatttcatttagttctctgctcgaattttaccttctctaatagcccttgcttgcttattcacacttttgaataccggcccagttattctctttctctttaccttgctgctttgttcatcatacttctcattacctgagactatagcctttctctttgctgaacttgacytgacattaatgacttgttaaaaagtcaggctcttctttgggtcactcctggattagtcatgggagctatgagctatgaggacagacatatagaaaatgctaaatcacaaggtagaatatcatagaattagagtagaaacactcttggttgtctcagtttgcaagtaacacattgagggtccataaaaaataatagctgtttctggttacttgtcacaggtttttatatatatttaatattttgatcatcacctttatgaaataggtattattatattttctattttacacagaggggaatgagggctgaggcgcagttacccaaagtctgtaagctatgaataaagcatggattagactcaggtctcatgatacccacttgagtaatgttgaacatttcgattccttggaggaaaagtgttttaatctaaagaaatggctttgcaaacaaattcctgccagc

SEQ ID NO: 255008 - DNA, 634 bp, Homo sapiens
gctcatttcatttagttctctgctcgaattttaccttctctaatagcccttgcttgcttattcacacttttgaataccggcccagttattctctttctctttaccttgctgctttgttcatcatacttctcattacctgagactatagcctttctctttgctgaacttgacttgacattaatgacttgttaaaaagtcaggctcttctttgggtcactcctggattagtcatgggagctatgagctatgaggacagacatatagaaaatgctaaatcacaaggtagaatatcatagaattagagtagaaacactcttggttgtctcagtttgcaagtaacacattgagggtccataaaaaataatagctgtttctggttacttgtcacaggtttttatatatatttaatattttgatcatcacctttatgaaataggtattattatattttctattttacacagaggggaatgagggctgaggcgcagttacccaaagtctgtaagctatgaataaagcatggattagactcaggtctcatgatacccacttgagtaatgttgaacatttygattccttggaggaaaagtgttttaatctaaagaaatggctttgcaaacaaattcctgccagc

SEQ ID NO: 255009 - DNA, 601 bp, Homo sapiens
ttcatgagggcataggcctcatgacctaaacaccttctgtcaggctccacctgccaacactattgcattgaattgcattaaagttccaacatatgaatttttggaggagacacattcaaaccatagcataaggcaccctaaattccctagaaacctaaagcctaggaaatccccaggtgtagtacccaaggactctacaaatattctccctatatgtaaacatagttttactgacaagtgctgtaagaacagcagggagacatagaatggcactgtcatgttattgtcattctcactagccattctgcaaaacttcaggtccagccagtttcctttcctgctaatakgcatggttgcttcttagaggtagtgattttatatgtgttaagctttgagtgacttattattacactacactattccttttattaatttagcacagagattgaaaagctaactgacatttgactctgctcttttgctagctggattatggcatacatttgtgcatcattaagtgcatctatgagtgatggtcagggcattatgtcacatcacagggtcatcctctcttatcatgtcatatcacatcatgattgac

SEQ ID NO: 255010 - DNA, 528 bp, Homo sapiens
gtgcttgcctttcacagaatattctctctatagcattctgccttgcccacaatagttgaagctattttcctggaaaaagcaggcaaacaaaggaaaataaaaccttcttaggataactagaagcagtgttaggaaaatgataatccaattaatgcttttcccagaagacaagagacacctcccatagcaggcttgcacctggcttctctctggccagatactcacctcagcctaacagaaaattgtcagatcaacatttgaaacttgagctgcagtaaggtaacctgatattctgagaaaaggaggctcttccttttctaaatatttatrttagataaatataaaacattccatgagagtgggaaggaaaaatagagctatgataatactgcagtggaggggtgtattgctattcaaatgccttatgtgccagtgacactggaggaagctgtagggggtgggagtatatagaggtgggtcccaccttcctccctccctcccttcctgaacattgtgataacccttcct

SEQ ID NO: 255011 - DNA, 528 bp, Homo sapiens
gtgcttgcctttcacagaatattctctctatagcattctgccttgcccacaatagttgaagctattttcctggaaaaagcaggcaaacaaaggaaaataaaaccttcttaggataactagaagcagtgttaggaaaatgataatccaattaatgcttttcccagaagacaagagacacctcccatagcaggcttgcacctggcttctctctggccagatactcacctcagcctaacagaaaattgtcagatcaacatttgaaacttgagctgcagtaaggtaacctgatattctgagaaaaggaggctcttccttttctaaatatttatattagataaatataaaacattccatgmgagtgggaaggaaaaatagagctatgataatactgcagtggaggggtgtattgctattcaaatgccttatgtgccagtgacactggaggaagctgtagggggtgggagtatatagaggtgggtcccaccttcctccctccctcccttcctgaacattgtgataacccttcct

SEQ ID NO: 255012 - DNA, 576 bp, Homo sapiens
ttatcaattaatagactcagtgacaactatttccatgagatatacctatctcatggaacaaacatmaaggaaaaaacaaattcctctacataaaggaatttgtttacttacttaccaatgttcaatctagttccaaaaaaaaattattgtgatttataaggatttttataatataacaaaaataacatgtactagttgtaaaagaaacaatacagggaaacaaaccatggagaataagtttgtgagcaaggaatgtagttgctactgagggcaacaaatttacctctaaatgttccagcagactgcccacctgagaaaagggaaatttgttctaaattcagttttcatttcaagaaaatactaacaaagtcctaaaagagtcacaactaccttttttttttgagatcggggtctcaattctgtcacccaggctgggtgcagtggtacaatcatggctcactgcactatagcttcaaactcctgggctcaagtgatccacccatctcagcctcttgagtagctgggactataggcatgcatcaccatttcaggctaattattattttttttaatttt

SEQ ID NO: 255013 - DNA, 576 bp, Homo sapiens
ttatcaattaatagactcagtgacaactatttccatgagatatacctatctcatggaacaaacatcaaggaaaaaacaaattcctctacataaaggaatttgtttacttacttaccaatgttcaatctagttccaaaaaaaaattattgtgatttataaggatttttataatataacaaaaataacatgtactagttgtaaaagaaacaatacagggaaacaaaccrtggagaataagtttgtgagcaaggaatgtagttgctactgagggcaacaaatttacctctaaatgttccagcagactgcccacctgagaaaagggaaatttgttctaaattcagttttcatttcaagaaaatactaacaaagtcctaaaagagtcacaactaccttttttttttgagatcggggtctcaattctgtcacccaggctgggtgcagtggtacaatcatggctcactgcactatagcttcaaactcctgggctcaagtgatccacccatctcagcctcttgagtagctgggactataggcatgcatcaccatttcaggctaattattattttttttaatttt

SEQ ID NO: 255014 - DNA, 555 bp, Homo sapiens
aattctgagaggaaaatgctgctcaaagtcttcttccaacatggcctttcctatcaaacagcacaatcaaatttttggatgccatccttgtcatctggagggctgggtttactcatcactgagaacccagacawtatggatttgctagaaacttggaaaatatctgagttaggagccaccctgtctgtcactaggtaacctgaggcactgctctcccaaatgaccagtctttctgggagccctttaccagctccctggttgcccccaaacgtttcaataattcagctctgtagaaggctgtttttggcaccaaaagcagagtgaaaaacagctttgcaaagaaataacaggcaaccagtatccaataaaacttttagaaaatttcaccgaaggaaaaaaaatccccgagttcacggcaaaaattttaagaaaacaacaaaattatcacaaaaataggaggcagactcagaagccttaggggttaaaaagaaacatgcatggccgggcacggtggctcacgcctgtaatccagaggccgaggcgggtggatcatga

SEQ ID NO: 255015 - DNA, 526 bp, Homo sapiens
catatttgagtttaatcagcctttcttgaccaaaagccttctcaatttttttaatctttctttgacattggaagttgcctcttccaaccatacaattctttgaatctaggaactctctctattccttttatttgtgcttacaaagtgtccaattcakcttttttgaagtatcttatcaaagtaaatagcaaccaatacacattactaacattttattttctacctctttctctagagatacaaattaaataggtacattaactccaaattatcatgggagaagtttgtcatttgtctagcctctaatatgctttctactgaccagcatccaaccaataacccaatgccatatgttacaggctttagtgtagcaacccccatttcaatatacaatttgtttctctcagtgtgggctacgttatgctgcagtaacaaataagctgaaatttgctgttttaacttttatttttcatttacactatatattcaacgtgggtctagtcatcatactcattcagggacccca

SEQ ID NO: 255016 - DNA, 521 bp, Homo sapiens
cacttgttatatggcggcgacaagagaaaaatgaggaagatgcaaaagcagaaaccctaataaaaccatcagatctcatgagacttattcactatcacaagactagcatgggggaaaccgcctctgtgattcatattatctcccactgggtccctcccacaacatgtgggaattgtgatagtatgattcaagatgagattcaggtggggacacacaacaaaaccatatcaatgttccaaatactgtatggaataaatatgtcctaaatattgcatggcacatagtttcactaaaagttattttttctatactcagatttaactaggtatcctgtaattcatctggcmaccccatccccagagccaagtcatcaatggcactaacgtaaattaatttcatataaatatttataccaagtgcaccaaatttaaacaaaaatatttggtcaatgtaacttgtcaagagccatagaaaaacatctatttcaaatatcttttgacaggatggatggactgagtatt

SEQ ID NO: 255017 - DNA, 592 bp, Homo sapiens
gtaaaacattacttaaaaaagaaaagtcagtagaaagctagaaattcttawatgttgaaaatatattgtcaagttagaaaaaaatgagtggacagtttgaaaataaagtcaagatatatcccaagaaggagaattaaaggcagagaaatggaaaaaaaaaaaaaaaaggaacacttaattcatatatctcaaacatcagacattccaatctaacagcaattttaggaaaaaaaaaaagataacagagacaaatgaaagaaaaattatctaggaaataatacaagaaaatctccatgagactccaaatttgaaaggcccatattaaatgaaaaagacctgtactcaggaaaatctctgtaaagttttacaatacaaagaataaagatgctaaaagctttcatgtagggtttttttcttttaaaaaaaaaaggtcactgacattgaaataagctgattgtctttagattgcttggaacagaatacaacatgccttcattactgcaagggaaaataattttcaaacttgaatttttatgcaaacacattaacaattaaatttgaggataaatatatttttgtgcgtgtccagaaa

SEQ ID NO: 255018 - DNA, 586 bp, Homo sapiens
attaaatgaaaaagacctgtactcaggaaaatctctgtaaagttttacaatacaaagaataaagatgctaaaagctttcatgtagggtttttttcttttaaaaawaaaaggtcactgacattgaaataagctgattgtctttagattgcttggaacagaatacaacatgccttcattactgcaagggaaaataattttcaaacttgaatttttatgcaaacacattaacaattaaatttgaggataaatatatttttgtgcgtgtccagaaaatttacccttcacataccatttcttagtaagttacttgaacatatcttggagcaaaactatatgggaataagaaataagaggaagatactacagaagcagtaaaatgtcccaggataaaagctgggtgacaggcctggagaacaatagttcttactggaacaacagaatggatggccctgagcagaaaatttctgggaaagaagaatccaaaaatattttattgaaaggggtttttttaaaaaatatagagagagaatataaaggcaaataatgtaagaaaacaagaacaataagaaacaaaaactgaaagttt

SEQ ID NO: 255019 - DNA, 586 bp, Homo sapiens
attaaatgaaaaagacctgtactcaggaaaatctctgtaaagttttacaatacaaagaataaagatgctaaaagctttcatgtagggtttttttcttttaaaaaaaaaaggtcactgacattgaaataagctgattgtctttagattgcttggaacagaatacaacatgccttcattactgcaagggaaaataattttcaaacttgaatttttatgcaaacacattaacaattaaatttgaggataaatatatttttgtgcgtgtccagaaaatttacccttcacataccatttcttagtaagttacttgaacatatcttggagcaaaactatatgggartaagaaataagaggaagatactacagaagcagtaaaatgtcccaggataaaagctgggtgacaggcctggagaacaatagttcttactggaacaacagaatggatggccctgagcagaaaatttctgggaaagaagaatccaaaaatattttattgaaaggggtttttttaaaaaatatagagagagaatataaaggcaaataatgtaagaaaacaagaacaataagaaacaaaaactgaaagttt

SEQ ID NO: 255020 - DNA, 521 bp, Homo sapiens
atttattacgaccatatatgtttgtgtatttggagagagactcagtattgtcttaagggatataatacagagaacagcagcccctttgaaacctgtaatctacatgaacaaaccccagaaaactacaagcacaggacaacaacagagaagaggtttgaaagggaaaagggaacaaaaagtcagagagtggttactgccagatggaccacawagtgccagctcactgaagggcaacgaacttgagctatgttaagcaaaatcatgttacatattaggagaagaaaaagatttccaaaatgaggaaacaaggacaagaggcagatattaagtggggaaaagccaaaaaccaattttggaagtagcaagaggtaaactgaaattgtaggaagtcaagcggccctatacagagtaggtcaaaaggaaacttttggggaagctttttaaacagtttgaaaagttttttttttgtttaattcaaacttgatttctagttcttaatactgctaataacagtagtagta

SEQ ID NO: 255021 - DNA, 587 bp, Homo sapiens
tgacagggcagctgttacatcaattcatcaattacacagtaagcagggcaccaacagccctaagagcgcacrctttcaattcaaactagaactttcttcaaactcagggaaaaaatagtgttctaagaaacacagccaaagatctctatcgtatcctctcgttactgttacttccccatattagctgaccacctacattgaaaatgatggcataaaacaaaaagcaaagatagggaattccacaggtttttggccttgaaatcccctttacatatcagaaagccacaggtagtgagtgttcataggaccaagaagtgatatgaccaagtgtgttcataggaccaagaagtgataggaccaagaagtgtaccaagaagtgatatgaaaccagctgagttagttttatgcagtgcttccattgttctggtgagaacaaaatacatatgcacaaaagaaacagaaattgtgtaaatttggtgattccacctacaggctaaatgcatttatatttgcattttaaatggcatcacagaatataaatatgaatagcaaaatccatactattaattttaaatgttttcatttta

SEQ ID NO: 255022 - DNA, 534 bp, Homo sapiens
cgtttccctgtttgaacaaaagaccccatattttcactttgccccaaaatctacaaatcatgtagccagccctgttcctacaaatattttgcawacaatttcatgagaatcccagatccttataaggtgacaagttaagaggatatgcacgtgtgtgtgcgtgcgctcatgtgtgtgtgcgtgtaatttttatataattaaatctgaatactttagatatgatcaaatgtttatatttcacatatattttataaataataatatatttttcatatatattttctaaataaaagagactcgtgggtcagccaggtattcttaataggggaatacctagctatagagcaattatagctaggtatataatgtcaaaattcaaaagattctgctactgagttctctcctttcactaattctcttattgtatcaacacctgaaagatctcttaatctgtgacaagacagctttactcattttttgaaagaataattttataagataatcagtaacaaagagaaaatgaatttaaagact

SEQ ID NO: 255023 - DNA, 548 bp, Homo sapiens
cttttcacatattaaaggaggtcttccaaataagttacgttaaaattgggcaatgtcacgctttactttcatttccaagtgattttggctaacccatttgccatatatttctctgtgaatttttaatccatttcactctaaaaaaaaaatctcataatctgtaaacaaggatggataaataccagaaaatctctgtaaggaagaaaactgtgtagcaagtaatttaaaacaaagacatcatttaaaatgcatagagacccctactacatcatgcttcgaaggacaatgcttttgtatttttaatttccttaaagcaaagcacatctttgcagcatttctcttatttccccacctatgtagcacatgaactgctcaaaactgacacattcaagtgccaccagcaaggcctgaatgagaaaggctttgtaattcagcctctgtgatcttttatataaatattgctttgagttggacagtagaaaagcccagggtagcaatataacgccaacttgasagacactttacaaccactgccaatatcatactat

SEQ ID NO: 255024 - DNA, 532 bp, Homo sapiens
ttgaatcagaatatagtagtaacatttgttctcatgtgctacttttgcaggaggaatgtagcgggcggggaagaaagggatgccctgacatataaaggtacggaaatggaaattgtccatattcttataagtgctcgtcacaatgtttaaatgatgaacatttgagccaaagtattaagttctgatacaaaggaggcagcagcaatgtaattctaatttcttttaaccaaaatgtaatttcatgttkagcctatttagttttaaatacttgacagtagaatgggctatgacatttatcccataaatatttatttaccaagtcctaagttcaatttagtttgactctgtctgtaacagaaaggtgaaaaaatatggtctctgttcttacattttaggtggctcatactacttaccataaaaagtacaaagtgttataagactaagagaaaagaccactttcataaaatgataaggtctgtgaaaaaggtaatcatatttccctaatattggaaggtaagtcattttgcaactt

SEQ ID NO: 255025 - DNA, 532 bp, Homo sapiens
ttgaatcagaatatagtagtaacatttgttctcatgtgctacttttgcaggaggaatgtagcgggcggggaagaaagggatgccctgacatataaaggtacggaaatggaaattgtccatattcttataagtgctcgtcacaatgtttaaatgatgaacatttgagccaaagtattaagttctgatacaaaggaggcagcagcaatgtaattctaatttcttttaaccaaaatgtaatttcatgttgagcctatttagttttaaatacttgacagtagaatgggctatgacatttatcccataaatatttatttaccaagtcctaagttcaatttagtttgactctgtctgtaacasaaaggtgaaaaaatatggtctctgttcttacattttaggtggctcatactacttaccataaaaagtacaaagtgttataagactaagagaaaagaccactttcataaaatgataaggtctgtgaaaaaggtaatcatatttccctaatattggaaggtaagtcattttgcaactt

SEQ ID NO: 255026 - DNA, 521 bp, Homo sapiens
aaatgattatggaatctctatagatttttatccacacaatgaattttggtaatatggtaaaggtcagaaactcaaataaggtgatcatgagtctcattaattccaaacaatatgaaatatgctatttaatatcctttttctcttctgtgtgccctttccttaatttttaaagcaaacaattaatcctctgctttgcaccagcatgttttgattaataaggattttataacttatgaaacaatccaatagctcactgtattatataatrgaatagtcagcacagaggattccggaagatttcatttgaaacttttcacataatgaaaagtcattctttactttccctaaagatctagcttatagattattctgtgcatatttcccaagtaaataaatatattaatttctgagaataaatcatataaattttaaaagaaagcccctggaagcacacctattcttattttgtaaaatgctgaggtcatcttaacatgggaaaacaaaaaggtgtccttaacaac

SEQ ID NO: 255027 - DNA, 521 bp, Homo sapiens
aaatgattatggaatctctatagatttttatccacacaatgaattttggtaatatggtaaaggtcagaaactcaaataaggtgatcatgagtctcattaattccaaacaatatgaaatatgctatttaatatcctttttctcttctgtgtgccctttccttaatttttaaagcaaacaattaatcctctgctttgcaccagcatgttttgattaataaggattttataacttatgaaacaatccaatagctcactgtattatataatggaatagtcagcacagaggattccggaagatttcatttgaaacttttcacataatgaaaagtcattctttactttccctaaagatctagcttatagattattctgtgcatatttcccaagtaaataaatatattaatttctgagaataaatcatataaattttaaaagaaagcccctggaagcacacmtattcttattttgtaaaatgctgaggtcatcttaacatgggaaaacaaaaaggtgtccttaacaac

SEQ ID NO: 255028 - DNA, 554 bp, Homo sapiens
taaaactggcattgcagagaatgtcataattcatgtgtgtcagtcctgaggtgtgtaaaagtggttgggagcaggaatgccacagcctattcaaaaccacagataagaasagatattctatcctgttgcccagagtgacatctactggatcagcaagttcaaaacataaatgcaaaacatttctcccttccttaaacaaaagcagagaggtggacgtgcaaagatatgtaaaagatggaaaggccagtggatcctagaagtctatttgggcccagagtctacccagtaactggaatgctgatgtaccagcttctcaggagaaaagtctttggccactggaagagaaaaagtttcagaacaggtaaaaaggagagaaactgggataatgtcatacttcttttttttttccttttgaaggcagaacaccctctcccaatctaaacagtaaagttaccaacttcctaatcttaccaaaaagagagccaattttcctgttgagagagaggtagcaatgttcaatctgccaaaactaaatgaaccaattaaagtgtaca

SEQ ID NO: 255029 - DNA, 554 bp, Homo sapiens
taaaactggcattgcagagaatgtcataattcatgtgtgtcagtcctgaggtgtgtaaaagtggttgggagcaggaatgccacagcctattcaaaaccacagataagaacrgatattctatcctgttgcccagagtgacatctactggatcagcaagttcaaaacataaatgcaaaacatttctcccttccttaaacaaaagcagagaggtggacgtgcaaagatatgtaaaagatggaaaggccagtggatcctagaagtctatttgggcccagagtctacccagtaactggaatgctgatgtaccagcttctcaggagaaaagtctttggccactggaagagaaaaagtttcagaacaggtaaaaaggagagaaactgggataatgtcatacttcttttttttttccttttgaaggcagaacaccctctcccaatctaaacagtaaagttaccaacttcctaatcttaccaaaaagagagccaattttcctgttgagagagaggtagcaatgttcaatctgccaaaactaaatgaaccaattaaagtgtaca

SEQ ID NO: 255030 - DNA, 554 bp, Homo sapiens
taaaactggcattgcagagaatgtcataattcatgtgtgtcagtcctgaggtgtgtaaaagtggttgggagcaggaatgccacagcctattcaaaaccacagataagaacagatattctatcctgttgcccagagtgacatctactggatcagcaagttcaaracataaatgcaaaacatttctcccttccttaaacaaaagcagagaggtggacgtgcaaagatatgtaaaagatggaaaggccagtggatcctagaagtctatttgggcccagagtctacccagtaactggaatgctgatgtaccagcttctcaggagaaaagtctttggccactggaagagaaaaagtttcagaacaggtaaaaaggagagaaactgggataatgtcatacttcttttttttttccttttgaaggcagaacaccctctcccaatctaaacagtaaagttaccaacttcctaatcttaccaaaaagagagccaattttcctgttgagagagaggtagcaatgttcaatctgccaaaactaaatgaaccaattaaagtgtaca

SEQ ID NO: 255031 - DNA, 554 bp, Homo sapiens
taaaactggcattgcagagaatgtcataattcatgtgtgtcagtcctgaggtgtgtaaaagtggttgggagcaggaatgccacagcctattcaaaaccacagataagaacagatattctatcctgttgcccagagtgacatctactggatcagcaagttcaaaacataaatgcaaaacatttctcccttccttaaacaaaagcagagaggtggacgtgcaaagatatgtaaaagatggaaaggccagtggatcctagaagtctatttgggcccagagtctacccagtaactggaatgctgatgtaccagcttctcaggagaraagtctttggccactggaagagaaaaagtttcagaacaggtaaaaaggagagaaactgggataatgtcatacttcttttttttttccttttgaaggcagaacaccctctcccaatctaaacagtaaagttaccaacttcctaatcttaccaaaaagagagccaattttcctgttgagagagaggtagcaatgttcaatctgccaaaactaaatgaaccaattaaagtgtaca

SEQ ID NO: 255032 - DNA, 447 bp, Homo sapiens
tacagctcatttcccttacctctctcattgcttccctatcagtcctgctgactgaaggcacaacctatgtttattatctcttgatcccactaaatcattttatcccaccaaagcagcttagatttatttgaatatttcatacgtcttcattgtgctttgtacttctcataacccaaatttctccttctatcccaggatcagtagatattttcctagatctttaaagtgaggggaataagagtctcctccacatttaggattcatatcattgagaaaggagaataaasgatagaaactggaaagattggatagtcaataagagtgtgattcagaggaatgatctatttccagtcctacactgaccaacactcacttaagctcaatgtaagtaaatacagaagaggaagaagagacgaaacatacaggaaaatatcacgggtacccact

SEQ ID NO: 255033 - DNA, 544 bp, Homo sapiens
  misc_feature (1)...(544): n = A,T,C or G
nnnnnnnnnnnnnnnnnnnnnnnnnnnnnnnnnnnnnnnnnntgtttctctctcctctagaactagagttttcgtttaaaaactttgttttcttggccaggcacggtggctcacacctgtaatcccagcactttgggaggctgaggtgggcggatcacgaggtcaggaattcgagaccagcctggccaacatggtgaaatgccatctctactaaaaatacaaaaattacctgggcgtggtggtgggtgcctgtaatcccagctactcaggaggctgaggcaggagaatcatttgaacccaggaggtggaggytgcagtgagccgagatcatgccattgcactccagcctcggcggcagggcaagactccatctcaaaaacaaacaaacaaaaaaactttgttttcttggcataaaaatgtgtaagtttaatgaataactgagtaactgttatttgactgtcttgttcctcttttcttccaactagctagtgccccaaagtggatttaatgtcataatttaactaacatagattttcaattagaa

SEQ ID NO: 255034 - DNA, 558 bp, Homo sapiens
gctaaaactgatgcccagatctaggcacgtacaaagaatcaatatggcagttttgacataaaaatcctgacaaagtaattgaaattgttttatgttttctgagataaatgatctttttccttattgttctctgaagtgaagacaaatctaagtttcaatttttcaacagtcctaggagaatgtgacagcatccacccttgctgtgcccaatgcctggggcagcagagagcagcctggaggctggccctgactacccagacttgcaggcatggatgtgggctggctgtagctgtatacacaccataaacttggcgttgggccagcttggccagagaagatgctcaaatttgtggagacrtggaggtctgcatgtaagccttgggttggaaaatttcaggaaaaggaggcagctggctaaccaggcctcatggatcagcttcctggagacctttgcagagacctcacacccatggaccaccttgctcagcctgcttagttctttgggagtccctctttatgttataacttgtttgggttgtgcatttaaatgttgttata

SEQ ID NO: 255035 - DNA, 529 bp, Homo sapiens
ccacccttgctgtgcccaatgcctggggcagcagagagcagcctggaggctggccctgactacccagacttgcaggcatggatgtgggctggctgtagctgtatacacaccataaacttggcgttgggccagcttggccagagaagatgctcaaatttgtggagacatggaggtctgcaygtaagccttgggttggaaaatttcaggaaaaggaggcagctggctaaccaggcctcatggatcagcttcctggagacctttgcagagacctcacacccatggaccaccttgctcagcctgcttagttctttgggagtccctctttatgttataacttgtttgggttgtgcatttaaatgttgttatagtttgtctagcctttgttagtatttttggtaagattatggtgtcttttagctcagcttagtctgctatgttgatgtaacttgaagtctacagtaaggttttaagagttaaattcccccagtggttgtcagtgttagtggggttgttataggattgtcaggtg

SEQ ID NO: 255036 - DNA, 635 bp, Homo sapiens
tgaagtctacagtaaggttttaagagttaaattcccccagtggttgtcagtgttagtggggttgttataggattgtcaggtgattgtcaaactgtgtttgaaataataagctcatagcctggcgcagaaaaggagttttgtgtatgttggtgtggggagaggaaaggatggatgtctgtgcagcccaacaagtgtccagcaggctgaacataggaaaactttctagaaagcaaaaggatttaggaactagcaagcctcctccatttcttgtttggaggcaactctggcagcctctgctccttgctcctacaactttctcatcgctggaagacaatcccttcaaagagctaaggaaaaatagaatttcatacctagtcaaacactctttcaagaacaaaggcaaaagtaaaaaaaaaaaaatagacaaagattaggagagtttactatccrccgtgctttataaaggaagtagataaagttcaccaagaagaaaatgaacccagaaggaggttatgatttgtaaatataactataatggacagaaacttaaaaagtcagttaaccattgtgatggtgcttccctccaatacaaataaagtgaaactaatttttaacacaaataacaagatacattg

SEQ ID NO: 255037 - DNA, 589 bp, Homo sapiens
atatcaaactaaaaaacaggtacagagaaaatattgtaccrtctcagagtagagagaaaattttaaacaattcataaaaagcacaagacataaattacgaattttcacagattaaaaattaaaacttctgtatagcatctatctatttacatgggaaggattaaaatagaagtcagtatgaaagaagatgtttggagaacatataactgtgaaagatttagtagcttgagaacataaaaagttgaataattcaatggacaaatatgtgaaagatatgaacaggcaattctcagaagaggaaccctaaatggcctccataggtcaataatgttcaacttaagtagtaatcaggaaatgcagtcaaaacaagaaagtgcaattttatgttaatattattgcagaagtaaaatttatggtagttgctatattgacatacatgtatattcatgaagacttgatgtatcacaattggggatgttaatggaaattaaaacttctttgagaacaatttggcaatctagtaaatccgaagtttgcttaggctaggtgtatactttcacaaagaaatgaggaagaatgttcaatgctt

SEQ ID NO: 255038 - DNA, 573 bp, Homo sapiens
tgaacaggcaattctcagaagaggaaccctaaatggcctccataggtcaataatgttcaacttaagtagtaatcaggaaatgcagtcaaaacaagaaagtgcaattttatgttaatattattgcagaagtaaaatttatggtagttgctatattgacatacatgtatattcatgaagacttgatgtatcacaattggggatgttaatggaaattaaaacttctttgagaacaatttggcaatctagtaaatccgaagtttgcttaggctaggtgtatactttcacaaagaaatgaggaagaatgttcaatgcttaattgcttaatgatgaaaatgaaaagaatatgaatgttaggggaaaattaataarcaaattatatactcatatagtagagtactataaaaataaaaatgatcttgcattatatatatatcagcatgaagtgttgctaaacataatgttgagttaaaaaaagaattttgcaaagtgatatcaagagcatgatgacatttttataaagtttaaaagcatgtaatccactactaaaatggaatgaggaaagcatgcatgaat

SEQ ID NO: 255039 - DNA, 580 bp, Homo sapiens
agaaatgaggaagaatgttcaatgcttaattgcttaatgatgaaaatgaaaagaatatgaatgttaggggaaaattaataagcaaattatatactcatatagtagagtactataaaaataaaaatgatcttgcattatatatatatcagcatgaagtgttgctaaacataatgttgagttaaaaaaagaattttgcaaagtgatatcaagagcatgatgacatttttataaagtttaaaagcatgtaatccactactaaaatggaatgaggaaagcatgcatgaatatgaagtttacttggagtgtttttastcaaaatatgtgaaacaaatttgccaacagagaacatgtattaaaggtgagtagtagatacatgatgcatatattggctttattatttaaacagtctgaatattttataataaaaaacagggagacaagaaggatatacattcacggaagatagaaaaaatggggcacaatgtactaacaaagtaattcactaaagaggaattctgaataatcgatagatagacacaattgcagttgtaaccaggcaaataagattaaagcaaaaata

SEQ ID NO: 255040 - DNA, 580 bp, Homo sapiens
agaaatgaggaagaatgttcaatgcttaattgcttaatgatgaaaatgaaaagaatatgaatgttaggggaaaattaataagcaaattatatactcatatagtagagtactataaaaataaaaatgatcttgcattatatatatatcagcatgaagtgttgctaaacataatgttgagttaaaaaaagaattttgcaaagtgatatcaagagcatgatgacatttttataaagtttaaaagcatgtaatccactactaaaatggaatgaggaaagcatgcatgaatatgaagtttacttggagtgtttttagtcaaaatatgtgaaacaaatttgccaacagagaacatgtattaaaggtgagtagtagatacatgatgcatatattggctttattatttaaacagtctgaatattttatmataaaaaacagggagacaagaaggatatacattcacggaagatagaaaaaatggggcacaatgtactaacaaagtaattcactaaagaggaattctgaataatcgatagatagacacaattgcagttgtaaccaggcaaataagattaaagcaaaaata

SEQ ID NO: 255041 - DNA, 502 bp, Homo sapiens
ctggatacggttttggatgaattgagaaactaaacggaagatacaaggtccaaataaaagaagragaaaaatgggtattaaaggactaacaattgggaggacccaggacatccaattagagagtgcccaagggggttcagcgtaattacttgcttggttggcaagtttttgggctctatccttgagttttttaatgttgtcatacaccaggccagattgatttaggtaaaaacaacactcctcatttaagaatatgcagagtcctcctttttcagcagtgagtaagtcaaggcctcggcggttttggaggacaactgcagctaaagagtcaacttgggcctggaggactgataaagtttgtgatatgtctgtgatgctagcagagaagtcattagacaggctacggaaggtcatgacagacgttgaaatgcctgctattccagtaccgagagcaacagtggaggcagaaagtcctaaaccgaccatcaagggaattagtgga

SEQ ID NO: 255042 - DNA, 502 bp, Homo sapiens
ctggatacggttttggatgaattgagaaactaaacggaagatacaaggtccaaataaaagaaggagaaaaatgggtattaaaggactaasaattgggaggacccaggacatccaattagagagtgcccaagggggttcagcgtaattacttgcttggttggcaagtttttgggctctatccttgagttttttaatgttgtcatacaccaggccagattgatttaggtaaaaacaacactcctcatttaagaatatgcagagtcctcctttttcagcagtgagtaagtcaaggcctcggcggttttggaggacaactgcagctaaagagtcaacttgggcctggaggactgataaagtttgtgatatgtctgtgatgctagcagagaagtcattagacaggctacggaaggtcatgacagacgttgaaatgcctgctattccagtaccgagagcaacagtggaggcagaaagtcctaaaccgaccatcaagggaattagtgga

SEQ ID NO: 255043 - DNA, 502 bp, Homo sapiens
ctggatacggttttggatgaattgagaaactaaacggaagatacaaggtccaaataaaagaaggagaaaaatgggtattaaaggactaacaattgggaggacccaggacatccaattagagagtgcccaagggggttcagcrtaattacttgcttggttggcaagtttttgggctctatccttgagttttttaatgttgtcatacaccaggccagattgatttaggtaaaaacaacactcctcatttaagaatatgcagagtcctcctttttcagcagtgagtaagtcaaggcctcggcggttttggaggacaactgcagctaaagagtcaacttgggcctggaggactgataaagtttgtgatatgtctgtgatgctagcagagaagtcattagacaggctacggaaggtcatgacagacgttgaaatgcctgctattccagtaccgagagcaacagtggaggcagaaagtcctaaaccgaccatcaagggaattagtgga

SEQ ID NO: 255044 - DNA, 502 bp, Homo sapiens
ctggatacggttttggatgaattgagaaactaaacggaagatacaaggtccaaataaaagaaggagaaaaatgggtattaaaggactaacaattgggaggacccaggacatccaattagagagtgcccaagggggttcagcgtaattacttgcttggttggcaagtttttgggctctatccttgagttttttwatgttgtcatacaccaggccagattgatttaggtaaaaacaacactcctcatttaagaatatgcagagtcctcctttttcagcagtgagtaagtcaaggcctcggcggttttggaggacaactgcagctaaagagtcaacttgggcctggaggactgataaagtttgtgatatgtctgtgatgctagcagagaagtcattagacaggctacggaaggtcatgacagacgttgaaatgcctgctattccagtaccgagagcaacagtggaggcagaaagtcctaaaccgaccatcaagggaattagtgga

SEQ ID NO: 255045 - DNA, 584 bp, Homo sapiens
caataatgaagtcacccatagggtgacacaagtagaggtataaagaaagaaaggccaacaggaactaaagtattcaattaatgcagggaatgaattaagataaatgacctataaattcatggttgacagcagcacgaaggggtagagcataatatatccacatgacacggcttcaaataagctggggcatttttgaagaaggacacacctatcccaaatcctagccttgaagtgcaagaggaatgatagaaaacaaaaacaaaaaacaataaccctcactagaattggaagatttatccttaattaatgtccagttcagttaaggcaagacaatacgtagaattttcagagacaaaattgctgatataatagagttttctaatcaaagaagtttgcagagtagaaggttatcagaaggtgggggatttatcaacttagagatatacaaaggatgtaggatctgccagggaagaataatgwtgataatggttgatagagaggcattgacttctggtcgtactagaagtaattatggatgtcaagcatggtcaaagtcatcatggtagtctcgaagaaccctgggc

SEQ ID NO: 255046 - DNA, 531 bp, Homo sapiens
gacccacagttttccaaaaagactcagggatttacgctgatataaatgaggcactgaggttttactgcaaattatgtttctgtaaaataattttataaatattttattccaatcataaaaatgggaaaattgatacctgaacaataaaagacataagccaaaagatacacaataaataaatgagtaaaatgaaaccaggatttttaatgcctttttcygggaataatgccatgttccttgtcagtactacctgccaaattggaagccctacgtaaaaacagctcgtgaaacaaaacaaatctctcctacagtcaacttccagttggactcagaagtttgagaattgataagaaaaaaatcagcacaacagcaaactcaggatataacatgtcatatttgcacattagaaatgattagcagataaagggtttgttcttcttgtactctttctaaaacctttaaacacacctatccaagatggctatttgctaattaccaaagatcagattcacagaggaagagaagtcaaaa

SEQ ID NO: 255047 - DNA, 582 bp, Homo sapiens
agtataatgaacctgccacccagaggctggctgatccccgcaggggctcaatgctggattctgcagattaggaactcagcagcagcgctatcccagtcaactttacaaaggggaagccatgttgctgagcccatgcatacacagctccagtcttgccaccaagactcctgtttatgggcccactgagacagctggagagataggctgactgacatgcagaatgtgtcattttgtccacttgattattaagagcctcctctgcaatggatgtgcttttgtgggcactcagaggggatacaaattctttcagggtcttttcattttgaaaggttcattcacatacctcttcctcaaactaactaccttgtcaccaatcttccaatcctgttccttccaactctgaccataaaaaccattaacaactacccatcgatgaccaatatagatctgtatttctaggcatgtctcattcccaacatrgtggacaaccatatttactgttcaaatctctgcctacagaaaagttttccttatccagtattattcacagttactcacgagtagggctatagtgctacacag

SEQ ID NO: 255048 - DNA, 548 bp, Homo sapiens
atgtcctctgttgctgcacagtgaccctgacttcagacttactggtctacatagattgtctatttctagaacactattctattcaatactataacmgacattcactttccttgttcaaaaaccaccagttatttcccattatccacaacaatattgccctgagtattttctgaagaaagcagtcgtaattttcctaatattcctaattttgcactgcatctgcagtacagaaaaagtgctttgaggtcgctcctgtatgggccactctatctcattcattggggatatcatattacacttattatcatataaaggccctaatgggtaaagaaggtgaacacaatgataatattggagtcccaaacatttggctttgagataccatatttatcagggaatgagatagaaatgaagaaggccagtgtaaatgaggaagttagacaagatgcaaataattatattaccattattcttagtactatactctagttcctgcttctaattaaagaacctcatatttcaatcagttactgtccacactgctgagc

SEQ ID NO: 255049 - DNA, 570 bp, Homo sapiens
tgatggaataaaatgactccagagatttacacagccaccatttgatcccagcctttgtcmttgtgttatttaaacaatggcttcctgctttctcaggggtcaggaaaatgatttaaaaatttgtcttcttgacaaggcctgaaaacgaagggaggtgtcgtggagaaatggtgatttttctggttacatcacttgattcaagcactccctggagctttcaaagccttttttatctgctcagagttgacacccaactcagagtcagaactcaccagaagatgaggaacacccccgaaatcaatgtttcctttctccatgggatttttttcaatcttggtacagctgcatatctcccaaactcggatgctcttgtgaaatgacagccacatcagtgtggttactccccacaaataacactagggggaaatgaccttttttatttaaaaaaaaaaaaaaaggctaatgctatagaatgatcatgtaaagaatgttgaataaaatttggcccatgttttaattgactctaggcacctctattgaaataagtctgaggcatagtttgtgaaacat

SEQ ID NO: 255050 - DNA, 567 bp, Homo sapiens
ggctccagaagaatagtgccatatggagggctyagcatcagtctctgttgctggcagactgtacatttggcagcagcaggagctttatcagtcttggtaagtggcaggccatgctcatggacccaagaagagccttcgtggctcccactgccacccaatccatgtacctatcacagcagccctggagtagccaataactgaggctggctgcttgctgccaaccggccaagttattctgtctatatcaatactatcaaaaaatatatataatgtgagctacaaatgtgagctgcatatgtaattttaagtgttctcatagccaacttaaaaagagttaacaaaaagataaaattaatttaatgatatatttcacttaacccaatatataaaaaatttcaacatgtaatcaatataaaaattattagtaatattttacatactttttggaagactaagtctttgaaatccagtgtgtattttgcaattacagcacatttcaatttggagtagccacgtgtggctagtgcatacaatattggacaacacaggtccacaccattgtttaat

SEQ ID NO: 255051 - DNA, 617 bp, Homo sapiens
atatatataatgtgagctacaaatgtgagctgcatatgtaattttaagtgttctcatagccaacttaaaaagagttaacaaaaagataaaattaatttaatgatatatttcacttaacccaatatataaaaaatttcaacatgtaatcaatataaaaattattagtaatattttacatactttttggaagactaagtctttgaaatccagtgtgtattttgcaattacagcacatttcaatttggagtagccacgtgtggctagtgcatacaatattggacaacacaggtccacaccattgtttaatatgtcttctgcagtgggtgctctctagttgataggtgytaacatgtgacacaaagatcttcacactttgtgtccactctcacatgtcattcacatgcttatactccaagactcctattccccaatcttctgatatctctgctttcagcatcctgagccaggctattcacttctacccaccagtccatatatattctaacagagctcctatttattcttccacacaaagagaataaccgggtggaccttaaagctctacctattttaaggatttttctctagccccatgagctactcctgaacaaggctgc

SEQ ID NO: 255052 - DNA, 508 bp, Homo sapiens
ttttggggagagattatatgcttacaataaggaggttttcattgtttaaagcaaccttgattttttttgcattgtttcattgtttggaatattgctttaattgtggcaaatagatatacattaaaagtatattcaacatcttgtaatatccatagawcattcagaatcaactatgttgaactagttgaactagaaaagttaaaatgttgtatccaaaataataaaaatgatgcacctatcttctaaacttttccccaggattcccaaagaataatcttaaaaatgtcaaataatgttcccacaggctatgtatgttgctgtttatttaaatataagtactgggatattttattttaaagatgtttcatttgttaatatctctttataggtgtcataaatatttttatgtatataaaaattggtctaagaggaccaattgaattgctagtatcagaccaattttttgctttaatataaacccagactgacatatcttgtttacaaacaa

SEQ ID NO: 255053 - DNA, 508 bp, Homo sapiens
ttttggggagagattatatgcttacaataaggaggttttcattgtttaaagcaaccttgattttttttgcattgtttcattgtttggaatattgctttaattgtggcaaatagatatacattaaaagtatattcaacatcttgtaatatccatagaacattcagaatcaactrtgttgaactagttgaactagaaaagttaaaatgttgtatccaaaataataaaaatgatgcacctatcttctaaacttttccccaggattcccaaagaataatcttaaaaatgtcaaataatgttcccacaggctatgtatgttgctgtttatttaaatataagtactgggatattttattttaaagatgtttcatttgttaatatctctttataggtgtcataaatatttttatgtatataaaaattggtctaagaggaccaattgaattgctagtatcagaccaattttttgctttaatataaacccagactgacatatcttgtttacaaacaa

SEQ ID NO: 255054 - DNA, 508 bp, Homo sapiens
ttttggggagagattatatgcttacaataaggaggttttcattgtttaaagcaaccttgattttttttgcattgtttcattgtttggaatattgctttaattgtggcaaatagatatacattaaaagtatattcaacatcttgtaatatccatagaacattcagaatcaactatgttgaactagttgaactagaaaagttaaaatgttgtatccaaaataataaaaatgatgcacctatcttctaaacttttccccaggattcccaaagaataatcttaaaaatgtcaaataatgttcccacaggctatgtatgttgctgtttatttaaatataagtactgggatattttattttaaagatgtttyatttgttaatatctctttataggtgtcataaatatttttatgtatataaaaattggtctaagaggaccaattgaattgctagtatcagaccaattttttgctttaatataaacccagactgacatatcttgtttacaaacaa

SEQ ID NO: 255055 - DNA, 508 bp, Homo sapiens
ttttggggagagattatatgcttacaataaggaggttttcattgtttaaagcaaccttgattttttttgcattgtttcattgtttggaatattgctttaattgtggcaaatagatatacattaaaagtatattcaacatcttgtaatatccatagaacattcagaatcaactatgttgaactagttgaactagaaaagttaaaatgttgtatccaaaataataaaaatgatgcacctatcttctaaacttttccccaggattcccaaagaataatcttaaaaatgtcaaataatgttcccacaggctatgtatgttgctgtttatttaaatataagtactgggatattttattttaaagatgtttcrtttgttaatatctctttataggtgtcataaatatttttatgtatataaaaattggtctaagaggaccaattgaattgctagtatcagaccaattttttgctttaatataaacccagactgacatatcttgtttacaaacaa

SEQ ID NO: 255056 - DNA, 620 bp, Homo sapiens
aaaagttacccatttattacataaaattcaaattaagtggatttcctgtattttatctggccaccttccatgaaaggaagtacaggagcatctccttttattgtgcttcactttactgcactttcaataatagtttcttgttttcttttttttttttaacaaattaagggtttgtgccaaccttgcatcaagaaagtctatcggcaccatttttacaacagcatatgttcactttgtgtctctgcatcacattttgctaattcttgcaaaattttaaactttttcattgttttatgtcctttatggtgctctgtgatcaatgatttttgaagttactataataattggtttggggtgatacaaaccatgcccaagcaacatggtaaatgtaataaatgttgtgtgtgttctgactgctccaccaacaggctgctcccccatytctccttctcttttggacctccctgttccctgagtcataaaaatatttaaattaagccaattaataactctacaatggtctctaagttctcaagtgaaaagaaaagttgcaggtctctcactttaaatcaaaagctagaaataattaatcttagtgaggaaggcatttctaaagccac

SEQ ID NO: 255057 - DNA, 525 bp, Homo sapiens
gacatgattggatttgtgcttcaggaagattaatctagctgagaaaggtaaaacaaattagagacatgaggagtctaaggtaacagttcaggggagagggtctgaattatactagcagcagtaggatagaggtgccggggcagatttgagacataacagaggtagtatcatcaaatcagtgatctgaagttcgctaatgaaattcacctatctggatttatggaataacaaacacctttgggaaaaaaaatatgtaccactgtcaatatttttatttcaaaacaaatacttgaagtgcctcttggattgcttcccccacatttgggtgaattttccccagaagctatgtaagcagctcggactcaatccygagttccttcactaagttcatgaagtagtttttcatcatgacagtaaacccacagcacacattcaagaggcatatgatggattaaggacatctttgaactgccagtgggaatggaaaacagaagaagactaaagactgcagcacaccagaagaaa

SEQ ID NO: 255058 - DNA, 567 bp, Homo sapiens
aattacaaccctcaaatatatatatttgagacaaggttttgtcttacatataggtttttgtcttaaatatatatatatttaaggtttttgtcttaaatatacacatatattcaagacaaggttttgctctgtcacatatggctggagtgcagcacgatcatagctcactgcaactttgatctcctgggctgaagcaattctctcacctcatcaaatggaaattttacttgcagtttcatttaaaaaatcaaaagttgcttaaatacattaagttgactttaagcaataaatgaaatcctaaaaattgtgtataaattgaatttgttttaattataaatgaatgaatgcatatcaggttaaatggtctatagtaatatgattcttgaggaataaattcatatttataaatatttgggaaaaaatgaataatttaggttttcatacgtcagatttgttgyatgtgggctaaatctgtaatctcattccttgttcctatttgaaactcatttctatgatgacaaaatatatattattttctgagaaaataaaaacgaggcttaatgaaac

SEQ ID NO: 255059 - DNA, 547 bp, Homo sapiens
aataattttagtcctcagtttaaaagatactgccaagtaaagtgtcccatatcttatattcatttagaaaacccttctctgaacacagaaaagaaatataactctataaaaaccccaggcacaagctgctaaccagtcgaatataattktatagatttttttatacttgaatatagaaaggcttttgactgtcatgtatcttgcaagatttgtataaataagggatgactggttgcatcatgatacacacatgtactgctcaatcgtctacttcacattttttgctgtgatgatgaaacattcacaatgacattttccttgacataaatgtagacctataaaagagagatttcatcttcagaatcatagaatgtttgaactctcaggaccacagagatgacttagtttagccttttccttttatatttcaagttgttgagactcagaaagataatgacatacccaagatcatccaggttattggcagccacatcataagaaatttgggaccctgtttattcctctgctgcacagtttgaaacagaaa

SEQ ID NO: 255060 - DNA, 547 bp, Homo sapiens
aataattttagtcctcagtttaaaagatactgccaagtaaagtgtcccatatcttatattcatttagaaaacccttctctgaacacagaaaagaaatataactctataaaaaccccaggcacaagctgctaaccagtcgaatataattgtatagatttttttatacttgaatatagaaaggcttttgactgtcatgtatcttgcaagatttgtataaataagggatgactggytgcatcatgatacacacatgtactgctcaatcgtctacttcacattttttgctgtgatgatgaaacattcacaatgacattttccttgacataaatgtagacctataaaagagagatttcatcttcagaatcatagaatgtttgaactctcaggaccacagagatgacttagtttagccttttccttttatatttcaagttgttgagactcagaaagataatgacatacccaagatcatccaggttattggcagccacatcataagaaatttgggaccctgtttattcctctgctgcacagtttgaaacagaaa

SEQ ID NO: 255061 - DNA, 589 bp, Homo sapiens
ttcctgggaagtaaacttcctagagctctcgtaagtatttttgattatgagagttgaagaaggactaatcgccaatattctccagccacttgccaacacctaaaactgaaggatgaatatccacggctaaaatatgtcaattatgtttttaatgtcccaacagctttagtgataacctatctgagttctatacaaacggaggcggagcaagatggctgagtagaagcctccactgacagtcctccctgagggaatgccaaattgaacagctgtccacacataaaagcaccttcctgcgaggcaaaaactaggcaggttatcacagtacctggttttaatttcatatcaaggaaagaggcactgaagaaggtaggaaagacactcttgaattgctgatgctacccmtctgccatcccccagcagtggctgcatggtgctgagacagaatctgtgcccttgggggaggaagagtgccatgattgtgggactttgcactgaaactcagtgttgccctgttacagtggaaagcaacagagggcagaactcagccagcacacacacagacagcatttagaccagccctagccag

SEQ ID NO: 255062 - DNA, 589 bp, Homo sapiens
ttcctgggaagtaaacttcctagagctctcgtaagtatttttgattatgagagttgaagaaggactaatcgccaatattctccagccacttgccaacacctaaaactgaaggatgaatatccacggctaaaatatgtcaattatgtttttaatgtcccaacagctttagtgataacctatctgagttctatacaaacggaggcggagcaagatggctgagtagaagcctccactgacagtcctccctgagggaatgccaaattgaacagctgtccacacataaaagcaccttcctgcgaggcaaaaactaggcaggttatcacagtacctggttttaatttcatatcaaggaaagaggcactgaagaaggtaggaaagacactcttgaattgctgatgctacccctctgccatcccccagcagtggctgcatggtgctgagacagaatctgtgcccttgggggaggaagagtgccatgattgygggactttgcactgaaactcagtgttgccctgttacagtggaaagcaacagagggcagaactcagccagcacacacacagacagcatttagaccagccctagccag

SEQ ID NO: 255063 - DNA, 564 bp, Homo sapiens
atttttatatgttaagccactgaaatagcaagatttgtttgttcctgtagcattctttaaagttgacttgaatttaattggaagcttttaatagtccacttttaaaatatgtttgctggcataaccaaaagcacctgggcttgtgtttttatcctgaatgtttcagtatttgttaaatttaacgaggggagaagatagcctcttttgtgctggctacttaacaatcatagcctagaggctgctgaaaagatgtataagctgctgtgtttatgctctaggcctcatgtctcattcctgggctgcagaggaatttcccagccaaatttccaacctatatttagatctctggtcatggcctccaggcagtttgtggcactgcattaggtaccaaccatgggctgttacagagaccattcttcacatacccagaagtaaactgcaaggcttggtacattgtatttgggraaaaaaaaagtgtaaatcagaactttaaaagtgcttatattattataggctggagaattgtaggaacatggcatttccttttggctagacataacaatt

SEQ ID NO: 255064 - DNA, 558 bp, Homo sapiens
attaggtaccaaccatgggctgttacagagaccattcttcacatacccagaagtaaactgcaaggcttggtacattgtatttgggaaaaaaaaaagtgtaaatcagaactttaaaagtgcttatattattatagsctggagaattgtaggaacatggcatttccttttggctagacataacaattcttccttttcaggtagtcttttctgcaaaaactggccttcagttactcaatcaatttgtcccaatatggatcaagatataaaagatttcatacacttgacttaagcctatgataaatacgtgtttaaatactcttttctctaggacactgagtttccaagcctttatgtagacatttgacccattttactggagtggtagatttgtaaaccaattagtaactaggctattgactgaatttaatggttgctaattgattcattaccaatcaatctagacaaaatgatcaaatcacttgtttatttcaggcttagtagcaataaaaagtctattacttctttaaaaacatggtgcatggaagcaccccatgttta

SEQ ID NO: 255065 - DNA, 564 bp, Homo sapiens
atttttatatgttaagccactgaaatagcaagatttgtttgttcctgtagcattctttaaagttgacttgaatttaattggaagcttttaatagtccacttttaaaatatgtttgctggcataaccaaaagcacctgggcttgtgtttttatcctgaatgtttcagtatttgttaaatttaacgaggggagaagatagcctcttttgtgctggctacttaacaatcatagcctagaggctgctgaaaagatgtataagctgctgtgtttatgctctaggcctcatgtctcattcctgggctgcagaggaatttcccagccaaatttccaacctatatttagatctctggtcatggcctccaggcagtttgtggcactgcattaggtaccaaccatgggctgttacagagaccattcttcacatacccagaagtaaactgcaaggcttggtacattgtatttgggaaaaaaaaaagtgtaaatcagaactttaaaagtgcttatattattataggctkgagaattgtaggaacatggcatttccttttggctagacataacaatt

SEQ ID NO: 255066 - DNA, 558 bp, Homo sapiens
attaggtaccaaccatgggctgttacagagaccattcttcacatacccagaagtaaactgcaaggcttggtacattgtatttgggaaaaaaaaaagtgtaaatcagaactttaaaagtgcttatattattataggctggagaattgtaggaacatggcatttccttttggctagacataacaattcttccttttcaggtagtcttttctgcaaaaactggccttcagttactcaatcaatttgtcccaatatggatcaagatataaaagatttcatacacttgacttaagcctatgataaatacgtgtttaaatactcttttctctaggacactgagtttccaagcctttatgtagacatytgacccattttactggagtggtagatttgtaaaccaattagtaactaggctattgactgaatttaatggttgctaattgattcattaccaatcaatctagacaaaatgatcaaatcacttgtttatttcaggcttagtagcaataaaaagtctattacttctttaaaaacatggtgcatggaagcaccccatgttta

SEQ ID NO: 255067 - DNA, 591 bp, Homo sapiens
tccatacgagagccctttaagttcttcacatgtaatagctccaaaacagaatcacattttccattaaaatctgcttctccttatttcttagttcagtgaattataccaccatttcctagtcacccaagtcaaatatctaggaatcacctgcagcttcttctttatcttcaatcctttgtttttgattacaaagtcattgttacaatttctacttggtttatgacaccagcctcttgaagtttcctctgccagcagcactaacccttgagtcttattcttcacagatgatcagtcatctttgtaaacataactatgccatcctcttgcttaaaacccttcaacgtttctcataggttttagtccaatatccttcttgtggattataaggtcttcaagatctgcccatgattgcttcaccacttatattcattgccctgaccctctccctctgtgaatttcagctatattgcattacctataggttccagaatggtctctgataattcaaatttccaygtctttgagcatgtagcacttaatacgtctcttttctattatctgcctggttaactcctttggacttaattcact

SEQ ID NO: 255068 - DNA, 605 bp, Homo sapiens
tactgcagaagagaaatgcctggcactgctctgttagcaagatagagtcctcttctaagtagattggtgccaaatatagtatatggtggccttatgagcctgagtgttgacttgggccacccctataacacatatatacatgtagtccttacacactgaaatatgttgtagacataatgtgctcaggtctccagttttaaataaatatgtcttttggggtgagggggatggtggggaatggagtctccctcttgttgcccaggctagattgcagtggcacaacctcagctcactgcaacctccgcctcccgggttcaagcaattctcctgcctcagtctcctgagtagcagggattacaggcacccaccataccaccatgcctgggtaawtttttttgtatttttggtagagatggggtttcaccatgttggccaggctggtctccaactcctgacctcaggtgatccacctgcctcagccaccaaagtgctgggattatagggatgagccactgcacccagccaaatatgtcatttttaaagacctaatatgatatatcttgtgtgagtgcctgtgtgtgtgtatgtgtgtgtatgtatttgcc

SEQ ID NO: 255069 - DNA, 587 bp, Homo sapiens
agcagccaagtgtggtggctcacgcttgtaatcccagcactttgggaggccgaggcgggtggatcacgaggtcaggagttggagaccagcctggccaatatggtgaaatctcgtctttactaaaaatacaaaaattagccaggcgtggtggcacacgcctgtagtcccaactactcagccggctgaggcaaaagaatcccttgaacctaggaggcagaggttgcartgagcggagattgtaccactgcactccagcctgggtgacagagtgagactccctcctaccgcccgccactccccccaccccatccccgccaaaaaacaagaatagccaggtgttgtggctcacacctgtaaacccagcactttaggaggccaaggagggaagatctcttgaacccaggagttcaagacaagccttaacaacataccaagaccccatctctacaaaatatatatatatattttaaattagccaggcatggtagtgtacccctatagtcccagccattcagcaggctgaggcaggaggattgcttgagtcaaggaggccaaggctgtggtgagccatgatcatgttactgaac

SEQ ID NO: 255070 - DNA, 587 bp, Homo sapiens
agcagccaagtgtggtggctcacgcttgtaatcccagcactttgggaggccgaggcgggtggatcacgaggtcaggagttggagaccagcctggccaatatggtgaaatctcgtctttactaaaaatacaaaaattagccaggcgtggtggcacacgcctgtagtcccaactactcagccggctgaggcaaaagaatcccttgaacctaggaggcagaggttgcaatgagcggagattgtaccactgcactccagcctgggtgacagagtgagactccctcctaccgcccgccactccccccaccccayccccgccaaaaaacaagaatagccaggtgttgtggctcacacctgtaaacccagcactttaggaggccaaggagggaagatctcttgaacccaggagttcaagacaagccttaacaacataccaagaccccatctctacaaaatatatatatatattttaaattagccaggcatggtagtgtacccctatagtcccagccattcagcaggctgaggcaggaggattgcttgagtcaaggaggccaaggctgtggtgagccatgatcatgttactgaac

SEQ ID NO: 255071 - DNA, 587 bp, Homo sapiens
agcagccaagtgtggtggctcacgcttgtaatcccagcactttgggaggccgaggcgggtggatcacgaggtcaggagttggagaccagcctggccaatatggtgaaatctcgtctttactaaaaatacaaaaattagccaggcgtggtggcacacgcctgtagtcccaactactcagccggctgaggcaaaagaatcccttgaacctaggaggcagaggttgcaatgagcggagattgtaccactgcactccagcctgggtgacagagtgagactccctcctaccgcccgccactccccccaccccatccccgccaaaaaacaagaatagccaggtgttgtggctcacacctgtaaacccagcactttaggaggccaaggagggaagatctcttgaacccaggagttcaagacaagccttaacaacataccaagaccccatctctacaaaatatatatatatattttaaattagccaggcatggtagygtacccctatagtcccagccattcagcaggctgaggcaggaggattgcttgagtcaaggaggccaaggctgtggtgagccatgatcatgttactgaac

SEQ ID NO: 255072 - DNA, 538 bp, Homo sapiens
aactcccggcctcaggtgatcctcccaaagtgctgggattacaggcttgagcaattgtacccccagcctattatatactattttcatttattcacaactaatgcatttagtcacttccaacaagttgtttytctgcctccctaaagttctaattaaagaactcctgctattttcatagggagaccgttgcagacaagattctcatttctggaatgaagaaatccagatcggcagcactcttaatattgttcactgcttctacaatgctaatttttgtttgcatagtctatacactaattagcacagtcctgtacactgagtcttcaataactgctcagtgatagcagaagaaagatagctagtaactgatgctgtgggtttagcttgtcagaatgcttagtattctacattctcgatttgtaaagactgaaaccctggcagcacacacacaaaaagataaaatggaagcaagcagaaagggtcaaattaaagagctacatctgccttatttttacatagtttttgtatctatagtgtt

SEQ ID NO: 255073 - DNA, 592 bp, Homo sapiens
tttataaatgggagttcccctgcacaactattgcctgctgccatgtaagatgtaactttgctcctccttcactttctcccatggttgtgaggtctccccagccatgtgaaactgtgagtcaaataaacctctttcctttataaattaaacagtatcaggtatggctttattagcagtgtgagaacagactaatacaccaatatatcccaccttcttctgtctgatttttctagctgccctgacagccaatgggagggtgcccaatcacatggagggtgggtcttctctcccagtccactgactcaaatgttaatctcctctgcaacaccctcatagacgcccccagaaacaatactttcccatctatctaggcattcttcaatccaaccaagtcaacacctaatattaaccatcacacttgtcaaycacaatttttatctttgttataaaatccttgaagaaaatcaccgcctgctgaaagagatgtttcttattttcaaagcaaatgggttcccctaggtggcaagatggcccaatggatattattctctcacttatcagtaggccacctcctttagggaaaaaccattta

SEQ ID NO: 255074 - DNA, 587 bp, Homo sapiens
tcccccaccccatagttcttcttgggactgatcctatatgctatatgatcctatgtgcctgtgtgattgatatgccagaaggaggcttccctttgagttgctgctggcttgttgatagaactgaatgcaaaacaagctataaaaattcctacagaactcaacagaatttcctcaccagcaacagaacttcctcaaataatcggtcccaatttcctgtatcttttccaggattcaggaaaagtagcaagttgattcagccacagaccatcaagcaaagatctgattgccctcggttggttcagatcckacctatgaaaggttggttggtaggtcgttaaggacatatctgaactaaggccataattcagagttcctttcagttatcaactaaaataccttcagtaaactacctcacaaatggctgagttaaaaattacctcagagtgtctcaaaagttactttaatacaagatccattaaataaaatagttaaggattcatgcctggattgtcctttaataaagtttcattatttcctcatatttataaggaccacagttatagggaaggctgacagctctggagttt

SEQ ID NO: 255075 - DNA, 552 bp, Homo sapiens
tcatcctcaaacatatccagtaagagtcagttaaacaagctccctaggtgatttgttttcatacacaccaaaatttggaaacttctaaaagttaaagaatcatcagcaatagataagtaaaggaattacgagtcccacaaccattcagtgatacattataaattaaaactcattattaatttaagacattgcagtctcccctgtttcctagttaaaactgtggaatgtaagagtttgaaaacaatacaatcaccttgatacatgatttttaagtatgtacaaaagaacaaacaacaccgcaaatatcattaagmttgcttatgactatactctcattgctgtggactaaatgtttatgtccccccagaattcatgtggtgaagccctaatccccagtgcaatagtatttggagataaagctttttggagataattaggtcctaagagtgaatatctcataatagtgttagtgctcttataagaagagacacaagagagatgatctctctttgtgtcatatgaagatacatcaagaaagcagccatttgcaaa

SEQ ID NO: 255076 - DNA, 552 bp, Homo sapiens
tcatcctcaaacatatccagtaagagtcagttaaacaagctccctaggtgatttgttttcatacacaccaaaatttggaaacttctaaaagttaaagaatcatcagcaatagataagtaaaggaattacgagtcccacaaccattcagtgatacattataaattaaaactcattattaatttaagacattgcagtctcccctgtttcctagttaaaactgtggaatgtaagagtttgaaaacaatacaatcaccttgatacatgatttttaagtatgtacaaaagaacaaacaacaccgcaaatatcattaagattgcttatgactatactctcattgctgtggactaaatgtttatgtccccccagaattcatgtggtgaagccctaatccccagtgcaatagtatttggagataaagctttttggagataattaggtcctaagagtgaatatctcataatagtgttagtgctcttataagaagagacacaagagagatgatctctctttstgtcatatgaagatacatcaagaaagcagccatttgcaaa

SEQ ID NO: 255077 - DNA, 548 bp, Homo sapiens
cgtttagagtgcttttcatataattgacaattacaaatatgaaaaatatttttagcaggccattcctcataaattaatgtgaaaaagccatcgtactatatcatgctcacctcttcattcctactttcttttcagtcaggtttcctgtgttcaaatttcttcttggtaataatagcagagattgttgtaatgaatgatcacgggtcagacaggagtaggcccactccgccaggaagcacagcatggttactgtttgagtttgccagagctgctgtaacaaattgccaccaacttggtgccataaagtaatamaaacttaatttcttatagttctggaagtcagaagtccaaaatgggtcttacccactagcagggttggcagagctgcattccttctgctctgacagtttccttgccttttctaggttgctttagaggcaacctcccattccttagcttgtggcttcatgctccatctttaaactctatcactccaacttctgcttctctcatcacatgttctgtctttcctctctgctttcatcatc

SEQ ID NO: 255078 - DNA, 548 bp, Homo sapiens
cgtttagagtgcttttcatataattgacaattacaaatatgaaaaatatttttagcaggccattcctcataaattaatgtgaaaaagccatcgtactatatcatgctcacctcttcattcctactttcttttcagtcaggtttcctgtgttcaaatttcttcttggtaataatagcagagattgttgtaatgaatgatcacgggtcagacaggagtaggcccactccgccaggaagcacagcatggttactgtttgagtttgccagagctgctgtaacaaattgccaccaacttggtgccataaagtaataaaaacttaatttcttatagttctggaagtcagaagtccaaaatgggtcttacccactagcagggttggcagagctgcattccttctgctctgacagtttccttgycttttctaggttgctttagaggcaacctcccattccttagcttgtggcttcatgctccatctttaaactctatcactccaacttctgcttctctcatcacatgttctgtctttcctctctgctttcatcatc

SEQ ID NO: 255079 - DNA, 574 bp, Homo sapiens
ccaatgactaactgatgtggaatataaagacytggaccctcattccaacttgaggcaactctaaaggctcatctaagtatcatggttcccagtaggtcagctgaggccttcatggagcctgcatcacaacccaacttccaccttagcccagttgtttcttcttcttcctcctactagtgtggatctcaacaatactccctgataaacatcctaggcattaattttcatcttagaagtctgcttccagggaacccaacctgcaacccaagtctctaatattataagcatcctttaactttttttgtatcagtcttagcaatcataatttaatataaatttatgtgttctttgatcagtgtctttgttcctatgaagctctatgctctttgaaacaagaactgtcatttttttgttcactattgttttctcagtacttagcagtgtacttggcatataatagatgcttggtgaatagctcattgttgcatgagtaggtaaataaattatctcataattcatcattagaaatttatctctttgcattgttattgggtttttagttaaaatgcaatta

SEQ ID NO: 255080 - DNA, 596 bp, Homo sapiens
taacatctaatttctcactggaagatcaagtaaatgctaagaatataatttttaccatgttgtaaatattgaaaatttaaaactgatatatcactttaaaaatgtaatatatttaatatacttactatggcaatttaatatgtgccatscattataaaaatacgtgaataagttcctctttaaatgattaatatttcacatgactcgtttttaaccttaatttgtatttccatttcacttctcccacagaattttatctgagtgacatgtttctatgtttgaaagtctttgatttaacatcctatttacatttctgcaacaagaatatgtatataaattaatttttgtaaatttatgctatttttttcctggatttagtattcatgcaattgttagtagtagccaattgataaaaacatttggcaggtcagtctcctcccagttcactactttcaaaaataagttggtaatttaaaattatttattttaaattatagatgatgtgattcagatatataatgctgaagttcatgtaattggacaaaattaatataaccatccttctgctattcccatctgcttgttaatataaatac

SEQ ID NO: 255081 - DNA, 596 bp, Homo sapiens
taacatctaatttctcactggaagatcaagtaaatgctaagaatataatttttaccatgttgtaaatattgaaaatttaaaactgatatatcactttaaaaatgtaatatatttaatatacttactatggcaatttaatatgtgccatgcattataaaaatacgtgaataagttcctctttaaatgattaatatttcacatgactcgtttttaaccttaatttgtatttccatttcacttctcccacagaattttatctgagtgacatgtttctatgtttgaaagtctttgatttaacatcctatttacatttctgcaacaagaatatgtatataaattaatttttgtaaatttatgctatttttttcctggatttagtattcatgcaattgttagtastagccaattgataaaaacatttggcaggtcagtctcctcccagttcactactttcaaaaataagttggtaatttaaaattatttattttaaattatagatgatgtgattcagatatataatgctgaagttcatgtaattggacaaaattaatataaccatccttctgctattcccatctgcttgttaatataaatac

SEQ ID NO: 255082 - DNA, 596 bp, Homo sapiens
taacatctaatttctcactggaagatcaagtaaatgctaagaatataatttttaccatgttgtaaatattgaaaatttaaaactgatatatcactttaaaaatgtaatatatttaatatacttactatggcaatttaatatgtgccatgcattataaaaatacgtgaataagttcctctttaaatgattaatatttcacatgactcgtttttaaccttaatttgtatttccatttcacttctcccacagaattttatctgagtgacatgtttctatgtttgaaagtctttgatttaacatcctatttacatttctgcaacaagaatatgtatataaattaatttttgtaaatttatgctatttttttcctggatttagtattcatgcaattgttagtagtagccaattgataaaaacatttggcaggtcagtytcctcccagttcactactttcaaaaataagttggtaatttaaaattatttattttaaattatagatgatgtgattcagatatataatgctgaagttcatgtaattggacaaaattaatataaccatccttctgctattcccatctgcttgttaatataaatac

SEQ ID NO: 255083 - DNA, 358 bp, Homo sapiens
ctggcccccttacatgcaagtgaaaattctattattccttttccaaaaattgtgtatgcatttgctttaaataaggtcaaagtatcaacttcccattgcattttaaaataaaataaggatatcytacctaaattctataattgttatgtcaatattgaatatttttctcttatagtcaaactgatgtgaaaatgatggagaagaatcagaacacgagaagatgataaaactggaatggcaggaggattagagaggataaattctattttaaattttagttttggaacaagaagcctttaaagttgaaatacttcaaggaaatacaattttgaacttggtcaataattgcttgtccaaa

SEQ ID NO: 255084 - DNA, 358 bp, Homo sapiens
ctggcccccttacatgcaagtgaaaattctattattccttttccaaaaattgtgtatgcatttgctttaaataaggtcaaagtatcaacttcccattgcattttaaaataaaataaggatatcctacytaaattctataattgttatgtcaatattgaatatttttctcttatagtcaaactgatgtgaaaatgatggagaagaatcagaacacgagaagatgataaaactggaatggcaggaggattagagaggataaattctattttaaattttagttttggaacaagaagcctttaaagttgaaatacttcaaggaaatacaattttgaacttggtcaataattgcttgtccaaa

SEQ ID NO: 255085 - DNA, 358 bp, Homo sapiens
ctggcccccttacatgcaagtgaaaattctattattccttttccaaaaattgtgtatgcatttgctttaaataaggtcaaagtatcaacttcccattgcattttaaaataaaataaggatatcctacctaaattctataattgttatgtcaatattgaatatttttctcttatagtcaaactgatgtgaaaatgatggagaagaatcagaacacgagaagatgataaaactggaatggcaggaggattagagaggataaattytattttaaattttagttttggaacaagaagcctttaaagttgaaatacttcaaggaaatacaattttgaacttggtcaataattgcttgtccaaa

SEQ ID NO: 255086 - DNA, 562 bp, Homo sapiens
aaaagtaatagtaagaaaaggcatagtatgtactcagaatagaattgtaaacagttaggtgagaaattctgagtgtctaggccaaaygttcatcttctttattttaggaaattaatctaaatcttaggggttgtttgcattttatcttccagtagatcaacatctagcattactcttcattctcattctccacagttaaccctccccattgttgaaaccagaattagtttcctcaggatccttggtccctaagaaaatgaagttctttttgtcccaatcccaggtccaagcagttctacttaattactctccatagtatctcaagtcccgatttaaagacctctaaagattcttctaagaaccactttcttcactgtctcttaatgcattgcttttctctgcctggaaaggttcctttttagctgccggtcactttaaaatctttcttagccacctactgtattccagtcaattaacaatttctagtctggcaacacctagggcaactctataatcgtgagtattacctcccacatcctcatccattacatcacatattctg

SEQ ID NO: 255087 - DNA, 523 bp, Homo sapiens
tgactctaacctatgtcatttctgttgctattttctgtcctttgttccacagtagacaaggacagtttgtatactctttgtcaatgaatactttgagattgacttatttatatgtccagttgtccctctgtatctcctgggaattggttccaggacccctatggataccaaaactcacagatgctaggtaccttgtataaaatggcataggatttgcatagaacctacacacagtttcgtgtacttttttttttttttttttttttgagatggagtcttgcactgttgcctgggctggagtgcaatgacascaaattggctcactgcaacctccccctcccgggttcacgattctcctgcctcagcctcccgagtagctgggattacaggcacacaccaccacacctggctaatttattgtatcctgtactctttaaattacatctatattacttataatacctaatacaatctaaatgcgacgtaagtagttgttatactttattattgtattgttattttt

SEQ ID NO: 255088 - DNA, 563 bp, Homo sapiens
ctagagccttaagaagcaacacaaccctgccaacatcttgatttaagcccaagaaaactgattttggaattctgacccatagaactgtaagattataaatttgtgctgtattaagcaactatatttgtggttctttgttagagcaactataagaaagyaatgtgtggaaattaaaaacaaaagctgcttttgtggttacatacatttaaaattatcataatgtttatatttgtcaacttcttataactcacagtttttgttatatcctttccttcttaaaatatttattttcctacctacttctatatccataatgtctatattatttttcttaaagaacccactaaatgtatcagttttgagtccccagaaaaactggatccactaaaatggattattaaatcttggctattgcaaatagtgctgcaataaacatgggagtacaggtatctcttcaaaaaaaaaaaaatgccccaggaaggcagcaagtagagagctttaaaccacagctgcagctgcttcagggctggggcacttgatagtgtcaggcagtgattttgcac

SEQ ID NO: 255089 - DNA, 563 bp, Homo sapiens
ctagagccttaagaagcaacacaaccctgccaacatcttgatttaagcccaagaaaactgattttggaattctgacccatagaactgtaagattataaatttgtgctgtattaagcaactatatttgtggttctttgttagagcaactataagaaagtaatgtgtggaaattaaaaacaaaagctgcttttgtggttacatacatttaaaattatcataatgtttatatttgtcaacttcttataactcacagtttttgttatatcctttccttcttaaaatatttattttcctacctacttctatatccataatgtctatattatttttcttaaagaacccactaaatgtatcagttttgagtccccagaaaaactggatccactaaaatggattattaaatcytggctattgcaaatagtgctgcaataaacatgggagtacaggtatctcttcaaaaaaaaaaaaatgccccaggaaggcagcaagtagagagctttaaaccacagctgcagctgcttcagggctggggcacttgatagtgtcaggcagtgattttgcac

SEQ ID NO: 255090 - DNA, 563 bp, Homo sapiens
ctagagccttaagaagcaacacaaccctgccaacatcttgatttaagcccaagaaaactgattttggaattctgacccatagaactgtaagattataaatttgtgctgtattaagcaactatatttgtggttctttgttagagcaactataagaaagtaatgtgtggaaattaaaaacaaaagctgcttttgtggttacatacatttaaaattatcataatgtttatatttgtcaacttcttataactcacagtttttgttatatcctttccttcttaaaatatttattttcctacctacttctatatccataatgtctatattatttttcttaaagaacccactaaatgtatcagttttgagtccccagaaaaactggatccactaaaatggattattaaatcttggctattgcaaatagtgctgcaataaayatgggagtacaggtatctcttcaaaaaaaaaaaaatgccccaggaaggcagcaagtagagagctttaaaccacagctgcagctgcttcagggctggggcacttgatagtgtcaggcagtgattttgcac

SEQ ID NO: 255091 - DNA, 581 bp, Homo sapiens
atcaccctgaaggcaggagctgtaccttagctctcttctgcctcccctcacagcactgaaaacagtgccaggcacattgtgggcactcaacaaatgcctgatggattttcagggaaatctgcactgaggttatttctacattaagaagctaagaggaaagaaaaatgactataccatttagaccagtgacttccaaactgtgagtcacaactcattaagtttaagtagtttagtaagtccataaccaatatttttgtcytgagaaaatgaaaacaaaatgtgtctatgaagaagaaatcttcagggtgctcctcccctgttttgtagagctacattagcaacccctgaaatccaagtctccacccactatgtacctgcacccacaactgaacatggctgaagtcatacaaccacacccactggtcttcctgtaatttgcttccatgatcttgactgggtccatatgctggtcattgtacttcatcctgggcctgctaccttccaagacaaccaccatctcccatcctccaggtcctcttctcccattctctctctcagcacctcacctggcttcctacctc

SEQ ID NO: 255092 - DNA, 560 bp, Homo sapiens
ccacacggagatgaggggacgtgtgtgtcatgaacacagtcacggccccaacacttctccacggctgagtcccagccctgcctcctccctggcccccagctctctgggccactctgagatggatggcaaagaggcagatgcttgtctagatggtgtggttgaaagggagtccccgcacaccctccaactatctcgctcacagacctgcctaaaatcctcatcacaggcacttcgattctttgcattcaggcatcttacttccagaagtttcctgttaaatgcaaatatacacagaagagtcacatgtactcagccttggacttctttttccaatgccaccctttcactaacatrtaccagctcccctcactactccccagcagcctgagtccagagcaaagacctctggcaaacacaagaactctcccaccaagagaaaggcagaaacctaaatttatggagaaaaaaaaaaaaaaactagataggaagagggagaaaacaaatagtcatgctatctgacttccaccctgatttattttatgccctcccacaactaggga

SEQ ID NO: 255093 - DNA, 611 bp, Homo sapiens
cgttatgctgagtgagtaaatccagactcaaaagactacacattgtgtgattccttgtatatgacttcctggaaaaggcagaaccatggagacaagaaactgagccactaggttgccaggggttggaggtagaagagaggaattgacaacaaagaagcagaagagaacactttagagtgacggacctgttctataccttgatttcggtggtagtcatacagctgaatttacatgtcaaaactcataaaagtatactctaagaagagtgggttttactgtatgtaaattatacctcacttaaatagataatatatacacacatcaggtaagtgctccttttracaatgccccaaaccacatcctccaccctgccataccctagtgcccctccctgctccctatgcaaagaacaaaatgagaagttgtgtcattggaaatgttatggttaacataactacagaaaacaacctggaatgggaaccagaggagaaaaaggagagtttcaacaattaaaatgatgtctagaaaacagtcaggaaaatggagagcatgttcattcctccgtttgctttgggatgcatgtctatgactttacaatagtgaatcttatt

SEQ ID NO: 255094 - DNA, 538 bp, Homo sapiens
ccaactgaacccacttaggtgggcttccctttctatttaccatccaggggcactgcttttccttctcatttccctaccctaagcccctccagctttctccactccctagctcttgtgaagtattttctagctgttgttgatccgtgtccctccaccttttattgaatctccctcaagattctctgttaaagccagtattttactttagaaagtcttggttctatgcaaatcttcattctctttgcacccccatctagttgaggctggaggtctcatcccccagcagaggtcaccaaatcctcttttaaggaacgagcamggggaagcaagctgaggttgtcccttctggaaagtcttaggtgacctcccttccacaaacaccctggcccctccagccttccccagagtacctgcctttccctctgcagtagcacttgtcactctgtgctatgattacttatgcatcagttttcccttgacagtgagtcccttgtccccatccctgtgcctcccgactccaccaccaccctggctgaga

SEQ ID NO: 255095 - DNA, 273 bp, Homo sapiens
acttcgcaaacacatactagggtcttagaagagtctttgaaggggtctttkcaacactgccaggagtgacgagaagacaaagaaaagtaaaacataataatcatccttgaaacatttttgctgattaaacattagaagattttcatcatctacaaggcaggaggtggatgaaggggaacctactgaaaaaaaaagccaaacagcacttcatagttaacctaagaggttaaaaatgctgtgggattcgagggaggaaaatccccccttgaatcc

SEQ ID NO: 255096 - DNA, 606 bp, Homo sapiens
cctctcccctttgaaatttttttcaaaccagtttgaattctgtcacttgcaacccaacaggtcccaactaatattcctcgtgtgtgagcagcagattcagaccacagccaccttcccctaagcrcatgcactccctctcccccaacactgctgccccggagcatggtgggccaggcaagcccaccatcctgctccatcccctcacctgggaaatccacactcctggctactgcctccctctactccagcatctgccagtgcccatcccttccctggaaaatgctgtctcagagcaaaacaaagagtcctcgagcgagggcctggcacagctaggttgtgaagttgacaccctgatggggcacctgaggcatttgaacacacatgtccttgtgctcactgattatagcagaaagggcaggaatgttgaaaagatcaacttttctcaaagaaattgaaaccaagacaagagttagatcaagctcaggatccagggcttcctgtcgctggcatagagatttctaaagaggggaaaagttaatgttaactcaacccaatactgtggtccagtttaaaacagaggcacaaccctaaacctgagatctaaga

SEQ ID NO: 255097 - DNA, 562 bp, Homo sapiens
tgtgtatgtgtgtgaatgcacagcaaccaacaagatccagagaaaagggaaaggaactagacataaggggaagtggtcacatgggttaaattcttttcattctttatgcttctgtgttgtttgaattgtttgcagtgagcatatgttcgcgtactacttttgtaagttaaagagatgactgactggtgttacgtagatatcaaccttgtgtcaatccttagatccactaaacctgggagctgaaatgagccatagcatcatctattttccakgaggttgtaaattacttcccctaggattccacaaacacacctacgtggggtggagaccacacttaaacccactgcacatcaccatgtacttccaggagctcctgttcgtgcagtcttcataccaaagcttctcctgccttctctgtttaactagactgagactacaaaatgtgctattgaaaacaattaccatttgcaactacatatgtagataaaacaggagtttcttattgatgtacatccaaaataatttgcagaattaaatttaatatgtaagcctggattgcaaa

SEQ ID NO: 255098 - DNA, 547 bp, Homo sapiens
tatgaaacttattgctgtgtgaatgataagagggagggcagggagcatgtagtcactgcattgcagtagatagtgatgccactagaatgcacaaatttctgaggagtacagatgggaagatgcctctgactgaggaggtataaaaaagggggcattcttgcaaagttgacctacaaacaggcaaagaaaagatgcacagtctttgagttagagaagagggggatgggggagtcattccaagcaaacagactaaaagtataaaaggataaaagggaagatataagtagataatagtacagcaatgcctttgactgaagcacagataggcacagaaaagagggggatattagtyaagagataaattagatgggccccaagcttctatggacaagggctctcctcctataatagcacctgccagtgcctcacccagatcccctcagatgtcatgtaggttctgtgtgctcctccccagctcccatgtgctttggttggctgcccctgcaggtgacagcccatgggtttctagtgctattttgatcacaac

SEQ ID NO: 255099 - DNA, 571 bp, Homo sapiens
aatataccacatcttctatggggaagaggggggctgtagttggaggagcactttcttgaatttttataacaggcatatattcatatacatttcactcaggaattctaagattcattctataaacataattggataattttttaraggtataaaaatgatgtttatctcagagttatttataacagtgaaaaataaaaaacaacttcaatatatatcaatagaaaagctattaagtaaattaatccgtatccatacaactagattctatgcagccatttaaaaaatagggtgtagatttttatgtattttcatagaaataaattgacagaatattggtaagttaaaaaaaagcagctaatgaaacaatagtaagtgtaatatgagatgatttttggaaaaaatatacagatacttgcttagggaaaatctgcaagaatatcaacagtgggtcagctctgggtggtatgttcctcccacttgagctttcctggaaaaactattttcctttttctaggacatacagctaaatgcattgtactacatttttgcaaagaaaaatatagttattttt

SEQ ID NO: 255100 - DNA, 622 bp, Homo sapiens
ctgggtgaagtagggggccctttgtagagaccctccccttccctgaggatcggccggctgtccagttcagttacaaagggggaggaatggctttggaaactgtctattcacattagcttttcactttctgaaatgcctcaatcatctttctcagggttggatccaatttctctycactctgaggtaattgtctttctgctcagccttgctgcagtgagcaggtgagctgacagggccagagtaggctggagagcttgtctgccttgttattgttccaggtgtccttgtaccagacatgaggtcggggagaatagagttcatgttttctctgtgccagccttgagcccttgctaacgactttcttcatgaaaagagaagtagctgaccattactcagcacctacttggcttcgagcactttcctagcattctacctatgactttaatcttccccacacccccatgatataggtattattctattttacagatgaagaaaccgaggcccagacacattaagtatcgtgccaaaatccagtggcatggccaggacttggactcccattcaagcccttgccatttctactcagccacgtttacaaacacctagggtttgaatggcg

SEQ ID NO: 255101 - DNA, 571 bp, Homo sapiens
aatataccacatcttctatggggaagaggggggctgtagttggaggagcactttcttgaatttttataacaggcatatattcatatacatttcactcaggaattctaagattcattctataaacataattggataattttttaaaggtataaaaatgatgtttatctcagagttatttataacagtgaaaaataaaaaacaacttcaatatatatcaatagaaaagctattaagtaaattaatccgtatccatacaactagattctatgcagccatttaaaaaatagggtgtagatttttatgtattttcatagaaataaattgacagaatattggtaagttaaaaaaaagcagctaatgaaacaatagtaagtgtaatatgagatgatttttggaaaaaatatacagatacttgcttagggaaaatctgcaagaatatcaacagtgggtcagctctgggtggtatgttcctcccacttragctttcctggaaaaactattttcctttttctaggacatacagctaaatgcattgtactacatttttgcaaagaaaaatatagttattttt

SEQ ID NO: 255102 - DNA, 622 bp, Homo sapiens
ctgggtgaagtagggggccctttgtagagaccctccccttccctgaggatcggccggctgtccagttcagttacaaagggggaggaatggctttggaaactgtctattcacattagcttttcactttctgaaatgcctcaatcatctttctcagggttggatccaatttctcttcactctgaggtaattgtctttctgctcagccttgcwgcagtgagcaggtgagctgacagggccagagtaggctggagagcttgtctgccttgttattgttccaggtgtccttgtaccagacatgaggtcggggagaatagagttcatgttttctctgtgccagccttgagcccttgctaacgactttcttcatgaaaagagaagtagctgaccattactcagcacctacttggcttcgagcactttcctagcattctacctatgactttaatcttccccacacccccatgatataggtattattctattttacagatgaagaaaccgaggcccagacacattaagtatcgtgccaaaatccagtggcatggccaggacttggactcccattcaagcccttgccatttctactcagccacgtttacaaacacctagggtttgaatggcg

SEQ ID NO: 255103 - DNA, 581 bp, Homo sapiens
ctataggaatccccggccctggactggaacctgtgcacctgagatggagctttctggaaggggagcaagaacccagggaggctgggtcttcagctcgctctagttttttgccaacatttttctctcctgctgctgctcctcctgctgcactatgataaggactctccaggaggagaggatcagaaagtgtcggctcaagctgatctagttttaagcctcagctctgctacacagctgtgtgaccttgggcaagttacttaacctctcttggtctcagtttcctcaactatgatgtagagatgacagtagcacctgacctccagggaggctgggagaatgacacacagcgtttatacagtgtcagctacacagtgggaycccaataagtagaggatcatgtcctcattaccctttggcctcctattgccagtccctctctcctataccactaattgaccctctttatataaggttaatatacataaagttgtggtcatttggctaaagtctagacaggaattatgggaggagagaggagagaggagctcaggaactactgtttgagagaggtcaacagcact

SEQ ID NO: 255104 - DNA, 509 bp, Homo sapiens
accagacatgtaattaattggagattgttttcaagttgaaattgcagtgtttgctccattttaagatgcgtagcttcacggctgttttgcctccactgatcttgagggtgagcttcaattatactctgccacggacgagaatgtrtacataaattctaacctgtaacaccacctggcaattggcatatatctacgtttttgtagatgtataaaaatatgtttatattaccgaatatgcaattcttaaagactgttaaaattcagcatagtctcatctgaaaattagtgtctcataagggaattttaagaattctatattgtgttaacaaattttagagacaatgtattttcctgatatgtgatttcttggtattggaaatatttgagtttctttgaatggaaattagtttatctttatgatgtgctttgaaaatttttcctcattacagaatgatataaacagtcatttatcatttttcttttaatatttttatgtatattatatttgg

SEQ ID NO: 255105 - DNA, 547 bp, Homo sapiens
gggagagtcgatctgaaaaaggagactcgagcagatattaaagcaagcattgaaartaatagttattgcataccaatccttgtttgcaaatcaaaaattgaaatgttatttctgcattgttacctgcatattactgaaagaaacatgttggttttgtggagagaggtagatactaacttcctccatgaattttttgaggtattcaaaggaaaaggaattgttttcaaagtaatttcatacttgttgatgctatttgaaaagtgtttagatgtaatatctaccttaaaattttcacaataaaatttgacatgtactgcaagatgcctggtgttattggttagccgcgcatgcttaaagcaaattcaataggagagtaaattgtgtagtctgttgtacattttcctttgtttctttgaacataggtacaaaattagggatgtgttatgtcgcccttgcaagctgctcaagttttgtaattaggctgtttctctttaaaaactaacaaggttaaaatgttggagaagtcttcagaaagactacaaaactg

SEQ ID NO: 255106 - DNA, 581 bp, Homo sapiens
tcttccctataatatatagtagatgctgtggtgtagtaataaatatttgatctttacccctagttactggtacagaaacctaaaaaccctggaatttactgtctcttatgctaaacagatgatttatggggtggggagagctagacagcatcatcatgggtctgctctgcagaaaaaccaaccacatgattagggagttagagctttcaggcctactccctgacatccagagaggggaaaggggctgaacactgagttcmattgctaatggccaattgtcttagtccctattctgctgctataacagaatggcacagaatgggtagtttataaataatagcagtttattttgctcacagttctggaggctgggaagtccaagagcatggcactggcatcttgtgacggcctccatgctccatcataacaggatggaagggcaagggagtgcccgagataaagagaggatatctgtcaaatccatctcttgatcaggagcctactcccaagataacaaacccacttcccaggtaagtgcattaatcccttcataagggtggagcccttgtggcctaatcaca

SEQ ID NO: 255107 - DNA, 581 bp, Homo sapiens
tcttccctataatatatagtagatgctgtggtgtagtaataaatatttgatctttacccctagttactggtacagaaacctaaaaaccctggaatttactgtctcttatgctaaacagatgatttatggggtggggagagctagacagcatcatcatgggtctgctctgcagaaaaaccaaccacatgattagggagttagagctttcaggcctactccctgacatccagagaggggaaaggggctgaacactgagttcaattgctaatggccaattgtcttagtccctattctgctgctataacagaatggcacagaatgggtagtttataaataatagcagtttattttgctcacagttctggaggctgggaagtccaagagcatggcactggcatcttgtgacggcctccatgctccatcataacaggatggaagggcaagggagtgcccgagataaagagaggatatctgtcaaatccatctcttgatcaggagcctactcccaagataacaaacccacttcccaggtaagtgcattaatcccttcataagggtgragcccttgtggcctaatcaca

SEQ ID NO: 255108 - DNA, 673 bp, Homo sapiens
ttctttcataaattgagcaaacatcatgcaagtcatgtatgtttaccgcttatgaaacagactgcaggagtcacagcacttgccaatcaagaagcttacagtcaagtggaacaaacataagtaaatcaattattatagtacaatggcattcattcattccataaaaacgtatgtagtgcctactgtgtaccagatattgtctagatgctactcatttgtgaacaaaaagaaaaaaaaattcttgccttcttcatggggagagacagataacaaaaatataaataaaaaaacatttatagcatatttgaaggccataagtatatggggtggaaataaagcagaaaaagagagagtacagggcagacggtttatttttgttagtgttaaggtaaagagtcatgtggaagtgtacatctgagcaatggtttgaaggatgttaagaacaagcyataaggttatttgaaggaatagcaaatacaaatagcttgagggaagaatgtgtctgataagtatacaagaaacaacaagaaggttagtgtagctggcccagagtgaagaagaagtgtattaagaaataggggagaggtaaaatgctgcgaggaagatcatgtattgtagggtcttgtaaagactcttgcactgtaagatcattgtaaagtcatggtggggtgtg

SEQ ID NO: 255109 - DNA, 673 bp, Homo sapiens
ttctttcataaattgagcaaacatcatgcaagtcatgtatgtttaccgcttatgaaacagactgcaggagtcacagcacttgccaatcaagaagcttacagtcaagtggaacaaacataagtaaatcaattattatagtacaatggcattcattcattccataaaaacgtatgtagtgcctactgtgtaccagatattgtctagatgctactcatttgtgaacaaaaagaaaaaaaaattcttgccttcttcatggggagagacagataacaaaaatataaataaaaaaacatttatagcatatttgaaggccataagtatatggggtggaaataaagcagaaaaagagagagtacagggcagacggtttatttttgttagtgttaaggtaaagagtcatgtggaagtgtacatctgagcaatggtttgaaggatgttaagaacaagctataaggttatttgaaggaatagcaaatacaaatagcttgagggaagaatgtgtctgataagtatacaagaaacaacaagaaggttagtgtagctggcccagagtgaagaagaagtgtattaagaaataggrgagaggtaaaatgctgcgaggaagatcatgtattgtagggtcttgtaaagactcttgcactgtaagatcattgtaaagtcatggtggggtgtg

SEQ ID NO: 255110 - DNA, 542 bp, Homo sapiens
gacgtcactgggccccctgaacattccctaaactttgagacttatccagacacacttcctaatacttctttcctttcctcaaaaataaaaaagagagagacttgggaataaaattgcccaagatggcgaaacgcttgttgtttagagggcaggaaaaaaaatggaggatattgtaatatacacaaagggataaatttcaacaactcggccaaggactgcagctgcttccctctttataaggaagcaacagacaaaagataaatacagagggagaaagaaaagaagagaaaatctcccaaacaacagagccagctctgactcttcaaacacttccttccccttctcaaatcccaattctggggttcgtgaaactacttaaaggggagggagccgcgaaagagaacgggggckggggggaggggtagcgacaagaagattaaaagagggaagcagaggagttgggagctggcggtcgttcccggggaagaactgctaaaacatgagaccaaggcacagaccttactgtatgagaagcaatgctc

SEQ ID NO: 255111 - DNA, 504 bp, Homo sapiens
atccccagaaaagcatttaatttcaatgacatacaatttctcttttagcagcaaactgtctctacagtaaaaactggcctaaggttcaaatgcataatttaatcctgagttttccatgctctgcattcctttcaagctataatttgagtaactacctaataactgtaataaggacaataatttccttataatatattattaactcatatttaattaactcggaggcyaagctctgtacatgtatgactgggtcaacagttctataatctcaaaatttactaataatgttccagaagaaaaatatagattaaaatataagtatgaatgcacttagtatctaagacttctatcccaagtcacatacaaaaaagttaatgcattgttctataatggtggtcattaaataaataatatttttaagtatgtggaactaaaaaatggaatacactgatatttctatgcgtaaagtattgaatattaatgttttaacaatctattactgac

SEQ ID NO: 255112 - DNA, 718 bp, Homo sapiens
acctacataacaaacctgcacattctgcacatgtamcccagaacttaaagtataataaaaaataaaatataaagaaataaaaattaaaaagtatgagggacatatacagtatgaagcactttacagtgaattccagtatttatcgttaagtgaagaaagcaagttggagaaaaatgtagtatagtatgtcaccattcatctaaatatttacctattttttaactgaaaggataaattaaaacctttaaaaaaacatggttacctaaaaggaggaagggagcagagtagtaaaaataggaacagtacagtatgtgggtatctcataaaacctgtattgtagatgtgaatttggaaccatataaagtcatttacattattataataaaagagaaacaaagttaaaaagcaggccagttgcactggcttgcatctgtaatcccagtgctttgggaagccaaggcaggaggattgcttgagcccaggagttcaaggctgcagtgggctatgaccatgccactacatttcagcctgggcaagagagtgagactgcatctcaaaaaaaccaaaaaaacaaaatacaatcccataaaagtgaaacccaaaaaaataaatgaacttacttgtatgtgaagttggtggcataaccatagagaattattccaagtgactttaaaacacaacaactaaaacacactaagttaacagtatatagtattca

SEQ ID NO: 255113 - DNA, 699 bp, Homo sapiens
gcaaagaaacacctatgtagtggtgtgctactgtgcatctcgtcccaactctgtgataagtgatgtcatgttggaagcctgaaatcagccatggtgggaatgtttacgcctcatatataacttaatgtgggctataatttaatgtggtgctgataaacttaagagacagaaaaaatttacatagtgcaaattaaagtgatacactgtaaatatcacaagaaatgaggaaataatcttccaatatttcaaaactattaaaaatctagcaagaagttgttcacatcactgatgaaaaagtaaagttccaacatatacttttgttgttttatgttcctcttactcgtttaaacaaaaatatcaataaacatgcatgtcagaattgcatttgctcaacarttgcaaccatagattggctaccagtaagactacagacacaagggttgggtaaaaatcaactagggcattctgtgagaatcaactggctatatgaattttacaagacagtactgcatattttattattatttgtgaattgtatgatactgctgttacatcaatagaatttataaacttaggtatgtacttataagcatacatttttattcccagaaagtctttttttttttttttagacaaggtctcactctcccagaaagtctatttttaaaagagttaccagcacacctctgttgaggcgga

SEQ ID NO: 255114 - DNA, 513 bp, Homo sapiens
aaggtatgattacttttaaaaagaaggaacttaaacgttttaaaaacggaggttcaaaagagatcatgttgtttcaaaatggaggtagagacgttttgaaataaaaataacagcactacgtaagttacttatttatttatttagagtctccctctgtcgcccaggctggagtgcaagtggcatgatctcagcttgccacaacctccacctcccggttcaagtgattcttgtgcctcagtttcccgattagctgggattacagtcatgcgccaccatgcccagctaatttttgtatttttagcagagatggggtttcgtcatgttggccaggctggtctcgaactcctggcctcaagcaatctacccgccttggcctcccaaagtgttgtgatcacagatgtgagccacaacgcctggcctatctatctgatttcaaatatgggctattatacagcctcataaatagaacttccatcacaagttcmgcaggttccttgaaatggaagttggctt

SEQ ID NO: 255115 - DNA, 488 bp, Homo sapiens
gccatgcatcaatatcctaactatttagaacaagtaagatttaattttaatgcaaaaagctcttaagagcccgttacaacaatataatcatgttaagatattaaaattatactacttaaattaggtttgtatttattcattttgcaaaataaagttmtaatgcactgaaatagaacaaaacagaatgataacaaataacaaaaagaacacccaggagagaagactgtgccaagggtatagaatctcagaacaggtctcattacatatacgtaatatgtcatttcaaggagtatgtattcggtattgagccacattaatgcaagttgctaacatcactaatcaccacctttactacaatgacacatgaaatagcaagttttcaaaaaactacaactacgaagttaacatttccagctgaatttcttggtcacgttaacattaaataatttaaaaaccatagtagtcacatggaatgcaaaacacagttc

SEQ ID NO: 255116 - DNA, 488 bp, Homo sapiens
gccatgcatcaatatcctaactatttagaacaagtaagatttaattttaatgcaaaaagctcttaagagcccgttacaacaatataatcatgttaagatattaaaattatactacttaaattaggtttgtatttattcattttgcaaaataaagttataatgcactgaaatagaacaaaacagaatgataacaaataacaaaaagaacacccaggagagaagactgtgccaagggtatagaatctcagaacaggtctcattacatatacgtaatatgtcatttcaaggagtatgtattcggtattgagccacattaatgcaagttgctaacatcactaatcaccacctttactacaatgacacatgaaatagcaagttttcaaaaaactacaactacgaagttaacatttccagctgaatttcttggtcacrttaacattaaataatttaaaaaccatagtagtcacatggaatgcaaaacacagttc

SEQ ID NO: 255117 - DNA, 509 bp, Homo sapiens
attcaggagcagattgcggtgggtgctataaaaagagctcaacacagtgtgttctgagaggctgggaggggagaggagagaagaaatataatgggaagaatctggaaaggtaggcaggggaggcaggcttcagagtaagctttcaagacagaccaaggctttgacagcagaggctatactgtaaaayagtatagactaaccgttcttatcgtactcaaaattacagcccttcaaacacctcaaaggcttggaagggaaactaaatgctgcatgaacaggagtcagattcacctcctcacttgtggggtatgtgctgcatggaaaggggagagggaaggagtgtaggaatgccccctctctctcactcaagtaaatacatatgatacatccctagagctgagattctgtgaaatccaggctcgctttggaagagagaggatgggccagagaacataattgagcccactttggagggccaccatcctcattttgagactgtcatactggtg

SEQ ID NO: 255118 - DNA, 573 bp, Homo sapiens
gaggggagaggagagaagaaatataatgggaagaatctggaaaggtaggcaggggaggcaggcttcagagtaagctttcaagacagaccaaggctttgacagcagaggctatactgtaaaatagtatagactaaccgttcttatcgtactcaaaattacagcccttcaaacacctcaaaggcttggaagggaaactaaatgctgcatgaacaggagtcagattcacctcctcacttgtggggtatgtgctgcatggaaaggggagagggaaggagtgtaggaatgccccctctctctcactcaagtaaatacatatgatacatccctagagctgagattctgtgaaatccaggctcgctttggaagagagaggatgggccagagaacataattgagcccactttggagggccaccatcctcattttgagactgtcatastggtgtatggatcactctggccttgacacagttattattccctactttgtgatttccttttgacaaaagctacttttcttcttgagcttcccaacttggctccaacttaaacttggctccagtttttttaagtt

SEQ ID NO: 255119 - DNA, 574 bp, Homo sapiens
atgcatttttctgaggacacagtccacacctttcatcagaatcacaaaggggtatgtggcccccccacccagaagttcagaacactttatctacttgtaaccccttctattttaatggatgtttacttatggggtgctgcacaggaaacatcatggttatagaagtgttcagtatattcagaaatttatcagctagaaaaaaaaagattatctacaattagctatattttacatacaattcgcattttgaaagatttccttaaaytagaaacatacttagccaacacatacaatataactggtagatgtatttacaaagcagcccacacaagtatggattcattcacaatgcgactgtagatcactggtaccactacaaggcatactgctgcccccctccccaagctcatcatcttccctgtaatgcttcttttcctaccaccctctctttgcattccagcctctacccctcatcccctgagcatagagaaatgatcacacttgaccatgtttctgcctagcatgctgccagtaaaaattctgctgcataactaaactccagttaccatgtttt

SEQ ID NO: 255120 - DNA, 581 bp, Homo sapiens
atttagggtatccggcagaagaaatttctaagtagtattcaagaggtgacttgggtgctgttaaaagcattcagttttaaaagggaaacagcataaaagtttgtgaggcctccgcagccacagggaactggaagtccattaaacctctttcttttgtaaattgcccagtctcaggtatgtctttattaacagggtgaaaatggactaatacatcccctattagtaaactctgtggtgggagggttggaaccactggcattcttctgaactaaaagggtggggggtatacggttccttttgtcacagctgtgagttatctccgtggccatttgtgttctcataagaaatagaaaaacagcagtcatcatcatttgatatcctcatattacatattacatcctcatagtgctgttctctgggtcaggacactattcaatccctgtaacccctttactaacttgctsacattaattttcttagtttagacatcatgttcttgagaaaatattagatcatcctctatattagtttcctagggctgctgcaacaaattgcaataaatgtggtagcttaaaacaatg

SEQ ID NO: 255121 - DNA, 525 bp, Homo sapiens
ttatagaagacttgatcaacactatcaaaccactccctgtcttcagcctggctccccagaggcagaccctgagatatggattaatgtgcaagtgattgattaaagaagtactcttgtgctgagtctgaaaaaacaaacaaacatacaaaaacggtaagtaaagcaggacaagggagaggaagccaggcaagagtatgacctcaggcaaaagtcagcctaatccagcagaaaaactggaatgtaagttacgactcagtgttgcacaatctgatgcaaggctttcttatgtcttcatgtctttgcctatctatcactgtcaaaggctaaggaggaaagggaaggaggagcatagactccaaactcttccagttttttgcacatgcaggcartgcacctccaggagctcaaggttgtcttccaaaaatgagccctaggtgttgacaatggaatccacaccaaagtgggaagacaggtgcacagaaatggtgtaaagggatttgaaggaatctgggaaagcaatgacac

SEQ ID NO: 255122 - DNA, 525 bp, Homo sapiens
ttatagaagacttgatcaacactatcaaaccactccctgtcttcagcctggctccccagaggcagaccctgagatatggattaatgtgcaagtgattgattaaagaagtactcttgtgctgagtctgaaaaaacaaacaaacatacaaaaacggtaagtaaagcaggacaagggagaggaagccaggcaagagtatgacctcaggcaaaagtcagcctaatccagcagaaaaactggaatgtaagttacgactcagtgttgcacaatctgatgcaaggctttcttatgtcttcatgtctttgcctatctatcactgtcaaaggctaaggaggaaagggaaggaggagcatagactccaaactcttccagttttttgcacatgcaggcaatgcacctccaggagctcaaggttgwcttccaaaaatgagccctaggtgttgacaatggaatccacaccaaagtgggaagacaggtgcacagaaatggtgtaaagggatttgaaggaatctgggaaagcaatgacac

SEQ ID NO: 255123 - DNA, 502 bp, Homo sapiens
gaaactcactttctactcactttgtagtcccctttgcagtttggattaagcatgttactttggatccacctatcagatgtgcccgcttcagatattgactcagaagctagtaatgagatgaagatgagaccatttgtgctctgcagaaaaaatacccaacttgcagtggcagctgctccagtgacagctttcattatgtatgcagcaggtaaatagagtgtttctattcattgcaaatggggtccttaattgatacatcctcaaagaaaatttctgctacttacctgctacctaccactttccacttgccatttatataactaaggcatccattcatccattgtcaagccatctttacatgaatttttttttgagacatcatctttctctgtcactcagcctcaagtgtggtggcaggaacatggctcaytgcagcctcaaactcctggggtcaagtaatcctcccatctcagcctcctgagtagcagggaccacaggtgca

SEQ ID NO: 255124 - DNA, 622 bp, Homo sapiens
ctgcctggaggtaaaaggtaggctaaatgcccattcaggaatctcatagtcttgtaattttctgacaatacgcttaaaccaaatttacccacaaatgtattttttactgtctgtattcaatttgttaaaaaaaaaaaagtagatctaatttgatcctaagtctttaataaaaacagagagcatgagtacttcatcatgcatctctttatgacttaatttggaaaaataagtcaatatttaaaaaaatactaaatggtagagataaggaaaacagagcagcttctaaagatttctctcggtaaaggatatgataaaaatgactggcaggctttggattggagagtgtgacaggtgcttcggaactgggaagagactgagtcctgccagggctatatttggcaaataggcggtttaggggacaaaatggagcttagacactacagccaggtgagcagttctcagctggccccaaaccaaagaagaagtgtatccaggtgggtaggcaggaatcaggaggctacagacacccaagygcaaagtaacatgaggactcccaagtggagagggcaggcagccataaactgagaatgccactgggagggaaaggcagagccagccagcg

SEQ ID NO: 255125 - DNA, 544 bp, Homo sapiens
tgttacctcacagtctagagggcagaagtttgaaatgaaggtgttaaaagcaccacgttccctttaaaggctctaggagagaatgcttcctcgtcttttttttttttcttttttttttttttccttcaggtagctcctggcatttcttggcttgtggcagcctaactccaaaattctgccttcattttcacctggacttcttccttgtctttatgccatgtcttcttttataaggatgctagtcattggatttagggcccactctaaatccaggatgatcttatctcgagatccttaataaagacacattcacaggtaccaggggttaggacttggatatatctttttgaaraacacagctcattccactgaaccctccatgtctagattaagtgtttttacatgtctcccatgaactgcttatatctccagaggaccaattattataacatattttaactgcctttgtatttatctctatatctttgttcattgaaggcagggattgggtctttacatccctcaatgtctagcatggtgcctt

SEQ ID NO: 255126 - DNA, 620 bp, Homo sapiens
ctagtgatgccttttcaaacagtttatttataaaatgtggaattaagagctttgaagtatctgagatggagatgataatcacatagttaaattatgatttggaggtcagcaaagttttaattggagttgtagatttgggagtcaatactgtacagatgatattttaaactatgattctaggtgatctaactgaacgaatgatgtatatagggaagacaaaataagctaggactgatatctgagtcattttctgtagaaacccatcttgtgaaaagtctgggacacataaggaggtaaatcaattagggtctagtcagagacagaaaccatgcaagttatctggacaaagaaaatgtaatataaagtagagttagttagctactaaaagggttaaccatgaattttaagatatccaaaagtagcatttacaaactaccatgtctagagcaaaacaaaaaataatttaagactagaaagaggttctttccctcaactcttagatttggrcctctttggagaagctatggctactgtagaaaaatgcaggctaaaagtagcaaataagtgggcgggggaggagactgtacgttgttgtggctctatggaagggggttgcaggc

SEQ ID NO: 255127 - DNA, 590 bp, Homo sapiens
ctgtacgttgttgtggctctatggaagggggttgcaggctggagctgctgcagtgaagcccaggctgggcagcatgtggcctgaaggtccaactagaactaccacagaagctgcctgctgtcataacttagaaatgcctaccactggggagaatgtggtctgaagctacagttgaagctaatccacatgggccaccaagcaccaatactgaatgataatggagaattataacccagaagagaaatttcttcctgttgctatcaccttgcagtgtcaccccagtgccttctattaaaaagcctctcatttcacaagctgatggggtccagctgcaatatcacaaaactgggcagagaagggtagatttggagctgagaggcaacaaactggtagctggtaygagaggccatgtatacacacttcagtagatagccccagctgaattcccaactgatagcttaaactgtcaactatgtaaatgattcattttgcttgtttatctcagttaagccttcagatgagtgcagccccagtagatatctggctgcaacagcacatgacactgtaagcaaaaaacatctgggcccagt

SEQ ID NO: 255128 - DNA, 454 bp, Homo sapiens
tcctgttgctatcaccttgcagtgtcaccccagtgccttctattaaaaagcctctcatttcacaagctgatggggtccagctgcaatatcacaaaactgggcagagaagggtagatttggagctgagaggcaacaaactggtagctggtacgagaggccatgtatacacacttcagtagatagccccagctgaattcccaactgatagcttaaactgtcaactaygtaaatgattcattttgcttgtttatctcagttaagccttcagatgagtgcagccccagtagatatctggctgcaacagcacatgacactgtaagcaaaaaacatctgggcccagttaatccaggtccatggaagaaaataataggttgttactgtaagtcagtaagtttggggtgcttttttacacagcaatagattaatggaaattgctaactttatagaagactgc

SEQ ID NO: 255129 - DNA, 603 bp, Homo sapiens
ggtagctggtacgagaggccatgtatacacacttcagtagatagccccagctgaattcccaactgatagcttaaactgtcaactatgtaaatgattcattttgcttgtttatctcagttaagccttcagatgagtgcagccccagtagatatctggctgcaacagcacatgacactgtaagcaaaaaacatctgrgcccagttaatccaggtccatggaagaaaataataggttgttactgtaagtcagtaagtttggggtgcttttttacacagcaatagattaatggaaattgctaactttatagaagactgctgaaaaaccattttgaaataagacttatcgaggggtgttccaagatggccaaataggatcagctctggtctgcagctcccaacgtgattgatgcagaagacaggtgatttctgcatttccaactgaggtacctggttcatctcattgggactggttggacagtgggtgcagcccatggagggtgagctgaagcagggcggtgtgtcacctcacccagaaagtgcaaggagttggggaatttccctttcgtagccaagggaagctgtgacagactacctggaaaaatgg

SEQ ID NO: 255130 - DNA, 594 bp, Homo sapiens
aggttttctcactatgaattgtaatttttggtttctttgtctattataggcctagtctttatgtaagggagtacaagccttggtcttatttatcactgtatttctagtacctaacatattatcttgcaaaagtatgtagttgcatcccattagaagccataaaataaaataaatatctgaattcatacttatataaataattgagtaaataaatgactgattgataaggtacagcttttaaaaaggtgtaatagcaattaataaatatctaagggatgagggaaatggaaaaattattgttaggcagaaatgacagtaataattttataggcaagtatcattgataacactaaaattagtgagaaaaatatatataaaaaatagaaacttgccctactgtttttgcaactgttcttcagtccaaaattatttcaaaataaaaagttttaaaaayatatgtgcttcatacatatttgttaacttgtctgatgaataacatatttttgcatgacatactcaaacacctagaatctctttcagactgtctacaacaagtttttccttccttaatctagatttctcacttaactacac

SEQ ID NO: 255131 - DNA, 606 bp, Homo sapiens
accctgaaaaatctctagtaacctgccataaattaaaaacctttcagtacagtcaatatttttcaaatgctaaagataggaaatgtggcaatttttaaaaaatcagcaaatgtgttccctaaggagagctagtgacttctccctactcccagccctgggttagtctaaagaaacttttttatcttaaaaatgttgaccataggagtgagccaataggagttagctccagttagacaagatagatgtctagactgtggacccttggatacatatctaaataaaccttttgttcattttatatcactgaacctttctaggagcactagtgtatcaaggattcttcctggtttgtttttctcagactgcaaatattgcaacctaacaattccaaacttaaatcccctcttattttcacatagaaagttaacatttatctccaccagaacaaagtgtatagaaatgaagaaaatctataagatggccactacaaatatgttctttcttaaatttagacaaaccagactkgggttctataagaatcacccaacaatcttgctaataatacagattccttgctctaatatctgatattccaattcacggatt

SEQ ID NO: 255132 - DNA, 530 bp, Homo sapiens
tagtatcctagaattctgaatatttaatttttcttaatttgtaaagatagttaaacaatgtacattggtggaacaattcagtatgatgtattttctgtggtttgaatgtattccctccaaaattccagtattgtcaatgtgatagtaataaagaatggggcgtttaagargtgattagtctgtgaaggctcctctctctccttactggaagtaagaaccttatgaaagaggtgccacgcaacattccactagcttgctctcctgtccgtatgccatgagaaaacatgaagttcctcctctctggaggatgcagccctcaccagacaaccaaacctgctggtgccttgaatcttggactttctggagccttgaatctggaagttcccagcttccaaagctgtgaggaaataaatttccattcattataaattattcagtctcagttattctatcatagcaacacaaaaagtctgtattcattcaggctatgggtcataaaacatagtacaggatacttttttctttctttc

SEQ ID NO: 255133 - DNA, 513 bp, Homo sapiens
tggcacatttgttataattgatgagcccactttaatatatcataatcacccatcgttgacactatggttcatgcttggtgttttacattctataggttttggtgaatatttaatgaaatggactcatcattatagtatcatacagggtattttcactgccctaaaatatcctctgtggtccattgatttatccctcctcatcccctaygacatctggcaaccagtaattttttttttttttactttccccatagttttgctgtttccagaatgtcatatagtttgaattatatagtatgcaggattttcagattggcattttgtttacttagtaatacgaatttgaaattactccttgtgtttttgtggcttggtagctcatttcattttagcactgaataatatttcattgtttgggtgtaccagagtttagctatccactcacctactgtaggatatcttggttgcttccgcactttggctattatgaatagagctgctataaatatttgt

SEQ ID NO: 255134 - DNA, 571 bp, Homo sapiens
gctcctacacattgcagccttgaataatcccattaaaatatccttagggtttcagtgttgcaccagaggttgcataataaaatattaagcctatagcttatcacccaaggcctgttataatttgttctccacctccactgtgacctcattctctcattatctccatgtgaaagtctttggctcatgcaaagagcacctccttgagccttcgctttcttatctgtactggtttaataatgaccgtccctrtctcataggcttgtcatgaagactgaataaaacaatatataaaaagccctgatcacacagtcctgacatagtcagcccttgatattattgtgacacactgttaaaaatacattttacccctttctggcactcccattagaaattccttgttaattagcagtgcctgtgcagtattccaatatcattattgtttaggattctctgagaataaagagtttactaacaacacacagatgccaatcattcctactgaaaaaataaataaatggctataaccaagttctttgcaataaattattccagttcttatccaaatgatggc

SEQ ID NO: 255135 - DNA, 535 bp, Homo sapiens
tgtattctattgcctagaaaattatcagaaacatagtaagaacttataaagtgtatttggaattaaaaaatagttctttattatgtaagtaaggaacttttttaatgagtgaactgaaaactatgatcatgctaagaaggaaacacagagagtaaagtgagagcataatttgtcaaggccacataatttaaagtgaattgaaagagtgatggatgaagaagacttgaaccaagtgcaaaggcagagaaaaagcattatgggcaggagcacatgctggaaactccaaggaaaggaaagacttcaggtgttctagaaatgtaaaagcaggctagcatggccagagcagagtgactgagaagaattatgcaagttgagaggaacagacaggcatccaataatttgtggtcttgaaggctgggataaggaactttgaattattttaagataaatagaatatcaatgaagggttttacagtggatcttagccaaaaggccaagaagtgatcactgragggttttaaaagggctgtgccat

SEQ ID NO: 255136 - DNA, 515 bp, Homo sapiens
actccagaagctaagaggtgagagagggttctataagagtctcagagggagcaagatcctgttgacaccttgattttagacttctaccctccagaactgtgagaaagtatatttctgttgtcataaggtacgagattgcggtgttctgttaaggcaaccctaaaaaaacaaatgcaatgttcaaaacttaatgcccaattctcttccaaaccatgttctttatgtgccaagtgacccccaagtgcagaaggagctgaggaatcaaagaacaaggcagacaaatccagtttgtcagtagaggatgatttactgggaatgttatgaacagaggtgtactcttggacagtggtaagacaggtagatctccacatcatgactccccagacctagggcttgtgtactatagagaaagggcgtacatgctcaagagacacttaamgacaaccttccagaagaggcaagaatgctatgtgaatcatagcctatagtttgtgtgataacatcaagttggtttt

SEQ ID NO: 255137 - DNA, 567 bp, Homo sapiens
taatgagcaatggaggtccttaacaaatagtgaaagctaaatataacagccaaggggcttattctgtagtttataaaraggaccagtcttttgcagtcaaagagcaacacagctaaagagcccactcaagatctgacaggtttattgaacttcaaagatagtagaatgctctgccaaggcaaatatgtaatgctaaattcagcaccctagtagggaaagcctaggaaaacatgagatgggacatttgaatgaatactctcaaatattgaggctctctagaatcccctaaacatttagagctgcagaggtgccgctgctccctcctttaatctctccctattaattgctagcactttccccacatagtggcctatccctcaggagtcagcagaaggctctctttaggatatgtcctcaccgttctcctggctgccaggctgataactacagttaatcctcagatatcccagctgaattcatgcaggatatgttaaagtataaggagattatacccaaagcagttgcaaaagttaactagcatgtattagtaggagccagaggagtacc

SEQ ID NO: 255138 - DNA, 608 bp, Homo sapiens
tatcccccaaccccactaatgacagcacagtggaggtactagtgcttggccacttgtgcccaacacaaaactctcaaaggacaggctgtgttctgaagttttgtatggatttggtcaagactttgtagagygtatcattctgggttttcttcctgatcttacttcctcttttattttcttttacaagtgttatctcccctttcccttaaacaataacaacaacaacaaaatgcacaaaaagcccaaaccaaaactcttgtacttctcaatccatcttagaatctacttcccagtgaagctgagatgacacatatgttgttttggcatgctaggcttttcctttttggctactaacataacattaattaatgcattaattttgtaacaatttacttacattgtctactacaacaaactctttgacagcaactgctagatctgtcttttttcacaattgtattcccagggcctagtatagggccaactactcagtaactattcccaacccctggtggactgtacctatatttgtatttggccatcctgagtgtactattccaatttgtgccaggtgtgggatgtgtgttaagaaggtcttccacaagcct

SEQ ID NO: 255139 - DNA, 563 bp, Homo sapiens
taaagcagagggaggaaaggggggttccatggcaggagctgagagtagccccgcataggtgaagaacaaagctcagcaagacaggaggggcatgtgctggtggggaacggagagaactgtactggagactgagcgaggaggtgctgaagctcgggccaaggaactgaacttcacctaagggcgatgacaaagccaagatcatcttgagcagaaactagcatggtcaagatttgcctttagaawtttctctctggctagaatgtgagaatggactggggaggaaagggtggatggtgaggcagcacatctctgtgtttctcagctctatcaacacagagatttcacaaacattgggtaacacaggagactgttagaccaacagagtgtaagaatcagaacactgaggacagagagaaaggaatggattagagtgaaatttagaagtagacatgataatagttggtaactgatcagatgtgggacacaacagaaaaaggacagataaggaaaatacccagatttctggaatgggcctctaggcttgagagaacaccgcaggagaa

SEQ ID NO: 255140 - DNA, 483 bp, Homo sapiens
ctgcaggaaacaagtataaattcttgacaaaatattttatctaactattaaaaggcaagcatagcataaaagcaggcaggaacaagagaggygtcaactgtgaaaaaaaatatactgtatcgagtgatattcacaggtaaatggctttttgtctgagggcaattccagctgccttagaaggaggtaacaagaactcagagtaaaccatagccttactagcttgaagatatgggaggcatagtttgtgacttccagagccactggaaaattagttggaaagtctggaaaaggagagtatcacattaaatctgtgtaaatactccacctttctttcttttttttttttttttttttttttttttttagtgcatgcattagggagacaccaacagtaaacagcaacagctagaagtctgaagaactgaatagagatttcagctgccacttaccatggaggaaacacaccaaggggtctgagtttag

SEQ ID NO: 255141 - DNA, 595 bp, Homo sapiens
gagctaggacactcagccccctttccatgtgatgctctgcaccacctcaagagtctgcagtctccaccagtaagaaggctttcactagatgagatccctcaatcttggacttctcagcctccatcactgtaagaaataaattctttttctttacgcattacccagtttgagctactctgttattaacaacagaaaacaaactgagatattgaatttctttagtcgctgtattttttagacagtctgcttaatgcttttctactttaatgatagcttggatggagatcaaacacttggatccagtgttttgatgttgagaggcacgtgttgccctgaattttctgtctttacaaattactrgaaattttgccagaaaacctattaatatctttccatcttttaggaactaaatattatttccagtctgtcttcttaaggatctttctgtattaaagttttcctggcacttcttgggatcattcgttggtagagcaagctttatttcaagaaattaatcgttaattatacttttttttcctttttttctgttatcttcatggacactggatatattttatgttgtcccttcttcttg

SEQ ID NO: 255142 - DNA, 615 bp, Homo sapiens
taagtctctgttatgtgggaccagtgtatgctatgtggctcccattcttcttctagaatatttactgcaattgtctgtcatggtttccttattatatttaggattttggaagagtccatgggtcttaaaatcaagaagattcacatccagaactaatatcaagatattatacaagtctatcctcattcttttatcctaggttgtaaaattgatgccatgactggaaagacttttggattgcttcccttggtggaggtggaggacatattttgtatatgggaaaaatagagagccaaaygttttcttaccagaagtctagactgtggaagtcattagaactgttggcggatcttttagttctcccccttctgcaaacctgagaggattggaatccttctatctttgatgatagccatggccattaggcttggctttggttaatgaattatgagtagacataatttgtgtgacttccagaaaaaaaagtatttaatagcaattacgtgttttgttatgttcctctctccctggtgactggcaaagtcccagatggtggaagctccgccatcttgagttcctgtgtgactgaggtgagatgagcatgttgcatgagca

SEQ ID NO: 255143 - DNA, 589 bp, Homo sapiens
agaaatataggcttagttaatgggtgtggtgtctgtacacatggaaaaaagtgaaaatagatactgcagtatggcatactgaaacatcagtcccaaagggacaaaaccatttaatatcaaaaccataacacatctaaaagaaaatgcatgaagtaagaatagacaagtrtattaaataaaatataagaagtattagctttaagtgaaacaaaattgataatttagactgtattaaaattaagggattatctttatgaaaaggcatcttaaagaaaggtggaaatgtaagctgtaagttaagaaaagctattgctatatataaagttgaaacaaaattagtattgttatcattactgataataacaataagagatattcagaataaagagaagaaaatgagtaacactagaaatactgacaatggctatgagtaaatataatacaaagaaaaacttgtataatcaataaattgagaagtttatcatctctggaaatccagtaatctagaaatgcaaatcacaatctcaatacaatagtattttacaactatttccttgtcaaaaatgaagatatctgaaaatcccacata

SEQ ID NO: 255144 - DNA, 556 bp, Homo sapiens
gtttaaaaaataattacaaatatattatacacacacatgcacacacacacacataatattcacttcctacaaaggttaaaacagtaaggtcttggccaactctcctgactatttcagccgcccagatccccaaaagcagtacacagttttcttttctgaaaagtcttttcctcattattcatcttctttccygctttcaaaattgtgttgcagtctcctctattgtttaccttgtcttccattccctttatcctgtgggttaacactgaaacaaaaaagcccttctactattcttttactgggattttcagaagatgacatactttctatttctattcagtgatttttaaccatgtaagtctaaaacatgttcaggtgactccaagccagtccctgctttaggggaggttggaatatattcttcatagacagttcttttcctccgtacgtgtgtgtgtgtgtaggtaggtagaatcataaaatagataaatacaataaaatataaatgatggcataaatgagcaagtaatgtttattttataaggtgaaaaagaaa

SEQ ID NO: 255145 - DNA, 561 bp, Homo sapiens
taaccatgtaagtctaaaacatgttcaggtgactccaagccagtccctgctttaggggaggttggaatatattcttcatagacagttcttttcctccgtacgtgtgtgtgtgtgtaggtaggtagaatcataaaatagataaatacaataaaatataaatgatggcataaatgagcaagtaatgtttattttataaggtgaaaaagaaaactgatggattatctaatatactttggacacattgagattcacgcttctgwctgactttgaggttgcattaaaaatatgtacacaaatgtgaaataaatggggaatataaatctatacaataaaaaagtgaaaaataataaaccacctgacttaactatgaaaaacattggcatgcttataatgttattaatgtggaatgactacaaatgagtattttgataaaaacatattttttgaaatagagtcactgtgagtgcaggtttagtagttgatataaaagaaataagttctcattttctatggtaggagataaatggaaaatcagacataataatgtggcttatttgaaaa

SEQ ID NO: 255146 - DNA, 541 bp, Homo sapiens
tggagtagttagagaattcataaagaattcagggttgatatttcccttgaaggatggactggatttggtggaggataaaaggggcattttaagagtaaagatatgaaaaagatgcagttatatatgttagcagcatacaacatttatttagtatmgctaagctggtttacttaaagtttaaggtagtttctttacaacattttctaccatcatgtaaaattgaatttggcattgacaggcagcatccctacaacatacacatgcagacatacagacacacacacacacacacacacacacataaataatgaaatacaagttttggaaaataatatttttaatactacgtactatgtaccctgacatttttcctctcttgtatttcattttcttaaagttggttacaatccattaaatttaatttatgatctacttatggatcaaaatctatgcttgagttgtttttttcttacagacagttgacatttagtcagactttatctcctatgcaagaattggtgtagatactgatttcaggaca

SEQ ID NO: 255147 - DNA, 541 bp, Homo sapiens
tggagtagttagagaattcataaagaattcagggttgatatttcccttgaaggatggactggatttggtggaggataaaaggggcattttaagagtaaagatatgaaaaagatgcagttatatatgttagcagcatacaacatttatttagtatagctaagctggtttacttaaagtttaaggtagtttctttacaacattttctaccatcatgtaaaattgaatttggcattgacaggcagcatccctacaacatacacatgcagacatacagacacacacacacacacacacacacrcataaataatgaaatacaagttttggaaaataatatttttaatactacgtactatgtaccctgacatttttcctctcttgtatttcattttcttaaagttggttacaatccattaaatttaatttatgatctacttatggatcaaaatctatgcttgagttgtttttttcttacagacagttgacatttagtcagactttatctcctatgcaagaattggtgtagatactgatttcaggaca

SEQ ID NO: 255148 - DNA, 541 bp, Homo sapiens
tggagtagttagagaattcataaagaattcagggttgatatttcccttgaaggatggactggatttggtggaggataaaaggggcattttaagagtaaagatatgaaaaagatgcagttatatatgttagcagcatacaacatttatttagtatagctaagctggtttacttaaagtttaaggtagtttctttacaacattttctaccatcatgtaaaattgaatttggcattgacaggcagcatccctacaacatacacatgcagacatacagacacacacacacacacacacacacacataaataatgaaatacaagttttggaaaataatatttttaatactacgtactatgtacmctgacatttttcctctcttgtatttcattttcttaaagttggttacaatccattaaatttaatttatgatctacttatggatcaaaatctatgcttgagttgtttttttcttacagacagttgacatttagtcagactttatctcctatgcaagaattggtgtagatactgatttcaggaca

SEQ ID NO: 255149 - DNA, 515 bp, Homo sapiens
aatttcaagataaaactttaaaagacagatgttttacggagcacaaacgtatttctgatttgtagaactagtgacttttacagctgtccttcagcctttttccatttaaaagttgtcaggcaaacaagtttaaattgtaaaaaaaatgtaataaaagacaggcaaacctcaagcctttattttggctttgtttctgtatattcttccatattaatactttcttacgtctattctcyataaaataaatgaaaaatctggtgtatggacaaaacagaagtcaagcatccaatattacaagaaaattcagctccatccttcttctatcagttaaatttcttcttgtccccattttcaaagcactgacagtaagtacaggacaaagagctatggtagttcagacattttagaaaaagttcttgttatttcactatcttttcccattaaagctactgtaattctcagctattctacagctaaacaacagaaggcagtggtggtttaaagcagttttagaa

SEQ ID NO: 255150 - DNA, 515 bp, Homo sapiens
aatttcaagataaaactttaaaagacagatgttttacggagcacaaacgtatttctgatttgtagaactagtgacttttacagctgtccttcagcctttttccatttaaaagttgtcaggcaaacaagtttaaattgtaaaaaaaatgtaataaaagacaggcaaacctcaagcctttattttggctttgtttctgtatattcttccatattaatactttcttacgtctattctctataaaataaatgaaaaatctggtgtatggacaaaacagaagtcaagcatccaatattacaagaaaattcagctccatccttcttctatcagttaaatttcttcttgtccccattttcaaagcactracagtaagtacaggacaaagagctatggtagttcagacattttagaaaaagttcttgttatttcactatcttttcccattaaagctactgtaattctcagctattctacagctaaacaacagaaggcagtggtggtttaaagcagttttagaa

SEQ ID NO: 255151 - DNA, 559 bp, Homo sapiens
ccaaattgataggtaaaaagtaatgtcttgtttctaatttttatgttttgtttttgattagtaaatattttctttttttttttttactacttagtgccaatttttatgtatatggcaatgtatgagtaataaggggttaaaagagaaagagaaagtgtcatctgttcttatacttcacccatttttctttctaacatacttttttttggttttcattgattgtaggaatttttgtgtaaatggatatttatccttttatgatgtagtattataatttttaagtacataggctttggaatcaatccaagcttagtgcaaactgtagtgcaagaattactagctctaggactttgaacaagcttactgagawttatgtatctttcatttgtaaaataggaatacagagttattgaaatgattaaattaaatgatgcctataaatgataaaaaaacataaaataataatgataataaaggtaactactaaattcactgttatcaaaattatattgcaggtgtatatttccattttgtcagtagcaccttaaattttttaagc

SEQ ID NO: 255152 - DNA, 570 bp, Homo sapiens
tcattctaagaacgaatttttggcttcatttattttttcttttgtcttttctattttattgattgtcactccagtacttactctttcctttctaccacaaattcgagctcttctttttctagtttcttaaaataaaggtgaagtcattaatttggtacctttatagtatttaatgccctaaattctcctctyattaataagtactgctttagtggcatcttataaattttggtacattgtattttaatttttattttggtaaatatttttgacccactctcaatttcttcttttatctatgaattatttagtttccaaaatttgaggattttttaaatatttgactgttattgatttctaatttaattttcttgttatcagatgtcattgtatacattaaccctttaaactttatggatagaatatagtccatctttgtaaatgttctctgtgctttcagaaagaatgtgtattcttccgtttctggttctgtgtgttttataactcaattaggttaagtcagttggtagcactgttcaagttctgtagatgcttaataattttctgtgt

SEQ ID NO: 255153 - DNA, 570 bp, Homo sapiens
tcattctaagaacgaatttttggcttcatttattttttcttttgtcttttctattttattgattgtcactccagtacttactctttcctttctaccacaaattcgagctcttctttttctagtttcttaaaataaaggtgaagtcattaatttggtacctttatagtatttaatgccctaaattctcctcttattaataagtactgctttagtggcatcttataaattttggtacattgtattttaatttttattttggtaaatatttttgacccactctcaatttcttcttttatctatgaattatttagtttccaaaatttgaggattttttaaatatytgactgttattgatttctaatttaattttcttgttatcagatgtcattgtatacattaaccctttaaactttatggatagaatatagtccatctttgtaaatgttctctgtgctttcagaaagaatgtgtattcttccgtttctggttctgtgtgttttataactcaattaggttaagtcagttggtagcactgttcaagttctgtagatgcttaataattttctgtgt

SEQ ID NO: 255154 - DNA, 570 bp, Homo sapiens
tcattctaagaacgaatttttggcttcatttattttttcttttgtcttttctattttattgattgtcactccagtacttactctttcctttctaccacaaattcgagctcttctttttctagtttcttaaaataaaggtgaagtcattaatttggtacctttatagtatttaatgccctaaattctcctcttattaataagtactgctttagtggcatcttataaattttggtacattgtattttaatttttattttggtaaatatttttgacccactctcaatttcttcttttatctatgaattatttagtttccaaaatttgaggattttttaaatatttgactgttattgatttctaatttaattttcttgttatcagatgtcattgtatacattaaccctttaaactttatggatagaatatagtccatctttgtaaatgttctctgtgctttcagaaagaatgtgtattcttcygtttctggttctgtgtgttttataactcaattaggttaagtcagttggtagcactgttcaagttctgtagatgcttaataattttctgtgt

SEQ ID NO: 255155 - DNA, 570 bp, Homo sapiens
tcattctaagaacgaatttttggcttcatttattttttcttttgtcttttctattttattgattgtcactccagtacttactctttcctttctaccacaaattcgagctcttctttttctagtttcttaaaataaaggtgaagtcattaatttggtacctttatagtatttaatgccctaaattctcctcttattaataagtactgctttagtggcatcttataaattttggtacattgtattttaatttttattttggtaaatatttttgacccactctcaatttcttcttttatctatgaattatttagtttccaaaatttgaggattttttaaatatttgactgttattgatttctaatttaattttcttgttatcagatgtcattgtatacattaaccctttaaactttatggatagaatatagtccatctttgtaaatgttctctgtgctttcagaaagaatgtgtattcttccgtttctggttcygtgtgttttataactcaattaggttaagtcagttggtagcactgttcaagttctgtagatgcttaataattttctgtgt

SEQ ID NO: 255156 - DNA, 617 bp, Homo sapiens
tctgtgtgttttataactcaattaggttaagtcagttggtagcactgttcaagttctgtagatgcttaataattttctgtgtgcatttaatgtcaattatagggggatactgaaatatctgacagtacttctagatttgtctatttcttcctgtttgatcagtttttttgttatatactttaaagctgcattatcaggtacacgaatatttgagattgtgaggtccaattcataaaattatacctttaacattatgtaaaaccttctttttctcttcttccctgktaatattctttgatctgaaatatactttctatatttatataaccagtgtaactttcattttattagagttagcatggcatagtctttacattcatttacttattttatttttgtcttatatttgaagtgcattgtttttttgcagaaagaatataattgggtcttgctttttgttccattcgaaagttactgcctttgaattggcagttacaccatttatatttaatgtaattatttataagattagatttttaaagagtatgatctcactatttgttttctgtttattccatctgatctttgtttacttttcgtttttttcttgactttga

SEQ ID NO: 255157 - DNA, 617 bp, Homo sapiens
tctgtgtgttttataactcaattaggttaagtcagttggtagcactgttcaagttctgtagatgcttaataattttctgtgtgcatttaatgtcaattatagggggatactgaaatatctgacagtacttctagatttgtctatttcttcctgtttgatcagtttttttgttatatactttaaagctgcattatcaggtacacgaatatttgagattgtgaggtccaattcataaaattatacctttaacattatgtaaaaccttctttttctcttcttccctggtaatattctttgatctgaaatatactttctatatttatataaccagtgtaactttcattttattagagttagcatggcatagtctttacattcatttacttattttatttttgtcttatatttgaagtgcattgtttttttgcagaaagaatataattgggtcttgctttttgttccattcgaaagttactgcctttgaattggcagttacaccatttatattwaatgtaattatttataagattagatttttaaagagtatgatctcactatttgttttctgtttattccatctgatctttgtttacttttcgtttttttcttgactttga

SEQ ID NO: 255158 - DNA, 491 bp, Homo sapiens
catggcatagtctttacattcatttacttattttatttttgtcttatatttgaagtgcattgtttttttgcagaaagaatataattgggtcttgctttttgttccattcgaaagttactgcctttgaattggcagttacaccatttatatttaatgtaattatttataagattagatttttaaagagtatgatctcactatttgttttctrtttattccatctgatctttgtttacttttcgtttttttcttgactttgagtggattatatgaatgtttgtattattccattttatctctttaatttgtttattagctataatttattttgcatgtttagtgtccatagtttgtatctatgatttaacacaatctattttcaaataatattcatgtgttgtgtaagaatattacagtaatacattgcaatttctcccttcctgatgtttgtgctcttctagtcatatactaaaccaaacactgcattgtca

SEQ ID NO: 255159 - DNA, 491 bp, Homo sapiens
catggcatagtctttacattcatttacttattttatttttgtcttatatttgaagtgcattgtttttttgcagaaagaatataattgggtcttgctttttgttccattcgaaagttactgcctttgaattggcagttacaccatttatatttaatgtaattatttataagattagatttttaaagagtatgatctcactatttgttttctgtttattccawctgatctttgtttacttttcgtttttttcttgactttgagtggattatatgaatgtttgtattattccattttatctctttaatttgtttattagctataatttattttgcatgtttagtgtccatagtttgtatctatgatttaacacaatctattttcaaataatattcatgtgttgtgtaagaatattacagtaatacattgcaatttctcccttcctgatgtttgtgctcttctagtcatatactaaaccaaacactgcattgtca

SEQ ID NO: 255160 - DNA, 491 bp, Homo sapiens
catggcatagtctttacattcatttacttattttatttttgtcttatatttgaagtgcattgtttttttgcagaaagaatataattgggtcttgctttttgttccattcgaaagttactgcctttgaattggcagttacaccatttatatttaatgtaattatttataagattagatttttaaagagtatgatctcactatttgttttctgtttattccatctgatctttgtttacttttcrtttttttcttgactttgagtggattatatgaatgtttgtattattccattttatctctttaatttgtttattagctataatttattttgcatgtttagtgtccatagtttgtatctatgatttaacacaatctattttcaaataatattcatgtgttgtgtaagaatattacagtaatacattgcaatttctcccttcctgatgtttgtgctcttctagtcatatactaaaccaaacactgcattgtca

SEQ ID NO: 255161 - DNA, 536 bp, Homo sapiens
gagtgtggaggaatagataggggacctgtgtaacaaggcagtctggccactttttccatagggtggctgcaccagaggcaacaatggttatggataggagctccatctcagggaagtgtaatgctgccacaccagtagctggctggagttgcacgtcagtgggtcttatcctgtgaaatgttgtggaagcaggacctgtagatcctcactcctcaaccccctggattcaaccctttgcctaagggtaagcacaggggtctaaccctgctttgctggagttgcatctgcttttgttgggaagcctgaatatatacagcttctggggcgctgcatgtgcctgattagctgctcagccaaaactccacgtagctctgtgtgtcagattgcaggtccggtggagtgggttcatgaggggatctcctgacccaagggttgcaaaaatccatgggagaagtktgtgtgcctgggattgctcactcaactcaccacttccctaggcagggaggctctcctggctccacgttactcctgggtag

SEQ ID NO: 255162 - DNA, 555 bp, Homo sapiens
catgtgtgctacacaatggcttataaatactaatttttcagcctgtctggaaggaacaagcamtattctctgccctgtatgaacactgaacactctcacctcttatgcttttaagtgctttacagtggttctttccttggtctcagttattttatcacatgcatgtgttgatcagtattcagttgaatagtccagggggaccctttgtagatttccagtgttatctctgtaccactctcttttctctgttactctatcctgaaaaatcttcctagattctgagttctgctttctcaactcagcaagtctgttaggatttttctgtgttcctcctctctgtgccaaagcctgggaattctttcaaggtagtaatatatgcaatcactgggttcacaatatttgttccatttctctggaaactgtcctttgctgtctgatgtctagtttttttcaaaacatcattttgtgttttttatccattttttttgcttgctgccagtgggagattggaatccaatatttttactacattttgacctggtacgcatatgctaa

SEQ ID NO: 255163 - DNA, 617 bp, Homo sapiens
atgtgagtatctttatgtcatttgattatttccttgagattagtttggtgcacttcctgtcctttgtccagtaacgtagtatagcctcaacaacaatattacttttccttatgcatgtgacctttacaaaatgtccctagttgaccttaccagccttgtcttacagatttctctcccttgaccttatttttccatcacatcaaactcttccccgctccaagattatagctctgcacctggtgaaagcacactatgtgataccatgyggtagtataaaacaagatcggtctatcatctatctatccatctaatgcaaaagaaagataatgtcgaaaggaaaaaataaatgatttcaaacatttatattctaataccatttatataaattaaacaccacttagagattgctttttaatcattaggaaggactattaagaaaaattattgtaaacttagaaataaggaaaaaggatgacagcatgaccttcattatcatgctatgctaataaacttgcttaaaaatctacttgctttaagggcatatgcttttgctggacttaccactgattagcagcaaacaaattacaactctttagagttagatgttaatttgtagg

SEQ ID NO: 255164 - DNA, 617 bp, Homo sapiens
atgtgagtatctttatgtcatttgattatttccttgagattagtttggtgcacttcctgtcctttgtccagtaacgtagtatagcctcaacaacaatattacttttccttatgcatgtgacctttacaaaatgtccctagttgaccttaccagccttgtcttacagatttctctcccttgaccttatttttccatcacatcaaactcttccccgctccaagattatagctctgcacctggtgaaagcacactatgtgataccatgtrgtagtataaaacaagatcggtctatcatctatctatccatctaatgcaaaagaaagataatgtcgaaaggaaaaaataaatgatttcaaacatttatattctaataccatttatataaattaaacaccacttagagattgctttttaatcattaggaaggactattaagaaaaattattgtaaacttagaaataaggaaaaaggatgacagcatgaccttcattatcatgctatgctaataaacttgcttaaaaatctacttgctttaagggcatatgcttttgctggacttaccactgattagcagcaaacaaattacaactctttagagttagatgttaatttgtagg

SEQ ID NO: 255165 - DNA, 617 bp, Homo sapiens
atgtgagtatctttatgtcatttgattatttccttgagattagtttggtgcacttcctgtcctttgtccagtaacgtagtatagcctcaacaacaatattacttttccttatgcatgtgacctttacaaaatgtccctagttgaccttaccagccttgtcttacagatttctctcccttgaccttatttttccatcacatcaaactcttccccgctccaagattatagctctgcacctggtgaaagcacactatgtgataccatgtggtagtataaaacaagatcggtctatcatctatctatccatctaatgcaaaagaaagataatgtcgaaaggaaaaaataaatgatttcaaacatttatattctaataccatttatataaattaaacaccacttagagattgctttttaatcattaggaargactattaagaaaaattattgtaaacttagaaataaggaaaaaggatgacagcatgaccttcattatcatgctatgctaataaacttgcttaaaaatctacttgctttaagggcatatgcttttgctggacttaccactgattagcagcaaacaaattacaactctttagagttagatgttaatttgtagg

SEQ ID NO: 255166 - DNA, 617 bp, Homo sapiens
atgtgagtatctttatgtcatttgattatttccttgagattagtttggtgcacttcctgtcctttgtccagtaacgtagtatagcctcaacaacaatattacttttccttatgcatgtgacctttacaaaatgtccctagttgaccttaccagccttgtcttacagatttctctcccttgaccttatttttccatcacatcaaactcttccccgctccaagattatagctctgcacctggtgaaagcacactatgtgataccatgtggtagtataaaacaagatcggtctatcatctatctatccatctaatgcaaaagaaagataatgtcgaaaggaaaaaataaatgatttcaaacatttatattctaataccatttatataaattaaacaccacttagagattgctttttaatcattaggaaggactattaagaaaaattattgtaaacttagaaataaggaaaaaggatgacagcatgaccttcattatcatgctatgctaataaacttgcttaaaaatctacttgctttaaggrcatatgcttttgctggacttaccactgattagcagcaaacaaattacaactctttagagttagatgttaatttgtagg

SEQ ID NO: 255167 - DNA, 585 bp, Homo sapiens
catgctctaacagccacataccatcacctgcctgaggctagtgggaatgacaaccagcccgaaggtctgaacacatctgctcacttctctggccctttgcttttcagccatggcgtcaggtatccctttaaarcatcctaaagatgtcctaatgcagagacggttagaaacatggccaattttaacgagagggtactcaagatggagagaaaaggcagagaggtctgggtatgaaaaacccattggggtgtgggtagaaatggttagaactaggctagtgaatcattgcccatcaatatccaccatcaacccatgccccccaaggtggggatatcactcagggtaattaacttctaattcttagattattttatctggtcaccagcagaacctgagaggatggagatatagggttggtgagattacctaaggggaagtagggagagagggaggtctgagtggagggacggatgctcagtggcccaggcaggggtaccctgagggcaggtttactggtcagtgggcagcatgagagctctggtctgaaggcctatgtgagatgagctcagaggtggtggtgggcag

SEQ ID NO: 255168 - DNA, 620 bp, Homo sapiens
tcatcaagacttttgttctctttttctttctgggccacaaccctgggccatattttccagtccctgagcttctaggtgggaccatgtgaccactcctgttgaatggaaagagggcaagcattatatatgtcactcccaggctgcgcacagtggctcacgtctgtaatcctagaactttgggaggcaaggtgggtgggtcacctgaggtgaggggttcaagamcagcctggccaacatggtgaaaccccatctccactaaagttacaaaaaattagtgtggtggtaggcgcctgtaatcccagctactcaggaggctgaggcaggagaatcacttgagcctgggagacagaggttgtagtgagctgagatcacaccactgtgctccagcctgggcaacagagtgagactccaactcaaaaaataataataataatttttaaaaatatgtcactcccagcttggcctgtgaactcctaggcaattctccactctctctctttccccatccactggctgagcagaaaactttgaggactggaagaggatggaatcatgaattggaaggtctcttgagttactgaatgaccttgtggagcagagcccattccacctgtttcaaa

SEQ ID NO: 255169 - DNA, 571 bp, Homo sapiens
tccagggttctttgctctccccgaatggatggaagccaygctcaagcagctgaacactgtgaacggacacagctctgcctgtaaacgcttcctcagaaagaagtgagggtgttcacattgaggctgttctatgggtggaggctgctggcaccctctactggacggactgggtatgtcctctgctgtccagtcaggtccaaattgctcaactctaagtcaaagtgatgaagctatggcaaccctctctccaggtgtccatggccaccatcagtgcctgtgttaaagcctctctgagattgtgagctagtcccaggcacatccccgtgttttccagctgatggatcatgcttcctgaacaaatgtaatgtcacttcagtcagggactctggagtctactttctcacactaagagcggggagcacagcttcccaaatcacagcagcccctcttccttcctctggttcactgatgctttgaaaataaagaatgttccctctgaggtcccatctcctttttaaaaagaaattcagtttccagttctagatgaaattagcatttgtcctctctaatt

SEQ ID NO: 255170 - DNA, 613 bp, Homo sapiens
atttaaaattaaataaaacaaaatctaaacacctgagcaccacctgcagggccccatgggagctcctaccctyagctcttaccactgcagacacactggcctgcttgtgttcctcatgacaagctcattcctgccttggggcctttgcacttattttctcatcttcctgaagcaattctcttcctgatatttccataactggttcctcttcattatttatagaagtgtttgttcaagtgccatcctcttaattacttaggtcccatgcagtgcctttgaaatgtctgccttgaccatcctatctaatactacacctcatccgccaagtctttttctacccgaagagcatctttgaagataggacctttgttttgttctcttccacatgcccagaaactatagtaatatctaataagacataggtactgaataaatatttgccgaatgactaaatcaacgacattgccctgttttgatctaagattctcttctttatctgtttactgttaacttgcatattacctaagtctcccataagaatgacagttccctgagagcagagtcctcctctatcatgtacccaccatatcctcagtgcctccaatagtatctg

SEQ ID NO: 255171 - DNA, 570 bp, Homo sapiens
tggagaaatcacatgtgaaaagactggcctgaaagcaattcaggaattgatgaagctagagagagagagagagggagagcgcgcacgagagagaatgacagctgggtgggctgctgagtacattattagtctgaaatcagattatagctttccctcctgaattaattctggggacagtacatggggagggggtaggggctgctgatakcagtgggttttccttgagcatttattttttattctactttcttttagtttagttcttgagttggggcttttctggatagggagggacgttggtgagtgattaagagttaaagggaaatagcaggaggaaggatgaataaaaggaatcctctgtgtgcaactcaagagaaagtccaggatcagattaggttgtttttgccccatttcttgaattaaaagatcaaaaacaggaatgtctttttctttttatccagaaaatggggtatgcaaaagaatggtctcttcccacagttttagtttacacagggcgtgtccctcccaaccagtcccatgggtgtctctcggttccttagtttgggagta

SEQ ID NO: 255172 - DNA, 389 bp, Homo sapiens
aatatccccatctgtcctgcctaccctaggagttttgcgcacctggatttttctctcctgcccatgatggatggccaggagccacactgtcagaatgacttccaatccataaatagctctgccatttagatgccatggggataacattaataccaaacagaaaggctaaataaaaagcctttagcaactgaatggcccttagatttcagagttatcratccagtggagcctgctaagttattatggctacagttctgctcagagaaatctgtgatcctgagaaaagttagcaaaagtcacagtcacctttaactacaaagtgcagtgagaggactccagggcagctaattacccccatccactctggcacattccaaaggctgtgttca

SEQ ID NO: 255173 - DNA, 519 bp, Homo sapiens
tgggtaatttataaagggaagagatgcaattgactcacagttccgcatggctagggagacctcacaataatgttggaaggcaaggaggagcaaaacgatgtcttacacggcagcaggcaagagggcatatgcaggggaactccccttgataaaaccaccagatctcaygagacttattcactatcatgagaacagcatgggaaaaccctgcccccatgattcaattacttctcaccaggtccctcccacaacacttggggattatggaagctacaattcaaaatgagatttgggtggggacacagccaaaccatatcaactgtcatgtgaagatacagggacacaaggagaactccatgtgaagatgaaggcaatattggagtcatgcagctgctgaaacaccaaggattagcagcaacccagagcctggccctgccaacaccatgacttcagacttctggcctccagaattgtgagacaacacaattctgctgttttaggccacccagtttcacccta

SEQ ID NO: 255174 - DNA, 554 bp, Homo sapiens
taataaggcccctcgaattacccattacgtgctgycagcaaatcacatgatttcttttttaatattgcaaatatctggcccctggaaaatgatgatgatgctatctccactcggctagatgataaacagagttcctgtgccagggagccaccgcccctcctccagggttgtctcagaaaaggcaaggaaggatggggagaggctcctgcagttttgagcttcaagtcccatcttcatctggcacaaacgcccctacattgcacctccctccagccaatgttccctggctttcctgacagcatggctgaggcataaatgccacttcctctgagtggccttccctgactgccctacctaaacaagcaccttgcactgttggccctccaagcacctgctttttcattcccagcattacacccgtttgcttgtttaatgcatcacttattaaacaataagctctgtgagggttgtcttgttaattattcaacccatagtgcctagcatattgtagggcacatagtttgacccaagtaaccatttgttaagtaacttaa

SEQ ID NO: 255175 - DNA, 532 bp, Homo sapiens
atgggtgatcaacatcacttcagcaacatactctgaaatagttctggaaaaagaacgatgttttgctgtacttacagctcgtctttatgaatgagattgtttcaacaacaccatttaagaagctatcactgtgatgaccagcaaaaggcttcagtctccttcagcccacattatctggccatgcttgcaatgagctcagtctgcttagagatgctgagtgagtcagcctcacacctcggtgctgaggtcatcacaatcgtgcctgccatctaaaatatcctgcatggaagaggsaattgagggggagacaggtggactccatgcccttctggagccctgcattgatttcaggaaggattcaggccacaagaattgggaagatagatgtctccatcatgtgggcattgggtctgtggtcacaagagcaatgtcccgacttctggtctcatgtctgtccctcgcaggggctctgctctcaggagtataccctgggaagcttctgcctcctcctcttccatgtgaggaaggctgg

SEQ ID NO: 255176 - DNA, 561 bp, Homo sapiens
attttagtgtctcaaagtttacctagtagaaaagtccaaagttgagaacaactgacaaccagatgtagaaatatatatattttttatttctggaaactctgcttacttttcttagctgttgtttctgctgcactgcatgttgcatggtactgctcactgataacccctctctgtggcatcatctgcccatggtggaaaagccagcaaacctgacctgggtaaaagcaggcacaagcagacagtgtgctggactggccgtcccaagacctggcatccaagttggctctgctgctaactcactaggaaccttgggaaaatccacttcaacccctctgtcccagaaatccgatctgttctatttattttccagagtaatggggaagaaatatcaaggtgatgkatgtgaaagtgctcagaaaaataggaagtgccttcaacctgtaaagttaagcctctgtcatcaggatcaggtttagaaaacgaggtctgaacacagggctgtaaagcagacaggttctgagacacgcctagctcaaatcctcattttacaggtgagagcac

SEQ ID NO: 255177 - DNA, 599 bp, Homo sapiens
atctgtgattgtgattataaagcaatctcagcaactttttttttttttttgagacagggtctcattatcacctaggctggagtcagtggtgtgatcagagctcactgcagccttggcttcctgggcccaagtgatcctctcacctcagcttcccttgtagctggaccataggggcatactaccacagcccagctattttaaaaatttttttctttttttttttttttaaaaagagatgaggtctccctctgttgcctaggctggtcttgaactcctgggctcaaacgatccaccttcagcctcccaaagttctgggattacaggagtgagccaccaatgtttatttatttatttatttttttgagacagtctcttactctgtggcccaggctggagtgcagtggtgcagtctcagytcactgtaacctctgtctcctaggttcaagcaattcccatgcctcagcctcccaaagtgctgggattataggcatgagccactgtgcttggcccactttttaaaaatgatttctctgattataaaggtaatccatgctcatatattacaaagagtataaataaatggacacataatcccagca

SEQ ID NO: 255178 - DNA, 536 bp, Homo sapiens
ctcttggtccctttgatatgtagtttcaggagagacacagaattgctctttttcctaaacacactagctgtcctcccagaagaagctgcatagaggggttttgagtgtttgaccatccttctcatgcagacagacacaaccctcccagacttctgcatgttccacttcagccctccacccgcaaggactgccctgcagatatcaatagttttctacaacaygagaagtggagagctgggagcgaccatatgtagaaggccacgtaagacttaacagcatctaaaccaagcagaggaggcgcctgtttcagatgctgttacagataaattacctttagtgagatgtaatttacatacaataaatttcatcaaattttagcatataactcagtgcattttgacagatatacatgggtgtgtaaacaccactacagtcatgacacatagtatttctattccttgtgcttcttttcagactatcttctcctcctccctccatggcaaccactgttatgctttctgctgccgtagttttgg

SEQ ID NO: 255179 - DNA, 581 bp, Homo sapiens
tcgaagtttcttctggtgggttcgtggtctcactggcttcaagagtgaagctgcagatcttcccggtgagtgttacagcttttaaggtgtggggagttgttcgttcctcccgtggggagttgttcattcctccccgtgggttcgtggtcttgctggcctcaggagtgaagctgcagaccttcgcagtgagtgttacagctcataaagacactgtggacccaaacaacgagcagcagcaagatttactacaaagagctaaaaaacaaagcttccaccgtgtgcaagaggccccaagcaggttgccattgtgcgtttattcccttatctggccccacccacatcctgctgattggtccattttacagagagctgattggtccgttttacagagagctgattggtctgttttgacaggatgctgattggtgcatttacaatccctgagctmgacacagagtgctgattggtgcatttacaaccctctagctagaagtaaaagttctccaagtccccactagattaactagacacagcactgattggtgtgtttacaaaccttgagctagacacagagtgctgat

SEQ ID NO: 255180 - DNA, 589 bp, Homo sapiens
tgctatctccaaggacaatctaagccagsctgctccttgtaatctggtctcatccctgccctttgccccctctccacatatctctgttcttcctttcccaggttccctgggtgtcgcccacacccacgcctgcaccaagacaaatcgcacggggctaggctctcccgagaaggcctttgcagaccgctgctggcctcccagcaagtgctgcatctctgcgagccactaagcatgcagggagtccctgaagagacagctttgaaatgggatcattttcttcctggaagcaaaagggtgtttcctcaagacactatttctccattaaagtatgagaaattccatctctgaagctcccagtggggccagacatcgggttggggtggggacgggacgttgataagagtcaaatctagaacactgtgctcttaccccctcatttcacctggtgtctctgggcctggcttctgggagctatttgtgatgtgtggtatgagtgcatgtgctggaaagtattcttgtatgagttcaaatttatgtgctcaccttgccccttggggtattactggccttcaagtttgatgcttttgga

SEQ ID NO: 255181 - DNA, 619 bp, Homo sapiens
tgcacctgtatgttacagataagtaaattaaggctcaaagaggggcagsccatgattggcttggtgtcccaacaaagcaagcctttgagttccctgatggagcatgggacctttgagcctttggtcttcctggcctaagatgtggtctttatccctgaagttctaagaactgtgggcttgcctgttgccaaattaccctctaggaccatggatcctccaagcccactacagaatccagctgaagctttcaattatgtcagcctgtggaagtatctaaggtgagtgattgatgggctgctgtcagggaaagcagaatggatcaagctcaaagatctgagaggcagctgtagcacactttcctgaaatgcaaaccccacccccacgccaccagcctccagatttcagcagcattactacccatcaagggctgcttaatttgccttcaacgtccgaaggctgtcagcagggagggcactgccaattagtccatcagtgagtgagatcagatgtaaggttgtaattgccctgggacctatatgaaagtatcaacactctgtaggagggtgagagacccaagagtttggagcaaagagagattctgactctaagagaaatggca

SEQ ID NO: 255182 - DNA, 583 bp, Homo sapiens
ggcagtcacaagctgagaagagtaaatacataattattttagctcttggatgtcctagtattaaggaaactgagtcctataaattccttctcttcaatacctcccaaattccttatttccttccctttcccatggccaccccttagctcttgtctacctggtggtaatgcagagcaggtgagcccctaatggggcttagacagggagggttcttggttttgcccaggaaagaattaaagggcaagctgcagtagatgaaaacagctttactgaagcagtgttacagttgtggtrgttttatagttccgtgactgctcctgcacagcagggtgaccccataggcagagagtagcatctcagggcagttttgcagtcatatttatacctatttaattacatgtagattaagaggcagtttatgcagaaatttctagggaaggggtagtaacatttgggtcattgggtcgttgccatggaaaggggcaataactccaggtgttgccatggcaatggtaaacctacatagcacactgggggtgtgtcttatggaaagctgcttttgcctcagccctgttttagctaa

SEQ ID NO: 255183 - DNA, 583 bp, Homo sapiens
ggcagtcacaagctgagaagagtaaatacataattattttagctcttggatgtcctagtattaaggaaactgagtcctataaattccttctcttcaatacctcccaaattccttatttccttccctttcccatggccaccccttagctcttgtctacctggtggtaatgcagagcaggtgagcccctaatggggcttagacagggagggttcttggttttgcccaggaaagaattaaagggcaagctgcagtagatgaaaacagctttactgaagcagtgttacagttgtggtagttttatagttccgtgactgctcctgcacagcagggtgaccccataggcagagagtarcatctcagggcagttttgcagtcatatttatacctatttaattacatgtagattaagaggcagtttatgcagaaatttctagggaaggggtagtaacatttgggtcattgggtcgttgccatggaaaggggcaataactccaggtgttgccatggcaatggtaaacctacatagcacactgggggtgtgtcttatggaaagctgcttttgcctcagccctgttttagctaa

SEQ ID NO: 255184 - DNA, 594 bp, Homo sapiens
aaaatatagtatatatagggctggctttatccatggtttcaggcatccactgggggtcttggaacataccctccacagataaggagggactactactgtatactctgtgatccagcaattttactactagatatatagccaaaggaaatgtatacatacataaacaaagacatrtgtaagaatgtttatagaagcactatttatcatagttcagtgccagttataaattcagctccaaggacatacatactatatgtatatatacacatacacattcttcagcatacctacatcaggactggaattcacctctcctcagcaaagtgtatggcaaaagtatttctaagtacagtgggctatagagaggcattcctatcccccatagaaaaaaaatgattgtgtttctagaacttctacttggggatccagtgctaaatattcactcatcaccagaattttctttaaatgaaaaaatttgtattttggattttaggtattcagcattggattaatcataatcctagttatgactcaatgccaacattgtttcgcatatggcccacttttttactcattcgttcatttattcatgca

SEQ ID NO: 255185 - DNA, 490 bp, Homo sapiens
ccccttactcttcactgtagaggcaagcttcctggcctgggcaggaaagcattggcccacatttgaggttctggcattatctccctggcctggtatcaggttgctcttccaaggttcctcttcctgacacttccccaatatcccagctcccttcaagagtgaagggttaaaccacttccttcccctggccctgctggcctctaccactcctgccaatctcccaggccacagctgacgcctgccaaggtagacttttaaagccattccccaaatactagcaggggctatgtmctcctcaaggaaggcttgaccacatcatctggaaacactgctttgctgatggcacagcttagatctgtggccatataagcttgtcaaaatggcattcccccctccgcctgagttaaatgtctcactccatcacagcggacctggaacactggttatatatggctgcataacaaaccaccccaagcctaatgacatcata

SEQ ID NO: 255186 - DNA, 524 bp, Homo sapiens
atttcaatacttgtaacaaggttttggaagagaatgtccttgctcttaggaaatacatactaaattattaaagggtaaagggactttatgtggggaagttactctcaaggggttcagaaaaccaatgatatctttagagagagaataatacagcaaatgaggtgaaatactaacaataagtgaatctagacaggtagcataagggcattctttgtacttttcttttaaaaatctttaagtttgaaattctttcaaaataaaaagtgaaaatgaaaaaggatctgaaggaagagcatttgacctcaagggagaattgtaaaggaccaacccaaattcctcttgcagtaactgggatcaagacttcagtttaggccctcaacaagggatgacaaaagaacaaagctgtttttcctaaactgcamttcctccagaatctgaaaaacacttgtttttatctctttgcctgctgcctccccatatttcagaatctcctgcagagccagtttccatttagacaggaagcc

SEQ ID NO: 255187 - DNA, 547 bp, Homo sapiens
gcctcagtttccaacatctcaaccaaagcagggaaggtgatgacatttgcctcagaaagctattttgagaatcagaggagctaatatagaactcagtaacatttgtgttcatatttcctgggcacacagctgaactggcgcttctcaaacttttttttttttttttttttttgagatggagtctcactctgttgcccaggctggagtgcagtggtgcaatctcagctcactgcaacttctgcctcctgggttcaaatgattctcccacctcagcctcccgagtagcagggattacaggcgcacgccaccacacccggccactttttgtatttttagtagatatggggttttgccatgttggccaggctggtcccgaactcctgacgtcaggtgatccacccacctcagcctcccaaagtgctgggattataggcatgagccaccacgcccagcctctcarcccctcatgtacatgagtcacctgggaatcttgttaaaatgcacattccctctcagcagattggggtgggggcctgagattttgcat

SEQ ID NO: 255188 - DNA, 535 bp, Homo sapiens
tgagtcagactccaaatttcagtgtcataaacaattattgagcacctactgtgtgccaggcaccatacaaggcactagagacccaatgatgaataaagcacagtccctgcccttgagaggttcatatgcaggagaggtcctcactgtgggcagtgactgaaacctacatcacaggatttgggaatgagaaaatatagccaacccaggcccctcctacgctctgcatttgcaacaaagaaaataataagggaattgtgctccatgggcatgcaaatgaggactaatgaaggtcgcaggtgataaattggtgcatagatgtgcaggtagggtgccccagaccaggtatgcatgtgtttgaatgtgtgcatgtgtgtgtgagcacataggcatgtgctggagtatatgggtgtgtgtgaaagaaagagaggattaaatcttrtttaggactagccagcatcttcaactaacatgatcatttcctctctattctgaattcgaaaggactgcattatcctggtctagaagtttaagtaca

SEQ ID NO: 255189 - DNA, 632 bp, Homo sapiens
ctgtcctattttttcaaaatatccacaagacatggcaccatctgcttaggtagtcaaatgtgtatgatgatctgacaaggccaaataggaaactgttatagtaccatttatggctgggatcagcaatctgtgagaatgaaagaatcccttttatctgaacagcaytttttagtttacaaggtactttctgaggagctttctagttttctaaagacttacctgtgacacttcataaaggagcactactttttaaatatggaccttatcgctaagaatgaatgagtagtcttggatgtgacctgggtgtttgtagttttaaaaaggcccacagatgattctgatgcacagccagaaggtgtggcatcatctccttactcctcatggctgccctgaaagataggacatcccctggtaggcctgatttgcagatgagaaaactgaggctcaggacactgaagatgcttgtccagggaaacatcattagctaagaccccagtccaggtcttctgagcactggtcagtgctccttcatctcctcttactgtccatcatcagcaggctggaaggaagctcctctgttcaaaaacatacctccaaggagggtgggacctctgagtcatccacgtgctaat

SEQ ID NO: 255190 - DNA, 581 bp, Homo sapiens
catgttgaagtggtatgcacgtgttgaagtggtaggtgcaagttgaaatggtcgcacatgttgaagtggtatgtgcatgttgaagtgatatgcacatgttgaagtgggccacgcatgttgaagtggtatgcacatgttgaagtgttccacgcaggttaaagtggtctgtgcatgttgaagtgatatgcacatgttgaagtgatatgcgcatgttaaagtggtccatgcatgttgaagtagtctgtgcatgttgaagtggtatgcacatgttgatgtggcccatgcatgttgaagtggtctatgaacgttgaagtggtttgtgcatgttgaagtgggccatgcatgttgatgtggtccatgaatkttgaagtggtctgtgcatgttgaagtggtatgcacaagttgacatggtcagtgcatgttgaagtggtaggtgcatgttgaagtggtctatgcatgttgaagtgatatgcacatgttgacatggcctgtgcatgttgaagtggtaggtgcatgttgaagtgatatgcgcatgttgacatggtaggtgcatgttgaaatggccatgcattttgaagtgg

SEQ ID NO: 255191 - DNA, 584 bp, Homo sapiens
gaagtaatatttgagtaattagaatactcttacttttttaggaactcaaaaagtttctgtttacaacttgaatttaagagagaaatggaaataatgattcgaggaggggagcatatggagccaaaagacacatgttccagtgtagttctctgactacgtagtgaattcccctcttcctctctccaccttaagtctcagtggtacacygtgcaaaatcctaaaggtcaataaatgatctcaaagatgcctgcgatttggagcttacatgattactgcacttctccagctaactgcttcctagccatgttatttcttatcagaaactccaccagagggtgcaccagctcagaaaaaaaagtgaaataaagttggtttggaaaattgttagcccaggaagaaaaaaaaatagagggccttaaaaattagatttaagaaacacaatgaggtggttaatatttagaattgagtttaacgataagtaaaggggctattttcaaacagaaaaaaagtaaaggaagaggaggaagatgaaataatccatactcctgaccatgagcttagatgtcacaattcaaaaaagaaaa

SEQ ID NO: 255192 - DNA, 483 bp, Homo sapiens
ggcctttaaaaagacaaaggcaatgaaattaaaatgaggtaattgggatgaaccttaattcaatatgaccagcattcttataagaagatattagcacacagacaggcacaaagtaaagaccatgatgtagagacacaaggagaagggtggccatctgcaatccaaggagagaggcctcagaagaaacctaccctgccgaaaccttggtcgtggatgtctagactccacaatcgtgagaaaatgaatttatgttatttaagtgatccagtctgtggtactttgttatgacagccctagtaaactaatacarctgctctcttggggagtgaggaggaagaagaggggctgtcagagaacgaagaagaggagaagatcagaagaaagtcaagaaggcagagaaggagaagatgcagagcaagaggaagaagagaagaaacagtttaaaatcagagatattttaaggactaaaatttaaacctactt

SEQ ID NO: 255193 - DNA, 613 bp, Homo sapiens
aacatttttactgtttactaaagagaaataattatttatattagttgaagtttgcaaccatacatgtaaaataatacaatttagaaagtgatattttaatttttctaatgcaatttacatttcccatgttggcagcattagctgaaatgccattagtgttgaggaatcctgttctgtgatctacaaaagargatattccttctagtttcagctcctaaattgtaaatgcttcttgatgggttagacaatgatgatttcatcagttcaggcaagcaattttttttttcccccctgtggtgactaaaccttcactgcaaagagcaagatagttgtaatttttttctcatagatacaaataattttctgttgcttcagcgatccaagcaatgccagattttatcgggcagttcatgtacttatgttttatgctcactagaaagattacaagtcttcatctttctctttccagggacagaagcagctgtgagtccaactgttggaattcaccttcaaactcaaacccctgacctatatcctgttcctgctccatgttttggccctttaggctccccacctccatatgaagaaattgtaaaaacaacctgattttagg

SEQ ID NO: 255194 - DNA, 565 bp, Homo sapiens
tcccttctaaatccaaacaaccattgatctttttattttctccacagctttgcatttttagaatgccctatagttggaatcatacagtatgtagccttttcaggttagcacgtaagtttcctctatgtcttttcatggcttgatagttcatttcttttcagggctaaataaaatccattgtctggtttaccagagtttatgtatgccttcacctgctgaaggatatcttggatgcttccaagttttggcaattacgcataaagctactgtcaatatccatatgcaagattttgtggagacataagtttgtaacttatgtttgttgggttgtatgtttagttttgcaacaaaaccactaaccyatctttcaaagtgtctgtaccattttggagttctagcagcaatgaacgagagttcccattgctccacatcctcaccagcatttggtgttgtcagtattctgaattttggccattctaataagtgtgctgtggtattccattgttgttttaatttgcaattccctaatgacatgtgatgtaaagaaacttttgatatgtggagt

SEQ ID NO: 255195 - DNA, 580 bp, Homo sapiens
atatatatgtagctttaatgttaaattagtagtaagtggaaaacaggggaagtgaaaaaaacaaggcatttattaaatccatgaaaaacaaaaattggattaactataaaatggttaagctatgaaaattaaaaataattagtactgttataaatggttaagctatgaataatgtaaataattaatacttaaattgattaaaatgtttaaattaatattttaaatatrtattatttatattaacaatataggcaaagggaaaaggtttgtgaaggaaggtggcaggatacagtaagaaacctaaatgctaatctcagattgtgaaaatttaattattattatttattaataatttattatttattaatttattaaataaataaagtattaataaattaaaaccaaatggtgccaaaacacatcattttagaattggataataaatatttgtaacaaaatacttaaagagttgaaaattgttgtctcaagaaattggactcggagataatgtgtggcttaggtatgacagaaaagtactgatttctatttcgattttatagtactacttgacttttaaaat

SEQ ID NO: 255196 - DNA, 649 bp, Homo sapiens
ttttcaacttgactcaatcctgtgaaactgaagtttcattactctcttttcttgaaatccttttctccattctagttcttcatatgcccgtttttctactgcttactggacatctctacttggatgcgcaataggcatgttaagacgactaygtccaggttgggtgcggtgactcatgcctgtaatcccagcactttgggagactgaggtggatgaattacctgaggtcaggagttcgagaccagcctggccaacatggtgaatcccagtctctgccaaaaatacaaaaattagccgggtgtggtggcttgtgcctgtagtcccagctactccagaggctgaggtgggagaatctcttgaacccgggaggtggaggttgcagtgagccaagatcgcacactgcattccagcctgggcgacagaatgagactctgtctcaaaaaaaaagaagaagaagaagaaggggaaggagaaattatcatcatgtccaaaatgaaatttctgactttttttcaaacctgctctctctcagtctttccacttttggtttatgtctgctccatcctatgaatttcttaggcaaaaagctttggaatcatttttgacaagtcttttgctttcatacctcacatctagtcaatcagcaaaa

SEQ ID NO: 255197 - DNA, 649 bp, Homo sapiens
ttttcaacttgactcaatcctgtgaaactgaagtttcattactctcttttcttgaaatccttttctccattctagttcttcatatgcccgtttttctactgcttactggacatctctacttggatgcgcaataggcatgttaagacgactatgtccaggttgggtgcggtgactcatgcctgtaatcccagcactttgggagactgaggtggatgaattacctgaggtcaggagttcgagaccagcctggccaacatggtgaatcccagtctctgccaaaaatacaaaaattagccgggtgtggtggcttrtgcctgtagtcccagctactccagaggctgaggtgggagaatctcttgaacccgggaggtggaggttgcagtgagccaagatcgcacactgcattccagcctgggcgacagaatgagactctgtctcaaaaaaaaagaagaagaagaagaaggggaaggagaaattatcatcatgtccaaaatgaaatttctgactttttttcaaacctgctctctctcagtctttccacttttggtttatgtctgctccatcctatgaatttcttaggcaaaaagctttggaatcatttttgacaagtcttttgctttcatacctcacatctagtcaatcagcaaaa

SEQ ID NO: 255198 - DNA, 649 bp, Homo sapiens
ttttcaacttgactcaatcctgtgaaactgaagtttcattactctcttttcttgaaatccttttctccattctagttcttcatatgcccgtttttctactgcttactggacatctctacttggatgcgcaataggcatgttaagacgactatgtccaggttgggtgcggtgactcatgcctgtaatcccagcactttgggagactgaggtggatgaattacctgaggtcaggagttcgagaccagcctggccaacatggtgaatcccagtctctgccaaaaatacaaaaattagccgggtgtggtggcttgtgcctgtagtcccagctactccagaggctgaggtgggagaatctcttgaacccgggaggtggaggttgcagtgagccaagatcgcacactgcaytccagcctgggcgacagaatgagactctgtctcaaaaaaaaagaagaagaagaagaaggggaaggagaaattatcatcatgtccaaaatgaaatttctgactttttttcaaacctgctctctctcagtctttccacttttggtttatgtctgctccatcctatgaatttcttaggcaaaaagctttggaatcatttttgacaagtcttttgctttcatacctcacatctagtcaatcagcaaaa

SEQ ID NO: 255199 - DNA, 591 bp, Homo sapiens
tatgaatttcttaggcaaaaagctttggaatcatttttgacaagtcttttgctttcatacctcacatctagtcaatcagcaaaagcagttgactctactttaaagtaaataatatccagattctaaccacttcctcctatgacagactgcaatcatcaagccgtctcttgcctggattattgtaataaccttctatatgaactcattgcttccctccttatctacttacggtctatttttcaacacaacaggaagaatactcttactacgtctcaatttagatctatgtttcctttgatcaagacttattatcttttgctttcattcaaagtaaaagaggaagtctttagaatggtctgtcatatcctatayattttaaatctctttccctttatgccttcattttaaaatactatcttcctagcttacttcattgcagctgcgttggcccctttgctcttttctgaacatgttgtacgtgattctaccttggggaacttgcatatgttatttccggaatactttcctaccaggtaccacttgatttgtttcatctcttttaaattatttcttaaacttcaccttctcatt

SEQ ID NO: 255200 - DNA, 558 bp, Homo sapiens
  misc_feature (1)...(558): n = A,T,C or G
tcagaccccagcttggtagtaaggatgaccccaaacctagtggtaagtagagtatttatagtttcttgaatgttctaacagtacaattgctaaagtgttggagatgccgtagcttttacagtgtctttggcatttgagagaagtaggggaaataataagattatggaacgtggaatttggtgttagttgttgtgtgccttttggttactcaggagaaaaaaaaatgactaatcattaatttaaaactaagtgcaaaagtcagaggttatttctggaagtctttaaagagacttttctcacttgcagcttgggagcatgttgagccggtgaaccataggccttagttgtgacaagagcaaaacttcagaaaagcctaaattcatgcctaggtaagactckggatgccataataaggcagatgtgcttcagagagtgggagttaagccatgcagattcagtggcttgccacatatacgatgcttttagggatccagtgggtctggtgcatactcgaacatccctttcaaggtaaagggcaaagntatggcatcttttgta

SEQ ID NO: 255201 - DNA, 588 bp, Homo sapiens
ataaactgttcttaattttcatataagtattatagagtagtgaataatgtatattatatataattcataattatacatagtacatactgtattacatactatgtatkctgtaaatgcatttgtataaatgtgaaaatatattaaatgttaaaattatatatgtatgtatacttttagtcgacacttttattttggcaaaacattaagaattaaatcactaaattttccttgtcttccataaaaaagtagcataaggaaagctgtggaaataaaaaaaaaaactaaggattccagataatcatgtgattaggttatagaataaaggaggataaatgtctggagaaagagttgcaaaaattaggccaagctgtaaaagggggtcttcttgctcatgctaggaatttggttgggatttagggacacattgaatattggcagagaagggtcaggtagctgtattttcacacagatcgattcagaggaaataattctatttacccagaagtgtaaataaatgaataagatcagacttttacttagaagagtatggggaaaatagacaaaattcagagacagaggaagagttaa

SEQ ID NO: 255202 - DNA, 588 bp, Homo sapiens
ataaactgttcttaattttcatataagtattatagagtagtgaataatgtatattatatataattcataattatacatagtacatactgtattacatactatgtattctgtaaatgcatttgtataaatgtgaaaatatattaaatgttaaaattatatatgtatgtatacttttagycgacacttttattttggcaaaacattaagaattaaatcactaaattttccttgtcttccataaaaaagtagcataaggaaagctgtggaaataaaaaaaaaaactaaggattccagataatcatgtgattaggttatagaataaaggaggataaatgtctggagaaagagttgcaaaaattaggccaagctgtaaaagggggtcttcttgctcatgctaggaatttggttgggatttagggacacattgaatattggcagagaagggtcaggtagctgtattttcacacagatcgattcagaggaaataattctatttacccagaagtgtaaataaatgaataagatcagacttttacttagaagagtatggggaaaatagacaaaattcagagacagaggaagagttaa

SEQ ID NO: 255203 - DNA, 588 bp, Homo sapiens
ataaactgttcttaattttcatataagtattatagagtagtgaataatgtatattatatataattcataattatacatagtacatactgtattacatactatgtattctgtaaatgcatttgtataaatgtgaaaatatattaaatgttaaaattatatatgtatgtatacttttagtcgacacttttattttggcaaaacattaagaattaaatcactaaattttccttgtcttccataaaaaagtagcataaggaaagctgtggaaataaaaaaaaaaactaaggattccagataatcatgtgattaggttatagaataaaggaggataaatgtctggagaaagagttgcaaamattaggccaagctgtaaaagggggtcttcttgctcatgctaggaatttggttgggatttagggacacattgaatattggcagagaagggtcaggtagctgtattttcacacagatcgattcagaggaaataattctatttacccagaagtgtaaataaatgaataagatcagacttttacttagaagagtatggggaaaatagacaaaattcagagacagaggaagagttaa

SEQ ID NO: 255204 - DNA, 517 bp, Homo sapiens
aacattcagaagtgtgatggaagtagccaaggatagaactgaagcgtcctatggcacgtaagacagagggatcttccttaaccaggaaggaactcccttaaagaaggaatttacaccgagaccgaaggaaagaaacagaaaagaaagtgttttagcagagggaaccacatgttagaatgcctggaggtgagagagaataaaaattcaaaagaagttctgtttgcttagggaaggaaaaaaaaactgaaggaaaaagaagtaccatgtagagatgtgggtgtgtgaccagattttgctacagggaattttgaactgttttaaagttttggtctctattctatgaacaataaaaatcctccggcaattttaagcaggatagtgacccagtcatrtttgcgttttaacagttttgatctagattcataatgatgctgaaattaaaataataactaaattttattttatgcttactatagccaaaactgtacattctttatgtaagttgtcctagtattct

SEQ ID NO: 255205 - DNA, 604 bp, Homo sapiens
attaacattccaggtcatttcyagctttaggaatatttatgacactattttgaaatgtttattctaacagtaaattccactttctgtagcaaagtgctatttgaattttgtatctcaggcagagctaatcaggttagctactaatcatgtaattagaaatcaaagtagctatggttgcgaaaagtcgcacagaaaactgctgtatttgaatgtgacaattttctttttctccgtgtctcattagtataagcaaaagctactattctagaacatcaaaaggtccttgaaacattgcagttgctttcagaatagtttggggcctccaaagagaatctcgtagaatttatcggggctctgttgttttctcagaaaaaaaaaaaggataaaaaaaacctcttttcttacatcaactgtataagcagtgagtagatcactggttttaaacaattaggatagtgctaaattatttcatatttccctttcctcatttttccacccttcagaaataggtgtcaaacagacttgaatgttatcccagctcagtatctagaagctttatggcccttaagtacaatttaatttcctcctcagctcttaataaaat

SEQ ID NO: 255206 - DNA, 520 bp, Homo sapiens
aaataaatattccatgctataaaagaaagaattattattacaactatggataagttatataattttgaaacataatgattgcagatatcataatatttaggttgaaaatattttattattcrattattaaaagttatgtaatattgccttcaaattgcaaaattatcccatgtgaactaatatacaaagattctaatggagttggcatataattcgctatgtagattatacacagccttgcattttacattctcaaaagatgaaaatcagtgttcactgttaaaaatcctgtggattattacctgatatattcaaagtatatgtcattatatccactttaaagctttaaaggtactcaaattaatcacagtccttatttttggaactcaaaaagaagtcgttttcatttttacagggaatgttcctacaggattaacatcctcctatgagtatgtcctaatgcagaattttggcagagttctgtagatgagcttctaaaatagaaaactttctaaaactt

SEQ ID NO: 255207 - DNA, 520 bp, Homo sapiens
aaataaatattccatgctataaaagaaagaattattattacaactatggataagttatataattttgaaacataatgattgcagatatcataatatttaggttgaaaatattttattattcaattattaraagttatgtaatattgccttcaaattgcaaaattatcccatgtgaactaatatacaaagattctaatggagttggcatataattcgctatgtagattatacacagccttgcattttacattctcaaaagatgaaaatcagtgttcactgttaaaaatcctgtggattattacctgatatattcaaagtatatgtcattatatccactttaaagctttaaaggtactcaaattaatcacagtccttatttttggaactcaaaaagaagtcgttttcatttttacagggaatgttcctacaggattaacatcctcctatgagtatgtcctaatgcagaattttggcagagttctgtagatgagcttctaaaatagaaaactttctaaaactt

SEQ ID NO: 255208 - DNA, 599 bp, Homo sapiens
aaattgctcctggagataacattgatacaagaggtagatagaaattatttaggcagaaagtgagggcaaaagagtccttggcagagcttcccttctaacaaaaagcagcccaagaaatcattttttttttctaacaaagagcagcctgaaaaattgagctgcaaacatagataaacaagctggaaccttgcacaggggaattccagcagctgtgccaacagaaaagggctagctgggggccagacatgttcaactgggggctccatctttcctttttttgttaccacttgtactgtaataaagaaatgggcaatatggcacagctcagagaatccacctgcgtaataaaagataagggtgggggctaccagggattagtgccctatacaaayggcacacctggtctaaccagtctaacctggtctaacctggtctaacctggtctaacctgtgtaaatcagacagcacctcctcaccagctcatctataaaaccccttgcatttgaagacccatttttctgggactcctctttttcacctattaaacctctgctctcaacctcactctttgtgtgtccatgtccttgttctccatggct

SEQ ID NO: 255209 - DNA, 547 bp, Homo sapiens
agtgaggccatttcagcatcactattgtaaaacctaagatcagtgcttgagatattttgcagaccctcattccatcgaacagctgacaccacccaagccagtaatctgactcaatcagttctgcgatcccacccaggaacagaagacagcaagaaaacctcacttcgaccccctctgtgattccaccttcaacctgaccagtcagcactccccacttcctgagcccctacctgccaaattatctttaaaaactccgatcctcaaatgctcagggagactgatttgagtaayaataaaactccagtatcccgcagagctggctctgtttgaattactctttctccattgcaattcccgtgtcttgataaattggctctgtctaggcagccggcaacgtgaaccagttgggcagttacattagttcgccttcattttttgaagaatattttcagtaaataaaaaattgcaagttgactttttgttttaattagctttatttcaaaatgaatctattttcagaccacagttgacagcagataactgaaac

SEQ ID NO: 255210 - DNA, 562 bp, Homo sapiens
gacatttgtttttaccctaaatagctgacattcttttatatgataggtatgacaacgtagtagaaaggcaagagcactaaatgggccattaggaaacctgggctctgaaactggaattgtcactagcatttctggaacgtygaaagggtctctttccttttaagaaatatcttagaagcattctagctctgctattttaagtctctaagattggattgaaagatgtggtgaatcattaggtgtaggttttgcttcttcagctatttccatataatcctgaaagttatgccattctctaaaagaaagacagtaaagtaaatatttcctcaatttatgttgtatctttagctacctactttatgagcatactcattaacttaaacttagtattttccaaacaaattttagtgaatgatttgagtgtcatacatcttggttatcatcactaccaagttagtatcactcattacggcttggttgtaaaaatttagagtttctaaatgtggccatgcttgttgtgcataacttacctgcaggggtgtaattcacatggctatgatct

SEQ ID NO: 255211 - DNA, 617 bp, Homo sapiens
ctcctgtgctagatgattcctgccctcaaacatcggactccaagttcttgagttttgggactcagactggctttcttgctcctcagcttgcagatgaactactgtgggatcttgtgatcatgtgagttaatacctttatatatatatatatatatatataaaatatatatgcatatataaatttatataaacaaatataaatgtataaatatatagggtataatatatatatatttatcctattagttctgtmcctctatggactatcctattagttctgttccttgcagatggcctattgttggatcttgtaatcatgtgagttaatacatatatatagtataatatatacatatttaatctattagttctgtccctttagagaaacctgactaatacaacagttaaacatctcatataggcaagtagatagatatacatgagtcatacatatgtgagggttatgcttgctcatgataatttctttttagtttctctgactttcctgctgtctcacgcttccaaaccctacacttcgtaggttcactgccatgccaggatataggaacaagtgcatctctattaagaaggaacttaataagtcatagaccaatagt

SEQ ID NO: 255212 - DNA, 617 bp, Homo sapiens
ctcctgtgctagatgattcctgccctcaaacatcggactccaagttcttgagttttgggactcagactggctttcttgctcctcagcttgcagatgaactactgtgggatcttgtgatcatgtgagttaatacctttatatatatatatatatatatataaaatatatatgcatatataaatttatataaacaaatataaatgtataaatatatagggtataatatatatatatttatcctattagttctgtacctctatggactatcctattagttctgttccttgcagatggcctattgttggatcttgtaatcatgtgagttaatacatatatatagtataatatatacatatttaatctattagttctgtccctttagagaaacctgactaatacaacagttaaacatctcatataggcaagtagatagatatacatgagtcatacatatgtgagggttatgcttgctcatgataatttmtttttagtttctctgactttcctgctgtctcacgcttccaaaccctacacttcgtaggttcactgccatgccaggatataggaacaagtgcatctctattaagaaggaacttaataagtcatagaccaatagt

SEQ ID NO: 255213 - DNA, 617 bp, Homo sapiens
ctcctgtgctagatgattcctgccctcaaacatcggactccaagttcttgagttttgggactcagactggctttcttgctcctcagcttgcagatgaactactgtgggatcttgtgatcatgtgagttaatacctttatatatatatatatatatatataaaatatatatgcatatataaatttatataaacaaatataaatgtataaatatatagggtataatatatatatatttatcctattagttctgtacctctatggactatcctattagttctgttccttgcagatggcctattgttggatcttgtaatcatgtgagttaatacatatatatagtataatatatacatatttaatctattagttctgtccctttagagaaacctgactaatacaacagttaaacatctcatataggcaagtagatagatatacatgagtcatacatatgtgagggttatgcttgctcatgataatttctttttagtttctctgactttcctgctgtctcacgcttccaaaccctacacttcrtaggttcactgccatgccaggatataggaacaagtgcatctctattaagaaggaacttaataagtcatagaccaatagt

SEQ ID NO: 255214 - DNA, 579 bp, Homo sapiens
tagtataagaattttaacagctgagaagtcccttccctttctccttatactttgaaaatgaggctcaaggcagtgatatgatttttctaacataataaatatctgtttcagcaggggttgcagggtttctagagccttagtccattgactcacccaatctgctccttgtccctcattcatcctcagggagtcactgggcctattagccagcaaattcttactttacacctacgaccacagcagcattttatgaacagtttcattaatcatacaagctaagaacatataattttatgagtaactcatttagaacaaatacatttgttctctgattctcaatcttcttgaaaagctgcaaagaaattttgacttaatgcttttttaacataaaggctgtragaaagactattctttactaaacttgttaagtatagtttgagtggttaggcctcaaatatagttataatgcattgcatttaactaatttatattgccttaaataatgctgttgtgcattatttaagataagattatttaatctatcaagacaggttgtgagctcttagagaacaggtgtca

SEQ ID NO: 255215 - DNA, 683 bp, Homo sapiens
tttctctgcccataaagaattcccatcctggtaaggagaagagacacagagaattacagtttgataagtgatgtaacaggaagaggtagactcagagaagctatctcaggcagttctttctcagaatctcctggtaattcaattttaagaaatggcaatgcctgtaaatcactatttatctgggcatctgatgtttaatagcaattcccaggtgactctggtgatcaaacaggctttagaatcaactaactatcggatgatgaaacctgagtctagacagaggcagagaagctagttaagtgctgaaggagtgaggaaaggagaaggacagaaatcttccaggcaacgggaagagccttttytggatgccagagaaaatgttactgggttcaaaggaactgtatgcatttcagaaccgcaagaaaacagggtacatattagggatgcataagaagtgaatctagagaggaaaagaagaaccagcttgggaaagatctgcatattgtgctgcatactttgcagttttttctgctattgatgagaatctttaaaaagataggaatgtggtaaaggaagcaccaagcaaatgctgctgctaatgcatttgatatccaaataactttttttttcacttctgtttaagttcttgggttgaaacattttactaaaaatggaggtcacat

SEQ ID NO: 255216 - DNA, 683 bp, Homo sapiens
tttctctgcccataaagaattcccatcctggtaaggagaagagacacagagaattacagtttgataagtgatgtaacaggaagaggtagactcagagaagctatctcaggcagttctttctcagaatctcctggtaattcaattttaagaaatggcaatgcctgtaaatcactatttatctgggcatctgatgtttaatagcaattcccaggtgactctggtgatcaaacaggctttagaatcaactaactatcggatgatgaaacctgagtctagacagaggcagagaagctagttaagtgctgaaggagtgaggaaaggagaaggacagaaatcttccaggcaacgggaagagccttttttggatgccagagaaaatgttactgggttcaaaggaactgtatgcatttcagaacmgcaagaaaacagggtacatattagggatgcataagaagtgaatctagagaggaaaagaagaaccagcttgggaaagatctgcatattgtgctgcatactttgcagttttttctgctattgatgagaatctttaaaaagataggaatgtggtaaaggaagcaccaagcaaatgctgctgctaatgcatttgatatccaaataactttttttttcacttctgtttaagttcttgggttgaaacattttactaaaaatggaggtcacat

SEQ ID NO: 255217 - DNA, 683 bp, Homo sapiens
tttctctgcccataaagaattcccatcctggtaaggagaagagacacagagaattacagtttgataagtgatgtaacaggaagaggtagactcagagaagctatctcaggcagttctttctcagaatctcctggtaattcaattttaagaaatggcaatgcctgtaaatcactatttatctgggcatctgatgtttaatagcaattcccaggtgactctggtgatcaaacaggctttagaatcaactaactatcggatgatgaaacctgagtctagacagaggcagagaagctagttaagtgctgaaggagtgaggaaaggagaaggacagaaatcttccaggcaacgggaagagccttttttggatgccagagaaaatgttactgggttcaaaggaactgtatgcatttcagaaccgcaagaaaacagggtacatattagggatgcataagaagtgaatctagagaggaaaagaagaaccagcttgggaaagatctgcatattgtgctgcatactttgcagttttttctgctattgatgagaatctttaaaaagataggaatgtggtaaaggaagcaccaagcaaatgctgctgctaatgcatttgatatccaaataactttttttttcacttctgtttaagttmttgggttgaaacattttactaaaaatggaggtcacat

SEQ ID NO: 255218 - DNA, 567 bp, Homo sapiens
gaatttaataaagctagtcacacaatctttattctcattgggcttcaacaaacaaacaaacaaacaacatcatcatgtggtcatctacaatgatacattcactgtacttggtattgctgtgcatgtacaagmacaggcaaaagaaagcatccctgctcctaagttgtttataagatgcttctcacgaacacatttcttaatacagtgatgcacattcacaagtctttgtctttgttcaagatgtttccctttaggaacactcccttcttttctaagaaattcttattatttaagaactacatcaaccattatcttttccatgaagctttttgtaatgagtttccagaggcattaatcatttcctcatttatggtcctataacattttgtggaaacatgtatttcaacattgtagacctagattgatctatctatgtctatcaactctgtctatctatctatctatctatctatctatctatctatctaaacttctatttgcctgcaagcttcttgagtggcattctattaatctatagttactaagtggctgacctaagcctgacat

SEQ ID NO: 255219 - DNA, 558 bp, Homo sapiens
tttttactgaatccactagmcaataaagaccaagttccaaaatgaaacaagagacctatgccggagttgcaaaaatggtgtctgagaaccagttttgcagcccctagtggaccagctatctctctccctttcaaaacaaacaaacaaacaaataaacttaaccccaagaaaggagttagagtttaggagataatttttggagggagctattgatatgtactgagtaccacttttatgtcaccacggagggggcagacactgggagttcttgaatctcactttaagcctaaagaacaaggcttcagttcatctgctctgaacacttggtgtttgctccctggatctagagaaacacggtaaacctgtgcacttctccagctaagaaatctaaggaacaaaagttctagcagacacattgcctacatgatggaagatgactgcatgatggaggagtggctataaagagatttggcctatgtacaggggtacagatactcatatcactggaaggaagcggtatctttgtgctttgaaatgactaaaatacattatattacc

SEQ ID NO: 255220 - DNA, 609 bp, Homo sapiens
atggcttgagatttcatcacgctattcagaacagtgttcaatttaccactgatgaattgtttatctatgaaatttcccatgtaatttttgcagaccatgattaaccactggtaactgaagcctcaaaagggaaattctggatagcaggggtggtactgtagaccctatgtatagaaataattaagcttatattccacctatggttttccatgcagcttttacatttaaatttacgttttatatacttgaataaaatgaattaaaattagaaaaaacaaagtttagccacaaaaagtttattattgtaatatattttgaaaaatggtttatcaatactgattttagccttytatactgtatattatgatcaaataattttcaaatggaaaaaagtaatccttttataagctgttggtaaaataagaatcttagtagctgattcatgccagagtaattacctctttctggccttttctctgctcctttctttctctccctcccaatttctttctctcactctgtctcccctttgacattctctcctacattaagaatcaccactttgtttttactgttctcattcaaaatttttattttagtatatagaag

SEQ ID NO: 255221 - DNA, 609 bp, Homo sapiens
atggcttgagatttcatcacgctattcagaacagtgttcaatttaccactgatgaattgtttatctatgaaatttcccatgtaatttttgcagaccatgattaaccactggtaactgaagcctcaaaagggaaattctggatagcaggggtggtactgtagaccctatgtatagaaataattaagcttatattccacctatggttttccatgcagcttttacatttaaatttacgttttatatacttgaataaaatgaattaaaattagaaaaaacaaagtttagccacaaaaagtttattattgtaatatattttgaaaaatggtttatcaatactgattttagccttttatactgtatattatgatcaaataattttcaaatggaaaaaagtaatccttttataagctgttggtaaaataagaatcttagtagctgattcatgccagagtaattacctctttctggccttttctctgctcctttctttctctccctyccaatttctttctctcactctgtctcccctttgacattctctcctacattaagaatcaccactttgtttttactgttctcattcaaaatttttattttagtatatagaag

SEQ ID NO: 255222 - DNA, 637 bp, Homo sapiens
cccttttcttaactctctctctttccctcctatatccttctttttctttctttctctttcttcttcatctctttaccccttcatttctctctcttttctttctaccttttgtcatttcacaaataatctctgacaacttctgtatacttggcaccatggtgggtacatggttatgaagtaggatgagacctggagcctccctaggctactgccagtgtagtgagtgggacaaataggtgaaccgacagttatagcaccatgtagcacacactatgataatgaaaaccctaagcgagtggctcacttggtcttggataaccagtgaaagctacccmaaagaagagatatctaaactaggacttgaagaacaggtgagtgaagcaggagaagtagagagtattccaagctcaggaaatggcaggaactgaggtcaaggtacaagagcgttgtatgtttgcggtattttgtatatttcatcatagtaagaatttccagtttagagaaaagaatacaggggttgggtcattaagagttttgcataacatgtaaaatatagatcttataccataggcaagggtttgtcgctgtaagcaatatgtacatgtattttagaaagattaatcattctggctatctg

SEQ ID NO: 255223 - DNA, 579 bp, Homo sapiens
ggggttgggtcattaagagttttgcataacatgtaaaatatagatcttataccataggcaagggtttgtcgctgtaagcaatatgtacatgtattttagaaagattaatcattctggctatctgtggggagagattggaagggtaaaatgaggtatggggagaacaactaggagacttttgttatagaccagaagggaracaatagtggtctgtacttcagtgacagcaagcatgaagaaatatgaaataagggaggctctaaaaatgtcaaattgatgagagttataattgactgcatgtggggaagtaggtgatgaagagacacagtcaaagatgaaatctgcctttctgatctggggcaattggaggggtggtgatgttactcaccaagagtttaaatgaatgaaaattagtatctatacagaaaccttcatggagcaatgtccctgaaccatcctactatttttttctgcttagcttattatacaatacttagaggtaggaacacaattctttacaatggagatgtttatagatttaactttatatcagagggacctgaggttaaatcccacctt

SEQ ID NO: 255224 - DNA, 616 bp, Homo sapiens
tcagaaaccataaaaacaaaaaaacacttttggacctccaaattctataggcaggaagcaggtagagaagactactcaccacccagctaaggcactcccagtttattgacgcayataattgtgtgagataataacttttttattgttttaaacctttacttcttgggtaatttgttacatcacaacagataattcatattcttgtactgtgacatctgatatattccagacttgcaggaaactaacagtaaaaaggatccccaaatttaggaaaacactgtttttacagtagccttgataacaagtagccaccagaactagttttaaacatgttcaatcaacaactgcctaagtgaatacatttttgaaagccatcatcagagtgccagaccctgattggccaaaagtcaactcacactagtgtgaaagtcagccaaacagggacagagccactcacctgattgactttcagaaacaaaggactgactggatgggttaatttccaaaaacatgtttgctgagtgttatggtatggtttgttttccccccaaatccatatgttgaaatttcagcccccaaagtgatggcattaggtgaggctttatgtcatgacggt

SEQ ID NO: 255225 - DNA, 631 bp, Homo sapiens
attttagaaacattgaaatgagaaaaaaaaatatgtattctggcattttaagagatatgctatacagtacttcctgtcacatggtaattaccaaagatatataaatttgcttcaaaatgaatggagcctagtggaattctagagcctagtggaatttttgcttctttcttctctccactgccccactcccatccactgggccagaacactagacattgggaacatttgaatacacatgagagaagaagctttattattggaaataaagggatggcaaatggtgtacatgtggcagtaaaataaggctcagagagcactgaaatacagtgagggatttgggagttgggaacaaaagtaacagccagtaacctggagttgctgaagagtgtacagcctsgaggagtgtggggcggcagggttgtgagtagaagcttgcgattctgaataatatgcacagttatttgaaaagtggggaattttttggtaaatcgcttggaaactttttatatccatagcgggtaccactatagttcataagttatttttcacagtataaatgccaataatattgcataacagcaggaccatttgcctctttcactaggattaaaactgggtatgttaaaagtgc

SEQ ID NO: 255226 - DNA, 538 bp, Homo sapiens
ggaggaaatgcaaaccacttagctttgtttttaggagacttcatcatctgatctttgttaatctctgtaatctaatttttcacctttcctctcacacagtggcactgtactactccaagagcagttctccaaatgtaccatgcttttacagcactccagacttctaytgatactgttttctctgcctggaacgcttgtgcccagacttttctcttagttcctatttgtccttttaagtctcgacttaggtgtcaccgtttgcagaaaccttccctgatccctcatgaccaggcttggtgccctccttatgtgctcttaaagcaccatgtaaccctggaccataatactacactgcagttaatttcatatttatctattgaagctcctcaagggcaagattatgttttgttcactgttgtgtttacagtgctcagataatcttgaacgcatgctgggtgctcagatatttgttgtgttgtattgaattaaacttcaggtaataaggtgtttttagtatctgaatgtttttcagtaagag

SEQ ID NO: 255227 - DNA, 468 bp, Homo sapiens
ggctgggggagactaaaccttgtcatcaagatagaatctccttaagggacagtgcaaagtcacagaacaaaggctcagagaagaaggtattctcaggcaagagcagagtcctatggatgtggaagtcaggaactcagggttcctataagagacctacaagagtgttcatgtcatggactcaggggaaattcacactaaaggcgaagttttcaattctttccctcatatgttgcarttccctttaattcctctgaccctttaaccaactttgtgtcaggtcaccacctccaattcccaacatgacccatcagtctgccatcagggacctgtgaagtgagggtcacaacaccagtgcattccaggccagaatgggaatgcaatgaaaggtcacccactgtggtacggaatagatgccacagaggagcagggctcaagtggaggactcaggggtgcatggaagacaatctc

SEQ ID NO: 255228 - DNA, 585 bp, Homo sapiens
tttaccctaaacaaaatacttattccagcaataattaataattttaagtatgttattaaatatatttttgctaagtgcttaagatttaatgataccttgtggaaatcagagctcattcacatctcctggaaatgttggacaaaaaagtctgattgccaaatctccctagagtcatggaaacattcaaagcatttttgttttcaaaagaacctgcaattacccctctttccgctaggtggtatactcaaggccaagaaagctaycaaagggataaatatgttctttttcaacaaggtcaaaaaaaaaaaggataatttttttaatgtaatttttttaaatttctttttcatttcaataggtgttaggggaacaggtggtgttcggttacataagttccttagtggtgatttctgagattttggttcacccatcacctaagcagtcttcactggacctaatgtgtagtcttttttccctcacccctcacctcctctcccaccctttccccgagcccccaaagtccattgtatcattcttatgcctttgtgtcctcgtaacttagctcccactcataagtgagaatat

SEQ ID NO: 255229 - DNA, 595 bp, Homo sapiens
ctggggaaaactacatttttaaccaacttgccagggattctgatgatgacgttctagagggctacaagaaatacttagctatctccttttaacaaaatactgttggtttaaccccctgcaggagatgctatttccaaatgttgaaccagatgcagttctgtcggctattgacttaacttttcmaaatgctactattggccgggcgcggtggctcacgcctctaatcccagcactttgggagtccgaggcgggtggattgcgaggtcaggagatccagaccatcctggctaaggcggtgaaaccccgtctctattgaaaatacaaaaaaaattagccgggcgtggtagtgggtgcctgtagtcccagctgctctggaggctgaggtaggagaattgagtgaacccgggaggcagagcttacagtgagctgagattgcgccactgcactccagcctgggcgacagagcaagactccatctcaaaaaaaaaatgccactatttgtagaaccttgccagtgcgctaggccctcatgctgccatcttggaggaactagaaactcaagtgacatgcttttcactttagtgatgcagaaagg

SEQ ID NO: 255230 - DNA, 545 bp, Homo sapiens
aatgaaatacagatctacagtaactcactggagagttatgttcttaccaaaatatctagcagcttaaaagtgatttcaaacatgtacccattttacagatgagggaattcaggtgtcagggaagctggctgcccaacttcacatagactcaaaaccataccctcttttctgcagcataccatatggtacatacccctgctgccaagttttcatcacttttgcctcagttgaacctgctacactggatcattgtgttgagttgagctacttggtgaaggatggcgaatgatttgctgcctcaggagtgtgtaaaagagcaccrtcggggcagcaaaccattaccccagctgtggctgaggatggtagaaagaagagcgtgtaatagagattcctttaaatacccagtgagacatccttccagtcataagcgttgtcatataattattgtcaactggtttagggccatgttgaatcttttcaaatgtgttgctaaccattctagcatgtgcaagtgtgtaatgaaacagtctgagactcggcgtctg

SEQ ID NO: 255231 - DNA, 588 bp, Homo sapiens
cattaattctcttcctcctctatcctgatgccttctgcactgaccccaggatccacagagggagggtgacaaaaagtgtcacagcatatagctcatgaattgcatccttttctttagttagctaaaaactctttccactcatgtcttcttccctttgcagtttttttctccaacaggaaacccactgttttttgtttctctaccaaaatgtgtcaggttgccttcctttaggggtaggccagcaggctctatgatgggccctagtttttctcattgtattagttttcccttgtttgaatggagaaagtgattagaaatctggattactgttcatttcattttcatccatgtatgtcatttattcattcatttgttcattataacatttgtagaagacccactgtgtagggctgtgtgtgtgttaaggggtgggaggggctagagcagaaggttactggaactgaggcatctggccctctgtccctgctttttagtggctcacagtatggggttgtggggagggttggagagaaagacaygaagacaagtagatacatttcaaataagcatttactgaacccttgctgt

SEQ ID NO: 255232 - DNA, 554 bp, Homo sapiens
tgaaaaacttgctagacctgacctggcctgaattttgaaattcagtggcctgtccagttagaaagtcttctgcttctattgttggccatagctgcccacctactaagcttcatttaaaacgtgtagtccatagttttcagctgtccacagccaggggagactgtgggacaatggctggacaatgtggagtgtggggctcctgtggagtcaggggcttcagtagcaaggaacaggcgctccctggacaactcagtcctgtttcatcgttgttcacaaataaattccctttgcacccccaacacatacacacacacacacacacacacacasagagagagagagagagagagagattgagacttcacactaagatgtgtatccttggttagaaacattagaaaacaagtgacaaagcaaagtgctggagtccatctagaaaaccttaaagccagaaaaggaactgagtgagtaaaaggaagaaatggccttttggcaaatgcacatggtgaaggcagaccttacacttgggaaaggctgactggacccaaggttcg

SEQ ID NO: 255233 - DNA, 535 bp, Homo sapiens
gcttacctcacttagcatcatgtcctcaaagtttatctgagttgtagcacrtgacaagatctccttctgctttaggctgaataatattccattgcatgtatattcctaccgtttctttatcccttcatctattaatgaatatttagactgcttctccctcctggctattgtgactaacgctgcagtgtacacagtagtgccaatgttgctctgcggttattttttccacttcctaccaacagcagaatctcgttgaaatgcattggaaagacagagcgtaggggcttatctgagttctttgtcatcttttttccaatgtgtcttagacagtgatgcacaatcaggtagccagactgcccagattcttcctgggggtttcaacttcattatgtatatctattgtgtaaccggttgtgattagaattaaacctctgccaggctttctattgctttcagagcagtttcacaagcattattttattgaacccttgctgcatgatagctatttctttagtatggggaacacaaggttaca

SEQ ID NO: 255234 - DNA, 452 bp, Homo sapiens
caccaactgcagatttttcacttgtaccatctttattttcactaacaagaagcttctgtttcccaaactaattatacacagggcctgaaccagcgtgagtactcaagcattcccatgaatgatggaatgaaccctaagatgcaaggagtgggagatgaggtctgcttaacrgcttgaaaatacccctagatcccagtggtatctcagctctgcagcttgagcttgacttctgattctgcctgtagctgcggtggactgggaattactgataagggaagcaagtgttgacattttccatattaggatgggttctccagtgaattctgacccatgctctcgtggtcagctctcttgaggccaactttccagaggctagctgttgggaccagcggagttgacctctggggcgggacagcatatgcactgtcctctgaggctagcaagttcaagac

SEQ ID NO: 255235 - DNA, 571 bp, Homo sapiens
atcgaccaagtgctgagctgggcatctgggttggtgctaggcaaagacggctgcaggagcctggggagatgggacagctgacacagacaaggcctcccagttgggcataccattcactgtgcttagagtgaagattctgatagaagtagtggggaagagaagaagaagaaacaaaaagagaggatgaaggaaaaaaaaagaaagagaaggaggaggggaggaaggaagcaagcagcacaaggttgtttttgaatgtgcagaattctctttsgatgtgcagagctccagaattgaaatcaagtgtcaaagccctgcattttctactaaagtgtaagcatacaacaaaatccccgtttctaaaaagtcagcccactgtatgaactcagtccatgctgaattcagaaagcagaggaagcttgaatggttcccatgacacagtgaaaacacccaaactgtcagaagggcttcacaagccttccaccaaacagctccaggctactggtctaaccttatgttccacttccagcagcagctctatagtctgcagcatttcacgctgtatgctgtctcc

SEQ ID NO: 255236 - DNA, 588 bp, Homo sapiens
gaagttaattatcttttctcacacttaygggttatttgcactgtttttctttttcttttaaaagtttgttgaaactttttatttctatttctagaagctctttatatatgaagtgatataactggcagtattttttcccattggtcatttgtctttttagtttacctgccatgtaaaagtcgcttttggattttgagtaataagtaggaaattattccacgttcctggtgtatagagaaattcattcacattttcttctactatttatataactttatttttccaatttaaactactaattcatttggaacttaatgctagtacacagtaggcagagagatcaattttttttctctttccaaatagctatttagttatcctaacaccatttttttagaagtccatctcccacaaagattaaaaaataaagtatttgctaaaaaaaaaagtaagaaaaaataacagaataataaaatttcagtaatactaaaaatatatatatatatttttttttgagatgggagtctcacttccttgcccagactggagtacagtggtgcggtctcagctcactgcaacctccacctg

SEQ ID NO: 255237 - DNA, 566 bp, Homo sapiens
taaattgcaaaaattgggacatggatcttaagataaaagtggtgtcatggtggatctttgagagttgaaaataacctttcatcaatctgagagctacatctaaaaaatagtgcacatagaattatagatgagctaaatttttctaggtgtatatgtcttcagaggggtcaagctggtggatgaactcagttgtgctgactccttgaggtgtatggtgacccaggacgggcggttggaaaatgtggctgtgattcttggagaggtaatgaataagggaaaagctggaagagcaaaatggctcacagtgcctgatgattgtgccacatgcctggaagaagaggtaacagtgtttcaaaaaaattctgagtggtctctggagggtgcaaatgagtgagtgttccrcagactgaaaaaagacattttttaaaaaaacaagtttaaggtggcataatttacatacaatacaatgcaccttttgaaaaattaaactttttttgagataatcgtatattcacatgcagttgtaagaaataaaacagaaagattctatgtaccatttactcaat

SEQ ID NO: 255238 - DNA, 526 bp, Homo sapiens
taatagcctcacagcaataagagaggctattatatccataaaacaagagcagctgatgtcttaggtcaggttgtccaggacacatactctgagactgaggcttgcatactggagggtgacttaggagtacccttgagatccacacttgagaaaaactgaggtaagcaggactgagcagaggaagaagttgagatgcaatgtagtcacaacagaggacccagccaacttcatggggagctctggagctgtattcgggcatcagccatcagttgtgtgattggatgatgcagcaccttggtcctgagccaggggatgagggggtgtgcccacagcgcccattagaggtaattataaaaaactgccaatgagaaaattaagaaatttaaattatgatcattaaaaatttgaaaaccacttaactacrtaaatagaaagaatagacaaggctaaagactgacttaacgaattggaagatagagccagaggattgtcccagagggcactactaagactcataggaatagaa

SEQ ID NO: 255239 - DNA, 542 bp, Homo sapiens
tgcgtttattgccagtttcccccgacttgtacatgtgctctctgggggcagggcctttgccttttgtgtttacttccttgtctccagctcaaaagcactcaataaatactgagcagtgacaggcagatggcacagtgctgaacccacacccctcctcaggacagctcaggtctagcctgtgtacagcggcaccaagcacattcctcaagggctgctgctgaccttgatgatgttgtggttattttatctcttctctcattctctatcytccttaatctattttctgctgttagagcctttgggaatctgctaacccttcccttgcatcacctctcattcctgtccttgcagtgtacaaagcccactttgttgctcatcctcacaccacactattcttccacccaatgttcattatcagcttgatgttttttcttatttcaattttagcagaatgcatgttgttccagtggggctcttttcaaactgatgtcttgctcttcttagtgcctcaaactagatcctgtttagacatcttataacag

SEQ ID NO: 255240 - DNA, 499 bp, Homo sapiens
tgatgcaaatcttcccctggctcatctttcaggcactttctccacagtgtttggcagagaggcttcaagggaatgaagcaccatggaatccccatgagaagccttctctactgtcatcagagcagcataggtaattttggaagtgaaggggtaggaatggaaggtgatagccaggtgaagcattttctctctatcttcmtgatttcttacactcttcattattctctcagaacactgtcacctactatgatggttaattttattgtgtcaacttgactggatcaaggggtcaacttgaaaggaccattggggtgaccagatgtttggctaaatgtgatttctgggtgtatctgtgagtgtgtttctggctgagattagcatttgaattgctggactaagtaaagcagatggcacatgtggtgggcatcatccaatctgttgagggcctgaatagaactaaaggccaaggaagagagattttgcccctgctgtctgacca

SEQ ID NO: 255241 - DNA, 499 bp, Homo sapiens
tgatgcaaatcttcccctggctcatctttcaggcactttctccacagtgtttggcagagaggcttcaagggaatgaagcaccatggaatccccatgagaagccttctctactgtcatcagagcagcataggtaattttggaagtgaaggggtaggaatggaaggtgatagccaggtgaagcattttctctctatcttcctgatttcttacactcttcattattctctcagaacactgtcacctactatgatggttaattttattgtgtcaacttgactggatcaaggggtcaacttgaaaggaccaytggggtgaccagatgtttggctaaatgtgatttctgggtgtatctgtgagtgtgtttctggctgagattagcatttgaattgctggactaagtaaagcagatggcacatgtggtgggcatcatccaatctgttgagggcctgaatagaactaaaggccaaggaagagagattttgcccctgctgtctgacca

SEQ ID NO: 255242 - DNA, 583 bp, Homo sapiens
actaatacctgtatgtttcctgttattttgggcacaaagctaagttttatatcctaatcccttttcaattatgtaggactctgtgactgatatagagtcaatggaatatgagcaaaagtgatgcaatctcttggaggcctggcttacagaagcacacgttgacctctgttcttcccttttccaaacttggaagacatgttgaagatattgcctccgratgcctagtatcacaacctggaaggggctctggagtgacaggcagactcttattgataataacaatggtctgtggtctgagaaagtaatacacctttatcattttagatgctctcttagagaatctagatttatttattctcatagaatacatgcaacagggatttaaagtgatgtgtagggtatgtgtatgagtgtatgattgatatgtagttttttatgtattagcatggaaagttatttcaaatatatagattagaatgtcagcagtgataatttggggatacttttcttcatcattttcatatttgttatagagtattttccaaattttgtaatgtttgtcatagcatatgtattttttaat

SEQ ID NO: 255243 - DNA, 576 bp, Homo sapiens
ccctgctctgaacagtggtggcttcatccgagtaagggggcagccctgccagtttgcaggagggagggacaactgtttccagtacccctgtccctccagtagtttatccagaactgcttccagtacccctgtgcctccagtagtttattctgttagtaggtgccaaagccaagacaccagtctgggcagtctaaatccagaaactgaacacggagctaccaaactgtgcacaggcagaatccaggttggagagaatgactgctatttccaaagtgtagtgagccttcttccaactactaatrctattgtttccccacctgagcttaaagggcctccaagcagagtcagacttttggagaggctttcgttttgccatccagcaatgtgcaggtaagcctgtatcaagagaaagatgcatagccttagatgtattcattatgttactgtaggtagtcaggctgacatgagcagggcagaagaccagcctcctccccaccccccaccaggaatgtcaggcgaccatcaggtgatggtcagacaattcttaagctgtctctctaaaagaataattggttg

SEQ ID NO: 255244 - DNA, 527 bp, Homo sapiens
ataacatcaatggtttttcttttcattacagagctggcagagtcattaggtacttcggtgtctgtagaaagtgccaagcccttggcaaatctgggttcatttaccagggtgggtggtaagcttatgtgtgtctatttataggtgaggaaatagaagaagagagaaggttacatggagctgtaggaatctaaatcctagaaggttctggatcctgcaaactacactgcctaagtttgtctcattgtgcatttagcacagcatgatggatggggtggggaggctgtgtttcccagctttatgctccacagtgggtagtyaggctcatggacatgctaaggcactggttttagtattcccagggcccatcagtatgagactcagtaccctcctgaccactcatactggccacttggaagtcacgcctcccttgctaatggtacattatcccacaggtctctctctcaccaagatggaatgcagccagtcgtcccctggggaatccccatacttgagttactatttgtcct

SEQ ID NO: 255245 - DNA, 538 bp, Homo sapiens
tggccaatgaaatgagaggttatgtgctgcttcctggtggaggcatttaagagcaggtgcacaattctacatgctctctcctcggctgagactgtgagtcctgggcctcatgtagagagggcagcaygagaagatggaaattgcatcagcctgggtctctgagtgaccactatatggggcaaagcattcccctgccgcatcccagctccctactgactcccaagaacatctgtattgttttaagccactttgatttaggggccttttgagaccaaacataaaccatcctatgctgactgcttggggatgaagctcttacattggctgccaaggctacagatccaggcccctgtggtctggcaggctgtttcttggagctggctgtcccctcctttgtcatagcactgccttttcaccaccagtgaagctgcaaatccattgatgcctccagtgccatctacagccacaatcctgccaactctgcatatcaggcttctactgaccctggggccctgagccccccagtacccctaaccct

SEQ ID NO: 255246 - DNA, 538 bp, Homo sapiens
tggccaatgaaatgagaggttatgtgctgcttcctggtggaggcatttaagagcaggtgcacaattctacatgctctctcctcggctgagactgtgagtcctgggcctcatgtagagagggcagcatgagaagatggaaattgcatcagcctgggtctctgagtgaccactatatggggcaaagcattcccctgccgcatcccagctccctactgactcmcaagaacatctgtattgttttaagccactttgatttaggggccttttgagaccaaacataaaccatcctatgctgactgcttggggatgaagctcttacattggctgccaaggctacagatccaggcccctgtggtctggcaggctgtttcttggagctggctgtcccctcctttgtcatagcactgccttttcaccaccagtgaagctgcaaatccattgatgcctccagtgccatctacagccacaatcctgccaactctgcatatcaggcttctactgaccctggggccctgagccccccagtacccctaaccct

SEQ ID NO: 255247 - DNA, 584 bp, Homo sapiens
cagcttgccagccagaggctcctggccaggaggcaccctgccatgtccccagtataaataaggctgacacagaggaagaggcaacagacaggcagagggcaagctgcctacccaagggggtgaggtctttggttttacacatgcagccccctgtgcatgtacttttatggctgctatctttttatagcttgagaatgttatgttctgagcaaagtcctctctccaggcctggccttggtctactcttcctgacatgcaccacactgctccatttacagctttgttgagaaagtatttgttgaacacttgttatgtgcaaggcacttgcctgcctctggggatgaatgatgaatatggtttccttgctctggatgagtgcccaagttaataggagagacagatcatttccattcagactgataagtggtgttatggagggaagcaaaagaaaaacatccggsctcactggggtggggttggttggggaaggcttctcggaggaggcatcagcttggtcgagtcctgaaggacaagaggtgaggagcagaggagagcatgaagacgtcatggtggtgtggaagaca

SEQ ID NO: 255248 - DNA, 531 bp, Homo sapiens
ctggccccagaaccaaggatctttgctgtgctgcaaaacctctgtcatttaagtgaggtgaggtcctggagrtacagccaaatataaacttcactaattcagtgtttctcacattctcttctgtctactgttctgctttcaactaattttaaagatccattctgtgtctttggagttaagcaacataggggtggcagaaacaaggtgagacgaccccaagagggaagatatgtctggggcaaaaaaagtgagggtgctccatgcttgaccaggaaaattggctactggagaaaatccttgaaggctctgtgatttgtttgtttgatttgggggttttgtgggatttttttttggtgggggaggacaggatcttgctctgctgcccatgctggagtgcagtggtgccatcatggctcactgcaaccttcgtttcctgggctcaagggatcctcccgcttcagactcctgagtagttgggaccagaggctcacaccactaggcccagctaactttcaaatattttatagagac

SEQ ID NO: 255249 - DNA, 531 bp, Homo sapiens
ctggccccagaaccaaggatctttgctgtgctgcaaaacctctgtcatttaagtgaggtgaggtcctggagatacagccaaatataaacttcactaattcagtgtttctcacattctcttctgtctactgttctgctttcaactaattttaaagatccattctgtgtctttggagttaagcaacataggggtggcagaaacaaggtgagacgaccccaagagggaagatatgtctggggcaaaaaaagtgagggtgctccatgcttgaccaggaaaattggctactggagaaaatccttgaaggctctgtgatttgtttgtttgatttgggggttttgtgggatttttttttggtgggggaggacaggatcttgctctgctgcccatgctggagtgcagtggtgccatcatggctcactgcaaccttcgyttcctgggctcaagggatcctcccgcttcagactcctgagtagttgggaccagaggctcacaccactaggcccagctaactttcaaatattttatagagac

SEQ ID NO: 255250 - DNA, 531 bp, Homo sapiens
ctggccccagaaccaaggatctttgctgtgctgcaaaacctctgtcatttaagtgaggtgaggtcctggagatacagccaaatataaacttcactaattcagtgtttctcacattctcttctgtctactgttctgctttcaactaattttaaagatccattctgtgtctttggagttaagcaacataggggtggcagaaacaaggtgagacgaccccaagagggaagatatgtctggggcaaaaaaagtgagggtgctccatgcttgaccaggaaaattggctactggagaaaatccttgaaggctctgtgatttgtttgtttgatttgggggttttgtgggatttttttttggtgggggaggacaggatcttgctctgctgcccatgctggagtgcagtggtgccatcatggctcactgcaaccttcgtttcctgggctcaagggwtcctcccgcttcagactcctgagtagttgggaccagaggctcacaccactaggcccagctaactttcaaatattttatagagac

SEQ ID NO: 255251 - DNA, 531 bp, Homo sapiens
ctggccccagaaccaaggatctttgctgtgctgcaaaacctctgtcatttaagtgaggtgaggtcctggagatacagccaaatataaacttcactaattcagtgtttctcacattctcttctgtctactgttctgctttcaactaattttaaagatccattctgtgtctttggagttaagcaacataggggtggcagaaacaaggtgagacgaccccaagagggaagatatgtctggggcaaaaaaagtgagggtgctccatgcttgaccaggaaaattggctactggagaaaatccttgaaggctctgtgatttgtttgtttgatttgggggttttgtgggatttttttttggtgggggaggacaggatcttgctctgctgcccatgctggagtgcagtggtgccatcatggctcactgcaaccttcgtttcctgggctcaagggatcctcccgcttcagactcctgagtagttgggaccagaggctcacaccactakgcccagctaactttcaaatattttatagagac

SEQ ID NO: 255252 - DNA, 554 bp, Homo sapiens
tgggttcaggccactcacgcactgtgtcaccccagtcttcacctcattctgctaccagtttcacaggattctgattgtgatggatcaatcagatggtgcatgtaaaacatccaggactgtgtgtgcctcattaaactcatcctaaggaaaagatctggtgaggcagaagactctggagtcattttatctgctttacataatgtgtcctcatgcctcaggtagctgtagaatcctttgatgccatagtcatgaggagaggaaggcccagtccagttatggtgcctggcagccatgccggtgtagggccagggcttctgcttggcctggcacccygcttctcagttgatgtcttccccacccacttcatgccttgggtttgtcttctgtcagtatcctcagcacccagaacagagccgggcacaaagctgcatctcaattaatatctgctgaatgagtgattgattgaaagaatgaatggcagaaaacagagaaacagtgaagggaaaaaaattatgaccccacagtcaactgtaactgctgcctactcttcagta

SEQ ID NO: 255253 - DNA, 568 bp, Homo sapiens
gtttgttgaattagttaacaaaaagtttgactttctttggctactttgacaaatcgaattagattcttttaaggcagccaaatttcttttgcatggcggcacaggttttgagagcttgagtggatttacttaaggtaactggcagggaggcaggaagaagaaaaataccaaaactggttcatgtagcaaactgtaatactaaytgctcatagtatgaggagaagagaattggcttatcctatatgacacacacacacacacacacacacacacacacagagtttcacaatggtaggtatcttagatcttgcctagacctgagatgacaaacacctgccatgaagaaagacccgtctctctccgttcccatgcccatggcagacattactaatcaatcacagcactttcccagctaaatatggatataatctcaaaatcctcagttttgaatccaacattggttgtttcttcacctgcccactgctgaactcctatgtttctgagcataatttgtctgagtatgttcttgccaggttatcacctgcttgtagttctcttgtaaaactgc

SEQ ID NO: 255254 - DNA, 512 bp, Homo sapiens
cttatgacgctaggcaagagactgactaacctttgtgagaatcactctcctcgtcagtaaggtggggaaccctactaggaggataatgcctgtcttgttccgttgctgtgaacgctaagttagacgatgtgcataataggcttagaaccatgccttgcacatagtaggtggttaattattgctcatttcctcctctttaagacgggatttcatggaattttcagcctcactgagacacttacgataggtctgggaactaaagaaacctcagaactccamatcagtagagacatgtcttccacgtgaacctctgttaaatactttgttatatggatatacttttgttatatggatataaatactttcttatttgcatatatgttatatgcagttttttggtacatttttcaaaaataaaaatatagttttttgaccacaaaaagcccctctctgcttggggtttaatgttgacatgagaaataaagctatgatgattcaagaatttaaaaatt

SEQ ID NO: 255255 - DNA, 588 bp, Homo sapiens
aatgtaacacattcaggtcaaatctctgttggttttggtcactggctgtttcaaggcctaaaaggaaagagtgagatctttcaaagaatggagattaaaatcaaacacaacgaaggagctacttttgaatgtaataatgtggaacactttaaagtcgaattaattaaaggaaacataaaccaatgcattcctggctccatgttaactgcggctgtctaaaagaccttgagatgttcaagagaccagtgtaaataagttattttggttagcacaagctcaggggcctgccactttcctctcgctggtgctgtmtttggtagagccatagatagaaccagccacaaacttgattcgggcataagcaggagacacacacatcagcataaagggtgctccaaaaaaggccctcttgcttggagacacaggaaccagactccccaaatgtctctcacttacacagcaatcctcctcagacttaggaggctctgtcaaacattttcaaaattacagggaacctggaaagaaaatacaataaagagatcagagacctaaagtgccagaccaaagagaagaaccagaaaaagcaag

SEQ ID NO: 255256 - DNA, 588 bp, Homo sapiens
aatgtaacacattcaggtcaaatctctgttggttttggtcactggctgtttcaaggcctaaaaggaaagagtgagatctttcaaagaatggagattaaaatcaaacacaacgaaggagctacttttgaatgtaataatgtggaacactttaaagtcgaattaattaaaggaaacataaaccaatgcattcctggctccatgttaactgcggctgtctaaaagaccttgagatgttcaagagaccagtgtaaataagttattttggttagcacaagctcaggggcctgccactttcctctcgctggtgctgtatttggtagagccatagatagaaccagccacaaacttgattcgggcataagcaggagacacacacatcagcataaagggkgctccaaaaaaggccctcttgcttggagacacaggaaccagactccccaaatgtctctcacttacacagcaatcctcctcagacttaggaggctctgtcaaacattttcaaaattacagggaacctggaaagaaaatacaataaagagatcagagacctaaagtgccagaccaaagagaagaaccagaaaaagcaag

SEQ ID NO: 255257 - DNA, 470 bp, Homo sapiens
taggatgctgcaaagacctctgagaatgccagtctttcccctctctccctcccccagaagaagtttcaggggattctacaggctaacattaaagttcacaggctggagggtcccagctactgctattatatcaacacatgggggcaggtagtgatggctgctcctccagagagattacatagcaatgccaaagttccctggcctggtacagaatgacggcccaataaagagttgctgaacaaatgaccaaaaaataacaataaatcccagctcagcgacttattggctaatacccctgggtaagtccataccatttctttaccttaactccctcctgcataaaatggagataatcataactacccacaggtgtgcttggggactarttgttaaaccaaaccagagactcgatgcacaatagtggctttcctctcagaagtggcggggaccccagggaagtgcaaacaagg

SEQ ID NO: 255258 - DNA, 635 bp, Homo sapiens
tttgtgatcaaaagacttgaatttggtagagttctttatatgcctattgatataagtatataatcatgttgttaatgtcttttatgttcttcctaatgtttatctgtctgtaagaaaacagaagatttcaataacataatcacaaataacaatcagtttctgagagagatgactatagatttgtctggttctcctctttgctttgtaaacatttctctacatattttgaggccatatttttaggtgtatacatgttggtcaaacaaaccttttattgtcatatagcatatttttaatctctagtaacaatttttgccctaaagtttacctagtttaatattgatatactagtcacaccaacactcctttggttattgttttcatagaatatatgtaaayactatatataagatgttatatatattgtatataactatcttttactttgtcttttttattccttatgttttagacatgcgtgttataaattacatactgtatctttttcttcttaaacccaatatgaccatctttgtccattaattggaacatttgacccatttatgcagtgaaaggtattatgttagagaaataaaactaaacttgtgaaaaaaaagttagaccccagttagtag

SEQ ID NO: 255259 - DNA, 621 bp, Homo sapiens
tgtttactggttgtatggagttttctttttctttttcttcccccttaggcgagttgaaaatttgcactatttgctttccttaaaaacagactttactttttagagcagtgttaggttcctggcagaattgaacagaaagtacggagtccctgtatgccctctgcctgcacacatgcacagccctcactatcaacaactcccaccagagtactgcatttattacaaccgacgaacctacactgatgcatcattatcatccaaagtccatagtttayattagggctcactcttgatatacattctgtgggctttgacaaatgcacaatgacagctatccaccattgtagtattacaccgaataatttcactgccctaaaaaccttctgtgctccaccacctatgtatccctctctgctccttagtccccagcaaccactgaattttttttttatactgtctctgtagttttgcattttcccaaatgtcatacaattgaaatcaaacagatgtagccttttcggattgccagattgacttcttttactcagtaatatgcctttaagtttcctccaagtctttccatggcctgatagtgcatttttttttagcctgaataatatt

SEQ ID NO: 255260 - DNA, 560 bp, Homo sapiens
gtattctctgagtttggaggttctagaatccttgggaagagcagctctgttccctgcaacagcccctttttattgttgcagtttgtttcattctgatttctctatcagtttgatcttactagatttctaacttccagaaattctcccaaacatatggtctactggyggtatcctttcctgttccccaaggtgtagcaaatttattttttaattatatcatttgtgtcatttcagatgaattttgggagagagaggaggtaaatatttgtcatcagtctgtcacattgaactggaagtcttcacctagttttaatccataagtaaggttctacaggcttagcaattggaagctgtcaccagtatctagattctgattttaattgtcttttaatttctaatgaaatgtccatatcaggagttctttaatttaaatttcttttaatttctaaatgaaatgtttatatcaggagttcttgttctagagtccatggattccctagatatcaaagaagtcccaatctattctctggagggctttcagaagaaagaattagaataaa

SEQ ID NO: 255261 - DNA, 583 bp, Homo sapiens
atggtgccaagagctgtggacacagccacccagatgaaagaaatttgggtcctatttctagaatccagagcaaggatgctggtggaatctttcctctcctctcaatggccagtctctggcagacttcttcttcatttgcccaggaaagccagctttcaacagcacaggatttcaagaggtttcatcctgctctggtatgcaaaggttggcccagagaagaactcctggcttttcttaaaaccagttatgcttggctggaaatatgtactccatagggtttgataaacagatcctggcattttttcaacttgtctatcttaaatggaaatgcagatgcagatccaagttttgtggggcctgaaatctcacataatttttagggattctttttaagaaaaatcmtaaaaacaaaattgggtactcaacttcctcttacgcatatccccaaaatgcccatgaacttttctatatcactgacctgatcgggggtgtgttgaagtagaagatggagtgggaagagacaacagtcttgaaaattgagttaaaatgtcttacttcatcagcttaaataaactaacaattt

SEQ ID NO: 255262 - DNA, 579 bp, Homo sapiens
tcacagagccaccaatcccttttttgagaagtgtctcaaggggtcagtgttccaagaaacacatactgggaaacatgcttcaaggctcatccccccatttcacagacagaaaactgaggtccagggagaggccgtgccttgctacaggattttctgtccatcgatagcgaggcagagactaaaagcctgctcactcctctcagtcccrtgctgtctctaccacatcccgctgcctctctgtttgggaggctcctgtgtcagcttgcggtccccaaccccacccggtatacttaggtgctgaattagtctgctctggctgctgtaacaaaacactacagactgggtgtcttatgccatagaagctttggttctcacagttcggagggctagaagtccaagttcaaggtgttgacagggttggcttgttaggtgggttcttccttgcttgcagattactgtcttcttgctgtgtcctcacgtggtcattcctcagtgcacacacctgtctgtgtcccactcttctcttcaataggacaccagtcatatgaattagggtccaaccatgtggcctcattttac

SEQ ID NO: 255263 - DNA, 573 bp, Homo sapiens
gtaggtgtctccatttatataggtcttcctcgatatttcagaaggatttggcagttttcaatatacaggtcctgcacatgttttgttagttttatacataagtatttctctttcatttgaactatttaaatggcatttaatttttttttcagtctccaattgttgattgctaatatatggaaatacaattgatttgtgtatgttaaccttttatcctgtgatcttactaaactcacttattagtcttaggtttttttgtgtgtttaattttatcaaatgctttttctgcagcagtttatgkatgatcatgtaattttcattcgttagtaggtttgtatggtagattacattgattgatttttgaatgttaaactagctttgtatttctaaaataaaactcacttgtttcattggaggaacatacaagaaaaaaaaccctatggtaatacattaccctggtaatgtattagtcccttaataatttgctggaattgattcaagagtgctttgttgagggctttttttgcctatattcattagggatacatgtccttagttttctttttttttgta

SEQ ID NO: 255264 - DNA, 579 bp, Homo sapiens
gtaaaaacagtggtttggaccatgttaactgccttttaaaaaacacatgccaatagagggygaagaaaatcaatcagtaagatggctgctaaaaatgttttaaatgaagaatgcataactatatacagcccatgtcttcctagctttttaaattgagcattttcctgcctttggttccatagttaatgccattccgcagctatgcttttgcaattaggaaggaaagaagtgtgggactagttgaggccaatgtggaaagcaggattattgtagatgataaatcagaggtctatgagtttttcctatattttgcagtaatctttcttgggagaaaaacacacatttttctgcaatttgtttatcagtttttcttttgaaaataaatgatttgacatttaagaattgcaaaagaattcctatgggaagaaccacaggctagagatagataatgttggatgtggaactctgcaagacactataaaaaattgtttaatgggatacataaggatttgctaattggactgggaatttgtgagagagaggagttgataactctgaagtgatttggaaaagaatatt

SEQ ID NO: 255265 - DNA, 529 bp, Homo sapiens
cacttattttcttatttggaattcatgctcatcatgtataaaatgactctctttcctagagccacaagcagacagacacagtttatgtttgcattaaattgctaagcagagatgcatacagggtgtcccatagtgtgaagaatgagaggcagagcataagagtcccttcctcagggacctcccttcactttcccaactctctctttcacagctggataaagccactcaataaagaaattcttgcctcaccaattctagctggctttgtgggttagttagctaggttgcaaactcctaggaaaccttcccagrcaacatttccacaccttccccatgtctctagtgcatagtaccttgaggtgaccatttccttccatgtcaaattcacctgtgggtccagaagtaggagcctctgttgtaccagctgtgcagcctgggacacctggaggcagtcactacatttgcccaaggaaggaaaagagggaagcacagatacacatatgtggacctaatcattgctacaaaagaa

SEQ ID NO: 255266 - DNA, 499 bp, Homo sapiens
atgaaaaaacataccctgaccaacctagaattttacagttggtggaaatcaccttcaaaaataacaatgaaactgtcacagtcacgtgaagactaagaattaggtttaaatgtaatgtgatatcccagacagaatcatggaagagaaaaaaactaaaagctgaagaaatctgaataaaacatagactccagttaataacataataatgttttaataatggttaattatttttaataaaatttaccatactaacatgagatgtaataatagaggaaactgggtatggtatatttragaactctgcactttctttgcaagttttctgtaaatctaaaatctgttctgaaagctaaagtttgttttaaaaaataaagatgccataaagacaatgtcagacaaacaaaagctgaaaaaatacattgtcatcagacctgaactagaaaattactaaaggaagttcttcagactaaaagaaagaaacctcagatgaaagcatggg

SEQ ID NO: 255267 - DNA, 346 bp, Homo sapiens
ctatatagccacatctcctgacctcagcacttctgtctaatctatcttggcaactcaaattaaaagataattacatattttaacaacctctgtctcagccttcctaagccttcccaaatggcagaatgtgagggggaggtttgatttaggggaacagacttagaggctcagtggggaagcagaggagcaagcaggagaggctgaacrttggccaggaactatgggatttgagcagaaaagaaagattaaatagttggagagcttgacaagttggttggaagtgttgagatcaggaaaagaaacttgagcttgtgattgaaaatccattgcaaagtccagagagaag

SEQ ID NO: 255268 - DNA, 637 bp, Homo sapiens
caggtgctctacctgactctttacatcctttatcttatccagtccttacaacagccctgcatggtaygattattcccatcttacaggtgagaaaattgaagctcagaaaggtgaagtaatttgtttcagacatcacaattactaagtaatgttaacagggtttgagctcaggggagccctgactccaagcccagggttctgctcagtataccataatgaaggcttctaggtcaatacagagccaggcgacagcagcagcaacaacttcaaccaaaaatgaaatgctaacacaggaccagaagaggtttttctggctaaggcttcaccagtttgtcatcgtggagaaggtatcatccctaacaatcagatttacctatgttctttgttaacctgcagtttgttatacatgcaatagctctgcttaagttaactggtaaatagcatagagtttatccaacgggttaagctgagtcattctcgtgaagtattttcttgtttttagaaaagactgagtaaagagagctctgagggcaggttaaggccagggactgcctggagatgcctcagcagttttgctggagctgttctgggctgtgagtgggcaggcaggtgagcagacccccttcctggcccaggt

SEQ ID NO: 255269 - DNA, 637 bp, Homo sapiens
caggtgctctacctgactctttacatcctttatcttatccagtccttacaacagccctgcatggtacgattattcccatcttacaggtgagaaaattgaagctcagaaaggtgaagtaatttgtttcagacatcacaattactaagtaatgttaacagggtttgagctcaggggagccctgactccaagcccagggttctgctcagtataccataatgaaggcttctaggtcaatacagagccaggcgacagcagcagcaacaacttcaaccaaaaatgaaatgctaacacaggaccagaagaggtttttctggctaaggcttcaccagtttgtcatcgtggagaaggtakcatccctaacaatcagatttacctatgttctttgttaacctgcagtttgttatacatgcaatagctctgcttaagttaactggtaaatagcatagagtttatccaacgggttaagctgagtcattctcgtgaagtattttcttgtttttagaaaagactgagtaaagagagctctgagggcaggttaaggccagggactgcctggagatgcctcagcagttttgctggagctgttctgggctgtgagtgggcaggcaggtgagcagacccccttcctggcccaggt

SEQ ID NO: 255270 - DNA, 637 bp, Homo sapiens
caggtgctctacctgactctttacatcctttatcttatccagtccttacaacagccctgcatggtacgattattcccatcttacaggtgagaaaattgaagctcagaaaggtgaagtaatttgtttcagacatcacaattactaagtaatgttaacagggtttgagctcaggggagccctgactccaagcccagggttctgctcagtataccataatgaaggcttctaggtcaatacagagccaggcgacagcagcagcaacaacttcaaccaaaaatgaaatgctaacacaggaccagaagaggtttttctggctaaggcttcaccagtttgtcatcgtggagaaggtatcatccctaacaatcagatttacctatgttctttgttaacctgcagtttgttatacatgcaatagctctgcttaagttaactggtaaatagcatagagtttatccarcgggttaagctgagtcattctcgtgaagtattttcttgtttttagaaaagactgagtaaagagagctctgagggcaggttaaggccagggactgcctggagatgcctcagcagttttgctggagctgttctgggctgtgagtgggcaggcaggtgagcagacccccttcctggcccaggt

SEQ ID NO: 255271 - DNA, 521 bp, Homo sapiens
ttctgttgctcatcaacaaagatgaggttttcccggcttccccagacagaatcccaggcaggggctggcgctttcctgcccttttcactggagctgacaggagccacagtctcacctggcctggaggtcccccttgtctccaaccagcagcctgactgggggtcagcgctgtgagtattgcctccacggagttcacccccctgaatcctgcctccccacccctccaccttagacttctagtcactataaggcaggggaatctgctgtttccccagccctgaccctccactcatacgtgtgmatgcacacacacttgaaggctgcccaggagccagcctaggcttctaggagactgtgccccccacactcaaatcatccaaagggagcaaagctcaaactcacaggctcgccagggtgaggtgaagagacgtcggcctcatcccccttctgctggagaaggtgaacaggagtcagtcagcaatgggaagagaccgtgtttcctcttgaaatatccccaagga

SEQ ID NO: 255272 - DNA, 583 bp, Homo sapiens
ctgcacttaaccaaaaccactggtccttattactaatatctctacaggagtcccacaggtaacctccattatytccatccaaacctgtgccttctcgtgccagtccttctgattggagcacattccttcccatatgacaattgacttctttgtcttcatctgtcatgtcacattccttatacttaatatttttttaaaaaatcatttttccattaattatgatatttcattcctttcaaacattagtgattcgttcatacctgctaattcgttctccttcgtttggtaatgcatttcctatttcttgtgcttgatgaatcctgatactaagtaacatactatggaaaagctgcccatgtagatagccccatccttcctgttttatcacctcaggccctaatgaaactccctgttcaatgctcagtgaggatccctgtcatcattttaggcctccactatttgacactgaatattgagaaaaaacttaaaataaactcaatgctggactagggtttgtcatgatgttacattataccaacagttaaaataatcaaatttttttttattttataaaatggcggaa

SEQ ID NO: 255273 - DNA, 583 bp, Homo sapiens
ctgcacttaaccaaaaccactggtccttattactaatatctctacaggagtcccacaggtaacctccattatctccatccaaacctgtgccttctcgtgccagtccttctgattggagcacattccttcccatatgacaattgacttctttgtcttcatctgtcatgtcacattccttatacttaatatttttttaaaaaatcatttttccattaattaygatatttcattcctttcaaacattagtgattcgttcatacctgctaattcgttctccttcgtttggtaatgcatttcctatttcttgtgcttgatgaatcctgatactaagtaacatactatggaaaagctgcccatgtagatagccccatccttcctgttttatcacctcaggccctaatgaaactccctgttcaatgctcagtgaggatccctgtcatcattttaggcctccactatttgacactgaatattgagaaaaaacttaaaataaactcaatgctggactagggtttgtcatgatgttacattataccaacagttaaaataatcaaatttttttttattttataaaatggcggaa

SEQ ID NO: 255274 - DNA, 621 bp, Homo sapiens
ggtccaactaatacaatcacctccatctctctcctagagcttcctgaatttagtaataagacacatcagatgatccctttaatagaatatagctccagccatcctcagcttagagcatgaattttcaatagatagaatatcacgaccaaaattggttcttgggggcaaaagtcttagatattataatgattgtaaccctccaaggaccatacctgacaatatccgattccttagtgtttaacttttcttcttagggagaatttgatgtgtcttggtaagggaatgatcaagaaaaaaaaaattgagagacattggcgtatgagctcccacatctttgctgattgacataagatccctagcctgcctgaccactcatctttctcccagtggcttcaggccagatttggggagaaatataactttccacaggtataggtctcacagcaattacagatgtcaatgttaccttctagaagagaccacctacaagatgacagcaaaaggttctaatccttaatagacttccagcagatagtctactatgacaatactcatctagtacgttcactgakgtgacagaaaattgtaataacaaaattggaatatgggaatgatgttagt

SEQ ID NO: 255275 - DNA, 539 bp, Homo sapiens
ggccagtttacagaggcagcttactaagtgcccttgcatcctatgtttcactttttgatgtatagggcccaattttactgcattttaatgttaagtctccaccccaaagtgaacatgggacatacgttacatacatgtttccttaacatgtgatatggtttggctgtgtccccacccaaatctcatcttgaattgtagctcccacaattctcatatgtttttggagggaactagtgggagatcatggaatcatgggggcagtttcccccatactgttctcgtggtagtgaataagtctcataagagctaatggttttgtaagaggaaaccccttttgcttggctctccttctctctctggactgccaccatgtaagacatgcttttcaccttccatcatgattgtgaggccatgtggaactatgagtccattaaatctctttttcttcataaattacccagtctcgggtatgtctttatcagcagcgtgaaaatggactaacacaccmtgcatgtgtgcaacgccgccaccccccccac

SEQ ID NO: 255276 - DNA, 461 bp, Homo sapiens
atatatctgtggtgtgcgtatatgactttgtgtgtgggaggggctggtgtatgtgtgtaagaaagagagagaaattgatttagatttgatttgaatgtgcttttgaaattaagagayattttaagagtggataatactaattacttagagtaatataattaaaaagagatgcaatgtaatgtattattattaatgttattatgattatcaaaatagattaaaataatcatagcaaaaagccaaatcactaacaaaaccaaggatgtcttgcatagaatgccttggagttatttctccactcttcactcctatgaggtgtaaattgttctaactctagtcttggtctcttttattcactcctagcaaggtggaaagacttatcagattactaaacctgagaaaggaacctgagccaatgtagtggcccccaccctttgctacaagggagagtccgtaatgag

SEQ ID NO: 255277 - DNA, 349 bp, Homo sapiens
gaaagctggtcagagttgcaggacacttcgtcttcatccttgtccccctatagtttccctccccttcttgtgtcttattcctgtgtctgcagagtttcccttttctttggtagcagacwtcagaagcatgctgtttcactgtatgtgttaacttgactgtgccttgggatgcccagctatttggtcaaacattattctgggtgtttccccaaatatgttttagatgagattaacatttaaattggtagagtgagtaaagcacattgttctccctaatgtgggtgggcctcgtccaatcagttgacggcctgaatggaacaaaaagactgatcctcctctgagtaaaaga

SEQ ID NO: 255278 - DNA, 576 bp, Homo sapiens
gaaagctggtcagagttgcaggacacttcgtcttcatccttgtccccctatagtttccctccccttcttgtgtcttattcctgtgtctgcagagtttcccttttctttggtagcagacatcagaagcatgctgtttcactgtatgtgttaacttgactgtgccttgggatgcccagctatttggtcaaacattattctgggtgtttccccaaatatgttttagatgagattaacatttaaattggtagagtgagtaaagcacattgttctccctaatgtgggtgggcctcgtccaatcagttgacrgcctgaatggaacaaaaagactgatcctcctctgagtaaaagaggattcttcttgtctgactcccttaagactgggacatcagcttttttcctgtctttggatgcaaaccaaagcaccagccctgcctcagccttgagtctactggcctttagacagaaattaagcccttggatttcatgtatctccagcttgcaaactcaccctgtgtcaaatagatagatacatagatatatagataattcacccacacacacacaccaacacacaaa

SEQ ID NO: 255279 - DNA, 573 bp, Homo sapiens
tggcgtgtcccttgacttctcaggctcctgttggtggctcttccctttgtagctccaggtcgtcctatatcccagtaacatgacttccctccttgccctcttaggtttaagggtagtaatggctttctactaatgctaaactctggatacctgaatattgctcatacatttcctaactctgccaacagtgttgaaaatagtatcttcatccaaaaatagcactattaaaagcaacatccagttaattctgttatttgcgggtttgatagaaatggacttcataattttataaataacaactttcatccaattttactttcatttgggtttttgtatctctcagattatttacattctttctatatgaatcttttctatttcagctattttttctcttaaagtgcagtgaattagaaacgcacatagacctttaggtatagaaacatcatgggtttgaagatgaaaggttaaacttttaaaataatttcccataccttacttaatrtgaatatttaattattcttcttgggcctagaaaatacgttgagaaacattgtttaggggacagtctat

SEQ ID NO: 255280 - DNA, 576 bp, Homo sapiens
aaatcaacaaattttgaaaatcgaaataataaaatgtgcatttaacagtaatcttaagctagaaatcaataacataaagttgaacaaaaactcaagtatttagaaattaagcaatatacatctaagttactcaggagtcagtgaactaaacacaatggaaaggaaaacaatgaaataatgacattctaaaacttgtaaaatgcagttaaagcattttaactgtacattttaactgtacaccaaacccctgttacatccaatttacctatataacaaaaaaagaaaatttatagcattaaatacatatattagaaaagaagctacaaaatcaatagcaaactagawctaacagagaaggaaataataaacacaaaagcagaaatcaatgaaacagaaagcagatataaaattgagaaaatcaacaaagctaaaagtcgattttttaaatatcaattaaaatttaaacttccaataatactgtataggtagagagcagggggtgggagggagaagacaaattataaagaccaggaataataaagtcaccattacttgagaagctacagataccaaaaa

SEQ ID NO: 255281 - DNA, 571 bp, Homo sapiens
attatctaatactaatagactaagtgaggaaacccagtgaggcctgtctctatttttcttggcatctcggcgcagcatttcttcttcccagscatcaggcaggaccccttctgaaatgagtgtcttatgacctaaaatcagacaaggtaaatcagagaatttctttatggccagctccaagacagaaaggtgggggaaagcctgccttggggaaaaaaatagagcaggtgagaggagggtaggaaaaggtgtgtgtgtgtgtgtgtgagagagggagagagagagagagagactgtcttctgaggcctaaagtgctcaaatgctatatcaaaaaaatgtaacaagggccatgggagttataagccaggaaccatgaatgaaactaatagatagatatacagacagatagatgatagatagttagataggtagatagataaacttttttattttagaaagatcactctagcaacagattaagtagaaggtaatgacacaagatggaaatctacagtaatagtccaggcaagtaaagattaatatttcctgaattaaagcagtgagggtagag

SEQ ID NO: 255282 - DNA, 520 bp, Homo sapiens
aatcccttctccagagtggcctcatttcataactgtctccttccatcgccagactcatcgttcactgctcccttagaccatttgattctcttcttttactgctaggattgcaccaccgtctattctttaaacatgccacttaactactcaggcaggcatcctctgtggttggtgaaaattttggaaacatatgacctctggggcatagtcttctctctcaggttccctccacaagttttggcataaagttcaaactcttaacatgacttatgatagggtaaccatgtaatttatcatgcaattcaagtgatgtgaaaatgaaaaagggtgttagyaacaattacagtgggataattgggtaaacagggatagccatcatcctccacgtgtggcagttcaggatctcccttctacttatgtagccagcactttattaatgtctgctttgtaacaaacttgatatctatattacttctaatcagtacaagtctttaaagaggaggaaacacaaagtaattga

SEQ ID NO: 255283 - DNA, 580 bp, Homo sapiens
ctttattaatgtctgctttgtaacaaacttgatatctatattacttctaatcagtacaagtctttaaagaggaggaaacacaaagtaattgagttgtttgcaggaccttttacagacaggaagaggcagaattgaaagtcaaatcctgacctgtttgattcccatgtccaaacttttccacaggtgaattcttttcttaactagcaactttataaaacagaatgaggagctattcaaatctccatgcataccaaaacttgttttttaaaggtcccgaagaacaaatcacttaagcaacaaatcatatatagctcaaagaaaatttagawccaagtatataaagtcaaaaatatatgttcctctctgcccctactctcagctaactcagcccacttcgcagagataagcaatgttctcaaaatctggttgatgttcgcaaaacttttaacgacggagacataaatgtgtttctctttttttccacttaacttggaatatattatgtgaataactttcttaacacttgattaagaaatccagccaagttttaagccaaagatatacagtgctttcacatata

SEQ ID NO: 255284 - DNA, 673 bp, Homo sapiens
aggtattaataaacagggatcacttggattacatactcatgaaaatttacagttagtcatgtttatttatggacacttagtatttttgaggcctctgacaaagccatctctctcacatactttttaaagttaggccagatttaatttaagctctactgctttgtacctcaggcatttattatctttttgtcatgtaaaatgttaacttggaaaagtagttaggctattttttttcctgtattccaatggtctattattacaaatatttatacacaaaaatatattaattatttttaaaagatgaatggaagtataatttgaaaagtaagaaaagaagagcatgatttggatgacatgattaacagtaccacagcaacaaatatatttctagaacactgtatataatgtagcctttctgacccagccatcagcagggaattctattttgagttggtttcctaagaggaaaacgagtcattctgaaacatttacctttattygccctaccctttatatccaatggcattatttagaaataggtagtcggtagtcaccgttggaaattaagggggtttgtggttattgaaaagttcctactataaatctactatgactaccacctgacaagatataaaatggctaaattttgagctgagattgtttttagatttac

SEQ ID NO: 255285 - DNA, 417 bp, Homo sapiens
caagcctcaataaattaaattgaagttctatcaagcactctctcagaccacagtggaataaaactggaaatcaactccaaaaggaatcttcaaaacaatgcaaatacatggaaattaaataacctgcttctgaatgatcaytgggtcaaaaatgaaatcaagacggaaatttaaaaaattattccaaccgaatgacaatagtggcagaacctatcaaaacttctggagtacagcaaaggtggtgctaagaagaaagttcatagccctaaacacctacatcaaaaagtctgaaagagcacaaacagaaaatctaaggtcagacctgcaggaactagagaaacaagaataaaccaaacccaaacccaacagaaggaaggaaataaccgagatcagagcagaactaaatgaaattgaaac

SEQ ID NO: 255286 - DNA, 417 bp, Homo sapiens
caagcctcaataaattaaattgaagttctatcaagcactctctcagaccacagtggaataaaactggaaatcaactccaaaaggaatcttcaaaacaatgcaaatacatggaaattaaataacctgcttctgaatgatcactgggtcaaaaatgaaatcaagayggaaatttaaaaaattattccaaccgaatgacaatagtggcagaacctatcaaaacttctggagtacagcaaaggtggtgctaagaagaaagttcatagccctaaacacctacatcaaaaagtctgaaagagcacaaacagaaaatctaaggtcagacctgcaggaactagagaaacaagaataaaccaaacccaaacccaacagaaggaaggaaataaccgagatcagagcagaactaaatgaaattgaaac

SEQ ID NO: 255287 - DNA, 636 bp, Homo sapiens
tcaatactgtttttagttgtcattatcctttttggtcagcacctcctgcctggggcagtcgattctgttgagggataaccaattcagatagttatttaaaatgagctaaaatctacctgtgtttaacaacttttctttattctgagctatagaacctctggaatggcccaggtgaaacctattccttttggagatcagctctttttgtaactgaagacagcgattttcctgtgaatcttctcttctacagtggttaagagattgggctttgaagtgaaataaagttgggtttgaattctatattcacaacaaaacagtttttgcttttacaatagttatttaaatgttctgagtctgtttcctcagtttcaaatgtggaaataacatctacctaaacaggttattgtgaacattaaagtaagtaatgcaaattaaggacagtaaataagtgtggcatttggtctataatatatcttcaataaatttttctttctcattctcttcatgcccagatagctgtcatttttctaaatgccctgtattctgggttccttattatcatatcayatgccactaggtctattagaattctaaattctagaggaaattaaatattttgtaagcgagatgcagata

SEQ ID NO: 255288 - DNA, 560 bp, Homo sapiens
ttatcctttgagaatagaaatctaacttccaagacacagtagaaacctttagtcaatgattgttatacagtgctgtgtccccagtaagcagcatgcataggttcaggaacaaagagcagaagtagatgtggctgtactaacttcccagtaatctactcacaaaacttgtatttcccttttccataactctaagctttgtgggtctagttttcagtattccgctgtctaactgtgaaggcaaatgacaagtgcagtaaccactgaccaagaagggcatggtaaccaaagattcagacccctcaaggtgtcaccaccagggaagtcaccaagaccagcagcggtattttctcaggatggtggcaatccagagtgagtagtgtaggagggaaatggtgaacatcagttacttttggaaaccagctacagtagttgtggcttttccaactaatcttcttcctttayatttccccaggaaaatagactaataaaccttcactacaacatgttttcatttctctaggatatatgcctagaagtagaatggctgagccattggtaaa

SEQ ID NO: 255289 - DNA, 520 bp, Homo sapiens
atgtaaagagcaatcaaaattaaatcctttatttaaatttaattagggttaattaaatataattaaattagggttgtacaataatttcttaagtatgacaataaaacacaaatgacaaaatataaaatagatggaacattattaacaataaaacttttgttatgcaaatgatactatcaagaaagtaaaaaagcaggccacacaatgggagaaaatacatgcagatatatttttgataggggacttatatatccaaagtaaataaggacttccataattcaataataaaaaggtaaataaccaatyttaaaaactggaaaagtattaatatttgaatcaatgttgctccaaagaagatatacaaatgaccaatgaacagattcaaagatgtttatctactaagtcaatcaaaaccacaatgagatagcacttcacacccatccactaagatggctataatcaaaatgacagacaataagaagtgttgacaaggatgtgaagaaattggaagcctcataca

SEQ ID NO: 255290 - DNA, 596 bp, Homo sapiens
ccttggtagaggggatgtgcttcaccgagagaaacccgctcatctgggctgcctggattcctcagaactagcagraggaaagactaagttcgctggtctgtggagactgtggccatccctcccgctagggtctcaggcccagggagatcagagttctgttcctgagcccttggctggagttgtcagagttcctgcagggaggccccacccagtgaggaggaatggatcaaggtcaggcctgaagaggcactctgtccacagtctgtcacagccagtgtgttgggctgtgggtgatacctcttgggaccaagccatccagcctccctggcttcagcaggggaaaagcaccacctggaactatagagatggctgccgcccttccccggtcctggaagcttaatgtcttaggcagatatcagttccagtgttggctgtcactccttccccagggagctcaagctgcttagacagcaggcagccacagctgtggtgctagttgctcctcccctccgggaactcggcaggcttaagcagattctagcttagcagctgtagagaatctgcaccacttcgtggttgggaacgtgggccccagt

SEQ ID NO: 255291 - DNA, 596 bp, Homo sapiens
ccttggtagaggggatgtgcttcaccgagagaaacccgctcatctgggctgcctggattcctcagaactagcagaaggaaagactaagttcgctggtctgtggagactgtggccatccctcccgctagggtctcaggcccagggagatcagagttctgttcctgagcccttggctggagttgtcagagttcctgcagggaggccccacccagtgaggaggaatggatcaaggtcaggcctgaagaggcactctgtccacagtctgtcacagccagtgtgttgggctgtgggtgatacctcttgggaccaagccatccagcctccctggcttcagcagggraaaagcaccacctggaactatagagatggctgccgcccttccccggtcctggaagcttaatgtcttaggcagatatcagttccagtgttggctgtcactccttccccagggagctcaagctgcttagacagcaggcagccacagctgtggtgctagttgctcctcccctccgggaactcggcaggcttaagcagattctagcttagcagctgtagagaatctgcaccacttcgtggttgggaacgtgggccccagt

SEQ ID NO: 255292 - DNA, 612 bp, Homo sapiens
gtcattcatgctttgaggatcagggttattgtctacacttcctttatgaactctccatatctaatcagtggccacattctatgggttctgactcatttcttctcttaattatcccgtttagtaacttttcacctctttcttggtattttataatgtctcccaacctgtttccaatttctacatcttgaaaaatatgacctacattgtcatcagttattattctaaaacccaattttatcaagccatggatataaaacttgaatgtgacaatgatatccttactccatgccacatattagctaaacaattcacgtacaatatctaagctataytcaagtaaatctttgagggaaatagttttaccattagccgacagattaatgaacttgccccaaatcatacagttagtgagtgctagaggtgagaagtagaatttaaattctggtctgagtccagagaccagcatagactgccaagcatacttaaagaaaaaacttcattggctcttcacgggaatgcaaattcccaaattgaacattcaattattatataagatgaaatttcatctataaataattatttcatccataagatgaatgtcattttcctttt

SEQ ID NO: 255293 - DNA, 570 bp, Homo sapiens
attaagctaaaataaagacggataaaatttcatcaccacattattttgagacaggcattcccagtatttgccaggaatctaagaagtaatttcaacagtatcaatatacactaaaagtacagatttttctatactgctgcttctcaacacccgccctcccacccccatatccttggctatggtaaagaaatgtcttctttatttttaccaataaaagaactctaatttaagacactgactgggaagataaagaaaaagtaagaagtaacaatttaaaggccacagtttggagyccgacctcccaggaccccgattctatattttatagtatgccaaggatatgtttatagtaagtagtgaaatacatgaaaactgaatgtaagtggaaagtagtttcaatttagtttgtgacttttatgcatatatgtgctattactctcttttgaaaggaataagggactagtggaagactctggaggaaataaggcacagtagaatgcaatgacatccaaatactataaagttatcagagatactgcatagaaaaaaagaatcactacctgatatagt

SEQ ID NO: 255294 - DNA, 611 bp, Homo sapiens
agctgtggacccaggcatccctgtgctcttgggaacccaggaagccccgctcctcatgcaggctcagaaatgtctgctcctgctcctgggcctggcctctcctcactcctggcaatggctccaattctggagcaaagttgaggccaagcccaggtgctgtcacaacccagctgggtgtgcacaagcttggggcaatgctgtcacagcagccctctgccatttcagcccatgtggactgtggctgccaacaagcacaggaaggagcctgaggtagggctgagggcagcttagtgcagtcctgcaggtgcccctcagcaggaacaaccttgttgccacagatgatatgattgatggtggcaggaggcagacaggctcctgggcagaaagaagtgggtccccagtgaagttccacyttgaagccagggacagcctgaagcatgggggctgggctgtcagttctgggtggagttcacaggccccaagtgagaacttaggatgcttttcctgggcgtacccatggctacccatggaccaatcagcacacattttgtttcttctgaagcccataaaacccctggactcagccagagtcagagagacctcaggatgac

SEQ ID NO: 255295 - DNA, 517 bp, Homo sapiens
ttgttttccagcatcttaccatcttacgtgggagttctacctcagaatagattcaaataatcatcttcttagatcccaaaaacctatctgggagttatttcttcaccccaggatttatccagggggaatagctagtcttgagaaattgatgactctgctccagttgctttcactgagctctctcaatcttgctacctttgttgtaagtgattttattctacttattatgtctcactgtgttgcccaggctggtctcaaattcctsagctcaagagatcctcctgcctcagcctctaaagtaactgggactacaggtgccactgtgcctaactttgttgtaagtgattttatttttccccaggatctaagcttttgaaacataccttagagagaaactttgagttttatctatccctggagacaaggatcatggaatgatcaagctactttaacaggagaagggcaataagttcattagaaacctagaaaagaataagtggtttaagatgagatttta

SEQ ID NO: 255296 - DNA, 608 bp, Homo sapiens
tgcctaactttgttgtaagtgattttatttttccccaggatctaagcttttgaaacataccttagagagaaactttgagttttatctatccctggagacaaggatcatggaatgatcaagctactttaacaggagaagggcaataagttcattagaaacctagaaaagaataagtggtttaagatgagattttagacaaggctaaagaatagcaaaattgaagtaagcatgtaatgttagatggaagtcagattacatttcacacaaggaatagtcaactcattagcatgggtctgctatggaaatgtctcctggtcaagttcaaattcctcttttaaaatatatataattttaattgacaaataattgtgttgtgcttatttgtctgttgggtacaatgtagtgttttaagatgtaaacattgtaaaatattcaaatcagggtaattggcatatgcatcaccttaaatatttattcttttcttgtgatgagaacatttraaatcctctttcagctgttttgaaatacgcaatatattaactgtagtaaccatggtgtgcaatatatcaccagaatttattcctatctatctgaaactttgtaccctt

SEQ ID NO: 255297 - DNA, 540 bp, Homo sapiens
aatactgacgcttttattaagatgttttgcataaaatgaacacattcaagatttgaagctacatctctcatgactggagataatccaaatctgtatgatgttggaaaatagatggaagattagagcccattacagatccctgaattaatcatagcactttctagaagctctgctactggatgcacttcctaaaagcagcctgctctcctctcaaggctctgatgattttgcttcttttgcttggagcagccgtctcatcattcatcaagtgggcagcttcttgtctgttagaactcagctgatgyaccatgtttcacacgaagacttccctaaaccttagtccgctagccatgccaggtgcctttcctccaacttcctaatcaccgagtacaccacttttatagaattgatcacaatactaccagcatgtattgatttattttcatgcctcactatgttataaactgcttcaatagaataaccttgaccttaatctctctagtttctgaccttgtattttgcttagtatatacagcagga

SEQ ID NO: 255298 - DNA, 579 bp, Homo sapiens
taagtagttgttaatctcttactgtgcctaatttataaattaaactttaaactttatcctaggtttgtatctataggaaaaaacatagtatagttraggttcagtactatccagagtttcaggcatccactgaagggtcttgaaatgcatcccttgcagataagggggaactactgtatactaaaaaccactgaactgtacaatttaaatggatgaatactatggtaggtgaattatatcttaatgaagctattaaaattgttgaatgaatgaaatgaaagatcaacttgaagttaaggtgtcccctcatttagtaaggtagagatatttctgagaaggggaaccctgttacacacaattctttcataataatctcttcaaatttgcattttagcataaaatattgtcaattattcttcatttcttttaatatcttctgaatccacaggatgatgattgctgtagttaataagatctagtcacacaatctagctccagttctcctaggctgcagtatgtttataagattttctgccaacccaaattgccatctgattcctctgcccattccttaaaggt

SEQ ID NO: 255299 - DNA, 579 bp, Homo sapiens
taagtagttgttaatctcttactgtgcctaatttataaattaaactttaaactttatcctaggtttgtatctataggaaaaaacatagtatagttgaggttcagtactatccagagtttcaggcatccactgaagggtcttgaaatgcatcccttgcagataagggggaactactgtatactaaaaaccactgaactgtacaatttaaatggatgaatactatggtaggtgaattatatcttaatgaagctattaaaattgttgaatgaatgaaatgaaagatcaacttgaagttaaggtgtcccctcatttagtaaggtagagatatttctgagaaggggaaccctgttacacacwattctttcataataatctcttcaaatttgcattttagcataaaatattgtcaattattcttcatttcttttaatatcttctgaatccacaggatgatgattgctgtagttaataagatctagtcacacaatctagctccagttctcctaggctgcagtatgtttataagattttctgccaacccaaattgccatctgattcctctgcccattccttaaaggt

SEQ ID NO: 255300 - DNA, 580 bp, Homo sapiens
tagtaaggtagagatatttctgagaaggggaaccctgttacacacaattctttcataataatctcttcaaatttgcattttagcataaaatattgtcaattattcttcatttcttttaatatcttctgaatccacaggatgatgattgctgtagttaataagatctagtcacacaatctagctccagttctcctaggctgcagtatgtttataagattttctgccaacccaaattgccatctgattcctctgcccattccttaaaggtcctatggacccctaaaaaatcagctttaaacaacagctagaagtggctacatgatttcaatgaagttctacctttccctyctcctccatcattctgcttgttaacatgagtgatggctgtagacctagcagtcattttggataatgagtatcagttccacatcttaggagtgtcaggatcaagcggaaagaaaattatgaaactttttcagattaattatacaagatataaatttcaaactactaaattctaaaacatgggtacatctggtctaaactttgaggaaataactttcaagctatggaaagcata

SEQ ID NO: 255301 - DNA, 559 bp, Homo sapiens
aatcattacttgtatatttacattatgctctataatgtgcctggagtcatagaagaaacagaagtmaaaggtactattccttgtcatgaagctggaaagtcatgactgacccaagagaaactaaggagaaaattacatgacagtagcgtgtgtgtctgtgtgtgtgtgtatatatattgttttcttttgagatggagtctcactctgtcaccaggctggagtgcagtggcaccatctcagctcactgcaacctctgcctcccgggttcaagaaattctcctgcctcagccttctgagtagctgggactacaggcgtgtgccaccacgcctggctaatttttgtactttcagtagagacagggtttcacaatgttggccaggatggtctcgatctcttgacctcatgatccacctgcctgggactcccaaagtgctgggattacaggcgtgagccaccgcacccggccaacagtagtatatatttaccatagcatcacatgttaacaggaagcttcataagaatacaaaaatggaaaatattactgtgatgtgggatagt

SEQ ID NO: 255302 - DNA, 561 bp, Homo sapiens
gctctggcaacacagtgagactccatctctactaaaaattttaaaaattagctggctatggtggcacatgcttgtaatcttggctactcgggaggctgaggtgggaggattgcttgagcctgacaggtctaggctacagtgagctatgattgcaccactgccctccagccttggtgacagaggagaaactgccacccccacccctacccctctcccccactcaccaaaaaaaaaggaagggaagggaagggaagggaagggaagggaagggaagggaagggaagggaaaggaaaggaarggaagggaaaggaaaggaagagaaaaggagacatgttctccattcccagggaattcatagtccaagagctacaccacacacacacacacacacacacacacactccagattaaaatcctcaacttcaaaacctctgccttcttcacctctactgcagctcaagagaagacctcctgtcagcatgatatttatgtggaacagatggtcatcttttccatgggacatacccatcacctgtactaatcactcacatgcttcattc

SEQ ID NO: 255303 - DNA, 556 bp, Homo sapiens
tgaaacccatgagaaagccagtcaggcctgagaagcccaccagcatccggacacaggaagtgaccatgatagcaccctgcagccgaaggggagaagtgctcaggactgtgggcctcagcgcggcccaggccaccgtaacagtcccggaggctgcagcccctaggcgcggcccaggccaccgtgacagttctggatgctgcagcccakggtgaaatctggtgacccctaggcggttcttaggcagtgcaggggcaaagctggaccccaaaggaactgagagaaggagaactctgatttccctcctccctccagtctgtatttccaactgcgtgttggactttttcgctgaacaaagcttttcaggaaataggcttcaaaattaattattgattgtagtcacaatgatgatgatgttggcgactcccaacactagcacactcggtcgtgtattgaacatcttgctgcagcatttttctgttttcctagtttctattgcagaggtcgggaaactttctgggtttctttgttttgtttggttttgttttgtttgtttgtt

SEQ ID NO: 255304 - DNA, 556 bp, Homo sapiens
tgaaacccatgagaaagccagtcaggcctgagaagcccaccagcatccggacacaggaagtgaccatgatagcaccctgcagccgaaggggagaagtgctcaggactgtgggcctcagcgcggcccaggccaccgtaacagtcccggaggctgcagcccctaggcgcggcccaggccaccgtgacagttctggatgctgcagcccatggtgaaatctggtgacccctaggcggttcttaggcagtgcaggggcaaagctggaccccaaaggaactgagagaaggagaactctgatttccctcctccctccagtctgtatttccaactgcgtgttggackttttcgctgaacaaagcttttcaggaaataggcttcaaaattaattattgattgtagtcacaatgatgatgatgttggcgactcccaacactagcacactcggtcgtgtattgaacatcttgctgcagcatttttctgttttcctagtttctattgcagaggtcgggaaactttctgggtttctttgttttgtttggttttgttttgtttgtttgtt

SEQ ID NO: 255305 - DNA, 556 bp, Homo sapiens
tgaaacccatgagaaagccagtcaggcctgagaagcccaccagcatccggacacaggaagtgaccatgatagcaccctgcagccgaaggggagaagtgctcaggactgtgggcctcagcgcggcccaggccaccgtaacagtcccggaggctgcagcccctaggcgcggcccaggccaccgtgacagttctggatgctgcagcccatggtgaaatctggtgacccctaggcggttcttaggcagtgcaggggcaaagctggaccccaaaggaactgagagaaggagaactctgatttccctcctccctccagtctgtatttccaactgcgtgttggactttttcgctkaacaaagcttttcaggaaataggcttcaaaattaattattgattgtagtcacaatgatgatgatgttggcgactcccaacactagcacactcggtcgtgtattgaacatcttgctgcagcatttttctgttttcctagtttctattgcagaggtcgggaaactttctgggtttctttgttttgtttggttttgttttgtttgtttgtt

SEQ ID NO: 255306 - DNA, 559 bp, Homo sapiens
ggttgttattgatgtctaggcaaaaatggacattttctcctatcaggaatatacataggaatgcagcatataaacttatgaatgcactatgcacttaaacattttttgacaggaatcaggtccacagaactcctgtgtttgtaaggcacaaatctatagcagtaccacagtctgcatggaaagtcgtaaygaggcatcccagctagcagtaataacaaataaacttggactaacccatcctagaggaatgactgagttatctttccttttttctgcaaaatgaggtcattgaagagatgaaaccataaaatgtagagggagaaagtattataggtgactgtcagatggttaaataataaaaatgtcatgctattttctgaaatgtgtgacatttgtagtatttatctgttttttaacacctgtaatttgttgtgattactttcttaaatctagacaaatattcccttttgtgcacaattttatatgtgtaattttctgttctttttcttaaaggggacaccaaaaaccatctaagcttcaggttgtgcaaaactcactc

SEQ ID NO: 255307 - DNA, 545 bp, Homo sapiens
aaagttaacagtgtaacatgtattttggtaacttctaatcttgtggccttagacagtctagtccaaagacataaagaaagttcgcttttttaaaaaggaaagaaaaggggggaggcagaatttatattaaaaaaaagttatatggtaaattcttgtcctgaaataaattaactggttgtttaaagaaaaaaaagtttgttaatmagtcaaaaaattgagacatgttaaaaaattgtctgggaaagtcgtgagaaaaaaattataaaaaaaaatttttatgcaaaaaatattgtataatttaaaagtaatgaggcctcctgagtactatttaaaaaaaaaaaccagttcatgtgcaagatgtataagaaaagtaaaatatacctttggtaaaaaaaaaaattataaaggggcataaacgtggatttttacctacattaaaaggttaaaaaaattattgttttaaaagtttaagcaagctttaaaacgttaattataaaaaaaattctgtgtgtaaacatattagctaaggttaaaaaggtatcatc

SEQ ID NO: 255308 - DNA, 545 bp, Homo sapiens
aaagttaacagtgtaacatgtattttggtaacttctaatcttgtggccttagacagtctagtccaaagacataaagaaagttcgcttttttaaaaaggaaagaaaaggggggaggcagaatttatattaaaaaaaagttatatggtaaattcttgtcctgaaataaattaactggttgtttaaagaaaaaaaagtttgttaatcagtcaaaaaattgagacatgttaaaaaattgtctgggaaagtcgtgagaaaaaaattataaaaaaaaatttttatgcaaaaaatattgtataatttaaaagtaatgaggcctcctgagtactatttaaaaaaaaaaaccagttcatgtgcaagatgtataagaaaagtaaaatatacctttggtaaaaaaaaaaattataaaggggcataaacgtggatttttacctacattaaaaggttaaaaaaattattgttttaaaagtttaagcaagctttaaaacrttaattataaaaaaaattctgtgtgtaaacatattagctaaggttaaaaaggtatcatc

SEQ ID NO: 255309 - DNA, 579 bp, Homo sapiens
aattggtaaattcacaaaatatgtggaaattaaacaaaacattgataaacaaccaataagtcaaaaagaaaattacaagcaaacttagaaaaaaactttcagatgaatgcaaataaaaatacaacataccaaaagttatgggatacagagaaagcaatgcacagaggaaaatttatagctataaataactatactgagaaagaagaaagatctaaaattagcaacctaacttcacactttaaggaactagaaaagcaagagcaaactaaacccaaaactagaagaaggaaggaaataataaagattagaacagagataaatgaaatagagaacagaaaaacaatagagaaaaccaatgaaaccaaaagacgktttttttgaaaagatcaacaaaattgacaaatctttagctagactgattataaaatggagagaggtaaatgactaaaattagaaagtgggggcatttctactaaccctatagaaaaaggattataagagatactataaacaattgtacactgacaaattagataaccacaatgatatgaataaattcctaaaaacacaaattaccaa

SEQ ID NO: 255310 - DNA, 492 bp, Homo sapiens
ggtgacaggaagactggagtagaagggatcctttatcattcagggttccaccagagaaacagagccagtaggagagagagagatttgttacaagaaattggcttacatgattcaaggggcactcactaggcaagtctgaaatccrtggggagggtgatcaggaggggtaggctgaaaactctcagacaggagctgatgctgcagtccacaggccgaatttcttttttctcagctttgtttttaaggcatttcaaccaattagatcaagcctacccagattatctagggtaacccactttagtttaaatcacctgatagtagacattaatcacaactacaaattaccttcacagcaacacctagatcagtgtttgatgaataactgggtaccatagcttagccaattgatacataaaactgcctatcaccaggacttaaaagttacagtgcactatcttattctgcttgaacttttttataaccatgtgtgtg

SEQ ID NO: 255311 - DNA, 632 bp, Homo sapiens
ctgaagggtcatgcagggagtaaaagtctggggttgaaccctgacaggtcatgtgagccatgccatggggttagacaaatatcaggtgcagtagggatgcaattagattcaaaactaaacttcgctgacatttgtagaaattataaaaaattwtacattttaatagtccatttagataaaattaagtgaaaaaggcacattcagatattgctaattaaagtgtagttttgtatcaacacttctaaagaatagtttaacaaaatatttcagaaataactttaaaaatccataacctttggtcaagattttttattttgaggaatttatcctaagaaaaagtatagacatataaaaccatatgtttgtatctgcaaatatattatgtacaatgttaattacaatgtagctaaaaaaatagtgaaacatttaaataacccaaatattcaatattagtcttgattatctaaattacagcttatctatttaacagaagatcacgtaactgttgtaaatcatgttatgccatatgcattctctttggggactaaattgatgcttcgggggagttaaaatcttgctctttctatataaagtgcacagatataaataagtgcacaaacagatatacaatg

SEQ ID NO: 255312 - DNA, 609 bp, Homo sapiens
tgaaagcaaataggatgtgagtgggattaagtcctacttcagtcactcactaacttatttcttgggcaagttccccaaaccttctttgggtcttagatgataaacagaaatgaaaatatctgtgaggataaatatgaaaagaatcagaaatgggaagtaagcctcyaactcccttccctgctgccccaccagccttgctccaggggctcagatgcaactggtaccaaggctacagagacaatgtccaaggtaaggcatgcggacatgaaagtgaccttgaataccaggctaaggaattcagacaaaacccagtaaacgttctcttgaattaattcctaatatcagtaggctcaattttctacttttttttccttttcttatctttgctttcaaccctccacttttagaataggctaaggaaatttttaagttaaccccagggttcatattaattgaattttttgttatttcttgatataaagcttgctagagatgtctcctgcactaaaggacttattaacaggggaaatggctcattctgcagcctgccagcataattcagagcagcctggcacctgccttgttcaattaataagcaggtaagggtta

SEQ ID NO: 255313 - DNA, 609 bp, Homo sapiens
tgaaagcaaataggatgtgagtgggattaagtcctacttcagtcactcactaacttatttcttgggcaagttccccaaaccttctttgggtcttagatgataaacagaaatgaaaatatctgtgaggataaatatgaaaagaatcagaaatgggaagtaagcctctaactcccttccctgctgccccaccagccttgctccaggggctcagatgcaactggtaccaaggctacagagacaatgtccaaggtaaggcatgcggacatgaaagtgaccttgaataccaggctaaggaattcagacaaaacccagtaaacgttctcttgaattaattcctaatatcagtaggctcaattttctacttttttttccttttcttatctttgctttcaaccctccacttttagaataggctaaggaaatttttaagttaaccccagggttcatattaawtgaattttttgttatttcttgatataaagcttgctagagatgtctcctgcactaaaggacttattaacaggggaaatggctcattctgcagcctgccagcataattcagagcagcctggcacctgccttgttcaattaataagcaggtaagggtta

SEQ ID NO: 255314 - DNA, 564 bp, Homo sapiens
ggaagtaagcctctaactcccttccctgctgccccaccagccttgctccaggggctcagatgcaactggtaccaaggctacagagacaatgtccaaggtaaggcatgcggacatgaaagtgaccttgaataccaggctaaggaattcagacaaaacccagtaaacgttctcttgaattaattcctaatatcagtaggctcaattttctacttttttttccttttcttatctttgctttcaaccctccacttttagaataggctaaggaaatttttaagttaaccccagggttcatattaattgaattttttgttatttcttgatataaagcttgctagagatgtctcctgcactaaaggacttattaacaggggaaatggytcattctgcagcctgccagcataattcagagcagcctggcacctgccttgttcaattaataagcaggtaagggttatatctgatcacacattttcccttctcctctcctcatccaccttgaacaatcattagagccaaatgggttctgttctatgctcctgggaaaggcttcctcccaaagtc

SEQ ID NO: 255315 - DNA, 546 bp, Homo sapiens
  misc_feature (1)...(546): n = A,T,C or G
agaagcattttccttgaaaaccatcacaaaacraggatgctctctcaccactcctatccacctcngtattgtaagtgctagccagggcaatcaggcaagataaagtagtaaagggcatccaaatagtaacagaggaaatcagactacccttgttttcagatgacataattctgtaactagaaaaccccatagtctcagcccaaaagctccctaagctgataaacttaagcaaatcctcaggatagaaaaatcaatgtgcaaaaatcactaacattcttatacaccaacaacagacaagtcaagagccaaatcaggaatgtaatcccattagcaatggccacaaaaagaagacaatacctaggaatatggctaaccagggaggtaaaagatctctacaaggagaactacaaaacactgctccaggaaatcagatgacacaaatggaaaaacattccaagcacatggataggcagaattaatatgattaaaataaccataaagcccaaagcaatttacagattcaattctattcctattaaatgttga

SEQ ID NO: 255316 - DNA, 581 bp, Homo sapiens
gagaagacatgcatgcagccaacaatcacatggaaaaaaaaaggtcaatatcactgatcattggagaaatccaaatcaaaaccacaataagataccatctgacatcagtcagaatggtatcagaattattaaaaagtcaaaaaatagcagatgttggtgaggttttgaccctaaagatctagctacataatcagattaaatatgcaattgggccaggcacagtggttcattcctgtaatcctagcactttgggagcctggggcggctggatcgcttgagcccaagagttcragatcaatgtggccaacatggcaaaaccatacaaaaatacaaaaaattagccaggcctggtggtgcatgcctgtggtcccagctactcaggaggctaggtgggaggatcacctgagcttagggaggtcaaagctgtagtaagccatgatccagccatttcactccagcttgggtgacagtgacagcctgtctcaaaaaaaaaaatgcaattgaacaagtatgtgataaaagcatcttcaaagctacatgataggctaatgtacgtctacagtattattgtttcagtcact

SEQ ID NO: 255317 - DNA, 549 bp, Homo sapiens
tgatgacaaatgtactattcaatatgatttctctccactactccacaaatgtatgttttgtctcctattctataaagttattgagaaggatgcctcaaaaatactcagaaatacttccaatttctcagttatcacgttttccttaatatgaatatattatagttgtcctaatatacgtaacattgagagtctgtgttttaatactcaactctaacattttaattacatacctttagtatgtcaattcatcttcaccatgtgcaatgtttaatatactaaattaagaatgtttggcccacacatgggacctgcttgctcagcctgtgccagcagtagacatcactatatgataatagttttctttcttgctgagaaacctactttgaatctttctcagcacagtcaacaacttccaaacgattatttagcacagggaaraggcccatatttatcttctgaaggagaaaaatataggagcacaaaaaaaaactctgtgagactctaagaacacaagcctgaatgccccaacacatggaatgccatttttaa

SEQ ID NO: 255318 - DNA, 577 bp, Homo sapiens
ccctccaaactgttccaacctctgcctgttactcagttccaaagttacttccacattttcaggtatcctttcagtagtaccccactcctggtaccagtttactgttttagtccgttttcacactgctgataaagacataccagagactggaaatttacaaaggaaagaggtttaatagagaactcacagttccatgtggctggggaggcctaacaatcgtggcagaaggtgaaaggcacatctcacatggcggcagacaagagaagagggcttgcgcagagaaactctgtgttttaaaaaccatcagatctcataagacttattcactatcatgagaacagcatgagaaaacctgccyccatgattcaattacctcccactgggtccctcccacaaaacatggaaattcaagatgaggtttgggtaggagcacagccaaaccatatcaaggtggaaggcccagatgaaaggataaggaacttagtattgtggagaggctagagaacactggggaacatgaggaagaacagctttgatgtggcattgggggctgactaagatgatgggttagcctgag

SEQ ID NO: 255319 - DNA, 577 bp, Homo sapiens
ccctccaaactgttccaacctctgcctgttactcagttccaaagttacttccacattttcaggtatcctttcagtagtaccccactcctggtaccagtttactgttttagtccgttttcacactgctgataaagacataccagagactggaaatttacaaaggaaagaggtttaatagagaactcacagttccatgtggctggggaggcctaacaatcgtggcagaaggtgaaaggcacatctcacatggcggcagacaagagaagagggcttgcgcagagaaactctgtgttttaaaaaccatcagatctcataagacttattcactatcatgagaacagcatgagaaaacctgcccccatgattcaattacctcccactgggtccctcccacaaaacatggaaattcaagatgaggtttgggtaggagcacagccaaaccatatcaaggtggaaggcccagatgaaaggataaggaacttagtattgtggagagkctagagaacactggggaacatgaggaagaacagctttgatgtggcattgggggctgactaagatgatgggttagcctgag

SEQ ID NO: 255320 - DNA, 628 bp, Homo sapiens
tttgaaaatgtttttgatgttgacaaaacatgtaagtgaaaattttcactagtcatcttaaaaaactaagttttggaagtcaggccaaaggataaaaatggaggtatggtttggaaggtcataggctaccctaaactgacatttctaggacaaggctgtaaagaaacaaggaaatagaacaatgcattgagtattggagaactgcagcgtttaggtataggacaaaaaatatggagtgatacacagaggagctgattgagatgaagaggaagaatcagattgtgtgaaggatagacatcaaggtatggggaatttcaaaaatgatgggtaaagtagcattgtcaaatacagcaaaaacttcacaggaaattggcctgaaaaaggccactggattctgggattctacaacaggagagttgttggtgaaccttgaaaargaaatataattaggttagaaacagtacactagactaaggagcatcggaggggtttgagaaaattagcataattcacttattttgcaaataaaaagacagaagagtaatagagaaggcactagagttaatttccagtaacttctttttctctcaccttccctctctttatgtgtgtgtatgtgtgtttatag

SEQ ID NO: 255321 - DNA, 308 bp, Homo sapiens
agcttccactttggggtggggcagcactccatctggggtagctaattagtgatgatagctrtaatctgtaacttcactgctttgctgattgaaaatcctttcttaccttgtagagtgccagtttgtttagaaactacacacttcaaggttattcttctttaatgaaggatttttactttaaagtctcatttatcaagcagattaccaaataaattagaggaaggatggaaggatggaaagacagacgtgtaatttattttagtataatgctcagacacaaaatgtctgtatgagaaagaattttcaag

SEQ ID NO: 255322 - DNA, 331 bp, Homo sapiens
  misc_feature (1)...(331): n = A,T,C or G
ntatagtattccatggtgtatatgtgagtggctatgaaattattacagtggtacagtatgtattaattttatgcagttatgacttaatactgcatctttayatttgtttacattttcctcaactgagaatggcatcatgtaccatccataagtttgtgtcatacgttttgataaattttaactttttatgtttgtgtatattttatggtagtaaatgataaaatagactactatctatatatgtttcatgcattcatggcatatctaactttttcttaattttctcaatatttccaggctatgcagtttttctgccaggtttttcaaattt

SEQ ID NO: 255323 - DNA, 633 bp, Homo sapiens
atacataattgtagaaattgcaaactattttaaagtgacaaaatgaagatttcattgattgctagagccagagatctgagagccagggaggaatagactgtgaagaaaactttggatatgacagaattctgtatgttgattgtagtggtaacttcwtgggtgtatacatatgtcaaaattcattgaattgtacactttaaatggatattgtttattgtacttatacttcagtaaagatgattttaaaagaagaaataatttttaaaaaatggtttgtatctgatcttgacatattttccaagaaaaattagtaggctatttaagaaacataaacataatagaattaataggttgaatttgcaaggtgtggcctgtatttctagagcttcaactgtcatttctactacttcacacccattgggaaagtgggaggatcaagtatcactgatccctactgtcagaagggaggagaccaaggcacagaagacctcataatcaggacgactggtgcagatgagtgcactataagcaataagtggtccaagaaaacaatttcttgatccccttttacttttagaatgtgattattcacattttacagtgagataaagagatataactaaaggtcccatc

SEQ ID NO: 255324 - DNA, 636 bp, Homo sapiens
tgatgaaatttttacttgcatttgctcatttagacttcatttcatcctgaaaagtttgtgttatcattatctctcttttagagatgagaacaccaaagctaagagaaggtaaataatatcctaatgacttaagggttagtaagtacaacagctgggatttaaactgaagacattctgtaccatgatcacagatttcttatatgaactacagacggaagagctgttaggtatggaaagtacttggaatattattacaaaattgcagcaagaactagttttgcactagtaaagagatttgagttttattcaactgcatcacctccgaccccaaccattccttcaaacgacagcatctaatctctgatcaaaccactttcagayacagggacttcaaaaccttatgcttctcccattttaccatcttagcagtcaaaatttagaagtagagctgcccccaaataaactggctgcttccagagatgggaacacactaattcccaagtttacatttagttctaccacttcccaagggcaagttcaccagcctaattcttcatttctcctgtctcttcatctaggaaggcatagtttcttcctagaagataattaatgacaatctaaaggaagtatatgaaa

SEQ ID NO: 255325 - DNA, 618 bp, Homo sapiens
tagtagggtttttgtaatagtcaaatcacataacatatatgatagtatttggaaaattccaaaatcttaccggaatgaagaggatacagatagccaagagagaagcactataagcagccagttaggtaaagtgacccttactggcattytaatttcttcacccagttttcagtcccagagaagcttcattctttaaaatagctgtgtatactcaataaattcaaattgtctccttacattcttttatgaacttcctgtaggtgctatcctccaacatcccaccaaaactaataagtgccacattgccaaagacatggccaaccttgtcttattagccccaggaaaataatttgataggcttcatcactctttcttccttcacacactttcttctttcggttgccaagccaacacagttacctggatttccattctctgaactcttcgtgggattctttgctggctcttcctcatatccttttccttttcatgttggaatgccactggtcatgatctttaaactctgttctcttctctgtctacctattgcttttatggccccattcaatcacatctatttactaatgactccaaaattgatatccccatcctggatat

SEQ ID NO: 255326 - DNA, 605 bp, Homo sapiens
tacattcttttatgaacttcctgtaggtgctatcctccaacatcccaccaaaactaataagtgccacattgccaaagacatggccaaccttgtcttattagccccaggaaaataatttgataggcttcatcactctttcttccttcacacactttcttctttcggttgccaagccaacacagttacctggatttccattctctgaactcttcgtgggattctttgctggctcttcctcatatccttttccttttcatgttggaatgccactggtcatgatctttaaactctgttctcttctctgtctacctattgcttttatggccccattcaatcacatctatttactaatgactccaaaattgatatccccatcctggatatttaatcagaactccacactcaaatatccaactatctaatattttcacatagatatttattagaaattaaaaacgatatttccaaaacaayatcagaagcatgatccaaaaaagtataaagttgataaattgaatgtcattaaaatgaaaaaccattgtaccacaaaatgcttaattaaggaggcatgttcttggcatatttgagtaagaacctgaaaattc

SEQ ID NO: 255327 - DNA, 595 bp, Homo sapiens
tttcaaaagctctacttggggccaggcatggtggctcatgcctgtaatcccagcacttagggaggccaagacgggcagaccacgagatcaggagatcaagaccatcctggccaacatgstgaaacctcgtctctaccaaaatacaaaaaatcagccaggcatggtggtgcgcacctgtagtcccagctacttgggaggctgaggcaggggaattgcttgaatctgggaggcggagattgcagtgagccaagattttgccactgcactccagcctggcgacagagtgagacactgtgtcaaacaacaacaataacaacaacaacaacaaaaatgctctacttggttcctttcttactcagatctttgttcttccttccttcttaaacatttttagaggtataattcatacccccaaaactgcacatatttaatgtccacatcttgatgagtttggacatacgggacatatgcacacaccaacgataccatcactgtaacccaggtactaaacatatccattacctccaaattttccttgtgttcttttgtgtgtgaggttttttgttttttttttttctgtcagttggagtttttt

SEQ ID NO: 255328 - DNA, 593 bp, Homo sapiens
ctaacgcagtgacgtacatgccatcactatgacgatgccccaacattcatatcttcacccctgccctctcgtctgagctccggattcatgtacttaactgtgtaagtaatgatagatgaggcctttaattagatgccgcataagaatcccagtattgagatgtccaacatrgaactcttgattttctcctgctcctaaactctttctcattgcacccaaccttcatccttcctggcattacccccaaagaaaaggggcctcttcacccacctgtgggctcaggccagaaacttgggagttgcccttaatttctgcccttccttcattcctgttattcagtctatgagcaagtcctgttgattctacatctaaaatgcaccttaagctgttttattctcctggtctcctcttgctaccatcccaacccaagtcatcttatctactgcccatcttattgcagtggctgcctcgctgatctctctgctgcaaccccatcccaacaatccattcatcagagagtagctagagtgatctttaaaacacaaaacaaaaccagttcatgtcttttccctgcttaaaccttttaatgactt

SEQ ID NO: 255329 - DNA, 573 bp, Homo sapiens
tttacactttactttgggcccagtgacagtgagggttaggggtgggtgggtttcgggttaagtgacaaatagcatatctgctgactgcctatgatgaatgctttttgcctaagtaaattccaaagctatctatctgattttgggttagctactatttgtgtctgtcttctttctttttagtacaatggaaaaagaaactgctcaccctcatgtagacacaatagaaggactacagaagtatttgggcctaaaaggcacacttggtactgctcggaacaattcattctggttttattccacagtgattttaaacccatcagaggcagcttctcaggacaaacatttcgtatttctacttgctctcttttcttgctcacaayattgtcatcattgttagatgcccactttagaataacctttactggagagaaagtgaataagacaaaggaagaaagataagacaccaaaagaggctggttgggtcggagtgcaggagaggtctgtatgaacaatctctgctcctgcctgttttaattatctcccagcttagttcaaggctagcttcctgtagtt

SEQ ID NO: 255330 - DNA, 573 bp, Homo sapiens
tttacactttactttgggcccagtgacagtgagggttaggggtgggtgggtttcgggttaagtgacaaatagcatatctgctgactgcctatgatgaatgctttttgcctaagtaaattccaaagctatctatctgattttgggttagctactatttgtgtctgtcttctttctttttagtacaatggaaaaagaaactgctcaccctcatgtagacacaatagaaggactacagaagtatttgggcctaaaaggcacacttggtactgctcggaacaattcattctggttttattccacagtgattttaaacccatcagaggcagcttctcaggacaaacatttcgtatttctacttgctctcttttcttgctcacaacattgtcatcattgttagatgcccactttagaataacctttaytggagagaaagtgaataagacaaaggaagaaagataagacaccaaaagaggctggttgggtcggagtgcaggagaggtctgtatgaacaatctctgctcctgcctgttttaattatctcccagcttagttcaaggctagcttcctgtagtt

SEQ ID NO: 255331 - DNA, 600 bp, Homo sapiens
atgtggtactctaataattatttggctaatgcttataaaagttactctgattatattagcctgctagagttgccataacagagtaccacagatgaatggtataaataacagaaattaagtttttcacagttctgggggctcaagtccatgatcaaggtgctggcagggttggattcctatgcaacctctctccttggctttcaggcaaccattatcttagtgtgtcctcacatgcttgtccttctatccacacacatccttgttgtcatttcccttcttataaggacacagttttatcagattaggaccataccattatgacttcatttaagcttcattgcctttttaaaaggccctgtctccaaagataatcacattgggggtaggacttcaacatatgaattgctggagttggggggacaccattcagtctgatcatctgaaaatataaatcttttatttaaaggcataaaaarcagttgaatttccaagtggattaatattatcattgtaaaagtcctagctagactggattcatttatattagtatgtgatgcctattattacaaagtccaagaccatattttataaacaggtgca

SEQ ID NO: 255332 - DNA, 629 bp, Homo sapiens
tcaatttaaactataacacacaaaaaggatttcagtaagacacaagtaagaatttcattttaatttaggactagatagcactgacatagttattcatacatagatgttggaacttttcatggtggtgggagattgctttagaatagaacaagtatccaactccctaatttaaatgaagttaattttaacagtaacttcttgcttggacatagtaaatacttttgctctaaaaattactctttcccctaaataagtttcccagtgcaacaacagaaaaccaacatactagctcaacacygtgacttttcagaaggatttttgcaatggaattaaacacattttaaactgttttgagagactctatcaaagtttattgtctagtatgaacatattttttaaatttcacaaatgaatatgagctgttgacaaaggattctctgactacacctatggaaaaagaatcttgggtaaaataagctaagtagcctggaatacgttttgtttgttgacaatattttcaatgttataatcaattaataaacagacatggcctctattaatgctttcatttgaattcattcaactgtgtgtgtacggctcagccaatgtagagattaccttctgatatg

SEQ ID NO: 255333 - DNA, 629 bp, Homo sapiens
tcaatttaaactataacacacaaaaaggatttcagtaagacacaagtaagaatttcattttaatttaggactagatagcactgacatagttattcatacatagatgttggaacttttcatggtggtgggagattgctttagaatagaacaagtatccaactccctaatttaaatgaagttaattttaacagtaacttcttgcttggacatagtaaatacttttgctctaaaaattactctttcccctaaataagtttcccagtgcaacaacagaaaaccaacatactagctcaacaccgtgacttttcagaaggatttttgcaatggaattaaacacattttaaactgttttgagagactctatcaaagtttattgtctagtatgaacatattttttaaatttcacaaatgaatatgagctgttgacaaaggattctctgactacacctatggaaaaagaatcttgggtaaaataagctaagtagcctggaatacgttttgtttgttgacaatattttcaatgttataatcaattaatmaacagacatggcctctattaatgctttcatttgaattcattcaactgtgtgtgtacggctcagccaatgtagagattaccttctgatatg

SEQ ID NO: 255334 - DNA, 549 bp, Homo sapiens
ctaggtcagcctaggcaaatagagatggaggcacatctgagcacactgagaatcttcctgatacttctactgcactgatcgtgttcaaaagacagattcaaatgccatagcaytgatgtttcttcatgttattccactagcctggagaaaagtgattttttttccaatgtttccaaccctatttccttatgctttgatgaggtgaaactgctttttttggggggcggagcgggggggctgcctctgttagatcaaggctacctagtttgggagaaagactgggaggttagttttatcaaaaaaaaaaaaaaactctcattcatccttcaagcctcatttgaaagagttcttcctctgattatctcacaatttcatatatgcatttatgctttaattctcacatcattgcattatagtttatctgtttgtctcattcgctggaccccaagctatgtgaaaatgggaccccataattcacctttgccaatctggtattatctgcaatggcgagtagatggcacatatagaaatttaaaaaaaaaaaaaaac

SEQ ID NO: 255335 - DNA, 622 bp, Homo sapiens
gctacaaaggagctaggtcagcctaggcaaatagagatggaggcacatctgagcacactgagaatcttcctgatacttctactgcactgatcgtgttcaaaagacagattcaaatgccatagcattgatgtttcttcatgttattccactagcctggagaaaagtgattttttttccaatgtttccaaccctatttccttatgctttgatgaggtgaaactgctttttttggggggcggagcgggggggctgcctctgttagatcaaggctacctagtttgggagaaagactgggaggttagttttatcaaaaaaaaaaaaaaactctcattcatccttcaagcctcatttgaaagagttcttcctctgattatctcacaatttcatatatgcatttatgctttaattctcacatcattgcattatagtttatctgtttgtctcattcgctggaccccaagctatgtgaaaatgggaccccataattcacctttgccaatctggtattatctgcaatggcgagtagatggcacatatagaaattwaaaaaaaaaaaaaaactttgtcaaatgaaaagaagaatatatgcataaatggataaatgggagtataaatgaactta

SEQ ID NO: 255336 - DNA, 622 bp, Homo sapiens
gctacaaaggagctaggtcagcctaggcaaatagagatggaggcacatctgagcacactgagaatcttcctgatacttctactgcactgatcgtgttcaaaagacagattcaaatgccatagcattgatgtttcttcatgttattccactagcctggagaaaagtgattttttttccaatgtttccaaccctatttccttatgctttgatgaggtgaaactgctttttttggggggcggagcgggggggctgcctctgttagatcaaggctacctagtttgggagaaagactgggaggttagttttatcaaaaaaaaaaaaaaactctcattcatccttcaagcctcatttgaaagagttcttcctctgattatctcacaatttcatatatgcatttatgctttaattctcacatcattgcattatagtttatctgtttgtctcattcgctggaccccaagctatgtgaaaatgggaccccataattcacctttgccaatctggtattatctgcaatggcgagtagatggcacatatagaaatttaaaaaaaaaaaaaaactttgtcaaatgaaaagaagaatatrtgcataaatggataaatgggagtataaatgaactta

SEQ ID NO: 255337 - DNA, 616 bp, Homo sapiens
atatctttgtcctttagcaaagtgctgaacacaaagtaaacattcataaaggtttgttgaatgaatgagagaatgaagaaatcataatttttctagccttacggctatgccmaatgtaaaaagtgactttttttccaattcatactttattaactaccatgttaggttctaataaatctttgaatatctttgaagagtcattcacatcgacttctctgtacaaattcagtgctattacaggcagtagaggctttaaaaatcttaattagagagcctaggtggcatttgatgggattaaataccatagtcaacagataaggatccacaggacctaacaaatattgaggaatgattcgtaagcacattggaaaactaagaaatcatattagtttaaaattcaaaattaattctatcatacacataccatttttcccatgtaaagaaatacatctattaattttgaaatataaataagaaaacttctcaagctaaatctcagcttctccctcctcaaactctgatgttgcagggtgagttgctcagggggagttgctttatcaaatgcatttctcggaataagtttcttttcctggtttaaaaaaacaaatctaaacca

SEQ ID NO: 255338 - DNA, 596 bp, Homo sapiens
gctacattttttaacaaattggtcctttgagcaagatgaattttaatggattggtttattaacctaaaggttgaaccagactgagagtaactgaatgatttgctcataattagtattatttataattattttacttgggaaaaaatatcaccttaaatgtcaggatgttttttaattgcttcagatgagattcaaaataattgacttcgcaaatttatttttaaaaactcatttaaaaacatctgaagctgttgacagtctgtctagaagaggcaagatattgatattcattactaggaacagggcagaaattgatccatcatttttttaaccacatgaattgtgcattgtggtcacttctggactctgaaatagctgcaatgctsatagagtgatgcgtttgttcctctcccccattaaatctgctatctaagcgaagatgctgtgtgtgtggatgtaggtattatgtttcttgctcaaatacatatttacatatatttttattaaaaggggaataggcacatgggcgaaaaaaggatgtatatatgtatttagtatttttagaaaaatacaaatagtctatgtacacattgcgc

SEQ ID NO: 255339 - DNA, 634 bp, Homo sapiens
acactgctggatataaatagaagtataaatagttaggcagttaaacacatccattctgatttatcagtccttatcttcagaagcaaaattattggggaaattgggggaggaagaattgcaacaaaggaaaacccaaaaacccaaatcacggtgaaattggtcctgtaaacacatctgccactttccagaaaatatcataataactttgaaaacaattaggcttacagaaaacaaaacaaacccttgtttatctctttactcatcactcaacagtaagttgttccaatcactcaaattcttgctgcctcacctgtaagctcagccttctaatttgacagcagagaccagttacaagagatatgggaattgagggccagcctattaattcatcattgaagaacctcattcatttcaggacaaaaggtctccttcctccacctcagcccccttttccatttttatcactcttaaaggaaactaaggggaagagaaggagaatgaaataactcgaagggatattgaatggcatataagcaaagccccaggtcygtgagattgcctaacagacacatacctatagatacaagcttgtgcggactaataccacaagttcggatctacgggtttgtggcaa

SEQ ID NO: 255340 - DNA, 599 bp, Homo sapiens
tcactcaaattcttgctgcctcacctgtaagctcagccttctaatttgacagcagagaccagttacaagagatatgggaattgagggccagcctattaattcatcattgaagaacctcattcatttcaggacaaaaggtctccttcctccacctcagcccccttttccatttttatcactcttaaaggaaactaaggggaagagaaggagaatgaaataactcgaagggatattgaatggcatataagcaaagccccaggtccgtgagattgcctaacagacacatacctatagatacaagcttgtgcggactaataccacaagttcggatctacgggtttgtggcaacaggcctcaatatcttctctcttttggggctgtgacatgtctgaaaataaaatattacaaccattaatccaataaaagagtctaccattcaattgttttatgccataaatggaaaggacttcgtcccactctcacaaaagcaaaagttaagcaatatcttctatgttctccccarcgtgcttcccttggtttccactttttccacaaatccagtggactttaggtaaacctcatcattttactgtttatat

SEQ ID NO: 255341 - DNA, 371 bp, Homo sapiens
aaaagaatatttttttcttgtcctagagtcagcaaacatactgccaggtaatytgagaggcccacagggagactccaagaagacaagcccaatagtcccataccaaaatctttcatcttgaaggccattaatgtgccacatcttcactacatttccaaatgcctactgcctttgggtggcatcacagcaataaacacaggacttaattaaaagtcatttccatttcattgctaaagccaaggaaatctggtaccacagccttgaatttataagtaggaaaatggtacaaaaaaagtgagggtgggaactaatttaaaacactaaaagtcactcaacactgccagtgggtggtgcaggatattgccatggca

SEQ ID NO: 255342 - DNA, 371 bp, Homo sapiens
aaaagaatatttttttcttgtcctagagtcagcaaacatactgccaggtaatctgagaggcccacagggagactccaagaagacaagcccaatagtcccataccaaaatctttcatcttgaaggccattaatgtgccacatcttcactacatttccaaatgcctactgcctttgggtggcatcacagcaataaacacaggacttaattaaaagtcatttccatttcattgctaaagccaaggaaatmtggtaccacagccttgaatttataagtaggaaaatggtacaaaaaaagtgagggtgggaactaatttaaaacactaaaagtcactcaacactgccagtgggtggtgcaggatattgccatggca

SEQ ID NO: 255343 - DNA, 565 bp, Homo sapiens
aggaaaacaaattgaaattagtcaacaaatgcaaccaaatttaatagaaatctcttgcccatgtataaggttccaaatagggtatctcatactcatctaaaatgaatttctatgtcaccacatagatcaataacatttctatgaactaattcagtacaaaaatattattctgccttaagagtatctgctctctctctcttgttccctctccctctctttcatttctctgtctgtctgtctacctatgagacagagctcagtattgtctcttttataccacaaactccaaaagggtagaaactctacgcatcaaaaatcatgttattctggcgtgcatatggaaaataagtgcaaaataaatgctttgtgatgatgaatctgcaaatatgttgatgctttatttgcatattgccatagatgctgaatgtataatttgtgyattatgccaatttaagggagtgggggctgcgctgtgttgtgttttgcacattttttaaatgcaaaaacaccagagcaataaattaaacattttaattaagtgttgtagcatactgctagtagaatt

SEQ ID NO: 255344 - DNA, 568 bp, Homo sapiens
attgtgtagcctctgccacaagaaggctgatcttctaggtcacataaatatgaagccccagctggccaagtgaatcaggatacaagtatagctattaggagatgcatgkcttagtttcacttctctaaagaaaacagaaattcatacaaagctctgccatagggtcaacttcatgggttgaataaatgaatgaatggtcattcagtcattcaacaagtacacctgctgttttcaagtcactgctgtcagtgttacgaagagaaatcctttttaaagttcttcattgtatgtacaagttatatataaagagtcactttgactgaatgttgctgctagatacttcagcacttggatacctgcacattctgctgaaggaaactcaccctgggacaatcagggttagagaagcaatggtatagtaacacatccatttagtacagtccgcagaaataattttaacacatatgaaacacaaccatgtctaatgaagaaagtaaacctcttttaaatgaattgctaatattatagtctacttagaataaatattttcagacaaagacaagcccag

SEQ ID NO: 255345 - DNA, 529 bp, Homo sapiens
atactagcagctataacaatccacgatgtataacctccttcaagtcctcattggtgattcaaaaaaattattctctatattagttcattttcatgctgctataaagaactgcctgtgactaagyaatttataaggaaaagaggtttaattgattcacagttccacatggctggggaggcctcgggaaacttacaatcatggcaccaggcacttcttcacagggcagcaggagagagaatgagtgctgggtgaagggggaggccccttataaaaccatcagatctcatgagaactcactcactatcatgagaacagcatgggtggaaaagacctccacgattcaattacctcccactgggtccctcccatgtcacatggggattatgggattacaattcaagatgagatttgaatggtggtacaacatcaaacattatcattctccaacagctcttaaaggaaaagatgaaagtgataaacctgctggggcaaaaagagaattcactttaaggaagctttggatttgttt

SEQ ID NO: 255346 - DNA, 529 bp, Homo sapiens
atactagcagctataacaatccacgatgtataacctccttcaagtcctcattggtgattcaaaaaaattattctctatattagttcattttcatgctgctataaagaactgcctgtgactaagtaatttataaggaaaagaggtttaattgattcacagttccacatggctggggaggcctcgggaaacttacaatcatggcaccaggcacttcttcacagggcagcaggagagagaatgagtgctgggtgaagggggaggccccttataaaaccatcagatctcatgagaactcactcactatcatgagaacagcatgggtggaaaagacctccaygattcaattacctcccactgggtccctcccatgtcacatggggattatgggattacaattcaagatgagatttgaatggtggtacaacatcaaacattatcattctccaacagctcttaaaggaaaagatgaaagtgataaacctgctggggcaaaaagagaattcactttaaggaagctttggatttgttt

SEQ ID NO: 255347 - DNA, 568 bp, Homo sapiens
ttggttctgtaacttcattcatgaaaacaatgatacatttgcttgtttttgctcttggccttggcttgttttagctatgagcattatgtgatgagcatgaatatctgtgatatggcagggaatatgcacaatccaagagagacgttttcctgataggaactgttcttatttattccagagaagagaaggctgggaggtagttgtctttaaggacatgaagggattgagtttaaaagaatggaggccggctgttctttctctccacagggaacaagagaaaatgggattaaactacagcgtgagggatttggaatagaaataagaatttcccaactgtgtggaatctcaaacactgaaatscattttgaaggaagcatgtggacattagttttattttgatgcctttaaaatatggaacggcacattttcactatgtggtttttacatggatgaagaagagcagatttgacgacagagttccaggattctcttgatctatgagtagaatctaaaagcgatgcatggtggtaactgtgagaagtaactattttttatagtggttattttt

SEQ ID NO: 255348 - DNA, 583 bp, Homo sapiens
agcacaacactggaagataaatgctaatacgaggtaagctcagaatgacatgaaagcgcctaggtggggaagctagtcttagcgctggtagaggttggggtgaaaactttccagagaaaatgacttctaggatgggatgtgaaggatgagggatggagtttggaaggtgtagtggagaaagtactaggtagaagctgaagtgtgtgagaaagcccagaagatagagggaacattaagaaaaggcaggtggatggcacgagcctagaatcacagaggggctgaagagttgatgagtccagagaggactgttggagccaggatcagggcatgaagggctttaggtgtcacgatatctcaagggcaatgggaagccagtgaagagtttgaagccatggaataatacaatcatattygtggtttagagagatttccccggctgccccttggcagtgtggagaggaaaactggaggcatggtgctgtagtccaggtgagaaatgagtgttgttctttaatgcagtagcatagatggagagaagtagacatatttgaacaatggaaagagaaaaaaaatcaaaagatta

SEQ ID NO: 255349 - DNA, 616 bp, Homo sapiens
ggttgctgcaaatagcgaattaacaaatactaaagcattgcccctaggggaaatacagggttcgtttcctaaaagcctctggccacatttttgtcaactgatcaatacacaacattgttttatgtgtgtttctgtttaaagacatcttatttaatatgtattgttgattcattaacaatgaactcatagctaaaagccctgtaactcatgccrgaatgaagtttattagccacatattttcctcatcaggcacatcacaaccttcttatgcttaggaactctagccagcacttcaacattacacttgggagtcattttaaacagcaaaatcatcaacagaaagcatacaaatgcaaataacagtggcatcaggtgacacaaatttttcaccactctgcacatgtccataaatgattacagaagttctgcaagtattaatttggggatttcaaatacattttagtgagtgggctaactcacaatatggaatctatggataatgaggattgactgtacctataaacacatgcaatgattgtgaacttcttggctgtcaccttgagtcaataagaaaataagtataatgatatttgcatttgaaatgataaaaggaatt

SEQ ID NO: 255350 - DNA, 577 bp, Homo sapiens
aatgtatttcttagttaaaaaaaaaacttcaaaaactgtactaagagatgtagctctgtaggaaggtacaactgtagaagtttagtaacatcaaagcaaagcaatttatcaatttcatgamtatgatggttttatttacatctaatgaacaatatagaaaagggtacatcaaggcccagccatttaacaagggacatttctccccagtaagttttgttttgttgcaggaaaattgaatgtgattactctaaaatttaaaaaaaaaattaggtaatgaaaataagtcagttctgtactgataagcattaaaatatttcttcctgaggtattttctatatacttatggtttaatgaaccctttaatttctggtgattcccaacatgctaaggtaacttttcaaaagctaagcctcaactgcagcctagtgtcattggctgttgaacgtgtttcagattggatcatgtgcactgaagcaacagcagaactgaaaggtgaaaattctgtagatgctaaaagaaacctctatggaacttacacgaagggtataaaggagacctgagattaacatttcctaaa

SEQ ID NO: 255351 - DNA, 577 bp, Homo sapiens
aatgtatttcttagttaaaaaaaaaacttcaaaaactgtactaagagatgtagctctgtaggaaggtacaactgtagaagtttagtaacatcaaagcaaagcaatttatcaatttcatgactatgatggttttatttacatctaatgaacaatatagaaaagggtacatcaaggcccagccatttaacaagggacatttctccccagtaagttttgttttgttgcaggaaaattgaatgtgattactctaaaatttwaaaaaaaaattaggtaatgaaaataagtcagttctgtactgataagcattaaaatatttcttcctgaggtattttctatatacttatggtttaatgaaccctttaatttctggtgattcccaacatgctaaggtaacttttcaaaagctaagcctcaactgcagcctagtgtcattggctgttgaacgtgtttcagattggatcatgtgcactgaagcaacagcagaactgaaaggtgaaaattctgtagatgctaaaagaaacctctatggaacttacacgaagggtataaaggagacctgagattaacatttcctaaa

SEQ ID NO: 255352 - DNA, 534 bp, Homo sapiens
tacagaagtttggcattagggtaaaagtcaaagtgactcggcaatatgaaccttaagaaataagaatttgcttaagaatttccagagtcagtatgatagttgtatcatgagagattatattccattagaaatgctgttaaaaaaacataatgtggcccttgacttcttaaagtctacatcctaaaggccgggtacggtggctcacgcctgtaatcccagcactgtgggaggccaaggcaagcagatcacctgaggtcaggagttcgagaccagctgggccaacasggcaaaaacccatctctactaaaaatacaaaaattagctgggcgtggtggcaggtgcctgtaatcccagctacttgggagactgaggcgggagaattgcttgaacccgggaggtggaggttgcagtgagctgagattgcaccattgcactccagcctgggctacaagaggaacactccgtcgcaaaataaataaataaatagtaaagacacctattctggtcactgtgtcatttattccctagttctta

SEQ ID NO: 255353 - DNA, 502 bp, Homo sapiens
ttacaaatattttctctcaattcctgttgtgtattttttcttagtagtgactttcaaagggcaaaagttttaaattttcagcaagtccaatttaccatttttttcttatagttctttgttttggtatcttatctttgttatctttgcctatcctcaaagttgtgaagattttcttctatgtttttctctaaaggatttagaactttagcttttacatcaatgttcattattaacttgagttaatttttgtgtatggtatcaggtaaggatcaggattaattcttttctatayagtcatttaattgttctaacaccatttgttgaaatgacttccctccacccccattgagtttccttggcatttttgtccaaaaaaaaaaatccattgaccacgtaagtggtgggtctattttcgactcttttctgttccattgatctgcttgtctattctctctttaacaccacgctgtctttgttattgtgcctatatagtgaatcttgc

SEQ ID NO: 255354 - DNA, 519 bp, Homo sapiens
tgaggccctgtaaaaggagtgagttaggacagatgcagcaagatattaggacagatttcgcccattattcaggctgcacaacacagaaggaaacttgatttcaataagacccaattcttaacagtcttttctacccacttttacccataacttttccaaatttggttcaaattgtgcagagaaacaataaaatttttaaaaaggataaactggctagttaaaagtaaatggcatttaattaaaacaaatcttgcaaattcatgaaaaaacaaaaagytatgtgatggtaaaccttagggcagcgtacagtgccactgtcctttgcagttttgagtgtatttcatttgtacattggaagtaggtacttgtcatattattaacaattactctacttagttgtacactcagcatttggcatcagaataatcttgtgtagtcacagggttttcattttctttctgtattttttaagcatgtttctgagtggtggttcacataagctttcaattttaaataaca

SEQ ID NO: 255355 - DNA, 589 bp, Homo sapiens
gctgctgtagggagctatatcccagccacgctgctatccttccaccctaacttctcaggcgagtcctcccactgggacaacaggctcttgaaacttcttgcagcacatgctgttgcccttacttggttggacgcccctgagtcaggcaggcccataccattctaattttgcttgttatttcttttatgaaatccaagattgagataaagagggaagggtgcacatccacaagactgctgtggcctcctaaagaattgttctatctgaacgaatgtaatgagaaaactgctaagaaactaaatggcaattcacacactcacaaaggttcactcaaaagtcttacatccatagtctgtaaaatttctatttgtcatagaaaacaaacatagaaggcactttcttttagtggtttttcagttaacygagcttccaaaatattatgttcatcaacacgttacacagaggactattgtattttccttatgggcataacataaataaaatataaataataagttatttacattgtaatataaatatccatctaacaaacatttattttgtttgtttttattattattattataac

SEQ ID NO: 255356 - DNA, 589 bp, Homo sapiens
gctgctgtagggagctatatcccagccacgctgctatccttccaccctaacttctcaggcgagtcctcccactgggacaacaggctcttgaaacttcttgcagcacatgctgttgcccttacttggttggacgcccctgagtcaggcaggcccataccattctaattttgcttgttatttcttttatgaaatccaagattgagataaagagggaagggtgcacatccacaagactgctgtggcctcctaaagaattgttctatctgaacgaatgtaatgagaaaactgctaagaaactaaatggcaattcacacactcacaaaggttcactcaaaagtcttacatccatagtctgtaaaatttctatttgtcatagaaaacaaacatagaaggcactttcttttagtggtttttcagttaactgagcttccaaaatattatgttcatcaacacgttacacagaggactattgtattttccttatgggcatawcataaataaaatataaataataagttatttacattgtaatataaatatccatctaacaaacatttattttgtttgtttttattattattattataac

SEQ ID NO: 255357 - DNA, 589 bp, Homo sapiens
gctgctgtagggagctatatcccagccacgctgctatccttccaccctaacttctcaggcgagtcctcccactgggacaacaggctcttgaaacttcttgcagcacatgctgttgcccttacttggttggacgcccctgagtcaggcaggcccataccattctaattttgcttgttatttcttttatgaaatccaagattgagataaagagggaagggtgcacatccacaagactgctgtggcctcctaaagaattgttctatctgaacgaatgtaatgagaaaactgctaagaaactaaatggcaattcacacactcacaaaggttcactcaaaagtcttacatccatagtctgtaaaatttctatttgtcatagaaaacaaacatagaaggcactttcttttagtggtttttcagttaactgagcttccaaaatattatgttcatcaacacgttacacagaggactattgtattttccttatgggcataacataaataaaatataaataataagttatttrcattgtaatataaatatccatctaacaaacatttattttgtttgtttttattattattattataac

SEQ ID NO: 255358 - DNA, 478 bp, Homo sapiens
aaggtattcacaaagaacacaggttacaacccaattcttgagggacccttgagtgagccagatgcagtgtgcaagggagaaggaagaaygttgctagaatgaatgtcaactttacagttgggctgtgcctcttggtcatgaccttgaggctcggagaattggctcagacagttctgaacagagtagccattttacagacagcccacagcccagcaggtcaccgctctctaactctgccatcatgacaccgccatctgcagccactgagctgagatttctcaagaccaaatttatcacgcccgagattccattcttacataagaatcacctgttgctgatgcataaatttcggcacctagcagagccaagggtaatcaggatttaaaaggaagaggcctgaataaattcaagcagatttcctctctgtgggactgagtcttgaaaaacctttgtgccctcatctgcccctcaacagaga

SEQ ID NO: 255359 - DNA, 478 bp, Homo sapiens
aaggtattcacaaagaacacaggttacaacccaattcttgagggacccttgagtgagccagatgcagtgtgcaagggagaaggaagaacgttgctagaatgaatgtcaactttacagttgggctgtgccycttggtcatgaccttgaggctcggagaattggctcagacagttctgaacagagtagccattttacagacagcccacagcccagcaggtcaccgctctctaactctgccatcatgacaccgccatctgcagccactgagctgagatttctcaagaccaaatttatcacgcccgagattccattcttacataagaatcacctgttgctgatgcataaatttcggcacctagcagagccaagggtaatcaggatttaaaaggaagaggcctgaataaattcaagcagatttcctctctgtgggactgagtcttgaaaaacctttgtgccctcatctgcccctcaacagaga

SEQ ID NO: 255360 - DNA, 478 bp, Homo sapiens
aaggtattcacaaagaacacaggttacaacccaattcttgagggacccttgagtgagccagatgcagtgtgcaagggagaaggaagaacgttgctagaatgaatgtcaactttacagttgggctgtgcctcttggtcatgaccttgaggctcggagaattggctcagacagttctgaacagagtagccattttacagacagcccacagcccagcaggtcaccgctctctaactctgccatcatgacaccgccatctgcagccactgagctgagatttctcaagaccaaatttatcacgccmgagattccattcttacataagaatcacctgttgctgatgcataaatttcggcacctagcagagccaagggtaatcaggatttaaaaggaagaggcctgaataaattcaagcagatttcctctctgtgggactgagtcttgaaaaacctttgtgccctcatctgcccctcaacagaga

SEQ ID NO: 255361 - DNA, 478 bp, Homo sapiens
aaggtattcacaaagaacacaggttacaacccaattcttgagggacccttgagtgagccagatgcagtgtgcaagggagaaggaagaacgttgctagaatgaatgtcaactttacagttgggctgtgcctcttggtcatgaccttgaggctcggagaattggctcagacagttctgaacagagtagccattttacagacagcccacagcccagcaggtcaccgctctctaactctgccatcatgacaccgccatctgcagccactgagctgagatttctcaagaccaaatttatcacgcccgmgattccattcttacataagaatcacctgttgctgatgcataaatttcggcacctagcagagccaagggtaatcaggatttaaaaggaagaggcctgaataaattcaagcagatttcctctctgtgggactgagtcttgaaaaacctttgtgccctcatctgcccctcaacagaga

SEQ ID NO: 255362 - DNA, 619 bp, Homo sapiens
gactgtgaaataaatattatagaggttttttttttgtttttatgrcattctatcttttgaaaatgtcatgttcttaggaaactatgttaaatctttttttctagaaaaatgttaacttagcagtttacattgaaaacctagtaatgctatctttcagtttctaaagtattctatttttaattacttaaattctagaggatagtttacagaccctattttttacaagtaaacatttaaattgccaaaagaattatcctgttgaaatctagttctgatgatgaaatagggaaaagtcactaaaccttgcaaaaagtaaggtgtgagaaaataccagaattggctatgaactacaatattcacttgtgttttcagcaggtttgtttatatcagtctataacttcagcaatgccagaaatctagaatcagctggaagtggtaatatgaatgagtcatgtggaatgttcatcacagctgtcttctagagacaactcaaattctctctgcacacgtcctcttccactgcaagatttctataaatggaatcatgctgtctacatttgagatgtagtaattctgcagttttcctcagcagtgaataataagaaagtttaagtttgta

SEQ ID NO: 255363 - DNA, 619 bp, Homo sapiens
gactgtgaaataaatattatagaggttttttttttgtttttatggcattctatcttttgaaaatgtcatgttcttaggaaactatgttaaatctttttttctagaaaaatgttaacttagcagtttacattgaaaacctagtaatgctatctttcagtttctaaagtattctatttttaattacttaaattctagaggatagtttacagaccctattttttacaagtaaacatttaaattgccaaaagaattatcctgttgaaatctagttctgatgatgaaatagggaaaagtcactaaaccttgcaraaagtaaggtgtgagaaaataccagaattggctatgaactacaatattcacttgtgttttcagcaggtttgtttatatcagtctataacttcagcaatgccagaaatctagaatcagctggaagtggtaatatgaatgagtcatgtggaatgttcatcacagctgtcttctagagacaactcaaattctctctgcacacgtcctcttccactgcaagatttctataaatggaatcatgctgtctacatttgagatgtagtaattctgcagttttcctcagcagtgaataataagaaagtttaagtttgta

SEQ ID NO: 255364 - DNA, 619 bp, Homo sapiens
gactgtgaaataaatattatagaggttttttttttgtttttatggcattctatcttttgaaaatgtcatgttcttaggaaactatgttaaatctttttttctagaaaaatgttaacttagcagtttacattgaaaacctagtaatgctatctttcagtttctaaagtattctatttttaattacttaaattctagaggatagtttacagaccctattttttacaagtaaacatttaaattgccaaaagaattatcctgttgaaatctagttctgatgatgaaatagggaaaagtcactaaaccttgcaaaaagtaaggtgtgagaaaataccagaattggctatgaactacaatattcacttgtgttttcagcaggtttgtttatatcagtctataacttcagcaatgccagaaatctagaatcagctggaagtggtaatatgaatgagtcatgtggaatgttcatcacagctgtcttctagagacaactcaaattctctctgcacaygtcctcttccactgcaagatttctataaatggaatcatgctgtctacatttgagatgtagtaattctgcagttttcctcagcagtgaataataagaaagtttaagtttgta

SEQ ID NO: 255365 - DNA, 375 bp, Homo sapiens
gaaatctagttctgatgatgaaatagggaaaagtcactaaaccttgcaaaaagtaaggtgtgagaaaataccagaattggctatgaactacaatattcacttgtgttttcagcaggtttgtttatatcagtctataacttcagcaatgccagaaatctagaatcagctggaagtggtaatatgaatgagtcatgtggaatgttcatcacagctgtcttctagagacaactcaaattctctctgcacacgtcctcttccactgcaagatttctataaatrgaatcatgctgtctacatttgagatgtagtaattctgcagttttcctcagcagtgaataataagaaagtttaagtttgtatctctactcgacccat

SEQ ID NO: 255366 - DNA, 375 bp, Homo sapiens
gaaatctagttctgatgatgaaatagggaaaagtcactaaaccttgcaaaaagtaaggtgtgagaaaataccagaattggctatgaactacaatattcacttgtgttttcagcaggtttgtttatatcagtctataacttcagcaatgccagaaatctagaatcagctggaagtggtaatatgaatgagtcatgtggaatgttcatcacagctgtcttctagagacaactcaaattctctctgcacacgtcctcttccactgcaagatttctataaatggaatcatgctgtctacatttgagaygtagtaattctgcagttttcctcagcagtgaataataagaaagtttaagtttgtatctctactcgacccat

SEQ ID NO: 255367 - DNA, 555 bp, Homo sapiens
tgataagtatgtgaggtgatggatatgttagtctgatttaatcattctacaatgcatacatgtatcataacattacattgtgcctcacaaatatatacaattatttgtcaaataaaaataaaataacattaagaaaaaaaaaagaagttataaaatgtatggatggctgttgggactttaacacttcttctgtagggaatattcactaaaacttagaggtagaagcctttacctgtggctaaaactaaaatctttgaggagaaatagatttgtcaagggaagatgggctttttgggtgaggaactcagtagagacttactaaatatttatcgtgtgtaaatcactattcaggatacaacagtgaagatgtgcaatggatgtaatcatattcctgttcacgatctcattacaggtcctgttctcctgagctctcacctctgatacaagcctgatagaagagtaaatgagacctaataacartattacagaatttgtcctcctgggcttttcacaggatcctgatatgcaaaacacattatttgtcatgtttttact

SEQ ID NO: 255368 - DNA, 532 bp, Homo sapiens
ttgatcaaggcctgaatctgtagtccattaatccaatcctttaattttattccaatatcaattcagtaactgtttctacaataaagaaatgtgtatttaccaacaaaggagcagtgcttaagcgcttccattgttatttccatgacttagcttaccaatgggtccatcgaacaccttcatctcatcatatgttcagttaaatattggattttctgtgtcataagagccttagataaagagtcccataaatacttatttgaaccagctaaggtctttttcactcaaaggctccattaaaagttggttttttaaaacttamctaataaatggattaaattcatccactcctaatgtaacatatatcacttctaaaatttgaagactatgtctacaagcactgcgctctcttactggtaactggtaaaagatacataaaaatatctttaattctgaagaactaccagatatgatcaaagataccatggattaaattatgactcaaaggtggagaactaatatggaaataagccat

SEQ ID NO: 255369 - DNA, 587 bp, Homo sapiens
tcatcatatgttcagttaaatattggattttctgtgtcataagagccttagataaagagtcccataaatacttatttgaaccagctaaggtctttttcactcaaaggctccattaaaagttggttttttaaaacttaactaataaatggattaaattcatccactcctaatgtaacatatatcacttctaaaatttgaagactatgtctacaagcactgcgctctcttactggtaactggtaaaagatacataaaaatatctttaattctgaagaactaccagatatgatcaaagataccatggattaaattatgactcmaaggtggagaactaatatggaaataagccataattttctgtccgtcctagctgaattcaaataaccactaaggctttccacattttggaatgacacaaaagtgtttgttagatcagatgaggcctacaacagcccagaatctgaatttatttgctccaataataaaaagtacataaaaatattaactaatgtagaaattgccaaaaatgtgccatagtccatagtaataatctgcaatccatacctattactaagctagaatgttaa

SEQ ID NO: 255370 - DNA, 591 bp, Homo sapiens
gatgcattcattatacatggaagtgcaggcatccttcaagatattgatttcatttcctttacatatattatgaaaagtcacattactagatcatatttttaattttaattttttgaggaagctccacagagtttcctataatggccatagcaatttacatttccaacaacagtgtgcaaaggttctctttcctatgctgaaacataaatgccacatgatctcacttatatgtgcaatctaaaaaatgttccaactcataaaagccagagactagaatggtggtttccaggggctggggctgaatgaaatgagrtgttggtcaaagggtacaaagattcagttgtgcaatgtgaaaaaattctgaagagttcgaatacaggtcattgatcataattagtgatacatattggttacacgaagtatgctaagagaatatacattaaatgttcttatctcaaataaaggtaactttgtgagataatggatacattagctacatagtggtagtcacttcacaaggtatacatatatcaaacatcatattgtacactttaagtacataaaatatttttgaaatatacctcaataaca

SEQ ID NO: 255371 - DNA, 591 bp, Homo sapiens
gatgcattcattatacatggaagtgcaggcatccttcaagatattgatttcatttcctttacatatattatgaaaagtcacattactagatcatatttttaattttaattttttgaggaagctccacagagtttcctataatggccatagcaatttacatttccaacaacagtgtgcaaaggttctctttcctatgctgaaacataaatgccacatgatctcacttatatgtgcaatctaaaaaatgttccaactcataaaagccagagactagaatggtggtttccaggggctggggctgaatgaaatgagatgttggtcaaagggtacaaagattcagttgtgcaatgtgaaaaaattctgaagagttcgaatacaggtcattgatcataattagtgatacatattggttacaygaagtatgctaagagaatatacattaaatgttcttatctcaaataaaggtaactttgtgagataatggatacattagctacatagtggtagtcacttcacaaggtatacatatatcaaacatcatattgtacactttaagtacataaaatatttttgaaatatacctcaataaca

SEQ ID NO: 255372 - DNA, 450 bp, Homo sapiens
cacaaatggaacctctcacagagatttccacttcggttactcagtagtatgaatgcaattgtccatttcctaccagagaaaaacaaaatactgaatttcctggtggaatttctctaattgatgagtatgatgattatggaaatctgttgaaattctcccactgaatggtaaaaccttggtcaaagaaggtgaaattaattcccctgaagaactatatgtactagcagcatatccttcaatgcacgtagcatttggttctccatgcaatttctacatagtttcaaactgctttgtggtattcttgccatttggttaggcasaaaagtctctgatgaagggatgacgaagaaattcagcaagagataatgttactatgggaggtcagacaagtgttctgagggaagttgaaagtgggcataggatccactgaagaacccaggttatgactca

SEQ ID NO: 255373 - DNA, 557 bp, Homo sapiens
acttaactgaagttatttaatgctctgcttcagaattatattatttgtaggacatgtacaatgcaataaatggctctgttgatacaattgaataagaacaaatcagaaataaaaataaatgaagacgatttttgataaagaaggaaatggagtattccaaatgatttaaaaaataaatgatatggtttggacctgtgtctccacccaaaactcatgtagaaatataatcctcaatgctcgaggtagggccttgtgggaggtgactggattgtggaggaagtttctcatgatttaacaccatgccttcttggtattgtcatcacagtaatgggttcycatgggatctgcttgttttaaaagtgtgtggcaactccccttcttgctcatgcccctgccatgtaagatgtgcctgctcccactttgccttccactataattgtaaatgtgctgaggtccctctagaagctgaggagatgcgagcatcttgctttcacttacagcctgtggaaaaatgagccaattaaacctcttttctttataaattacagagtctctct

SEQ ID NO: 255374 - DNA, 444 bp, Homo sapiens
tttctataaagatacttgaaaatgtggaagcagctttggaattgggtaacaggcagaggctgaaagagtgtagagggctcagaagaagccaggaaggtgagagaaagttttgaacttcctagagatgaaaaacttaatggcaactggatggaataaaggtcacttttgccgagcttcaacagtctggcagcattgtgcccctgctttagggatctgtcaaaggttaaacttgagagtgatgatttagggtatgtkgcaggagaaatttctaagcagcaaagcattcaagatttagccttgctgtgtctaacaacctataactcatatgaatgagcacagaaatgacctgaaactggaactagtgggaagcagagtgtaaaagtttgaaaaatttgcagtctggccacatgatagaaaagaaaagcccattttctgggaagaaat

SEQ ID NO: 255375 - DNA, 601 bp, Homo sapiens
agtttcaataagggatacaaatcacacaggaagttgtcaatgacattgggtccacagaaagggagctgataaataaagagaaattgaaccaatgagtgaagaaagcctccaatccaggccgccaacagcataagaacacagactcgacgattcatggtgatcaattcatgaagaggcttacagatggccatgtatcgatcataggccattaccaccagaagaatgacttcagcaccagcaaataaatgatccataaaaagttgagccatacaaccctgaaaggaaatggtctttttctcagagagcaagtcaacaatcattttgggagcaaatgcagtagaatagacggtatctatgaatgataaagaagccagaaaaaagtacatgggggaacccagggactggctggccatgatggtcactatgataagcaggttgcccattatcgtcaccatgtagattagtaagaatgtgacaaataaaaccttttgcccctcagggttctgtgtgagccctaagaggataaattcagtcacattgttcttatttttcatgtgttcttctgaagrtgttggactcaggtgtcggagcctacaaacaa

SEQ ID NO: 255376 - DNA, 536 bp, Homo sapiens
tctaattcttccttcctcacttaaattttgtactatgctgagaaaattatatttaaaaaggcacctataaactagaaatcttagaaaacacaccaaaaccttaactcttactctatctatacagaagactcayttcaggacttcaaaatgaacagaagacaaaaatcagtgtaactccatacaaagtcctgataagaagaaaccgcaaaaagagaaccacaacaattcaattcatgaccccctctgagagaagcaagagccaagaacatttacaaaaatgtgtatgttgggtttcgaaaaaaatagtttctgctagatttttttgcaggatttgttggtgagtgctctagggaataacacctgtaacaaagcaatggacagggagagacatttacatgaacataattgcatcaaaggccagtattacaggaaatttcgaggtaggggtggcctcaaagatgtcctaatcaaggtaaacaggttgaacctttttacccttaattcaatttgtaatttgatgcaggcaaaggcaaaga

SEQ ID NO: 255377 - DNA, 600 bp, Homo sapiens
aacaaatttcctcagcatatgcttgtctgagaagattttttttttctttttcagttatgaagcttaatttggccagatttgaaattcttgattggaaattcttttcttaaaaatgctgaatagagacctctattctggcttgtagggtttcctgctggaaggttcactatcagcgtgacggagttccctttggaagtgacctgccctttctgtatagttacctttaaaaatgtttttttcatttcaattttggagaatctgattattacgtgtcttgggaatgttcttcatgtgtattawctcacaggggttctctacatttcctgagtttgaatgtttccctctcaagcaatgttggcaaagtttccatgaagtacatcctgaaatatgttttccaagtttcttgctttctccctatctctttcagggacaccaatgagtcacagacttggtctctttacataatcccaatttctgagaagttttatttattttttaaattctttttttcttcatttttgtctgagtgagttatttcaaagagccagcttttgagtctgagattctttcctcaggtttgcttgttctgctgttaataat

SEQ ID NO: 255378 - DNA, 398 bp, Homo sapiens
tctcttctctaatcatattcccagcaagaagggccttatccctcctgttagaaagtccatgcccaagaagtcctgaggctcagaggcagagagcctaagaatggaagttgatattctgattcttggaaaaatagatcatcttagttctgcagttttaggttagagtacaggctttgatcaaggcctgaatctatgtcagaatctatgtccattaattcaatcctttaattttatgycaatataaattaaataactgtttctacaataaataaattttatttgccaacaagagagcagtgattaatggctgcctttgttatttccatgacttggcttatcattgggaccattgaacaccttcatctcatcatatgtttagttaaattttggatcttctg

SEQ ID NO: 255379 - DNA, 580 bp, Homo sapiens
tttccatgacttggcttatcattgggaccattgaacaccttcatctcatcatatgtttagttaaattttggatcttctgtgtcataaaagtcatagataaggggtcccagggtcccataaatacttacctgaaccagctaaggtattttttatgtaatgggctccactaaaagtttgtcattttcaatttacctaataaatggattaaattcatctacccaaaatgtaatawgtattactgttaaaatttgatgagcctgtctgtaagtgctgtgccctcttactggcaagtggtaaaagatgtgcaagcatatttttagttctgaaaactatcagatatgatcaaagatactgtggattaaactaagactccaaaattgagaactaatataaaactaaaccataattctctatgtcccttctagctgaatttaaataactactctgctttccactttcctgaatgacacaaaagtgtttgttgtatcagataatgcctacaacagcccataatctgaatttattatctctaataataaaaaaattcatcaaaaatatcaactaatgtagaaattgcaaa

SEQ ID NO: 255380 - DNA, 392 bp, Homo sapiens
ctatttacagatgtttgaggcagggcatttcttccacatgctcagcacacaatggagacagggaggaataggtaataaaatagatgctcctgttcaaaagggaaagctgtggtgcttccttctgcacaatttatttaaagactttatgaaatatacaagcaccrtattcacaaatatctttaaaactggcccttctcagacttgagctgaaattgtatatgcagtcatataatactcttaagtatcttagaattatgttttctagtttaaggtacttacgagacacaccatcaaatttttctgtagtctttacaagtgtcttaacatccataattttgaaatagcatttattttgatgacctttcttacttttagagtacttagctctttgc

SEQ ID NO: 255381 - DNA, 635 bp, Homo sapiens
ttgttatagtgccttagtatttatcatattactggctttgcttgatgtaatggagtatgtctctattcttcccatcattatacatcattcatctcatatatccaagtggccacatgaaaatcctgggacaaaggctttctattcctttttaaaaaagagtcattgtcatttcttttgtgttactaggatgtgaaatatatggtatatttgataaggtttctaaaatatctctgatgatcatggaccattttgttccaaggaacttgcctgattagtccaaactctgtattttggctagactgatcaattacccatggggaaaataataaacatattttgcctttttttctacatgaaactgaactattcatgtttttcctttgattctaaaagttcatctcaaagcataaagagatggaaatygcaattaaattttgaaagaataatgagctattctggataagacagattataaggttataacaataaaacaatgtggtactgtttcaaatatatacatatgtaaataaacagtaggatttatatattacttcagtttcctatacatatttacattaaggatgttttatttaagatgtttttgttacaaatgacagaaaaatcaaactattttg

SEQ ID NO: 255382 - DNA, 604 bp, Homo sapiens
agaaaaacctgttggctttattgggcagagtgaaaatacaaagcttccacagcatggaaggggtcctgaatgggtagccattcttggttttgggtgattgccttttaaactctttaagatgggagatacatgtggtgggaagatgttaccagagtgagaaacaaaggcagtaaattattttgtgacatktctagattttgaggaaaaccagaattgcaacttaggttttatctactttatgaccttgtagcggcatggcaaaggagacaggatctcacaggactttacaaaatatgtttacaaggaattggaattgggagtagagataaggtccactggtcacagaaaaatgggcaattaacatttcttttactttagtttcgggggaaggggaagggagagaagaaaaaaggacacacggaaacttaaagcaaaattttcgctgtttatagctttctagggggaagaaaacacatgcacaaatctgggtgttaggaatattttaaacatatatcttcagtattattcatccaggactgaaaaaagtcctgactcaggaaaagagtgagtttcacagctttctgaacccctactcaacccagga

SEQ ID NO: 255383 - DNA, 542 bp, Homo sapiens
gcccagggacgggcaggagacagatgccttcctcttgtctcaactgcaaagaagcattccttcatcttatactaatcctcagcacagaccctttacgggtgttgggctggggtatggtcaggtctttcccttcccatgaggccatatttcaggctatcacatggggagaaaccttggacaattcctggctttcctaggcagaagtccctgcggccttccacagtgtttgtgtccctgggtacttgagattagggagtggtgatgattcttaaggagaatgctgctttcaagcatctgtttaacaaagcacatcttgcacygcccttaatccatttaaccctgagttgacacagcacatgtttcagagagcacggggttgggggtaaggttatagattaacagcatctcaaggcagaaggatttttcttagtacagaacaaaatggagtctcctatgtctacttctttctacacagacacagtaacaatctgatctctctttcttttccccacagtcaatgacattggggccagagaaaggga

SEQ ID NO: 255384 - DNA, 673 bp, Homo sapiens
ataaaattcaaaagaaaaaaaattgtttgtcaaagtctctagatctgacagttaaggacaacttaattttgaaagaacagtgggacaagtagagataaaaacccagactttctgaatattcgctgctgaggaaaactgcagaattactgaacttcaaatgtagacaggatgattccatttacatagatctggcagtggaagaggatgtgtgcagagagagtttgagctgtctctagaagccagctgtgatgaacattccacatgtctcattcacattacctcttccagctgattccagaattctgtcattattgaggctatagactgatagagacgcacctactgaagaacacaagaaaatamtgtagtctatagccaattctgttacttttttcacaccttacttgatgcaaggtttagtgccttttcattcttgcatcatcagaactagttttcaacaggataattcttttggctacttaaatgtttacttgtaaaaaatatgataggtaaactatcctctatagtttaagtaattaaaatattatatattaaaaattgaaagatggcattactaggcctttaatgtaaactactaagttatcatttttagagaaaaaccatgatttaacatagttgtctaagaacatgaaattttcaaaagataaaattc

SEQ ID NO: 255385 - DNA, 592 bp, Homo sapiens
acttttttcacaccttacttgatgcaaggtttagtgccttttcattcttgcatcatcagaactagwtttcaacaggataattcttttggctacttaaatgtttacttgtaaaaaatatgataggtaaactatcctctatagtttaagtaattaaaatattatatattaaaaattgaaagatggcattactaggcctttaatgtaaactactaagttatcatttttagagaaaaaccatgatttaacatagttgtctaagaacatgaaattttcaaaagataaaattccataataacaaaaaacttccataatatcatattttacacagttttataaatctatttaaattacagtagactaggtactttcctcagcatatttatctatgggtatgtttgctgggataatttttagattcttaagtaaaaacccatattacgcttccagaacgtaacagacacttgttccttcatactctaacacacttgacatgatctgcaattttaaactctctaatcaaatatatctgaaagtaattgtacacttttactaatgtatcatataaaaataactttccataaactaagcttat

SEQ ID NO: 255386 - DNA, 534 bp, Homo sapiens
tttgcaattttagcagaataaattattttcttatagaaaaggaccctgttttctacttgcactctaattatacctgaagctaaatattaatctggatgcaaaaagggatatctctgggaaagagcatgagacctttttgaggtagattttgcacctttacagatattgaaggtgctatgatctgaaggctctctactaacagcacatccaacagcttaaataaactcttctttcctaaatgaagggcagggcawgttctcctcaagtacaccacaacatacaccttatgacacttgaatttatatctttatatgaattatcagaatagctcctttaggattctcttacttgagaactcaaagagaaaggtttgaggacaaactatgtctcttaccactgcagctgatctcaagagttgcaactgctatttaccttcttcttccttaccaaatttttttcccccttcatcttctgctagcattgctactgatctcataacttatttagcggaatagtccagactttcatcctaaa

SEQ ID NO: 255387 - DNA, 534 bp, Homo sapiens
tttgcaattttagcagaataaattattttcttatagaaaaggaccctgttttctacttgcactctaattatacctgaagctaaatattaatctggatgcaaaaagggatatctctgggaaagagcatgagacctttttgaggtagattttgcacctttacagatattgaaggtgctatgatctgaaggctctctactaacagcacatccaacagcttaaataaactcttctttcctaaatgaagggcagggcatgttctcctcaagtacaccacaacatacaccttatgacacttgaatttatatctttatatgaattatcagaatagctcctttaggattctcttacttgagaactcaaagagaaaggtttgaggacaaactatgtctcttaccactgcagctgatctcaagagttgcaactgctatttaccttcttcttccttaccaaatttttttcccccttcatcttctgctagcrttgctactgatctcataacttatttagcggaatagtccagactttcatcctaaa

SEQ ID NO: 255388 - DNA, 498 bp, Homo sapiens
gtcaaaataaataataatagggctccttaaaaacataatttatccattttatcaactaaccttaagtattttcatgacattgaaaagtgcgattatkccagccaatcaataaattttcttatatttcaaaagaagttgaattgagtttcccatcatttgaaccaaaaacatgcaaactgaaacagctgcattttatttattttttattttttatcttttgaggtggagtcttgctctgttaccaggttggagtacagtggtgtgatcttggcttactgcaacttctgcctcatgggttcaagtgattctcctgtctcagcatccagagtagctggcattacagtcatgcatgaccacacacccagctaatttttgtatttttagtagagacaggattttgccatgtttgccaggctgatcttgaactcctgacctcaggtgatctgcccgcatcagcctcccagtattcagattggttcattatcctttcaaaattta

SEQ ID NO: 255389 - DNA, 613 bp, Homo sapiens
gagctgtgagaagaggactaccattctccagaccccaaaatggttgctcccccagcagcttgctctctgtacctagaaaagccacagtcatccaggagcaacacccaacctaagagcaactttgggggctgaaccttcaaagccacatgggtggagctacccattgccttggaagcctacacattgcacgaatatgccctggttgtgaggcatggagtcaaaagaaattattttggagctttaagatttaatgactgccytgttagattgcagacttacatggggcctgtaacccctttcttttggctgatttctccactttggaatgaaagtatttacccaattcctgtaacttctttgtatcctgtaagttactagcttgcttttgattttacagacttaggtggaagggactagccttgtctcagagaagcctgggctgtggacttttcagttaatgctggaatgggttagcactttggggaactgattgtattttgaaatgtgagaaaatgtgagagaaaggtgagaagagcatgaggttttggaggggtcagtgccagaatgatattcttttgatctgtgtccccacttaaatctcatgttgaaatgt

SEQ ID NO: 255390 - DNA, 613 bp, Homo sapiens
gagctgtgagaagaggactaccattctccagaccccaaaatggttgctcccccagcagcttgctctctgtacctagaaaagccacagtcatccaggagcaacacccaacctaagagcaactttgggggctgaaccttcaaagccacatgggtggagctacccattgccttggaagcctacacattgcacgaatatgccctggttgtgaggcatggagtcaaaagaaattattttggagctttaagatttaatgactgccttgttagattgcagacttacatggggcctgtaacccctttcttttggctgatttctccactttggaatgaaagtatttacccaattcctgtaacttctttgtatcctgtaagttactagcttgcttttgattttacagacttaggtggaagggactagccttgtctcagagaagcctgggctgtggacttttcagttaatgctggaatgggttagcactttggggaactgattgtattttgaaatgtgagaaaatgtgagagaaakgtgagaagagcatgaggttttggaggggtcagtgccagaatgatattcttttgatctgtgtccccacttaaatctcatgttgaaatgt

SEQ ID NO: 255391 - DNA, 526 bp, Homo sapiens
atcgacaggttttcatccttctgttggtagtggctgtgactggagttttgtgcgttctgtgttccaaattgttgttgtgtacagtctccctttctgtggycccaatgtcattgaccactttttctgtaacatgtacccattaatggaaatggcatgaactgacacctactttataggcctcactgtggttttcaaggttgaagcaatctgtgtggtcatcttcacccttctactaatctcctctggcgtcatcctaatctcccttaaaacttacagtcaggaagggaggcataaagccctgtttacctgcagctcccgcattactgtagttgtcctcttttttgttccctgtattttcatgtatgttagacctgtttttaacttccccattgataaatttattattgtgttttatacagttatcacacccatgctgaatcctttaatatacatgttgagaaattcatagacgagaaatgctatagaaaacccctagtgtaaaaaattaactgtagatagaataaga

SEQ ID NO: 255392 - DNA, 526 bp, Homo sapiens
atcgacaggttttcatccttctgttggtagtggctgtgactggagttttgtgcgttctgtgttccaaattgttgttgtgtacagtctccctttctgtggcyccaatgtcattgaccactttttctgtaacatgtacccattaatggaaatggcatgaactgacacctactttataggcctcactgtggttttcaaggttgaagcaatctgtgtggtcatcttcacccttctactaatctcctctggcgtcatcctaatctcccttaaaacttacagtcaggaagggaggcataaagccctgtttacctgcagctcccgcattactgtagttgtcctcttttttgttccctgtattttcatgtatgttagacctgtttttaacttccccattgataaatttattattgtgttttatacagttatcacacccatgctgaatcctttaatatacatgttgagaaattcatagacgagaaatgctatagaaaacccctagtgtaaaaaattaactgtagatagaataaga

SEQ ID NO: 255393 - DNA, 590 bp, Homo sapiens
ataaatatcaacaccattccttcttcattctcattttaaggggaaaaaacttcttcagatacaatatcctataccattccttctcatacagttgagtttactaaggaactggtcatctgggtttcatttttgcctctagcattgacatttattatgtgactttgaacatttcccattgctttcatatatctaattttctataacgggaaaaatagrttaggaatactatactagccttcccctgagaatatacataagaaataatgcctataagaaatatcaatggagtggggtctagctatctacagaatgttattactgatgctgttttggaatgcactgatgattatacagactgggaaccaggccaaatggaaactacaccaccttttctccaaacgattaagtagttgccatttatcactccctagaaataaggtctccctcactctatgttggtgtgcaaattagtcaggggggttcccaggtaattactgcaatcaaatgttcatgagcttaacacgcccctgagaatcatatgaactctcactcacccagccagagcaaccggacagcagacagcccagatg

SEQ ID NO: 255394 - DNA, 554 bp, Homo sapiens
ggttgcataataataatggtacagtaatagttttaatcattgctaacatttgagttcttattctgctcaccaccttacatgccygatttcatgtgctcctcaaacaactctgtacaatagctattatctccattttagaactggtactaatggctggagagagttagcattatagagaaaacattcctctccatacttagaatatttttctacttcctgttttatcattttctaataatatagtctctagaattggaacttttcaagcagggctctgggctagaatatgagctaaagatagtagaaacaagataaaagacattgattgaaagacagggatgaagcaaggacgtctgtgttcaaatgctggaagggactctttagagttctgcccacaaggcacctgcttctagaaagattcttgtctcactcatttcagaaaaatgacattgcttttcaagaaaataaaaacacaaccatggcgatatgcctaatatggctctctgtccaaatatttaccttcctcacttccctaatgctcctgtaattcttct

SEQ ID NO: 255395 - DNA, 554 bp, Homo sapiens
ggttgcataataataatggtacagtaatagttttaatcattgctaacatttgagttcttattctgctcaccaccttacatgcccgatttcatgtgctcctcaaacaactctgtacaatagctattatctccattttagaactggtactaatggctggagagagttagcattatagagaaaacattcctctccatacttagaatatttttctacttcctgttttatcattttctaataatatagtctctagaattggaacttttcaagcagggctctgggctagaatatgagctaaagatagtagaaacaagawaaaagacattgattgaaagacagggatgaagcaaggacgtctgtgttcaaatgctggaagggactctttagagttctgcccacaaggcacctgcttctagaaagattcttgtctcactcatttcagaaaaatgacattgcttttcaagaaaataaaaacacaaccatggcgatatgcctaatatggctctctgtccaaatatttaccttcctcacttccctaatgctcctgtaattcttct

SEQ ID NO: 255396 - DNA, 568 bp, Homo sapiens
ttgtctgtaaaagaggtaagggcatagggcaaactctgccctcaagattgaagagagggacagatggatataagaagtcaccccttaccagagcagagactcacaggtggaaattactttgggaaccagtgccggggtaggaaaaactgaactgtaaattaaaaattgctagtctcastatggacaattctgagtcaaaaaacgataaaggaacccattttggggggatgttttaatttaagatctttaaggatagagagtacctttccaatgattaggagagacacaaaatggaaatgaaattttattacttacaggttctagggagggatggtttatggcatgtccagaggaccctgacatggaggtcaaggcaggcagagagagaaagagggaaacatgggctaatgcctttattgggcctagggcattattcaaacagtattcccacagggaattttaatcggttggttgaaagaaagcaggcacgtgttccaggaggtcacagagtgactgagagccagtcactgtagcatatccacacagtctatgtggggtgagaaagtca

SEQ ID NO: 255397 - DNA, 568 bp, Homo sapiens
ttgtctgtaaaagaggtaagggcatagggcaaactctgccctcaagattgaagagagggacagatggatataagaagtcaccccttaccagagcagagactcacaggtggaaattactttgggaaccagtgccggggtaggaaaaactgaactgtaaattaaaaattgctagtctcagtatggacaattctgagtcaaaaaacgataaaggaacccattttggggggatgttttaatttaagatctttaaggatagagagtacctttccaatgattaggagagacacaaaatggaaatgaaattttattacttacaggttctagggagggatggtttatggcatgtccagaggaccctgacatggaggtcaaggcaggcagrgagagaaagagggaaacatgggctaatgcctttattgggcctagggcattattcaaacagtattcccacagggaattttaatcggttggttgaaagaaagcaggcacgtgttccaggaggtcacagagtgactgagagccagtcactgtagcatatccacacagtctatgtggggtgagaaagtca

SEQ ID NO: 255398 - DNA, 588 bp, Homo sapiens
gggctaatgcctttattgggcctagggcattattcaaacagtattcccacagggaattttaatcggttggttgaaagaaagcaggcacgtgttccaggaggtcacagagtgactgagagccagtcactgtagcatatmcacacagtctatgtggggtgagaaagtcaatgtgcctactcaagcaggctacatctacctgtctgatagggaactgatcactagggagcagttgtataagacagatatctggactgatggaccatattgaagaactggagctgggtgtagaactggaaactgtgtccagggtgactgtgctctgcttctggtatgaaaatgtgtagtttatatttaaaacggttgctgaggcaaattaaaatttgctgcagggagggtactccatttttgtgaattttacctccgtaagctctgttgagtactcacagtaaatgtcaacaaaaaattccctcatgcttccagaagggggaggagtaaaggaacaattttgaaatatgtcagagcattctgtctttcttatcaaggcctgcctcagaataaactatcaaccaaagctaaatcttccgaagt

SEQ ID NO: 255399 - DNA, 588 bp, Homo sapiens
gggctaatgcctttattgggcctagggcattattcaaacagtattcccacagggaattttaatcggttggttgaaagaaagcaggcacgtgttccaggaggtcacagagtgactgagagccagtcactgtagcatatccacacagtctatgtggggtgagaaagtcaatgtgcctactcaagcaggctacatctacctgtctgatagggaactgatcactagggagcagttgtataagacagatatctggactgatggaccatattgaagaactggagctgggtgtagaactggaaactgtgtccagggtgactgtgctctgcttctggtatgaaaatgtgtagtttatatttaaaacggttgctgaggcaaattaaaatttgctgcagggagggtactccatttttgtgaattttacctccrtaagctctgttgagtactcacagtaaatgtcaacaaaaaattccctcatgcttccagaagggggaggagtaaaggaacaattttgaaatatgtcagagcattctgtctttcttatcaaggcctgcctcagaataaactatcaaccaaagctaaatcttccgaagt

SEQ ID NO: 255400 - DNA, 588 bp, Homo sapiens
gggctaatgcctttattgggcctagggcattattcaaacagtattcccacagggaattttaatcggttggttgaaagaaagcaggcacgtgttccaggaggtcacagagtgactgagagccagtcactgtagcatatccacacagtctatgtggggtgagaaagtcaatgtgcctactcaagcaggctacatctacctgtctgatagggaactgatcactagggagcagttgtataagacagatatctggactgatggaccatattgaagaactggagctgggtgtagaactggaaactgtgtccagggtgactgtgctctgcttctggtatgaaaatgtgtagtttatatttaaaacggttgctgaggcaaattaaaatttgctgcagggagggtactccatttttgtgaattttacctccgtaagctctgttgagtactcacagtaaatgtcaacaaaaaattccctcatgcttccagaagggggaggagtaaaggaacaattttgaaatatgtcagagcattctgtctttcttatcaaggcctgcctcagaataaactaycaaccaaagctaaatcttccgaagt

SEQ ID NO: 255401 - DNA, 574 bp, Homo sapiens
ttcatatgtgtgaaatagtacttttgacacatctacagagttagagaatacaaataaaatwagtacccacgtgcctatacaatgctcaagaaaaaaaaaaaaacaacatttttgaagccaacctgtgtattctccctgactatatctttgtttttccactctccttgattgtctacatggttttaccatatatctatgtattcctaaacattgtattgtttagtctactttggcatgctatataaatgatgttctactatttaaatatgccctttatttggtgaatggataaataaactgtactacattcagataggggaatattattcagtgctaaagataaggaggtatcttaaatgcatattaccaagtgaaataagctaatatgaaaagggtatgtactatataagtctactataggacattcttataaaactaaatttattgagatatagtaaaaataacaatagatgccagaggttaatgggaagagattaataggagaagcacagaggattttgagggcagtgaaactcttctgtgtgattctgtaatggtggatttatgccattat

SEQ ID NO: 255402 - DNA, 574 bp, Homo sapiens
ttcatatgtgtgaaatagtacttttgacacatctacagagttagagaatacaaataaaataagtacccacgtgcctatacaatgctcaagaaaaaaaaaaaamcaacatttttgaagccaacctgtgtattctccctgactatatctttgtttttccactctccttgattgtctacatggttttaccatatatctatgtattcctaaacattgtattgtttagtctactttggcatgctatataaatgatgttctactatttaaatatgccctttatttggtgaatggataaataaactgtactacattcagataggggaatattattcagtgctaaagataaggaggtatcttaaatgcatattaccaagtgaaataagctaatatgaaaagggtatgtactatataagtctactataggacattcttataaaactaaatttattgagatatagtaaaaataacaatagatgccagaggttaatgggaagagattaataggagaagcacagaggattttgagggcagtgaaactcttctgtgtgattctgtaatggtggatttatgccattat

SEQ ID NO: 255403 - DNA, 574 bp, Homo sapiens
ttcatatgtgtgaaatagtacttttgacacatctacagagttagagaatacaaataaaataagtacccacgtgcctatacaatgctcaagaaaaaaaaaaaaacaacatttttgaagccaacctgtgtattctccctgactatatctttgtttttccactctccttgattgtctacatggttttaccayatatctatgtattcctaaacattgtattgtttagtctactttggcatgctatataaatgatgttctactatttaaatatgccctttatttggtgaatggataaataaactgtactacattcagataggggaatattattcagtgctaaagataaggaggtatcttaaatgcatattaccaagtgaaataagctaatatgaaaagggtatgtactatataagtctactataggacattcttataaaactaaatttattgagatatagtaaaaataacaatagatgccagaggttaatgggaagagattaataggagaagcacagaggattttgagggcagtgaaactcttctgtgtgattctgtaatggtggatttatgccattat

SEQ ID NO: 255404 - DNA, 542 bp, Homo sapiens
ttggcatgctatataaatgatgttctactatttaaatatgccctttatttggtgaatggataaataaactgtactacattcagataggggaatattattcagtgctaaagataaggaggtatcttaaatgcatattaccaagtgaaataagctaatatgaaaagggtatgtactatataagtctactataggacattcttataaaactaaatttattgagatatagtaaaaataacaatagatgccagaggttaatgggaagagattaataggagaagcacagaggattttgagggcagtgaaactcttctgtgtgattctgtaatggtggatttatgccattatacatttgtcaaaaaccataaaatgtaaaacatcaagagtsaaccctaatgtaaactattgtatttgagtgattatgatgtgtcaatgtagtttcttctattgtcacaaatgcacaactctgtttgggattgtggatagtggagaaggctatgcatatatggggacagagagtatatagagaaatctctgtagattct

SEQ ID NO: 255405 - DNA, 566 bp, Homo sapiens
tcaagcgatcctcccacctcagcctccaaagtagctgggactaacaggtgtgtgccaccatgcccagctaattttttcactattttttggaggtaggtggggggtggggggtctcactttgttgtccaggctggtcttgaactcctgggctcaagtgatcatcctgctttggcctctcaaagtgctgggattacagatatgaaccatggtgcccggccactttattatattttaaatctaaatttgattgatgtgtttattactctagcattcataacattaaaaatattaagaactgtacttaactcatttattattgcatttctatcttgaaatttctatcttgaaattcttcatttttakaaggatgttgtaaaatcaaaatttcaactttcatacttcaaaatttcacaagaagaaaaaaattcctaaatcatataccacaacaatctccctgagaaatcatgttaaatctatgaaattaggtaatataaggattatgaagaaaatgtgctcataccaatcaaactgtaaaccagcataaattatacatattgtttaataag

SEQ ID NO: 255406 - DNA, 565 bp, Homo sapiens
gaaataatcctgtgttttttkgtatctcctccagttcttaacaaatactgtcgtatgagcaatactcataaaaaattaaatgagtaatatcgttttgaattctgatctattccaaaaagagaaccacaatctctttatcttcaacctataggcaatttgtatacaggaagcagaattcccaaagtctcatatagaaaatatgagaagttatgcatactcatgcctttagttcaacatataaatacactctctcctgggagttttatcctcaagtaaaattctcttttcccattgcccagtctaaaaaaaaaaagtaaatggttattagaaaagttcaggttataggaagtatttagtgaacctgcaccaatggaaacatgttacatgattccttttccatcaattccagatgtgaatcatagccctgggcagctagcaaagtgcctgggcctttgttctgagatcacagagagaatagataggcagctatgcacaaatcatgtctagagtgttgctttctctctgtggggctcataccagaatctgtgtgttgttgcaaacagag

SEQ ID NO: 255407 - DNA, 567 bp, Homo sapiens
gcctttagttcaacatataaatacactctctcctgggagttttatcctcaagtaaaattctcttttcccattgcccagtctaaaaaaaaaaagtaaatggttattagaaaagttcaggttataggaagtatttagtgaacctgcaccaatggaaacatgttacatgattccttttccatcaattccagatgtgaatcrtagccctgggcagctagcaaagtgcctgggcctttgttctgagatcacagagagaatagataggcagctatgcacaaatcatgtctagagtgttgctttctctctgtggggctcataccagaatctgtgtgttgttgcaaacagagctgctcctttccctgctaattggatcatggatggtaaaaagtgccaggtttatccttaggcaatgtaaagcattgaggctgaaagaagaaaaaggaataatctctagtgagagaaagctggcaggaagacaggcacagacatcaattttctcaaatgctgagcagtggaaagtgtcatacctaagggatttaggcctaggatatcagtactccttattatagt

SEQ ID NO: 255408 - DNA, 480 bp, Homo sapiens
atacaagttgcaggtcatgaagggcttcttggtaccttggtttggaaattgctaaatagtttaagctaagttaactgagtgattttaataccataattttcagattctctagcaaactaagttgtattatgaatctccaaagagactacgggtatatgcaatatttctcaaacctttttggatttaaatccccttctctctctctttttttttttttttttggatggagtctcactctgtcacccgggctggagtgcattgacacgatcttggcttactacaacctctgcctcctgggttcaagcaattctccttcctcagcctcctgaatagctgggactacaggcacccgccactaagcccagctaattttttgtatttttagtagagacrgggtttcaccatattgcccagactgggctctcttttttttttttttttaaagtatctctcataaccaatgttccacagaatacaatt

SEQ ID NO: 255409 - DNA, 536 bp, Homo sapiens
agcaagatatctgcccattgttgtgtttagggaaataaaaaatgaaacagctacttaaaaaaattcagaatgctagtctttggtatcccctgctgtttgatttgggcaaatcatttaacatgcttgttctgaatttttaacctgtaatgtaagctggaccgtatgatctccaagcatctacctaggtccagaatcctatttctttatatttatcctatttaccacattgccttctgtattttaccagttttcaattattttggaattatatctgctatttgctaaaaatgaactttaaataactgagatccatgtggttttcttctgcttcccaaaagacaaaattggtggaaatacagtaatctctacagataactcctggttagccacactaatagaacttagcatcatcgataagaattcaaatattaaataataaaaaaagtttmtatttgagtttggaccacaccttgatttatttattttgcaagtatactgtctgaattacaccattataaactaaacattataaatta

SEQ ID NO: 255410 - DNA, 605 bp, Homo sapiens
ttccatgagaacaatatgccagtcaggggagatgaattaactgggcagatttcactgctacccccactccctactcctttctcctcatacccatctctgtggtgcacaaatgctgaccttgccactaaatatctaacagttgttaatccctgctgtctttaacctctaagtgacayttccatttcctactcagatgcccaaggagcattgttttggcagtgaaacctggttagaaatatgtagccaggcatggggaggtggggatggggacagacagttctgtctccggtgcatcccctggttttatagcttgtttgtaagcctggcactgctgcctgggaagcagagttttcatcaaagtttagggatacaaggtcctcactttttctcctgaggaggtttcttttttcctaccttagggattttcagaaggctaatttaaaccctagaagaaaaaaaagtaagctagagatctagagattgcaggaagtaaaaagaaaacattagtgggatagagaacaaagaatttcatagtaaaaggacagcctataaagtgatgagcctggctttcttgcttggattatggaaaactgtcttattattca

SEQ ID NO: 255411 - DNA, 605 bp, Homo sapiens
ttccatgagaacaatatgccagtcaggggagatgaattaactgggcagatttcactgctacccccactccctactcctttctcctcatacccatctctgtggtgcacaaatgctgaccttgccactaaatatctaacagttgttaatccctgctgtctttaacctctaagtgacacttccatttcctactcagatgcccaaggagcattgttttggcagtgaaacctggttagaaatatgtagccaggcatggggaggtggggatggggacagacagttctgtctccggtgcatcccytggttttatagcttgtttgtaagcctggcactgctgcctgggaagcagagttttcatcaaagtttagggatacaaggtcctcactttttctcctgaggaggtttcttttttcctaccttagggattttcagaaggctaatttaaaccctagaagaaaaaaaagtaagctagagatctagagattgcaggaagtaaaaagaaaacattagtgggatagagaacaaagaatttcatagtaaaaggacagcctataaagtgatgagcctggctttcttgcttggattatggaaaactgtcttattattca

SEQ ID NO: 255412 - DNA, 605 bp, Homo sapiens
ttccatgagaacaatatgccagtcaggggagatgaattaactgggcagatttcactgctacccccactccctactcctttctcctcatacccatctctgtggtgcacaaatgctgaccttgccactaaatatctaacagttgttaatccctgctgtctttaacctctaagtgacacttccatttcctactcagatgcccaaggagcattgttttggcagtgaaacctggttagaaatatgtagccaggcatggggaggtggggatggggacagacagttctgtctccggtgcatcccctggttttatagcttgtttgtaagcctggcactgctgcctgggaagcagagttttcatcaaagtttagggatacaaggtcctcactttttctcctgaggaggtttcttttttcctaccttagggattttcagaaggctaatttaaaccctagaagaaaaaawagtaagctagagatctagagattgcaggaagtaaaaagaaaacattagtgggatagagaacaaagaatttcatagtaaaaggacagcctataaagtgatgagcctggctttcttgcttggattatggaaaactgtcttattattca

SEQ ID NO: 255413 - DNA, 580 bp, Homo sapiens
tcttgttgtagaacttgattaaacaataaaagctaacttctatctacaactttaccttgtctcccctccacagatacaactatatttttggcagccatatttttcttcttatactttatgaatagattactttctccaaggaatagtttaatgctatgagaaaatgcttatgacgtaatgtcatatgcaggaatattcttctcagatataycaaatatttaagtgaaaacatagcttacttataactttctatatattccaaaaatgagcatttgctacttttataattaggaaataaaattatttagctgttaaaaatgagtcagggttgggtttattattaaagttattttattactcttttaaaaactaaaaagcaaaagaaacaggaaagtaaaaagacatatcaaacttgcagtatagtttaattccaagtataatttcatattcagttgaggggtagaaaaagacctgcacctactggttttgctcaaaatggtgataaatagttcccaacctgcaaggtcctgtactggaaaaagaaaaagcaaatgcaaggaatgtgagctttataattttg

SEQ ID NO: 255414 - DNA, 566 bp, Homo sapiens
ttgtggcttgtcagaatgaataaaggacacaggcgagatcaggttgccatttctgatttgatctccttgcctgggcctgtggggccagaggtctgcctgctggtggagatgaatggaacgcgaagagcaaactcatcagactcagcaatgaatgggcactgagttttcagtgtctagttccccaagcctgcaggcagcttcaaagagtaacaaatgatggaattagctacagtgccacaatccagtgggatgaacacaaaaatcacatttttccatttttcctaccatcacaatagaactacacatgtgcacacccacacactcaatttttgtcaaagtcatacacacaggacatttgaagtcatataatactgaaaggtgtatgccaaatcagtacccctccttgccttactccctcacaatctccttctcctccccagaagcagcctctttcaaaggaatcagtcacttctttttttcyctattttttaacaaatgtgcttacattgctgtttcatgttttactaattttagatagactctacttattttcatttacactagtt

SEQ ID NO: 255415 - DNA, 252 bp, Homo sapiens
tcctgacctccatagattttgatgagaaattcacattcctttgtatcatttcctccctacagataaagtatcatttttctctgttttcaaaatttttcttagtcttaattatcagaagtataatttatgattcatcttaattgcataattatgatgtgcctgcatttctttggttttatcakgcttgggaattgctcagctttctaaatctctaggtttatgtttcttgccaaatttgggaagttttcagcc

SEQ ID NO: 255416 - DNA, 605 bp, Homo sapiens
ttcctacatttgtaagcacaaaaatatcaagaccttaagtttatagaaggttaaacaaaaacaacacaatttatgataaatactaaattttacaatatgaaattatgataaacaacacatcatatcttaagtccatgatcctggcagatgctagacttgtctggcacttgtaggagtgtagtataattgcttatacaattctatcttygtagacatttggaggtctaattaaaaagatgaatgtggaaccacatttttctaagcaatgacacatttataaaaatttcaattatttgacctaagatagcagacaaagttttatgccaaggtctgccccaaaccaagttaatctggcaggacaatttaatgaactcccaccagggtgggaaaaaatggaatataatacatttgaatttgttagttttattacagttttttaaatagtttaagtagacaagtaaaattaaaaatgaagcaaatgctttaaagtaacacttcaacatgaaactcagttttgaaaattgctgatctccataaagtattaacctcctaggaaaagagactgtcatacattttgatacctctgataatctgcagtgtttttt

SEQ ID NO: 255417 - DNA, 479 bp, Homo sapiens
cagttgatgtccttgtcacactggattgtggattcatcaacaaagagtacactcttttgaacatgtccttattaagacaactcacatgcttttcttgaaactaggaaatagcactgattcatagatccacatagctccagagctgcaagagatctcaggagatcagcccatgcggtcttcaaacacatcaaagtctaaaaatagcctctaggctataattcaaaaagagcctcatttctatgagtacaaattgcaaataayaggtttcatcaagaatttgtattttttaaaaaattgcaagtctaagatgctataaaaactaaatgcacaatgcatggtttttatataagcatatgcacaagctatgttcactgtttttgtttttttcatcattgatctctgcatgaaaaggaaaatgaagagataactatgtcacctgttttaattaaggggagtgtcttgggtagtggtgtgggttc

SEQ ID NO: 255418 - DNA, 479 bp, Homo sapiens
cagttgatgtccttgtcacactggattgtggattcatcaacaaagagtacactcttttgaacatgtccttattaagacaactcacatgcttttcttgaaactaggaaatagcactgattcatagatccacatagctccagagctgcaagagatctcaggagatcagcccatgcggtcttcaaacacatcaaagtctaaaaatagcctctaggctataattcaaaaagagcctcatttctatgagtacaaattgcaaataataggtttcatcaagaatttgtattttttwaaaaattgcaagtctaagatgctataaaaactaaatgcacaatgcatggtttttatataagcatatgcacaagctatgttcactgtttttgtttttttcatcattgatctctgcatgaaaaggaaaatgaagagataactatgtcacctgttttaattaaggggagtgtcttgggtagtggtgtgggttc

SEQ ID NO: 255419 - DNA, 511 bp, Homo sapiens
ggggttaagatttatttattcatttattaatttagtttgtttttcttgagcttatgcagttgcttgaccatatgctgggcaccaaggatacatagatgaatyagttcatgcaattcaaggtttagaataacaaatcaacactccggccattaccacgaagtggaaaatgcagaggcagaagttcatgtcttacaggagcacagagaaggggcaccctacacagtgtaggcagaggctgagggctggaggagggatactggagtgcttttaccttaattatgaaaaagcattagctaatgtattcaacagaggtctccagataaacagaatcaccaggatattgtagaaagaatttattagaggaattggcttacatgattacagaggaagagaagccccgcaatagaccatttgcaagctggagaaccaaagaaaccattagtgtggctcagtctagaaacctcagaatgagggaagtcaatggtgcaacctccaagttagaggcagaagg

SEQ ID NO: 255420 - DNA, 511 bp, Homo sapiens
ggggttaagatttatttattcatttattaatttagtttgtttttcttgagcttatgcagttgcttgaccatatgctgggcaccaaggatacatagatgaatcagttcatgcaattcaaggtttagaataacaaatcaacactccggccattaccacgaagtggaaaatgcagaggcagaagttcatgtcttacaggagcacagakaaggggcaccctacacagtgtaggcagaggctgagggctggaggagggatactggagtgcttttaccttaattatgaaaaagcattagctaatgtattcaacagaggtctccagataaacagaatcaccaggatattgtagaaagaatttattagaggaattggcttacatgattacagaggaagagaagccccgcaatagaccatttgcaagctggagaaccaaagaaaccattagtgtggctcagtctagaaacctcagaatgagggaagtcaatggtgcaacctccaagttagaggcagaagg

SEQ ID NO: 255421 - DNA, 516 bp, Homo sapiens
aaaataaatcttgtatttctagagtgtggaccagatgttaatgtatttgaaaggatatgtgtttctgtgagtgtctgtgggtgtttggtgtgagattgataaagatatgtgttttcccacaggtgtgtggccttaagattagaggcccttgctyatggttaggaatcatagaaacaggtgtgtagttgggagtgggaggttggagggagggaggagagttaagtgaaaaaaaaggtaaaatgaaaggagaccccttgtacaaacactggatttataggttccaaattcacaagattcatatgtcaaagatatacaaaatatcacgaatagttttgttgttgaaagacacagatttttatttttctataattagacatgaaagtccatccttcagaattaaaaaaaaaaaaaaactttctgacccttgccccgcaattttattcatatcttcctcccacttcactgttggtattgactatcccttcaacatgcttaataatgccataggcaaaataa

SEQ ID NO: 255422 - DNA, 497 bp, Homo sapiens
ttagctgccaggtctattttaatggagtctcgttgctctattrtaacaagcctccgagaactgctcaaagaatcaggactgccagcctcagctcgaaggctggacgaggctagggctgcgtcttattaacctacaatatcagagagttgcattaaatgtgtcttctctctgtccctgaaaatcctcgggagaattagggaaagtctatcagctgcctgaataggtctttgttaactcaaggttgacaggaaagaagaccatacaggagagaaaaagggaagaagggtggaacctcagggtgcaagaacacaaacaactctaatttgctaagttaccatcattacaaggggaagaggttaattcgtctgggcaaggttggtcatccccttccatagagaataccactgtgtggaaggttttctacgtatgccctaggatgggctccttccaggattcccaggactgccagaaagcctggacagtaaccagaaaggaca

SEQ ID NO: 255423 - DNA, 603 bp, Homo sapiens
ctgatctgtaatgggttattaatgaaaatttgattgtgtttttaagctaacctttgaagttgatgttaaggaaaaacaataataacaacaaaagtaacaacaataaaaataataaaagcatttattgagtgcaattaactatyccaagtaatttatattatcttgttgaattctagagctaattattattccccacattttacaaaggaggaaaacgagtctctgatgagttaatcatgggcattagattttaactaatccaaatatgtaagttgcaggatagcttaagactcccataattgctggcccaggggtatatgatggatctagctcaggattgcctttccttactacccatgtatttatcaaggtgaaagctgttaaatggggacaaagaaaccaaatggactacatgcagcctgaggactatatgcaggatggctgcaaatcccagcttccttgggacagacccagagtagctattattataacccactttcactctgaaaagtgtccagatttggaagagaaacatatggtcatcccaggtatgtcttagtaataaagaaaaattggatttaggcactgagtgcacaaatatac

SEQ ID NO: 255424 - DNA, 386 bp, Homo sapiens
ctgtagccaattatgtaaacaaccatatcccaaccataactttcttctttcttcttccctcctggaaataagagatcactcaaatctttaagtgtcatgtttttaggttattgggaagttagtggcaccctgaaagataataaaatctgtggaaggaactgatatgcaaggaaaaataaattaatgcattattggaggtggaaaatataccctaaagggctrtggctattttgaacatttctagagtctgcccactttctatctctgtggagattttccgaataaacagtgtggctctttcttttattcatgacatgctggtactgacatttaactgctttctggacatggccatcatttccccccagtcagctcaccagttgacc

SEQ ID NO: 255425 - DNA, 386 bp, Homo sapiens
ctgtagccaattatgtaaacaaccatatcccaaccataactttcttctttcttcttccctcctggaaataagagatcactcaaatctttaagtgtcatgtttttaggttattgggaagttagtggcaccctgaaagataataaaatctgtggaaggaactgatatgcaaggaaaaataaattaatgcattattggaggtggaaaatataccctaaagggctatggctattttgaacatttctagagtctgcccactttctatctctgtggagattttcygaataaacagtgtggctctttcttttattcatgacatgctggtactgacatttaactgctttctggacatggccatcatttccccccagtcagctcaccagttgacc

SEQ ID NO: 255426 - DNA, 512 bp, Homo sapiens
ttttaaaggaagtcaagttcactcattcatgcatgcactaagaattgagttctgctctgggcataagtttagaagcagtaaagacaacagacacatttcctgccctcttgtattctatcagaataataataatataataatwattattattattataagaatactaataaaaaatgttatactgggtcatacttatggtcacccattcttagaaaagtagtactaagggacactgaggtataatgtctgcacaacttatttctcaggcttaggaatagtggcatagacatgagtcaataggtgcagcaaaccaccctggcacacgtttacctatgtaacaagcctgcacatcctgcacttgtaccccagaactaaaaataacaatttaaatattaaaaaaaagaaatagtgtcacaaagaggtgaaaggactaagaatactaacagtggggccaggtctagagtccagagtacagcccagacttaaatcttatcctctgttcaatgctgcct

SEQ ID NO: 255427 - DNA, 512 bp, Homo sapiens
ttttaaaggaagtcaagttcactcattcatgcatgcactaagaattgagttctgctctgggcataagtttagaagcagtaaagacaacagacacatttcctgccctcttgtattctatcagaataataataatataataataattattattattataagaatactaataaaaaatgttatactgggtcatacttatggtcacccattcttagaaaagtagtactaagggacactgaggtataatgtctgcacaacttatttctcaggcttaggaatagtggcatagacatgartcaataggtgcagcaaaccaccctggcacacgtttacctatgtaacaagcctgcacatcctgcacttgtaccccagaactaaaaataacaatttaaatattaaaaaaaagaaatagtgtcacaaagaggtgaaaggactaagaatactaacagtggggccaggtctagagtccagagtacagcccagacttaaatcttatcctctgttcaatgctgcct

SEQ ID NO: 255428 - DNA, 558 bp, Homo sapiens
tgattctgtgcatgaatccacacaagttgtagctgacacagcaaaaatgtggagacctgaactgagatttgaaccactgaacacaggtgctgaaacagatgttatrgctgaacctaaatgaattgaccgcctgctgaaataaacaactagaacgaaaacagtagcgagtagcaaagtagagaatgcagggtcatttggcccactatcctttttttgtaaatacaatttttgtggaacacaatcatgtccattgatttatgtattgttaatgcatgcctttatagcagtgaagctgagaagttacacagagactgcgtgggccacaaacctaaaatatttactaactggccctgtgcaaatacatccaccaacctttgctctagcagattataacaggacccagagttcgtatcacacaatattcataatgtcaaaaacaaaataaaatatttcttggtgtacaaagaaacaggaaaatgtgaccaattctcaacagaaaataaaatcaacagatgccctaagtgctagaagtcttagagactttaatgcaatttttca

SEQ ID NO: 255429 - DNA, 558 bp, Homo sapiens
tgattctgtgcatgaatccacacaagttgtagctgacacagcaaaaatgtggagacctgaactgagatttgaaccactgaacacaggtgctgaaacagatgttatggctgaacctaaatgaattgaccgcctgctgaaataaacaactagaacgaaaacagtagcgagtagcaaagtagagaatgcagggtcatttggcccactatcctttttttgtaaatacaatttttgtggaacacaatcatgtccattsatttatgtattgttaatgcatgcctttatagcagtgaagctgagaagttacacagagactgcgtgggccacaaacctaaaatatttactaactggccctgtgcaaatacatccaccaacctttgctctagcagattataacaggacccagagttcgtatcacacaatattcataatgtcaaaaacaaaataaaatatttcttggtgtacaaagaaacaggaaaatgtgaccaattctcaacagaaaataaaatcaacagatgccctaagtgctagaagtcttagagactttaatgcaatttttca

SEQ ID NO: 255430 - DNA, 581 bp, Homo sapiens
tattaagaaaaaaacatgtaaaattataacatttgtcaaaactcatttattagtacccttaacatccatttacactatataaattttacctaaaaaatagttaatgtaatttaccaaattaacagaataaaatttaaaatcctttgattatctcagtagatgcagaggaagcatttgaaaaagtacaacacaatttttttagtaagaaaatatttgcaacttaggagtagaagagaacttcctgaatgtaatcartgacatctacaaagaacttttaaaaattgtatttgatgtaaaatgttaaaacctttcccagtgaggtcaggaatgaaactaaggttttcattatcattatctatccttgtctgttcaatatttaccatatatcctagctagtgtagtaaagcatgaaaaagaaaaataaagaatgtaaagatttttaaaggaatatacgaaatacttattagaacagaaaatcctgacaacttttcttccaaatatgtacagactcctgagagatttctactatgaaacaggatggagtaacagatacaaaatttactatctaaactgaaacaagt

SEQ ID NO: 255431 - DNA, 300 bp, Homo sapiens
ttagaaggggttgaaatctgtgaaatatatctatagttatttccatactttataagtaatgactaaagaataacacataattttcaataagttacaaaaaacatttgtgttacatatctaaaatttaactaacccataatattatttatttaaagtcttcaaaaacaattatggtggtaatatagttgtttaaaaattaaaagtcaatttagaagtacaaaaataattttwaaaaatgattcaaggccgggcacggtggtgcatgcctgtaatcccagcactttcggaagccaaggccag

SEQ ID NO: 255432 - DNA, 604 bp, Homo sapiens
gagtcactatattctctttccttttccattgcagttgacttctaaccagtctccctgttttcccatataacctattcacaaagtatccaggatgggtgctatggtttgaatgttccctccaaaatgtaagttgaaacttatctccaatatgacagaattgaacagtagggtttttaaaaggtgattggataatgaaggttctgccttcatgaatgaattaatcctattcatagattaatgggttatcatgggagtggaactggtggctttataagaaaagaaacaaagaccaggaatggtgacccatgcctgtaatcccaacaccttgggagcctaaggtgggaggacagattgagttcaggagttcaagaccgagccaggtaacacagcaagacattatttctactaaaaatcaaaaaattagttgggcatggtggcacacacctgtagtyccagctattcaggaggctgaggcatgaggatcacttgagccctggagattgaggctgcagtgagctatgatcatgtcactgtactccagcctgggcaacacagtgagaccctgtctcaagaaggaggaggaggaggaggagggacagtgatg

SEQ ID NO: 255433 - DNA, 635 bp, Homo sapiens
gtttccaggaaatggtaaacttaatgttgtttcttagcaatagtctagtttagattagaaattcattgatatccttttctgatagggctttttagattgctaaagcaggaaaattattcctcatgaaaacattgtaaggtactttcaagtataaaaatcgctttaatttggattatttcatttgagtcaaactatgagtttcttaattttcatattagcaatcgaggcyaagaaatgctaaataacttgcccagagtcagctagctactgagatttaactgtctgtaaggtcaacgatctgtccattgctctaagctgcctccaagttcagagaattcctagaattattagacttttgggaaaacattttcaaagagattggttaagatcagtttgggaaacaattgccttttctgtctatctcatccctctcaaatttattgatgtacaagtctaatttcagttaaagttccaaaataaaaatacttatggtttctttgctttcttgggatttgaccttttcataatttttttttcagaaattttaagcttcaaatttttactttaatgtttagggtaatgactgagggaacacaaataaatcatgaaatatgtattagttttctagagctgcc

SEQ ID NO: 255434 - DNA, 559 bp, Homo sapiens
cataacctcaaaaacattgggtataaatatttaaatatttactatttacaatatatatgttcattatggtaaattttccatttatatccttgttatttttaccgatagcacctcaatattgttttattctgctgtatttaaatgaacttttttgaaaattataagtattaaccttttgtcatttatagagcaaatgtttttcatctctgttgcattcttttttgtattagtgttgtttataagcattgaagtttcaaattttatgtatttaacaacattttctttgagatgttctgctttaaaccttagaaaattaacatctatcaraagacctggaaatagtttattctgctttctgtaatttacaatctgttattcacatatagtatttcttctggtttatggggtaaggcatgaatttatgtggtgggtttttttttgtttttttgtttgtttgtttgttttttgctctagaagtactaacttcagtggattaaggtgaccatggaaactttcttagtcagttcaggcttttataacagaataccatagatagggt

SEQ ID NO: 255435 - DNA, 508 bp, Homo sapiens
gcaaatcttgttggcagaatttccagttaagtccggaatcctaccatttcttactatctccatcatgccatactgtcctgagcaactatagtctcttatctggtctactgcagtagcctcttaactgtatccatttgttttcacttttatgccaatctgttctctgcatagcatacagagtgatattttaaagcaaaagttagtttatctcagtattttaaaaatctttcactggcttcctgtcactttctaaacaaaatcaaagtccttattactctaaggccttacataatctgaatcctagctacttctcccacctcttctactaacatgccccccattgcctactcctctccaattatgttggacttgaacttttccttgaataaactttctgcttcagagcatttgtacatgctgtctcctctgtgtggaattctttgcccactttcttactagtttatgtgyctgctcaattgccatcttaagcctttccttacttccatct

SEQ ID NO: 255436 - DNA, 525 bp, Homo sapiens
gtacccattccccctccaaaacagtctcttggttatggcatgaggactgtgtctgactggccatctggtagtttccaggtcccaaatttggtatatattattagaagatactcaggaaacaatgaattaaatggcaaatgctctcttggggcccctgactccccttttattcaggggatttttggcaggagattgggttgtgtagtggctgataacatagcttttaaagtcagatgggtatcgctggtgtcttgcgtctgtcatatactagctaggtgaccaccttgattaatttctttgggctttagtgttctcatctattaaaaaatgagcatgaacaaccaytagagttgtgagcattaagaaaaataacgtaaagtgttcagtgcagtgtctggcaaataaggaacacttaataaaagtagctatttatattgctaacctaagagatggggcatgctgaatcaacattaatagcccgtaaatgagaaaagatatggcttattctctcaagcccctggaaag

SEQ ID NO: 255437 - DNA, 589 bp, Homo sapiens
accaggtcttagggaaacttgcctggtctggctgagtagagggcggaggcagattcctttgcacaaggctgtttatgatatccaaactctctggctgctgcgatggaagaagagctgtgaggatgtaataatggcactgcagcagactggaggggttgagagggagakaacaccatgggctttggcaagtttgggcagattcctgccccccacccccaaccgcccctaccttggatggaggacctgagaagggttctgagggggttttagttggttaggaaagggagaaggtttagaaaagcctaggataggacagagtttccaggaatgatgatcacagcaaccatttatgtgccatttccttacataatctcatttaatcctcaaacgaactttctgagctgatattattgaacttactttaccagtaagaagaaaaataggagacagtgagaggactagccttagaggagttctgggacttttttgggtcacacagctggtatagacagtgtgtggcaggatttgaactgaggtctttctgattcccaaacctgtgcttttaaccactgccttcttttgccagtaa

SEQ ID NO: 255438 - DNA, 573 bp, Homo sapiens
tcctcaaacgaactttctgagctgatattattgaacttactttaccagtaagaagaaaaataggagwcagtgagaggactagccttagaggagttctgggacttttttgggtcacacagctggtatagacagtgtgtggcaggatttgaactgaggtctttctgattcccaaacctgtgcttttaaccactgccttcttttgccagtaattgaaggaggcctgagtcccatatgagctactgctttagataatcaaacctccagaccctcctcttcttggagcctactccctgcttccctggtctcggcccttcttgctgcttccccctcgttggggccttctgtgcctgtgccagcttgttgccagaggctctgtgtttataggatgaggagccctatttggcctttgcccacatcctgctgcaatctgggcaggatctccttgtcctactgctgtggctgctgtcccccaggtgacccccgtgctgccggcccagcagggtccatgtgcctaacagctggcaggaccttgttcctgtcctcctgccacatgctggctgcagctctgcagac

SEQ ID NO: 255439 - DNA, 528 bp, Homo sapiens
ttagtgacagaggtgtagcttcactccagagtctgcacgaggaaggaaggtagtagaggatgctgtggagcactttttggyttctcctagctttgtccagctctcctagctttgtctcatttaaccccattgaaaccacctggaggaatgactactccagccactctggagtccagacctggtcctgagcagggacagggaagctgtcctatgactgagagatgatgttttggcaccaagaaggtttctgtgtgtgtgcatgcatgtgtttgtgtttgcatgcacatgcgtcgagatgctccttgagaggttgtagaaagtccactttggccactggcatcaccatagcatatgagacagtatggtgagcctgaaagagcactgttcttagagtcaaaaacattaagttctctttctagaccctcatttagcaagcttcatgactctgggcgcatattcagtggttcttcaccagccgtgtgtagaattgtccaaataatccaccagccctgatgtctcccatagatt

SEQ ID NO: 255440 - DNA, 528 bp, Homo sapiens
ttagtgacagaggtgtagcttcactccagagtctgcacgaggaaggaaggtagtagaggatgctgtggagcactttttggtttctcctagctttgtccagctctcctagctttgtctcatttaaccccattgaaaccacctggaggaatgactactccagccactctggagtccagacctggtcctgagcagggacagggaagctgtcctatgactgagagatgatgttttggcaccaagaaggtttctgtgtgtgtgcatgcatgtgtttgtgtttgcatgcacatgcgtcgagatgctccttgagaggttgtagaaagtccactttggccactggcmtcaccatagcatatgagacagtatggtgagcctgaaagagcactgttcttagagtcaaaaacattaagttctctttctagaccctcatttagcaagcttcatgactctgggcgcatattcagtggttcttcaccagccgtgtgtagaattgtccaaataatccaccagccctgatgtctcccatagatt

SEQ ID NO: 255441 - DNA, 614 bp, Homo sapiens
taaatcagagaaggtctgtaaggtgctgagcccaggacatatcacatagtaggtactcactaaatataagctgcagttgtcgtgccaggcccactgtgaacaactccagaagacataaagcttctccatgggctttggrtgaagcctgggaccaggcagctaggtgttcccagttgcaggatggcagtgagcttagcacgggcccctgctcacgctccctggctctctctgccagaaaaatgggtggtactagagagtctgcatttccctgcgagcagctttcttcccttggcatcctaggcagggcctttgtacaattccttttcagcccccaaagatctatatcagaggtaatagtagttccaactgatacttacagagcacctactatgttccaggcactggattcattaatcctcccaatctttctgtgaaatcagcactattattcaccctgttttacatgggatgaaatgcaggcacagcaaggccttgcttagagcaagtcacttgctaagaattatatagctaaatcagagccacaacttgaactccattctgaaccaaggagtttgaaaccattcctcctgcatgatgcatgaaattttaataac

SEQ ID NO: 255442 - DNA, 614 bp, Homo sapiens
taaatcagagaaggtctgtaaggtgctgagcccaggacatatcacatagtaggtactcactaaatataagctgcagttgtcgtgccaggcccactgtgaacaactccagaagacataaagcttctccatgggctttgggtgaagcctgggaccaggcagctaggygttcccagttgcaggatggcagtgagcttagcacgggcccctgctcacgctccctggctctctctgccagaaaaatgggtggtactagagagtctgcatttccctgcgagcagctttcttcccttggcatcctaggcagggcctttgtacaattccttttcagcccccaaagatctatatcagaggtaatagtagttccaactgatacttacagagcacctactatgttccaggcactggattcattaatcctcccaatctttctgtgaaatcagcactattattcaccctgttttacatgggatgaaatgcaggcacagcaaggccttgcttagagcaagtcacttgctaagaattatatagctaaatcagagccacaacttgaactccattctgaaccaaggagtttgaaaccattcctcctgcatgatgcatgaaattttaataac

SEQ ID NO: 255443 - DNA, 614 bp, Homo sapiens
taaatcagagaaggtctgtaaggtgctgagcccaggacatatcacatagtaggtactcactaaatataagctgcagttgtcgtgccaggcccactgtgaacaactccagaagacataaagcttctccatgggctttgggtgaagcctgggaccaggcagctaggtgttcccagttgcaggatggcagtgagcttagcacgggcccctgctcacgctccctggctctctctgccagaaaaatgggtggtactagagagtctgcatttccctgcgagcagctttcttcccttggcatcctaggcagggcctttgtacaattccttttcagcccccaaagatctatatcagaggtaatagtagttccaactgatacttacagagcacctactatgttccaggcactggattcattaatcctcccaayctttctgtgaaatcagcactattattcaccctgttttacatgggatgaaatgcaggcacagcaaggccttgcttagagcaagtcacttgctaagaattatatagctaaatcagagccacaacttgaactccattctgaaccaaggagtttgaaaccattcctcctgcatgatgcatgaaattttaataac

SEQ ID NO: 255444 - DNA, 512 bp, Homo sapiens
gtggaggggaaactgtattatcctctccttggagagggaaaggaaggttctccctgtttattcgtactccgagcaggctccccctggagggcagccactgggagcttgatggggaatcctttgtactgcgcactttggaggcatctactagaaacaaagtaccctgtgacatgctggaagggatctccggacagtaaaacatacaaggaacagacccagggcaaactgtacttattcatgatgggccctgaagtgtgaaggggtttattcaaaagaagtaggtaggtggcattccaggtaaaggggacattgtgggcaaagacatggggatgaaacstgtgctgtgtcaactcagggttaaatggattaagggcagtgcaagatgtgctttgttaaacagatgcttgaaggcagcatgctccttaagagtcatcaccactccctaatctcaagtacccagggacacaaacactgccgaaggccacagggacctctgcctaggaaaacagaga

SEQ ID NO: 255445 - DNA, 533 bp, Homo sapiens
gatgaagaaactgaggcttacagaggttcagtcacttagtgaagtgggagcttggttttaaacccatacttctgcctctagggcttgcctttgtgtagtttaagagtgaaagactttccagaaagagacctggagtgaaggcctatcctagggatgagttgcaggccttcactgtgcagagtagaggatgccaatggcacactttgccagagacccattgaaacactccccagtgccagctgttggctgtcactccttccatctccctgtcctaaatacctccagaaggtttagttctgacaccackcatgtggggcccatttagagagacagtgagttagggaacatggctgaggatggaggaaggagcaccactaattgtggtaaacccataattagttctctgcttatggcttcaatcagtacttttaatttaaaaggtaatatctgtggattttttttttaaagatttgtgacatgggtataaaaggaatagaaaacactcatgttttctccaaccaacctcaccccac

SEQ ID NO: 255446 - DNA, 533 bp, Homo sapiens
gatgaagaaactgaggcttacagaggttcagtcacttagtgaagtgggagcttggttttaaacccatacttctgcctctagggcttgcctttgtgtagtttaagagtgaaagactttccagaaagagacctggagtgaaggcctatcctagggatgagttgcaggccttcactgtgcagagtagaggatgccaatggcacactttgccagagacccattgaaacactccccagtgccagctgttggctgtcactccttccatctccctgtcctaaatacctccagaaggtttagttctgacaccactcatgtggggcccrtttagagagacagtgagttagggaacatggctgaggatggaggaaggagcaccactaattgtggtaaacccataattagttctctgcttatggcttcaatcagtacttttaatttaaaaggtaatatctgtggattttttttttaaagatttgtgacatgggtataaaaggaatagaaaacactcatgttttctccaaccaacctcaccccac

SEQ ID NO: 255447 - DNA, 588 bp, Homo sapiens
tgaggatggaggaaggagcaccactaattgtggtaaacccataattagttctctgcttatggcttcaatcagtacttttaatttaaaaggtaatatctgtggattttttttttaaagatttgtgacatgggtataaaaggaatagaaaacactcatgttttctccaaccaacctcaccccactgtctcagaaatcacctctatgaacagtttcttgtgcatcattccagaaaatttgtacaaaaacaagtatatycaaatacatctatcctttctttactccagttggaatttcaccatcctcaccatcctacagaggtcttctttcatgcatcatcatctcttaggcatctcctgacatagatgtcaaatgccttctcttaactctgcactgtagactattatatggccattgtcctcctggtaggcattttggttatcctgattttttgccgtcatgaacaatgtgctgattacacctctatttttgcacagtttcccatataggactgtaagataggtggactcctgaaagcataattattggatcaaagtacatgctttttagattttactaaatattccctat

SEQ ID NO: 255448 - DNA, 549 bp, Homo sapiens
ttgctttttgtccttctctttcagtggaatgcaagccctgtgaaggttggagctgtccctgttcactgttgtagcttcagagtagagagcagagagggattagataggaaaataagtgaatctcagctgtattctactccacatgccacctttcttagacttgacccaggtggtcaactactagctcacacattcaccagtaaaggcaaagggctttctccttggttctgtgatctcgtaggatcttcaaagtctaaaaccatcttctttccaccttggagcctcttctttcatgttctcaccgtccctctgaaaataggccaacagtcatatytgttggtgctgatttgcagacagataatagatcaaacattttcagaaggaacctttggccccaagaactaattacatccccatcttggaaggtgactgtccctgtgtcatttaaactgtgtaagagaatggtggaggctgagtgtgacctttggcaaagcccacacgagggtactcagggaacagccagcaatgggagaagctgcagtgagccct

SEQ ID NO: 255449 - DNA, 549 bp, Homo sapiens
ttgctttttgtccttctctttcagtggaatgcaagccctgtgaaggttggagctgtccctgttcactgttgtagcttcagagtagagagcagagagggattagataggaaaataagtgaatctcagctgtattctactccacatgccacctttcttagacttgacccaggtggtcaactactagctcacacattcaccagtaaaggcaaagggctttctccttggttctgtgatctcgtaggatcttcaaagtctaaaaccatcttctttccaccttggagcctcttctttcatgttctcaccgtccctctgaaaataggccaacagtcatatttgttggtgctgatttgcagacagataatagatcaaacattttcagaaggaacctttggccccaagaactaattacatccccatcttggaaggtgactgtccctgtgtcatttaaactgtgtaagagaatggtggaggctgagtgtgacctttggcaaagcccacacgagggtactcagggaacagccagcaaygggagaagctgcagtgagccct

SEQ ID NO: 255450 - DNA, 538 bp, Homo sapiens
cagacttccagcctccagaactgagaaatgaatgtttcttgtttaggccacccagtctacggtattctgttatagcagtccaagctgagtaagacactccccacttcatgagtccttcacttgtacttattagaatggtaccttcatcttgaccatgattttgcctctaggcctttgcatattctgttccctctgtttggatagcccttccccctcaagcctctttatcttatttccacagattttttcytaccacccccacccaagcatacatttttttatattttgatatctctgaaatggggatgaattgaagggtcattatgcatatttgtggtagtaagtcatagactggagacatagaattcctcttcattgtctaaggctcagcccaggcagttcctctttgggtttaggctctcttctctgggttgcagtaacctccaggctactctgtcattgcattagtcagactatactgtatttgtctgctcattggtctccccctgcacgaggacctccttgagaacagcaaatg

SEQ ID NO: 255451 - DNA, 570 bp, Homo sapiens
ttccaccatgtgaaaataaagtgagaagacaactgcctgtgaatcaggaggaacaccgttaccaagaacctaaccatgctggcaccagatctcagacttccagcctccagaactgagaaatgaatgtttcttgtttaggccacccagtctacggtattctgttatagcagtccaagctgagtaagacactccccacttcatgagtccttcacttgtacttattagaatggtaccttcatcttgaccatgattttgcctctaggcctttgcatattctgttccctctgtttggatagcccttccccctcaagcctctttatcttatttccacagattttttcttaccacccccacccaagcatacattttyttatattttgatatctctgaaatggggatgaattgaagggtcattatgcatatttgtggtagtaagtcatagactggagacatagaattcctcttcattgtctaaggctcagcccaggcagttcctctttgggtttaggctctcttctctgggttgcagtaacctccaggctactctgtcattgcattagtcagactata

SEQ ID NO: 255452 - DNA, 581 bp, Homo sapiens
tattgttcatgctaacagatgtggtgttaagaaacttgaacccctggtttgttttcttatcagtaaaataggagagacaaatggagaattttttccttataggttgttgtgagaatgaatatgaaatacttcacatgtaagagtaagccttcagtacattcttttttcttttcttttctccaatagcatcagtgacatcatcattctttatgttatatgtgcgtgcatcttgcatgaatgtatatataaatgyctccatttgatgtctaatcatctcaaactggtcatgcccaaactggaactcttggtttctcaagttcatctcacagactgtttctcccttagtcttctgcatctttgtcagtggcagcaacacctgcccagttgttcaaactaaaaacctaagagtcatccttcactcctttctttccctcacactcatattcagttgcacatctttgccaatatgttgcaaaattgatccctcttcaccacactcactgctaccctcccagacactaccctcctgtcattcctgtgcaagtgtcctggatctgaccctcctgccaccaccctggacc

SEQ ID NO: 255453 - DNA, 581 bp, Homo sapiens
tattgttcatgctaacagatgtggtgttaagaaacttgaacccctggtttgttttcttatcagtaaaataggagagacaaatggagaattttttccttataggttgttgtgagaatgaatatgaaatacttcacatgtaagagtaagccttcagtacattcttttttcttttcttttctccaatagcatcagtgacatcatcattctttatgttatatgtgcgtgcatcttgcatgaatgtatatataaatgtctccatttgatgtctaatcatctcaaactggtcatgcccaaactggaactcttggtttctcaagttcatctcacagactgtttctcccttagtcttctgcatctttgtcagtggcascaacacctgcccagttgttcaaactaaaaacctaagagtcatccttcactcctttctttccctcacactcatattcagttgcacatctttgccaatatgttgcaaaattgatccctcttcaccacactcactgctaccctcccagacactaccctcctgtcattcctgtgcaagtgtcctggatctgaccctcctgccaccaccctggacc

SEQ ID NO: 255454 - DNA, 575 bp, Homo sapiens
tcaaggcttcccccagaccctagcatccttgattgtctaagcttaggtttttggacaaagaactattggttttcccctcttttcttccccccactccacgcccaccactgcccttttctcccttagcttcccaagtaacacatgcataaagcaatcactagcacagaaggatgcgtggtaaaaagcacaagtgtcgctttatcctccatggctgccctgagtctgcttccccactgcccagaggctgtcaccagtttggtgtgcagcttatgcatttacctgaagttatgtccacaaatgactaccaagcttttttagcataaatggaaccatcccatacatagcattctccaccttgcttttacacttggcagctttccatggcagcacataaatttgcttctttctctttaatggatgcaaagcatttcatagtttgcatggactacaatttatttaaccagtttmctgttgatgggtgttaaggttatctccactttttctgaggccacaaagcattggtttttatttgccaaagctctagggaaggcagagattgtccagccacagacccc

SEQ ID NO: 255455 - DNA, 618 bp, Homo sapiens
gcttcccacttccttcagctttctgaagtcactccttctctgtattctgagagggtgaggaacacatgggttagtgataccaggcagggtagaccagatgtggagggccttgagggaaagactgtgctaatgtccctcaccctccaaacgaagatcatctactgctctgcggctccagacccctatgcgggcagaaagtgagtcagggaggcatgaagaagagctcagtcttgagaggatgagacaagcaacagatccaggcaaggatccttcaccaggaaggggagcccagggtgatggataggagcagctcatcagagcagggacagaggtatggggwgataaagactcaggtattagatctgagaacactaggggacatgacctggggaacacaggtattattaacaataataatagatcaggtattattaacaataaaagctactatttatcaagctcatactatgtaacagacactgttctctggacttttgtttgcgttatagtcatttaatcacaaacaataaatatattttactctgtgctaagcattctacatttataaacttacttaatttttcacagcattcctatgatgtgggaacaattattatc

SEQ ID NO: 255456 - DNA, 568 bp, Homo sapiens
ttcctctcctgcactggccttttagagaaatgtaagggcaggcactgttgttttttcttttcaacrgagtcaagcaaaagatgaggcacatggaggcaccatgcgactaaaagctctgaggatgattgtcaaaaccccactggaggagttggaaagcatgtaaggttttgctcttgtgtggcctcagcagccactgcctggttcaagtgaagtttgcacagtcccttggcctagagcttcatgcccagcttttgccaagcgtgggccaagtgggggaatgattccccaggtttgtttgcctggggcagccaaagaaacagtgatttatttcccctgagtgtgtcatgaaaatgtaagcaccgagagttggattattttggagggtgagaatttgatgggggagatggagatggaagaattgcagcagtttggagtcagggctgggggccagaggcccgcccagtgggttggggtaacataagctgccgctattcaggaggtggcctgtgtaagaaaatctgaccacagcgggtgcgtgacttcagctaaaattaaccttggaggcttc

SEQ ID NO: 255457 - DNA, 542 bp, Homo sapiens
accaccccactgctcaggtttcttgggtaagaaacatcctcaaataatcaccaygagtgcacacagtttgcctttggtgttgggaattttaataagcaatgtacaccttatatagccactcacctgccctggtctgaatggccctaagaaaacaaaaacaaaacaacaaaacaaaaatcctttaccattaaaaaaaatctcccaggctttccagagtgattatatagcctcacatcagtctcctggggttaaagcattgaggatcccattggaaatgtaaatgttttttgggaactgtgactcacctttctctgccagagctgtgtgcctgggacctagtaagccctgatggaatggaatgtgggtcaggtgagttttgatccccaagtcaggcagagacagttaggtccagtgtctgggaatgggggaacacctggagcggggcttttgggacgcctcagtgggtgatgaggtccgagttgggggagggagggcctgggcaaattgaggatggtcagtgtttgggagaccagtgccaaaac

SEQ ID NO: 255458 - DNA, 576 bp, Homo sapiens
gaaactggggtgtatagatcagggtagcctgtacatatccacatttgggaattttatgtcctagatcatgagagtagctcttgattgtagtaaataagacagctgcataacaggagggaaaatgcagtgatagtacatgtcaaacttcatcacagccctgtctcaggagcccaaggcaggaggtcagatggtctgggatctaatcatgggtctagactgtgaccttgaaccaggcatttcacctttctgggctttagtgttttctcctacacaattataatggtaaaccttgatgttgtcacctcactgaattattaggatcaaatgagagaataatgaaagtccttgcaaagttaaaaatgctctagccatgtataacttgatccctagtcaagttgtataaagcaataataccaataggaacaataaactttcaatgagcactgatcatgtgacaggcastgtgcccagtgttcgcatgcatatctcacatggtccccacagcaatcttgagagacaggcatcattataatctgcatgtgcagatgagcgagcagggcatgaaaaatttaaata

SEQ ID NO: 255459 - DNA, 617 bp, Homo sapiens
catgcatgggagcagtctagagagcctactttgtctgaagttcccctggccggcccccaccgtgtctgagctttttcccattagtcattgctttggctgaaagagtggaagacccctgttaaactgaaataygttatctgggaaatacattaagccattaacagctggacacaaattagtttatcagacagaggctgggcttgcagaatttaggagtgagaaggaactttatagatcatcagtttcttagtgaagaaaagaaggtccactgatgagtagctcttgctcaaggaaacaccagtggcaccttttgggatgccaggcctcaaccctgcctcctggcctgaacccctcttcattccaccttgatgagcaagatggacagtccaactttcattcaggagatatttatcatgtggctgccatagctgggcaggtgctgaaaattcagagaagcatgggaggcagacatgggagtgttgagtgattgaacgatgtgggacaggtctcttgtatggtgggacgggaaaggtctggaacagaggacaccactcagtgaaaggcagatccagactctgaggggtcagccccaccaggggctccacagtaccagaaca

SEQ ID NO: 255460 - DNA, 344 bp, Homo sapiens
tccaagctgtacctgagatgccactctaacaggcagcataggaaagctgggtcccgatctgaactgcatagggtcaggttgccaaacctaaatgctttttwaaaaagaagaaaaagaatgatttgccaggcagggaaaacgtggagcctcccaggggatggcttctggagcttggtggcaggtggccatggtaagggctgggatgtcttctccactccgatattgctgcccgtttagtctatggagggagctttcctcaacaagggtcaggggtcagcctttattgggtctgcctgaatctttagagctgtctcacttttcaaattaactgtgaggaccaccca

SEQ ID NO: 255461 - DNA, 575 bp, Homo sapiens
caaaccagaattcctgagtttcaatcctaaccctgccatctactagtggtatagccttgggcaagtgattcagtccctgagagcctcagtttctccatcagtaaaatggagatcatattaatttctacttcacagggttgttgtgatgtttcaatgagttactctctatggagtgcttagcataatacctgaacataatgagcactacacaaaagaactattattattattattattattattgctattaatactagtctattgatcatttctctgcctaccattaagagattgagcctttccaggcaaacaactcttgtttggaaagaaaatgttctggagaggagtaccccaggcatccttctctcactgtttgtgttcccttccccagcaagagtttggcaggcaaagctgttcaaagtaaacacaggttcagtgcygcagaaaatatcaggtttggtagcacggcaagtctggaccaaaggaaacaggcttgctttatgccgacttcactcggccactgcatcccaggggctgccccagcagggctggtgctttctggcagacaaggcctt

SEQ ID NO: 255462 - DNA, 431 bp, Homo sapiens
acagcatattccttggtctgaagaaataatggttggccatccaaatccattcagtatcttctgttcttgtttgtttaagtagcaggctgagcatttttaccttccatggggtaagcaaaatctagcctagaatcagtgtctatttctgtcaagacttatatttgtattccctcagggttatcagcatcagtctcacttgccagctatgtttgagccttccaactaaggaatctgccccatagccattggcaatctctgtctcttttgctggcagattgaacagtttttattgccattttttttggcattatgcatctgagagggtgcaaaagaacatgtctagacttagccccatctctgcactgctgcaatagcctcatgaccagtcatctcatggacccrggtggtcacctcaaatgaacacacaggaa

SEQ ID NO: 255463 - DNA, 606 bp, Homo sapiens
gcatttaggtaaaggagacacgacttctttaaacaaggcctgtttaaatattccaactttcataatcctatcaacttttacattgttatgttctctcaatctaattgtagttccaacaagggcttcaccaatgaatcttggaaccacagtgcatggggctcccatatcaaggattcccaggaatttttcttcaccacttcctgaccatttcattcacttgygtacataaggctttggatccccactaggggattgagcaaagagacctttgcctatttctaaatctttatcttggttaatctgtctgcttattgccccaggcaattacagatttctgtttgtaatctttgctttctgatttttaaaatttccccaaactggggtacagtgtcagcttagatagcaaacagagagataaggtatctaaaagaaaataatatttatttgggaataagggcattgcaataggaatatataagtcatagtaaactatgtgcatattcagggaggtaaagaaagacaaggtttttaaggaaaaaatgaggagggttacacaattgttttgagatcattactcttggctacaaggatcaataataagtgtga

SEQ ID NO: 255464 - DNA, 622 bp, Homo sapiens
tatcttcagttatttatttatttatttagagacagggtcttgctttgttgctcaggctctattgcagtggcacaatcacggctcactgtagctgcaacctcctgggctcaagcagtcttcctgcctcagcctcccaagtagctgggaatacaggtgtkcaccaccacacctggctaatttttatactttttgtagagacagggttttgtcacgttgcccagatcttgaactcttaggctcaagcagtctactcgctttggccttccaaagtgctgggattatgagcatgagccacagtgcctggcttaactttagttatttaatctgatgtaattaattttgttctgattggtcttgattaacagttttataacctcatcagtttttttattcaagttttgaaaacattttatttaatccattaatcttaaagttattagaaacctgtatttaagagtgcgggttagagttttccacaaatctgagtgcaaatgcttttagaaaagaatttaaaaaataattttggatgacaaatatttagaatagccaaatttaaatataatggaagtttattataatcagtagttaacaaggagatctagttacttttatgacatataac

SEQ ID NO: 255465 - DNA, 624 bp, Homo sapiens
gctatgcccatctatagaaacccctttctctcatgttaggctttgtgaggttgactgatgtcctagactaaggctggctgttgtcctggactaacacttattattgatacttcacctttctggagggggactttctagaaatttgcagtgtagttgaggtcctcttgatccccttccagctcatcttcagaagatctaatgactccaggttcctcttagcacttttctgtctgatctagcctttataactagacctacaatgtaaattaaaaattctaactcatacattttacagcccataaaccatgtctcttgatattcacattttatgtcattttctcccatattgcctttggactttgatcaatgggacattagcaaacatgacacaataataggctttaaaagcacttgcacactggggcatgtacttatggactgctcaattttggatccctgagtcaccagataaagaggtctggccattttattggagagaccatatggagagagatgamgagatgctagaacaactggaactgtgccagtggttccagccatcctaactgtggtgctagacatacgaaggaagtcatcttggttgatccagcaccaatagaagaa

SEQ ID NO: 255466 - DNA, 560 bp, Homo sapiens
ttataatcatggaagaaggtaaagaggaagcaggcacatcttcacatgaccacagcaggaggaagagagaggagacagaagtgctacacacttttaaacaaccaaatctcatgagaattcactcacaatcaccagaacagcaagaggaaaatccatccccatggtccaatcacctcccaccaggccacacctccaacactggggattataatttgacatgatatttgggcagggacacagaccgaaaccatatcattctgcctctggcccctcccaaatctcaccttctctttacatttcaaaaccaatcatgccttcccaacagtctcacaatgtcttattaccccaaaagtctcattccagcattaccccaaaagyccaagtccaaagtctcatctgagacaaggtaagtcccttccacctatgagcctgtaaaatcaaaagcaacttagttacttctgagacacaatgggagtataggcattgagtaaatactctctttccaaaagggagaaatcagccaaaagaaaggacctacaggccctttgcaaatccaaaat

SEQ ID NO: 255467 - DNA, 639 bp, Homo sapiens
ttactttttatagttctagaggctggaaagtccaaggtccaggggcatgcatttggtgaggcccttcttgctgtgtcataacataatgaaaatcattacatgggcaggaaagagagcaagagaaggggttgaactcattcttttatcaggcatctactmctgtaatgactaacccactttcttgataataacatcaatccaattatgagagcagaacccttatgacctaatcacctcctaaaagtcccacctctcaacactgttgcaatggggattaagtttccaacacatgaactgtggggaacacattcaaaccatagcacttgcctttctgcctctggatgcagcatattttctcaataaaagcagctgtttcttcctggatctagacctttgagccaaccttattttagagagaactacagatatattgtattatgtaaaatgaagaatcaagttcaaattaagttgtccttgaaatgtccatggttagtagcatctaaggtatccatgctgcattatgtaaaatgaaaaatcaagttcaaattgtcatcaagttttccttgaaatatcttggtgagttgcaacttaggtatccaattgtcgtttgttctcagccccttaccaggccattctcaa

SEQ ID NO: 255468 - DNA, 522 bp, Homo sapiens
cgattatgacagttttatgtattattttttctgactagtctctttttattggttaagacttgagcttctgaggaataagaggaacctaaaggactccacttgagatggctggctcatgcccgttgcttaaatccaggtgctrgattggagctatgtgaaaccctcaacacataagaagttgaaaaaaaactgctttgaagtgatgctcaggtcttttttttttttaacttttaagttcaggggtacatgtgcaggtttgttacgtaggtaaacatgtatcatggaggtttgttgtacagactatttcatgacccagttattcagcttagtaccattagttatttttcctgatgttctccttccttccactctttacccactgacaggtcccagtgtgtgttgttcccctctatgatatcatgtgttctcatcatttagctcccacttgtaagtgacaagatatggtgtttggttttctgttcctgtgttagtttgctaaggataatcgcctccagctccatc

SEQ ID NO: 255469 - DNA, 583 bp, Homo sapiens
gtgtttttttttttttttgtttttgtttttgtttttgttttttggtgtgttttatttgtttgctaactctggtaaagccagaggagacttaggggattgaggatggggaaggacgtaattaaagcatgatcatgatgttttttccactgcagctttcccagcctggatkggattcacttggggaaggggagaaactttggattggatgagagactaaattttatatatgagactggtctacacttttattaccagaaaaatggcagtattcattggtagctgaaatgacttgataaaaccatgtgatctacccaggacttcatgcagaagtagggaagaaggtgtcaatagagcttgcctaaaggcaatagtgtgcaagaataaagctactttctgctcatatccttctcagttgagctcaaagaagagcctgcacagttccatgggcttcctcccacaatgatgccaggtttggactctgcatatctatggtgaggttcttgcttgggttcacagcttaccctcacagtcacatcctggggaaaaaccaggcactgtaatgctagccaccgtgtccgggttg

SEQ ID NO: 255470 - DNA, 583 bp, Homo sapiens
gtgtttttttttttttttgtttttgtttttgtttttgttttttggtgtgttttatttgtttgctaactctggtaaagccagaggagacttaggggattgaggatggggaaggacgtaattaaagcatgatcatgatgttttttccactgcagctttcccagcctggattggattcacttggggaaggggagaaactttggattggatgagagactaaattttatatatgagactggtctacacttttattaccagaaaaatggcagtattcattggtagctgaaatgacttgataaaaccatgtgatctacccaggacttcatgcagaagtagggaagaaggtgtcaatagagcttgcctaaaggcaatagtgtgcaagaataaagctactttctgctcatatccttctcagttgagctcaaagaagagcctrcacagttccatgggcttcctcccacaatgatgccaggtttggactctgcatatctatggtgaggttcttgcttgggttcacagcttaccctcacagtcacatcctggggaaaaaccaggcactgtaatgctagccaccgtgtccgggttg

SEQ ID NO: 255471 - DNA, 583 bp, Homo sapiens
gtgtttttttttttttttgtttttgtttttgtttttgttttttggtgtgttttatttgtttgctaactctggtaaagccagaggagacttaggggattgaggatggggaaggacgtaattaaagcatgatcatgatgttttttccactgcagctttcccagcctggattggattcacttggggaaggggagaaactttggattggatgagagactaaattttatatatgagactggtctacacttttattaccagaaaaatggcagtattcattggtagctgaaatgacttgataaaaccatgtgatctacccaggacttcatgcagaagtagggaagaaggtgtcaatagagcttgcctaaaggcaatagtgtgcaagaataaagctactttctgctcatatccttctcagttgagctcaaagaagagcctgmacagttccatgggcttcctcccacaatgatgccaggtttggactctgcatatctatggtgaggttcttgcttgggttcacagcttaccctcacagtcacatcctggggaaaaaccaggcactgtaatgctagccaccgtgtccgggttg

SEQ ID NO: 255472 - DNA, 514 bp, Homo sapiens
tgcaaaaacccttacaatacatacatacgcatatttatatttatacmtataatacattgtgatcaaatatgaccaaatgtactttatgtcaggaatgtaagattggtttaatatttgaaagtcagtggagtttaccaagttaacagaataaaagagaaaaaccccattatctcaaataggtgcagaacaagcagttgaaaaaattctacaccaactaaagataaaaattctcagcaaactaagaatagatggaaatttcctcagttttataaagggtatctgttaaaaacctacagctaacatcacacttaatgtgaactattaaacgtctttccctttaggactgggaactaggcaattacatccactctttctgtttttgtttaacgttgtactgaactcttaaccagtgcaaaaaagcaagacaaataaattaggggaatacagtttggaaaggaaaaaataaagttatatttcctcacatattttatgattatatacatacagaattgaa

SEQ ID NO: 255473 - DNA, 539 bp, Homo sapiens
gtgtacctgttcatttgtatgccttttgagamctgtctgttcaggttgtttgcttattttttaattgggttatttgttctcctgctattgagttgtttgtgttactcaaaaattttggatattaacctcttatcagatgtacggtttgcaaacattttcttccattctgtagattgtcttttcactctgttgatagtttcttttgctatgcaaaaactttatagtttggtttaatacaatttgttttagttttgttgcctatgttttctgggttgtgtctgaaaaatcactgtccagacaaatgtgaagattttccaccatgttttcctgtagtagttttgctatttcaggtcttagatttaagtctttaacccattttgagtaaattttttgtacatggtgtaagacagggatcaaattttattcttctgcatgtaagtaatcagtttttccaatctcatttattaaacactgtccttgtcccattatgtgcttttggtacctttctcaaaaatcaattgaccataaatgtgtggatt

SEQ ID NO: 255474 - DNA, 660 bp, Homo sapiens
aagctatatactaggagaaaatatttgcaaattacatttctgacaaagaatgtgtatccagaatatatgtacaaagaacccttaaagctaaataataaatgaagtaaaaacaaataaacaaacaacccaataaaaaatgggcaaagtacttgaacagatacatcaaagatggcttttgaatagcaaataagcatgggaaagaatgttgactgaattagtcaataggaaaatgcaaattagaatcacaagatatcactacacatctattggaatgtctaaaattaagtgattgaccatatcaagtgcaaggaaagttttggggtgatggacatgttctttatctctatcgtgatgatagtttcacaggtataatctcaaattgaaatgtgcaatttattgtatgtcaattatatckcagtaaagctgtttaaaagtaataataatgctgcaaagtggtctggggctatgtggcaagagagcctccacttccattttggagtagacttgatcagagtgatatcaaagccctgctgctttcttcatagttttggaagactgtaaggaggtggctctttctatttttactactgtacactcacttgtcttccaagagcccagaacaggaattggaggtgaggaggggctgctctgtgcacacac

SEQ ID NO: 255475 - DNA, 619 bp, Homo sapiens
attagtggcaatgttaacaaatgtagtttttaaaattttgtctcagagtaaacaagtcaacatttggaagatstgaataattcagtgaaccaatattttccaaatgaccaaggcatgctgttacaaaatcatgcatgagtaaatgattcatacaaagaacaagagaaataaatggattttagtgaaacataatagaaaaagttcatggacttggtttaagattccacattgcaactaagctaaattaccacttgtcaagttttggaatatcaaagaagaatatccacaattagctaaaaaggaaatattcctctttctctctctctctctctctttttaattgcatacctgtattattaaagatgagattttcttcctatacttcaacccaaacaagtattgcagcagattgaatggagaggcagtgatgggatgcagctgtcttctattaagccatgtttaagagatttacaaaggtgcagcccagtgccactcatctaaccaaattgttttggaagatgtaattattcttcattaaaaatgtattatttatgttaacatgtactgggcttattattgttcgtttaaaatgaatttacaatttttttttaaattctga

SEQ ID NO: 255476 - DNA, 604 bp, Homo sapiens
catgtacacctatgtaacaaacctgcacgttctgcacatgtatcccagaatttaagtatataataaaaaaaaagcaagtgtctgttaattcaaactctagttctttctgaggccataagtgttctattaagcgcaagtaatacagttaatttattttcaaagaaaaaaaaagaatagtagtttgatataaaagcaattggatggctctgagtttagtaacttttctccagcaagctcctagtkgctgagtggagaaaatgaaactatagcagatgttactcatggtcaaaggcaaaaccttagaggaatttattaataccttatacagctcatggcacaaagtaaagccctgatccattcaaatccttattcaaaagacagagtttaatagctccgacaaatatgtaatttcccaagttcctctcaattcctccatcttccagaaaaacctaattaatttactcactcatatcatacccaaacatagatgagggtgatacagaaggcagcaaagaggttcttatctgaaaaaataactttgcttttgccctagaatttctcctctggctttcttctttgagcttatgtcaccttaaatttttga

SEQ ID NO: 255477 - DNA, 664 bp, Homo sapiens
catatacaaaaattgattaataatttaaacattaaaactgtaaaaatactagaagaagacatagggcaaaagctacacaaaattagtctgagtaattagatgtgaccttaaaagctcaggcaacgaaagaaaaaatggacaaaaccaattacatcagactaaaaagcttccacaaagcaaaggacacaataaacagagtgaagagacaacctatagattgggagaaaatatttgcaaaccatacatctgataatgggttaatataaaaaaaataagaaactcctacaactcaataaaacaaataatataatttttaaaagtgcaaagaacctgaatagatatttttcaaaagcagtcatgcaaatggctaacagatatgtaaaaaattactygacattactaataatcagggaaatgtaaattaaaatcacaacaaaatgtcaacttgcccttgtctgaatgactgttatcaaaaggatgaaagatgagtgatgacagggaggcagagaaaagggatcatttgtacattgctggtgggaatgtaaattggtacagccattatggaaagctatatggaggtttctcaaaaatagaattaccacataatctagctatcccacttctgggtgctgatctaaaggatttgaaatcagaatattgaaga

SEQ ID NO: 255478 - DNA, 664 bp, Homo sapiens
catatacaaaaattgattaataatttaaacattaaaactgtaaaaatactagaagaagacatagggcaaaagctacacaaaattagtctgagtaattagatgtgaccttaaaagctcaggcaacgaaagaaaaaatggacaaaaccaattacatcagactaaaaagcttccacaaagcaaaggacacaataaacagagtgaagagacaacctatagattgggagaaaatatttgcaaaccatacatctgataatgggttaatataaaaaaaataagaaactcctacaactcaataaaacaaataatataatttttaaaagtgcaaagaacctgaatagatatttttcaaaagcagtcatgcaaatggctaacagatatgtaaaaaattactcgacattactaataatcagggaaatgtaaattaaaatcacaacaaaatgtcaacttgcccttgtctgaatgactgttatcaaaaggatgaaagatgagtgatgacagggaggcagagaaaagggatcatttgtacattgytggtgggaatgtaaattggtacagccattatggaaagctatatggaggtttctcaaaaatagaattaccacataatctagctatcccacttctgggtgctgatctaaaggatttgaaatcagaatattgaaga

SEQ ID NO: 255479 - DNA, 526 bp, Homo sapiens
aagctcataattttcaatagtaagatttaatattatggttgcactgttgtatgaagtagaggtgtattatgaaattaacctgcaatgtaaaatgcctcaarccagttctttgagcagagaagcacaaacttaaatgttattctttataggcatagagtttattctttgttttaaaaagaccatttgttctctgttagtttcttctttaggtagtagtaaagagatcaagatataaatgaactttcaagaggaaactctgtccagtggccacaaaatgaacacctgttctaatcagtagctcacaaatactcacccttggattaaaggagaactgagtaggagaatgttaatgacaacatgaagcctgtcactaaagaaaaagttttaaaagtacacattctactgattataaagttctactcataaaagaaggaaaaactaagcctaagagatggatgggggagaaataatggggcaataagaattcctggttttgtgataagcctcatagctgactgatgatgtc

SEQ ID NO: 255480 - DNA, 592 bp, Homo sapiens
attatggttgcactgttgtatgaagtagaggtgtattatgaaattaacctgcaatgtaaaatgcctcaaaccagttctttgagcagagaagcacaaacttaaatgttattctttataggcatagagtttattctttgttttaaaaagaccatttgttctctgttagtttcttctttaggtagtagtaaagagatcaagatataaatgaactttcaagaggaaactctgtccagtggccacaaaatgaacacctgttctaatcagtagctcacaaatactcacccttggattaaaggagaactgagtaggagaatgttaatgacaacatgaagcctgtcactaaagaaaaagttttaaaagtacacattctactgattataaagttctactcataaaagaaggaaaaactaagcytaagagatggatgggggagaaataatggggcaataagaattcctggttttgtgataagcctcatagctgactgatgatgtcaaagttctaaagaagcttaaacttgtaaaagtcttctttaggaaacatgcctaaggttgtgacctgctcactatttggaagccaagtatctttcccc

SEQ ID NO: 255481 - DNA, 616 bp, Homo sapiens
ctttccttctggtattgtcctctggactctacctatacagggtattttcattcccactaagattatggagcctgttttaactctattatctttcacactcttcctaagcttcagaacagtcaacaaagtaacttttatggatactgacacttcttgtaccaatgcatgcaaaagataggtttttaaccctctttagggacaaaattaaagrgaaaagagggaatatacatgattggtgataacagtttggctctgtgtccccacccaaatctcatctcgaattgtaacccccaggtgtagagggatgggggtgattggatcattggggccatctcccacatgctagtctcatgatagtgagtgagttctcaggagatctgattgttctataagcctctaacatttgcctggcttgaaattttatctcctgccaccgtgtgaagaagatcttgcttcccatttgttttccaccatgattataagtttcctgaggtctcaacagccacactgagctgtgtgtcaattaaacctctctttcctttattaattaccctgtctcagatatttctttatagcagtataaaacagactaatacaattggtaaaagcaaaactc

SEQ ID NO: 255482 - DNA, 534 bp, Homo sapiens
tggtctaagtttaatattgttgtgtcacagagagcagggaggcatcagaaaaatggtgtaggaagcctacatattgcagagtctaagagttgcattttggggagcccaatattttatgtgagtttttttcttagatcatttctcaactcaaggaataggagagaggccaaaattctgggcagaagatggctgctcagaggcagaaaacccagaagaactttcagcaatttcatagttttgggggagaccgaaattggaatgagactgccaaggcagccaaggctggagggactagagatggggagtaaacccaacattcaacactagtttttccctcaagatatttgctgatttttaagttccatggaaagggagtctaaaatgtcaagcagaaaataggtgaaaagaagagctgagtttcttttttaatcatattrtaatgctggaaaggtaaaagttccaatttaaggccattaaaggggaagcagcactcaagaatttcatttgtaaaccaccatgagcaatatcctagga

SEQ ID NO: 255483 - DNA, 640 bp, Homo sapiens
acagtaacacaaattaaagacctaaatgaaagagctaaaagtattaaactattgaaagaaaacataggtataaattttagtgaacttggatttggcagttatcttttggaacttacacaaaaagtacaagcagaaagaaaaaatatatatataaaatgaatctcatcaaaattaaacactattgtgcttcaaaggacactataaagaaactggaaaggtaaccctagaataggagcaagtatttgcaattcacatatctsataagaaaataagtatctagaatatgtaaagaatacttatacaaagataaataacccattttaaaaataggcaagcatttgaatagacatttctccccaatgaatatattcaagttgacaatcagcacataaaaagatgctcatcactggccatcagttagatgcaaatcaaatgtcacccttagataccacgtcatacctactataatggctagaaacaaagatattaacaataaccaattttttttttaggatgtggaaaaattggaatctttacagtgctggtgaaaatgtgaaatgttgtagctacttttgaaaacattttggcatgtcctcaaaaagttaaacatagagttataatattacccagcaattccatt

SEQ ID NO: 255484 - DNA, 583 bp, Homo sapiens
tctgtgaacttaactgttcatgaattaaaaggttctgaatggcagactcaatttacaataaaaattaacactcaatttataataaaaacaaaagcaatcattctttattaaggctctattttgtgcccagcactatactaagaattttatacacattgtgtttaatttaaacaacagtcctataacattgaactataacagtgctcatcatacagatgaagatactgaaatgatgagaggttaagcaatctgcataaagccatacagctagtggtggagatgtcaggatttgatctcgagactatatcaccctaaaatacatcctgttaaacactacattatactcatttccaaatatagtatacatgtttggaagatcagtccattaattacttgaagttggtgcactgaggttatgggttttgttttccaacagcaagacayagtacttttttctctttagcagaggatctgctcaagcttttctaaaacactgtggtctttggctcacaccatcttaataaaacccaggtgtacttagccagattatatgacacatgttcaggttcatgtttgatttcaa

SEQ ID NO: 255485 - DNA, 653 bp, Homo sapiens
tatggtctaacaatttcagagaaagtgccagccagcaggtaaaattgtttccaatgcataatgtaaatgggaacaccgttttactagaatatttgccaatatgttatattattgagaggcctgagtctatctgccttaagctaactttctttccctaataagagggattcaaagatgagcaggccagccattaactcacttatgccattttttttttttttttggtgaaaagtcacaaaaagtttgcaaatttttttttgtgaaaagtcaggccttggtgatgaccttgagcagtaggatacatataactcctacaagcttagcgttccaataatggaacactaggcataaataggttaataagctttggattagtcactggtgttttttgcttgtgccacagctaaattttgctgtaattggggacctacacaagaccttaaagataagcaaatccataattttgagtttatgtttgaaaaactgaggctcagatatattgacctgtacataagaaactgggtgtcaaattagaacatagaatgcttatttcctgatttaggamatgttttgtgttttttatttgtttatggacccacaaaagcaattgcttttgaaattttaactaattttctccctgtggaaatgtgaga

SEQ ID NO: 255486 - DNA, 569 bp, Homo sapiens
gattgcatagttgagagctgctaaattcactgcttttctttaagtcttcttttggctgaagtaagttatttagtcagtgatggctaccataattttattgtttgagatctgtagccacctttattactstttaaaaggagaagctctgtgcaaatgacaaatacccaatttaagaaaataccgacaacttttacctgttcatcgagaaagtttacatataccaatattctatctacaagtacttacacatcatctagatagcttgcaaaatcttgttttaatgaaacacatttggaatatgattttaatggaacacatttacacctttatgtcatggtttgtgaaataaaatacaggtttgctgcactatgtgtggctcatcaataacctgcaggcaaccttggctgttatcaatcacctacatgcctatctctctcatcaacgctttcatttcctttggcttattgcaaaccacttcacatttcccaagatgaaaagtaaggggaaaaagcttccttactttaagtttagaattgaatcttttaataataatgttttatatgaacata

SEQ ID NO: 255487 - DNA, 550 bp, Homo sapiens
ttttaatccctgcctaaatctcagacacagatgaaactatgaagaatgatacagaaaactttgataaagaaaattatttgaatttttctctccaagagtttaatagtttattttaacaaagaaaattttctatgcaattgaaaaacaatgttgttaatataacaatctttgttcataatatattggagaatataaggartgaaatgcttaaaaaagaaataggatgagaaagaatagggataaaagactttatagattgttgaaataaatacagattatctaaaaatctacaaagacagttaaatctggcatagtatattttcaagtccatggacactactacttaaaagcacttattacataccaagctttatcagtattcatgtgattacatttacaacaatcctatgagtaggtattaaaattatccccagttgttgatgtggaaactgaagcactgagaggtcaagtaacatatgtaaggttattaaaggtcagggggtcagtgggtagacaccagctgctctccactggatctccagaccactcc

SEQ ID NO: 255488 - DNA, 354 bp, Homo sapiens
ttagggttgttagctgcaagcaatagaaacctactatatgaggggaaaaggaatttactgtaaggaaattaggtagatcctagatctatatgaagaccagaaaatcaggctaagcaaacaagatgaattcaaatgaggctttgcagcaaaaataatctagtcaaaaacactaaggtatccttactctttggaaacctaaccactgaccacagacctaacagccacaaatcaaatctcaactttcrgtagtctttctagtgcttattcaagtttcaaactctttaggaagagagtaccattgctgaagctatcattgtggactggctgcttccttggtaggacataatgatttca

SEQ ID NO: 255489 - DNA, 575 bp, Homo sapiens
caggagaatcgtttgaacccgggaatcggagcccccagtgagtcgagatcatgccactgcactccagcctggtaacagagttagactacatctgaaaaaaaaacttaattaatttaaaaaaaacttgaaccagattcgtctgatgtggttactccatgattatatcccagtagcatattctatgggaccattcccttggaaaactaaaatagtaaggtcctgatattaaaagccatatttaaaaagtttgggtcactttgttcatatatgctatctcctggatggctggaatagagtttaaagaaagcaaaaataaatatttttatggggacaatttkaattattattattaaataatcaaactttgctctaatttaaatgttgttgaagtctctaggaaaaatgtatgtctatcttgcaagttggactttccagaccaccctttaaagagaaataaacaaacactattgggatttaatttggagatttagcttaattgatcacacatgtaggaaaactactaattggagacattaataacttgctggttcactagtggttgtcaggctattact

SEQ ID NO: 255490 - DNA, 615 bp, Homo sapiens
tgctatatagtaggttctcaacaaatgctggttgaataaaaaatatttgaatgaatacatctaatgcacacagtgtgcatggaacatgctatggtgcttcagaactctagtctgttttgtgagctttggccttcaactgtaatgactttcccttttctctgcctggcaaaatttttcttttcctttatatatctgtttaatagtcaattatcctgtagaatgtttcctgcggttcccaagaactcttcattaatcctttctatttgtccagaggtctactagcacttacctcacactagagttattatttatgcatctgttggtcttgttctcttaayggtgacctcctggtgggtgaggactctgactagtttagattttaccctatgtgctcagtgtaggcctggctcatagatggtgctcaatgagagtgtctgtcagactcctagtctagaccctgatgttaatcatttgtggaagtgtgaagacaataccgtacttttgtagtcctcaacatccaatttaaaaactgagagactgaatgagaactgtaattctcttctggttttagatttttttttagcacagtattgctacttttcactgctgtgtatt

SEQ ID NO: 255491 - DNA, 566 bp, Homo sapiens
atacatattatatataatatatatatgatttttgttcatagtaaagttagactgtaaattcaataagaaataagtaattcagtaaataatgtggatatttctatttacttcacaaaacttgaatgaaactaaaataaagttatattctacctcatatctaaaatcaaagtaattccagaaggaagaaagcatagatacatttgtttaataaaatttgagtggaacaggtacatccttgtacagcaccaaaagcaggaagtaccaaaaaatggataaatttgatcacataaaaaccttcttcaaaaaattaaaggaaaacaacaaactggggtggtgctgttagccaccagttgtgaaaatgcatgatgatgtgtagttgtcactgtcttgcattatacagagttcttagtaaaggtatctggyaagctgtaacgcttaaggaaatcatgtccttcagttctggacatttttcttgaattatgtctttaattatgttcctttctcctatttcttctgtccctcctttgtgaaattcctatgattttaatattgggattatttggact

SEQ ID NO: 255492 - DNA, 631 bp, Homo sapiens
tatggttgataaacaaggacttactccttccattttatttgttttctgtgtttgtgtgtgtgtgtgtgcgtgcacgcacgtgtgtgtgtgtggtcttctcatccttctctctttccttcctctcttcctttgagtgaaggtgactttctttctcactaattacttcttctacttgaccaattctgctattaaaagactctgatgcattcttcaataygtccattgaattttaaactccagaacttgtgcttaattctttttaatgatttcaatctcttttttatctggtagaattcttaattccatctctgtattatcttgaatttcctggagtttccccaaaaactattttgaattatccgtgtgaaagatcacatatttctgtttctccaggattggtccctggaggtttatgtagttcattttgtaatgtcatgttaacttggatcatcttgatacttgtagatgttcatctgtgtctgggcattgaaaacttagatatttattatagtcttcgcagtctgggcttgtttttaccttgtttttccttcttgggaaggctttctaaatattccaaaagacttggctgttgtgatctcagctttatctgttttagggggaaccccaaacc

SEQ ID NO: 255493 - DNA, 631 bp, Homo sapiens
tatggttgataaacaaggacttactccttccattttatttgttttctgtgtttgtgtgtgtgtgtgtgcgtgcacgcacgtgtgtgtgtgtggtcttctcatccttctctctttccttcctctcttcctttgagtgaaggtgactttctttctcactaattacttcttctacttgaccaattctgctattaaaagactctgatgcattcttcaatacgtccattgaattttaaactccagaacttstgcttaattctttttaatgatttcaatctcttttttatctggtagaattcttaattccatctctgtattatcttgaatttcctggagtttccccaaaaactattttgaattatccgtgtgaaagatcacatatttctgtttctccaggattggtccctggaggtttatgtagttcattttgtaatgtcatgttaacttggatcatcttgatacttgtagatgttcatctgtgtctgggcattgaaaacttagatatttattatagtcttcgcagtctgggcttgtttttaccttgtttttccttcttgggaaggctttctaaatattccaaaagacttggctgttgtgatctcagctttatctgttttagggggaaccccaaacc

SEQ ID NO: 255494 - DNA, 631 bp, Homo sapiens
tatggttgataaacaaggacttactccttccattttatttgttttctgtgtttgtgtgtgtgtgtgtgcgtgcacgcacgtgtgtgtgtgtggtcttctcatccttctctctttccttcctctcttcctttgagtgaaggtgactttctttctcactaattacttcttctacttgaccaattctgctattaaaagactctgatgcattcttcaatacgtccattgaattttaaactccagaacttgtgcttaattctttttaatgatttcaatctcttttttatctggtagaattcttaattccatctctgtattatcttgaatttcctggagtttccccaaaaactattttgaattatccgtgtgaaagatcacatatttctgtttctccaggattggtccctggaggtttatgtagttcattttgtaatgtcatgttaacttggatcatcttgatacttgtagatgttcatctgtgtctgggcattgaaaacttagatatttattatagtcttcgcagtctgggcttgtttttaccttgtttttccttcttgggaaggctttctaaatattccaaaagacttggctgttgtgakctcagctttatctgttttagggggaaccccaaacc

SEQ ID NO: 255495 - DNA, 621 bp, Homo sapiens
cctttcttaccttcagagatcctgagcatgaaaaactatgtcagcttagagcttctggaggccatctttactgtaacatggaaaacacctgactgagaagccaacagacaaaagcaaagctgagatgttatagaaacagtttcctgtaacatcatgaacacgtggattcagccatacctgaatctaatgcattgcttgaaatttccagttaaacgtggcaataagttttgacctttcttyctttggtcaagctacttaactcatgtataagagtattaactaataccaggcctcagcaaaagcagtgagaaaatgaaaaaactaattgttataattaactttgtaacacctcacagtactatatgtattggtcaaatggtgcgtgtacatgcatcactgactcagcttaaaatataaaattattagatttttgtgtcatgtgaattaaaaaagttattaaggtgagcatttaagagaaattcagcatatatttataagagaatagatggagatgatttggcaaaaatcaaaaaaatttctctaactcttaattcatttattcattcaacaaacatttacagagcacctactctgtactatgtactgctttaggttctggga

SEQ ID NO: 255496 - DNA, 500 bp, Homo sapiens
aggggagcctactgccctgaagggagagacccaggcttggcagcattcaccacaagctgactgaagagcttttgggccttgagtatactccttggtagccaggtagtactcgccacaggcctggggcagtggtggccatggggagagactccttctgcttcaggaaaggagagggaaagtggaaaaatctttgtcttgtggctttgatgcctgctcagccacagtagaatagagcaccaagtagattcctaagattcctgacagagcgagactccatctcaaaaaaaaaaaaaaaaaaaaaaaaarggacacatttcatagggatggctacagaagagtaaactgcaaagaagcatgaaaaagtgctctgagacgaggaaggaaactcagtaaagaacagaggcactatagtaaaaggaaagtggtcaacagcattaattttatagatcagtcaatgattgcagagtatgataaaaatctacttgtttggacttgtgaga

SEQ ID NO: 255497 - DNA, 598 bp, Homo sapiens
ctgcatgttacccagttccaaagtcacttccacatttttgggtatctttagagcagcaccccactccctgcagtatcaatttactgtattagttcatccacatgctgcaaataaaggcacacccaagactgggtaatttacaaaggaaagaggtttaattgactcacaattcagcatggctggggaagtcttaggaagcttacaaccatggtggaaggggaagcaaacacgtccttcatcacatgggagcagcaagaagaagaatgagagctgagcaaaaggagaagaccctcataaaatcatcagatcttgtgagaacttactatcaagagaatagcatgaagcaaactgcctcagtgattctatcacctcctgctgggtccctctcatgacaggtgggattatgggaactacgattcaagaggagatttgggtggagatagagccaaaccataacaaacacaaacgtctattgatagaatatataaattatgccatattcatataayggaatcatatacaaccataaaaacaaacaaattcatgccacatacaaatgctatgtggattatcatagaagtctcataagtgaaagaaa

SEQ ID NO: 255498 - DNA, 571 bp, Homo sapiens
ctgctttctaatactattttccaataaaaagaaccaggactctttggataaatggktgattctaggaatgggggaggaagtgcataagataagcctgaaacatcttgtggtgccagaaagtaaggaaggactttataaaattaaaaaaaaaacttatattgatggaggcataggagtcaagtgaaagatattccaatggccaaaactgcaataatttgagcaacatgaagtagtgctgtattattgccccaaatataaaacaaacattcctgactccatgcttatataaataagtgactgaataaataagtatatgaaagataatggaaattcacccatgtagaaaaattccaaagaatttatgtggatactccacccttaaggagtggggaatataactctcttttagtgtgggctgtgcatagagacttccttccaaagaatacagtatgagaagaggaagaaaaaaagagtaactttatagtggaggagatattcctacactacctcagccaggtggtgaatgttaaaaataatgatgataagtcaagttgatagcatatactcttat

SEQ ID NO: 255499 - DNA, 354 bp, Homo sapiens
cattacattttaacaccctgaccccccagttctttatattatcttccaccttatggcaggcacctttcattttcatgttcttttccttataattagtaataactttaatctattcataaccttgataccattcatctgactcacattctgcctcctgctgtgtttacagctcatttgtcctagttaattcaaatgcaaaaactctatcttatgaaaatttttattcagctaatttcacctgttcactatctttcaccatytttcaccctgtcttatcttcacttacatcatttcacgtccttatacagctaaaattccatgggcaatcattgtaatcagttccttgcacacacc

SEQ ID NO: 255500 - DNA, 583 bp, Homo sapiens
accaactaacctgcccaaagtacctcatgacaactgtctattttaaaaatgaagattttcttcttttgacataattccaagccaaatactaaaagcattttattccctttcaattgycagtgtttcttaatcaactctagaagaaaaacaattagtttaattgcattgcatataaaaattacatgtttggcttagtttttatacaaagtcttcagttttatctttttaaccgtttcctatatttgccaaattgccttggaaattcatccccacccccactccaccaatgcaatcacaatttttattttttattatagcaacgaattttgacagccataggtcatggagttctgagacatcctggatcaattactaatgtctgagtttgattttagccatttttacatatgaatagagactaatgtttctgtcttcagtacagatgttttccttggctgctaaaatagattgttgcttttttattgctgctgtgttttattaaattgttactttatttgtttaaaagataggttacttataggtggttaagacaaaactgtgaagtaatgagcaaataagaaag

SEQ ID NO: 255501 - DNA, 578 bp, Homo sapiens
gggtgactcgttgcaggcctgcaggcatctcttggcacaaacaacctgggtgccatgggcactgtagatgggaggttaatggtggcaggatgcagacaggctcctggatggtcaggggtgggtccccagtgaagcaccaccttcaaaagccagggatggcctgaagcctggggactgggctgttagttccacagaccagagtgagaacttatggtgctttatcggagcccacccacagccacccatggaccaatccgcatgtacttccccgactctgaagcccataagaaaccctgactcagccagacctgagaaaataaccagatgccctgtctgcagagaggagctacccactgtgggtctcctctctgctgagagctaaacggcgggaggacttcctgcctgcggagaggagcracccactgcgggtctcctttgagttgttccattggtcaacgtagcccatcttctccttgctcaaccctctatttgtccacgtacctcattcttcctggacataggacaagaactcgggaccagctgaattgtggggctgaaagagccataacaccaacagg

SEQ ID NO: 255502 - DNA, 553 bp, Homo sapiens
ctaaataattgtaggattacattttaatacagtggttttgcttttttttccatacttgtgtacaatgataaggaaaatttaataygggtagggatgagagatgaaaaaaatcaaaacttcacaaactaatttctttgagacttatggtacttttggttcccaaaaaaagaacagaatgacctgtaatcaaatcttgtcacatcaagctttcaaatgtgcagtgatgaaaaggcagaaaaatgtggtctttcaaagattctagtgtgctatttcaaaatagaaacagtagcaatactttaaaaattccagtaaaggagagaagtgtcattagaacaatgagaggaaatagttttaaccaagtattacattttcctgactttcagaataaattttagtttagtagttcagattcacactctctctacctcattgattattcttggctgaaatacaataaaacacaaatattgttaatatacttgcctccagttaccatctccctgtccaagaacttattattattaatataattattctgttaataccagatcca

SEQ ID NO: 255503 - DNA, 565 bp, Homo sapiens
ttgaattatacatggtagatgcttggcaattgcaatactactctgatctctttaaaagtggaaaaatgaaaagcattatatattaacacaaaaggaaaatatcataaacaaacaaggcatgactatgactgagtctcactctagcaaaccaatgattatgcagggaagtccagcaagagaaataagcagagatagctaggaggaggctatttgcaaatttttaaggatacctactatatttcaaaggttgttacctgaaatgaaaagcagctacattatgtcaaataatttcccatggacagcagcaatgaaattttttctagtccaacagcttccttgagccccayagtgaggttatgcacacagtgaagctgcagctgagaaaacctatcagagggtagggccatatggagtggtattttttagaccacaattttttatcctcaggtaacactgtgtaaaaaagagaagtggggaaacatggtactcatgcagcctatagtgccagcactatactggcctatgtaaagtagatgaatacaactttcaacattgtgttttatat

SEQ ID NO: 255504 - DNA, 565 bp, Homo sapiens
ttgaattatacatggtagatgcttggcaattgcaatactactctgatctctttaaaagtggaaaaatgaaaagcattatatattaacacaaaaggaaaatatcataaacaaacaaggcatgactatgactgagtctcactctagcaaaccaatgattatgcagggaagtccagcaagagaaataagcagagatagctaggaggaggctatttgcaaatttttaaggatacctactatatttcaaaggttgttacctgaaatgaaaagcagctacattatgtcaaataatttcccatggacagcagcaatgaaattttttctagtccaacagcttccttgagccccacagtgaggttatgcacacagtgaagctgcagctgagaaaacctatcagagggtagggccatatggagtggtattttttagaccacaattttttatcctcaggtaacactgtgtaaaaaagagaagtggggaaacatggtactcatgcagcctatagtgccagcactatactggcctaygtaaagtagatgaatacaactttcaacattgtgttttatat

SEQ ID NO: 255505 - DNA, 429 bp, Homo sapiens
tgtgaaatattgtctgtgtaaattattcattaggcagatgatccctacctttttatcaacattaaacatattgatttctgtgcaattgtgttaatttcctagtacattaactcaacttttcaaaaacagtccctgggtacagttctaggggacccattttgaaaagctgggttaatttattaggaaatrtgatgttttatttgttttttaaatttttaaattatgtgagttttaacatttctttttgattatgttaatatgtatttgtgaaaaatgaaaatcaaatacaaaagtatatagaggaaaaaattaatatcatctgtagtctcatgtccttccctcagaataaatactaagttatcattagtgggtatccttgaccttttaagtttctgcaataagctaacttttaaagttctgttagtgttt

SEQ ID NO: 255506 - DNA, 575 bp, Homo sapiens
actgtcgataaggaatcctttttattcttttttcctagtgtccaytgcaggaggaccttggtagagatcatggcaaaaacagccgggaaaaacaaaaccttccttgtcccttatcgctgttttgaacatgcccacagaaagtatttttacctgttgactcttactccccaacaaggacaaacaccttcttccccgcatgcctttttctttccattttcaatatttattctctccatgatgcccttttctggaaaccaaaataagtatttacttgatgataaataacgacacagtacatggtctggggctaacacagcacaccagttcaggcctgatgtttccttattatttatggtgttatcagcacagcttctcagttcaatcgtggtcttaaatcagggatcccatcacagaacctaatgtgagagaaaatcagatgtaccaggagcctcctttatttttcctccctggcttgtcaagcagtcagaaaatggagactcaacattcaaaggtatgtgctgaataactctgtctggttgctaatgacaccgtgatgtggcaaaacaccagctact

SEQ ID NO: 255507 - DNA, 575 bp, Homo sapiens
actgtcgataaggaatcctttttattcttttttcctagtgtccattgcaggaggaccttggtagagatcatggcaaaaacagccgggaaaaacaaaaccttccttgtcccttatcgctgttttgaacatgcccacagaaagtatttttacctgttgactcttactccccaacaaggacaaacaccttcttccccgcatgcctttttctttccattttcaatatttattctctccatgatgcccttttctggaaaccaaaataagtatttacttgatkataaataacgacacagtacatggtctggggctaacacagcacaccagttcaggcctgatgtttccttattatttatggtgttatcagcacagcttctcagttcaatcgtggtcttaaatcagggatcccatcacagaacctaatgtgagagaaaatcagatgtaccaggagcctcctttatttttcctccctggcttgtcaagcagtcagaaaatggagactcaacattcaaaggtatgtgctgaataactctgtctggttgctaatgacaccgtgatgtggcaaaacaccagctact

SEQ ID NO: 255508 - DNA, 575 bp, Homo sapiens
actgtcgataaggaatcctttttattcttttttcctagtgtccattgcaggaggaccttggtagagatcatggcaaaaacagccgggaaaaacaaaaccttccttgtcccttatcgctgttttgaacatgcccacagaaagtatttttacctgttgactcttactccccaacaaggacaaacaccttcttccccgcatgcctttttctttccattttcaatatttattctctccatgatgcccttttctggaaaccaaaataagtatttacttgatgataaataacgacacagtacatggtctggggctaacacagcacaccagttcaggcctgatgtttccttattatttatggtgttatcagcacagcttctcagttcaatcgtggtcttaaatcagggatcccatcacagaacctaatgtgagagaaaatcagatgtaccaggagcctcctttatttttcctccctggcttgtcaagcagtcagaaaatggagactcaacattcaaaggtatgtgctgaataactctgtctggttgctaatgayaccgtgatgtggcaaaacaccagctact

SEQ ID NO: 255509 - DNA, 556 bp, Homo sapiens
agtagagatggggtttcaccatgttggccaggctcaagagagccacccaccttggcctcccaaagtgctgggattacaggcatgagctactgcacccagccaaacttccattatctttcctggaagatattttagataaatagacagatatgtgaaaataagtaattcagaacctaagctgttggaactaaataaatttgagccttaaaggaataattttgggcctgaggcacgtgacaggtagctgtaacctaggcagctgtaatctttgtttttttctccattatggattaaaccttcttccttacctgtgttgttctgtatttattaaaatgtggtaaatggctgaaggatgccagggaagaccactttcctcttactgttgactttcattctctagattaacttccctcctacctttctcatacaagacttcatggctatcatgttatcttaaaagggartattaaatacactcttttaagttgaaaaagaaaaaaacagctgtaaagaaaacctatagggaaaagaaaacagactacaaccaatttgttgt

SEQ ID NO: 255510 - DNA, 411 bp, Homo sapiens
tgacagttacatggaaataagtaataaaaagaaaagcatttcatgatgctgttgatcacaatcataaccaaaagctgtaagttccaatatgagtcctccaaatgcctgaaagtttcctcaaaaaattgttttaactaaatactcttaaatatatctcattaaacaagttacagtggaaagccctaaattaaaacataaaacatacatttaaaatgtatacctgtggaaatgttatagaattayagtctatatcttcaaaacaataattttaaaaattcatttggttaacatcatgaaaaggatttctttaaatattaacattctgttcagcactcaggtgctcatcacacagccttatcagtgaagatttttactatctaggttcagttgtataagcaaagatatttaggc

SEQ ID NO: 255511 - DNA, 638 bp, Homo sapiens
tgtccatcccttcctcccagctcttggtcttagtttatatagagaaaaataagaaggaaaaaataggaggaaaggaatgaccaaggctatttatatttaatgtgatcacaagtgtcatttgggtggccttagcttccatttcttcatatataagattaaaaaatataaaaataataataatagtgatatatgcctacttagattttataagaattcaataaataattaatgtaaaatgtatttgtaatttgtaggtgctgtttaagcatcaggttttaagttattaaatgtgttaacatggaattttgcacattacacacttttctaaggcagatcattttcttctcaagatatgtaatattctatttctaagcaatatcgtttttatatatttctatcattaaytatgctgaaaaatacgaaagtaaattttcttcaatagataggcaatatttttttaaaatccagtgtgaattatctcagacatcatatatgaattgtgccataagttgtgcaaaattgattcttccaaacaacaattatttctagtaaccttttaaatttttttatcatgctatcattagtgagaggtccttagtccctaactgttccaattcactaaattgctttaagctaga

SEQ ID NO: 255512 - DNA, 526 bp, Homo sapiens
tggtgaaactccatatctactaaaaatacaaaaattagcctggtgtggtggttcatgcctgtggtcccagctacttgggagactgaggcaggagaaccatttgaacccaggaggcagaggttccagggrgccaagatgatgccactgcactccagcctgggagacagagtgaggctgtttcaaaaaataaataaataaataaatataatgataaattaataccagacaaagtttcaggaggtttcatgcttccaagtagggactttatcctttgatataccataataataatattaaattgaatttcataaattgaaatttattgggttttacattcggtcaacatgtaatttataaaatttacttcagttgttcaattgtttaagagctggcatgggctgaaatgtgtacccaaaaatttatatgttgaagacctagcccccagtatcttagacagaactgtttctctgtatttggacatacgtatttaaagaaataaatccgttaaaatgaggtctttagggtc

SEQ ID NO: 255513 - DNA, 526 bp, Homo sapiens
tggtgaaactccatatctactaaaaatacaaaaattagcctggtgtggtggttcatgcctgtggtcccagctacttgggagactgaggcaggagaaccatttgaacccaggaggcagaggttccagggagccaagatgatgccactgcactccagcctgggagacagagtgaggctgtttcaaaaaataaataaataaataaatataatgataaattaataccagacaaagtttcaggaggtttcatgcttccaagtagggactttatcctttgatataccataataataatattaaattgaatttcataaattgaaatttattgggttttacattcggtcaacatgtaatttataaaatttacttcagttgttcaattgtttaagagctggcatgggctgaaatgtgtacccaaaaatttatatgttgaagacytagcccccagtatcttagacagaactgtttctctgtatttggacatacgtatttaaagaaataaatccgttaaaatgaggtctttagggtc

SEQ ID NO: 255514 - DNA, 563 bp, Homo sapiens
agtctatagcattttgttacagcagcaycagcaaactaacaatacaagagctatatgtacaaggtaattataactagtcttatttttgtacttaagaacattataataaaaaggattaaattttttgatggcccacagcaattatatattgaatatatttctcaaaacagacactttttttagagatttgaaatacctggcatatgagcttctatttccttaaccatgccagtttttccagctaggcccaaatataatttttaaattcttcttaaaaccaccaattgatctgagttgacacaagtcataaaaaccttttttatagaatttatggataaaaggatgtggtatcttgaactattcaaaatttaaattgctgaataatgggtacctggtattccttaatatatttttatttctatatgttctatatgtcaataacaattttcaagtaaaaatattaaatattttctttaaaatattaattattcaaaatttgcactaaaaggattaattgaatcaatttatttagctttaactttcttttattatttgttatataa

SEQ ID NO: 255515 - DNA, 563 bp, Homo sapiens
agtctatagcattttgttacagcagcaccagcaaactaacaatacaagagctatatgtacaaggtaattataactagtcttatttttgtacttaagaacattataataaaaargattaaattttttgatggcccacagcaattatatattgaatatatttctcaaaacagacactttttttagagatttgaaatacctggcatatgagcttctatttccttaaccatgccagtttttccagctaggcccaaatataatttttaaattcttcttaaaaccaccaattgatctgagttgacacaagtcataaaaaccttttttatagaatttatggataaaaggatgtggtatcttgaactattcaaaatttaaattgctgaataatgggtacctggtattccttaatatatttttatttctatatgttctatatgtcaataacaattttcaagtaaaaatattaaatattttctttaaaatattaattattcaaaatttgcactaaaaggattaattgaatcaatttatttagctttaactttcttttattatttgttatataa

SEQ ID NO: 255516 - DNA, 564 bp, Homo sapiens
tacattaattttgtatcctgaaactttgctgaattcattgatcagttctaggagctttttggaagagcctttagggttttctagggatatgatcatatcatcaaaaaacagcgacagtttgacttcctctttaccaatttggatgtcctttatttctttctcttgtctgattgctctggttaggacttccagtactacgtggaatagaagtggtgagagtgggcatccttgtcttgttccagttctcacagggaatgcttttcacttttccccattcagtattatgttggctgtgggtttgtcatagatggcttttattacattaaggtatgtcccttgtatgcaattttgcttaggtttttaatcataaatcgatgctggcttttgccaaatgctttgtctgcctctattcagatgatcttgtgatttttgttttaattctgtttatgtgttacatttattaactcacatatgttaaaccatccctgcatccttggaatgaaacamacttgctcatggtgattatctttttgatatgatgttggatacagttagctactattt

SEQ ID NO: 255517 - DNA, 546 bp, Homo sapiens
aacttgggggaaaggtttggagaagggtgagagataaaagcgtacaaattgggtccagtgtataccactccggtgatgggttcaccaaaatctcacaaataaccactaaagaagtcactcatataacgaaataccacctgtttgccaaaaacctgtggaaataaacattttttaaatgtcatatattataaagatagctgcccacactgtgcacataaataagccagttattcctacagaaatctccaggcactccttcattgtggagagcctttccagtcatttgagggctacatgatctactactggtgtttccttcattgtttgaagttctcttatgactatgcttgatatataagtcaccatattttaagaagaaaagaaaattaatgcttggttctacacaaaaagtacagttcaggatacacatggtacctctgaaaaaaaaagtatttacaattattgaaacacacaagtggggcctaaacaagttgggctatcacagcttgasagtcctcctggacaactggtagagttgaactgggt

SEQ ID NO: 255518 - DNA, 567 bp, Homo sapiens
aaggcctttgagtagctgcagaatgggttagaggtctgatgtacttagtctaccaggaagggcccgaagttgtgcctaggcaatgtgccctccttcaaagtgatatcaatgactcaactattgacaagagtcataagtttggcaatgcagtggtatcctctgaaaaatgagttttttttttcttttgtatccagtctatgatggtgaaatatgtttccacaactggtatgatggcgtaggcagcaatagtggcaatttgaatggtgtggcctcatgagcaacttgattctgttgcatccaatcrgtgaatacagccttactgtggacccctacatgagtggtatagacagttctatcagcaccatgatttatttcaatcattcatggccccaaaagaattgctttattctgccagtcagtaattttccaagtagatcaaatagctaagccagtaccaacagtccaggagtcaataaaaattaaagaaaggttcattgatgtgactattggattgttctatgagaaaaaccttgagttattcccactgagtagaacaagcatgtccat

SEQ ID NO: 255519 - DNA, 559 bp, Homo sapiens
tgtctttggctgatgctgcctgctgcatcattgtcatactaacagccctttatccacatgcccagggtagagtgagtggcaatcaagacactggtttggctgcttatttcagttctacctctcactgctcagtctttacacctgcataaacagctatgagagtgagagagccttactctcagttctcaattttgctcaccacttgggagagcatataccagatgccawggagtccttcttatccttctcatagtctttgagcccttgtcttttaatttttttttcagaaagccatatctctgacagcatcctatgctcacatcactgccattattgttaagaatcatgaagcatctgagattttaccctatttgcaagctaatgagctagcctaccccagtttcagagatgttgctagaagacagaacactactgggtcagagacattcacagaggtaatataaatgagctcagttggatgcctgtacacatagtgggttgtgttacataagagaaaacctgaccataggtacctgaatctattatactggatagtaaa

SEQ ID NO: 255520 - DNA, 592 bp, Homo sapiens
ttcgctgaaatcatatttgaacctataggtatgccttttttttttttaacttttgagacagattatctctctgtttcccagaccagagtgcagtggcatgatcatggctctcggcagccttaaactacaggcacttatcaccagtccaggcaattaaaaaaaaaaaaaaaaacttttgtaaaaatgaggactagttatgttgcacaagctagtctcaagttcctggccttaagagatcttcccacttcagcctctcaaagcactgggattacaggcatgagccactgcacctgtcctgattatgcctttctaatagtaatcttgcacctacataaaagttattttcaatacaaaagaaaaaagatattttcatgcctcatggcataactgtagtgaccacttcactaattttccttttttatgtttttacartggtccttaacctgaattcatttatcatgtaatggtggccaaccagagctgtagacctaaatctacagtaaatatcaagcgattcaactatttcttgtaacgctgtgacttctttctccttcttaggagcacttccagcatcactactggcacattgatg

SEQ ID NO: 255521 - DNA, 528 bp, Homo sapiens
aattttaatggtctgtttcttttagtccttagttccagattacaaaatatatgaaaatttctccattatttatttaggattaacttttattggctcattatagccatgattgtatatatttaaaaaatctgttaaggaatactgagatgttttagaaattttcatatttaattaaatgttggtttttttactcaaattacactgctgaatcttaacattttttataaattaatacaggtatattttctttcatgaattagttgatgctatgtaagtccccatacaggtttcataaatattcatcagtggctctgctatattttaatctgcattgtcttcctttgaggtaactaytgtttttgtctgagtctttaatcagttatgacttgacttaatttacatcttgagtttagtgtgattataacataaaagggaatagttatcagtatttgaggcttagttattaccaatggatctacattgtctatgattactttagaaaaaactgtggggtagtaataatatgca

SEQ ID NO: 255522 - DNA, 605 bp, Homo sapiens
aatagataaaacttcatcactcttattttcttggctcaaaaataatttaaaatttcccaaattggctcccactaatggaaaatacaaatatgtgtaagaaaaattgagatttttgtgttaagcaataatgtatctgcttactattgctaaaaagtcacagctgtgtaaaatcttaataaatatctccactattttttcctccaaaggaggctagtgatgctgagtgcttgccatgaacattcaagaacatgaacattttactgtacttggatccaagtggcakatctggaaataaggtaagtaatcaaagaggcaggggagatgtttatatttccaccttgctgttactgcattttcaccatcttcctaaccttcatgctagtctcaattcatgacacttaatcacatcctgttgacagatggtttgcttttgttgttgctgttattatttataatgatcattcaaaactattagaaaggaattcattgtatcagttataaacaggcactcattcattcaatagtttattagtcttaccatgtatcaggcaaaatgctgggcaaatgaacacttcactgaggaaaacagaacctttcttgactgc

SEQ ID NO: 255523 - DNA, 586 bp, Homo sapiens
ttccccacttctaatcatcaggaragtttatatctcacccccagtgagatatctaatcatagctgttaagataactattgtaaaaaaatgtttctgaggatataaaggaaatcctcgcacactgtttgtgagagtgtatattggttcaccccctatggacacagtatggagagtattcaaaaaattgaaaatagagctactatatgatccagagatgctatttctgtagatatatatatatatatatatatatatatatatatatatatatatatatatatatgtatatatgtgtgtgtgtgtgtgtatatatatatataaaagatttaatttcatcttgaagatacatatcttgaagagatacctgctcctatgttcactgcagtattatatacaatagccaaaatatggaagcatacctaaatgtccattgatggatgaaagggaaaagaaaatgtgctatttacataaatggcacattattcaattctttaaaagacagaaatactatcatttgtgacaatatggatgaatctgaatgacattttacaactgaagaaagtcaggataagaaggacaattacta

SEQ ID NO: 255524 - DNA, 586 bp, Homo sapiens
ttccccacttctaatcatcaggagagtttatatctcacccccagtgagatatctaatcatagctgttaagataactattgtaaaaaaatgtttctgaggatataaaggaaatcctcgcacactgtttgtgagagtgtawattggttcaccccctatggacacagtatggagagtattcaaaaaattgaaaatagagctactatatgatccagagatgctatttctgtagatatatatatatatatatatatatatatatatatatatatatatatatatatatgtatatatgtgtgtgtgtgtgtgtatatatatatataaaagatttaatttcatcttgaagatacatatcttgaagagatacctgctcctatgttcactgcagtattatatacaatagccaaaatatggaagcatacctaaatgtccattgatggatgaaagggaaaagaaaatgtgctatttacataaatggcacattattcaattctttaaaagacagaaatactatcatttgtgacaatatggatgaatctgaatgacattttacaactgaagaaagtcaggataagaaggacaattacta

SEQ ID NO: 255525 - DNA, 586 bp, Homo sapiens
ttccccacttctaatcatcaggagagtttatatctcacccccagtgagatatctaatcatagctgttaagataactattgtaaaaaaatgtttctgaggatataaaggaaatcctcgcacactgtttgtgagagtgtatattggttcaccccctatggamacagtatggagagtattcaaaaaattgaaaatagagctactatatgatccagagatgctatttctgtagatatatatatatatatatatatatatatatatatatatatatatatatatatatgtatatatgtgtgtgtgtgtgtgtatatatatatataaaagatttaatttcatcttgaagatacatatcttgaagagatacctgctcctatgttcactgcagtattatatacaatagccaaaatatggaagcatacctaaatgtccattgatggatgaaagggaaaagaaaatgtgctatttacataaatggcacattattcaattctttaaaagacagaaatactatcatttgtgacaatatggatgaatctgaatgacattttacaactgaagaaagtcaggataagaaggacaattacta

SEQ ID NO: 255526 - DNA, 429 bp, Homo sapiens
aaaatgtacaacatgacctttaccacattaaccatttttaggtgtayagttctgtagcattagttatattcacattgttctgtaataatcactatatatatctccagaacttttcaagaaacattctctcttctttctttcagcttctggcaaccataactctactttatatctctttaaattttactgttctagataccttacatagtgaattgtacaatatttgcctttatgtgactgggttgtttcacttagcattatgtcttcagattcatccatgtgtagcatgtgttcaaatttccctctttggtaatgtactttaaaatattttaatacaaacagtgtcatttatgtgagtgtataatatttcatcagacatcatggcatttagatagcatttggaatgaccaaagtagaaattcacaatcg

SEQ ID NO: 255527 - DNA, 570 bp, Homo sapiens
aaaaccaaaaagtagaatgattatgcacaaagttcacttcaaaaattattttttagatgaactaatgagtactatactagagtcacttatgatacctaaatgcttaaaattgtrctactcataatactaattactaattgcctgaaattcttaaaatcaaaaatttcccatttccttttattaatcaatgataataatatttcttattatttttgtccctacattatgtccatttaacatattggtatactgtaataatacaagaaagtaattcaagtttaatttttataaagaagttaaacactatttttataaagaagttaaacacaagcagttaagcattgcttcatagtcataaatcatctttatttacagaagtgctaattgtcttataaataatattctaacttttaacataaagtaggagaatagctgttcccatatgttaaatttacaactttcactgatactacaaaaaaaacataaaattcagccagtgcttaataatactatttgattttattcagtaaaatatgtgtattaaaaaaatctatgatattaaacattgaa

SEQ ID NO: 255528 - DNA, 586 bp, Homo sapiens
aggttaatatgcaaaaatatttaaagacctcaaacaatagcaaataaccaaattataaaatgggcaaatatcctaaatagacatttttcatttttagagacagggtctcactctgtcccgggggctgaagtgcagtagggcaattatagctgactgcagcctcaaattcctgggttcaaaccatcctgcagtttcagcctcccaagtagctaggactatggcacgtgctgccacatccagctacatttttaattttttgtagaggcaaggtctctcattattttgcccaggctggtctcaaactcttcagctcaagccatcctcccatctcagcctcccaaaggaccaggattacaggtgtgagccactgtgcccagcccatatattttgtttttagaatttagtgttttgatacaacattcataattttgattctcagtatccatagcataatatacttattaacattggaattttccacattgtggttgttatatttaattttaaaatgaatatccattcaaataactttttctttaggttgaattatgttttctttattttwaaattcatttttatttatgtt

SEQ ID NO: 255529 - DNA, 507 bp, Homo sapiens
catcatgacccaaggaacaatacagactgtttcccgttttgttttttgttttgttttgctttgtttctgttgtttgctttttatttgtttttgtttttgctttatttttcccttcrcttcatatatcccagatttagtactggataagccaggaacccagaaacacaaatgatataaacagaacgctacaataaaagcctgatctctgcagccaaagaccaatgaaagagcagcctaacaagacaaaatactttcaaaatgtaattgcctttctccagtcatctaccagagaaaatgtggctccacctctcccttgccagcaaagacctaaggggaaccaacacttcctccctcatcaggctgtaacttggtgccactaccttacctgagtgatatggctattatctaaaagacaaaagatacctagtgttggtgaaggtgtggagaaaagggaactttgtgcactgttggtgggaatataaattagtacagtcattatgaatataa

SEQ ID NO: 255530 - DNA, 507 bp, Homo sapiens
catcatgacccaaggaacaatacagactgtttcccgttttgttttttgttttgttttgctttgtttctgttgtttgctttttatttgtttttgtttttgctttatttttcccttcacttcatatatcccagatttagtactggataagccaggaacccagaaacacaaatgatataaacagaamgctacaataaaagcctgatctctgcagccaaagaccaatgaaagagcagcctaacaagacaaaatactttcaaaatgtaattgcctttctccagtcatctaccagagaaaatgtggctccacctctcccttgccagcaaagacctaaggggaaccaacacttcctccctcatcaggctgtaacttggtgccactaccttacctgagtgatatggctattatctaaaagacaaaagatacctagtgttggtgaaggtgtggagaaaagggaactttgtgcactgttggtgggaatataaattagtacagtcattatgaatataa

SEQ ID NO: 255531 - DNA, 393 bp, Homo sapiens
ccttttaaaatcacagaaatggccaactaatcttctcagagttaatcagcttgttgatactggcagcagaactataactcagaactaaaacctcatatccaggcaggactcctgcaattattccatgatgttgcccataattcacaattgtttaaaaaaatctattaaacttaagctgatcctatctattttaaaaccatcatatttattttgatgccaaggcccacatcctgtgtgctctgtcaggcagatagaaatctgatatctttatttttgttcaaggttgactcttaggcagataactagaaaaataatgtacatgtgcctttagaatatttcaggctcaataattcaatccaacayagtaagtggtagaactaagatttaaaccca

SEQ ID NO: 255532 - DNA, 490 bp, Homo sapiens
tgtgttacaagaaacctggggctgggtttgcaggggaagagaatttaatcaggaygataaaatttgaagaagagaaatcagagcttgccaatttcttgtataagttcccactatctgcaatgttcttttccccagatccttacgtgactgactccttctctttattcagatgttaatcagatgtcacctcctcagagaagtcttccttgacctctgtaatcaaagatgcttcccacttcccgactcccaccacctagtcactctctgtcccagtgttcattttattttccacgtatcactaattcaaattgtattatttaactatttgtttgcatctttattgtctttctcttaccactcgaatgtatgctccacaggagcaaggactttatatttgatcctgcgtctccaataaagtgggaaggaaggaagggatggtttagggggagtgagagaaatgataaaaaagaagataattaaaagttttcag

SEQ ID NO: 255533 - DNA, 320 bp, Homo sapiens
tacgaatgtctgctattgttacaatttatcacaataagaataggaggaagttatttcttcctgtattttttttctaatgattattattaactccaaggagaaattcctacgaatcaacatagctgagtttactgggtgatctttattccagtgtagaattctgggagatttttaaaagagctgtgatgtcagatttgcttgttctatgtggcagctgtggaggaatkaataattgcagaaagggatcccaatacctcagattacccagatgtggctcacatcatttgcaaaaatgttctggctgcttcaagttttattta

SEQ ID NO: 255534 - DNA, 320 bp, Homo sapiens
tacgaatgtctgctattgttacaatttatcacaataagaataggaggaagttatttcttcctgtattttttttctaatgattattattaactccaaggagaaattcctacgaatcaacatagctgagtttactgggtgatctttattccagtgtagaattctgggagatttttaaaagagctgtgatgtcagatttgcttgttctatgtggcagctgtggaggaattaataattgcagaaagggatcccaatacctcagattacccagatgtggctcayatcatttgcaaaaatgttctggctgcttcaagttttattta

SEQ ID NO: 255535 - DNA, 571 bp, Homo sapiens
ttgcatttggagattgtgaatggtctgcagatctgacctactcccacctcattcaatgaaaccagcagcgaatattacaagctagattaattagttaatatttagatgtactaactactgccagaaaaatactgtcaactggcaaactcaaagagaagctttttttgattgcttggctgcattctgagtcatgttagttttgaaaactgctttttactcgtatgtaaatgagtaaagggcctaaactaggattcagactgaaatttcagaaactaaagcatctataaaccattctaagtttttctgcttgagatgactaatattagagaatgccaataaatcactgccagagtgaagggctcaaytggtaataattgcgataataactgaagtgaggaagaatttattaatgaagctcaaagctttgtttcttgtggaatggtcaagagattacaacaggccaggcatggtggctcatacctgtaactccagcattttgggaagcagaggcagggaatcactcgagaccagcctgggtaacatggagaaatcccatctctacaaaaattag

SEQ ID NO: 255536 - DNA, 571 bp, Homo sapiens
ttgcatttggagattgtgaatggtctgcagatctgacctactcccacctcattcaatgaaaccagcagcgaatattacaagctagattaattagttaatatttagatgtactaactactgccagaaaaatactgtcaactggcaaactcaaagagaagctttttttgattgcttggctgcattctgagtcatgttagttttgaaaactgctttttactcgtatgtaaatgagtaaagggcctaaactaggattcagactgaaatttcagaaactaaagcatctataaaccattctaagtttttctgcttgagatgactaatattagagaatgccaataaatcactgccagagtgaagggctcaactggtaataattgcgataataactgaagtgaggaagaatttattaatgaagctcaaagctttgtttcttgtgraatggtcaagagattacaacaggccaggcatggtggctcatacctgtaactccagcattttgggaagcagaggcagggaatcactcgagaccagcctgggtaacatggagaaatcccatctctacaaaaattag

SEQ ID NO: 255537 - DNA, 533 bp, Homo sapiens
ttttgtaatgagaagcacctcgggggtagtgttatgacacaggccatggtgtcacatactctgttcagttcaaccgtacaatggactggtaagaatgccaaacagacatttaaattagacaactatgactttcaataaatttgcacagagatgatcgctatcagatatgtagcatgaaaagcccgttttatattggaaagttgtctttgcctagtaggatttcaaatgtttattgaattgaatatgaggaaatatacttagctctatagttccctgaatattggctctagaatagggtctttgagatgtcatgttccggagaagtctagactcacttyatgattttaaataaaatggctgccccttccccatttcccagattcatgctgagctcgactacctccgtgagaaatgactctcctgtagggctcgatgaccttcatgtcaatgcgctgctcttgttctccaatgaccactgtcctccaaagccggttgtcctcccgttcctcttcggccgtatattctggaataga

SEQ ID NO: 255538 - DNA, 640 bp, Homo sapiens
gccaccttgcacttgagttcttggcacttaaaaggtaacctctggagctgagtttatggcctgaaactcagagagctaccaaacatgcaacacggattcttaaatttcacaatgtggtggtcaccaacattcatcaggaaaatgatgttaaaagaccaatttacataaaatataaygcccaatttgacaactaaaataaagttgacgtggattagaaagcccggcttccctttgagaagttaaaggagattctggtaaacaagaacaaaacgggcacttagctgatgatggttttacaccttgtgtggtttgtggctgtcctagtcaggcttaggattttaaaggtggagtcaaacaggggaaactttcctggggagagttgagacctgtgtactttaaacctaatgcaatcaccaaaaggaaatccagctaatctatggaaacaaatccactcatacttaacagtggattaaaggtatcttactggtaaacaccagtctaagggacaaagtatcactacaccgtgttaatgaagtattgaaatggaaggtcctactttcttgctaaggctcaactaaaatctttgaggcacataattggcaaaataggaaagtacacacaatttcataaaatatcttaa

SEQ ID NO: 255539 - DNA, 640 bp, Homo sapiens
gccaccttgcacttgagttcttggcacttaaaaggtaacctctggagctgagtttatggcctgaaactcagagagctaccaaacatgcaacacggattcttaaatttcacaatgtggtggtcaccaacattcatcaggaaaatgatgttaaaagaccaatttacataaaatataatgcccaatttgacaactaaaataaagttgacgtggattagaaagcccggcttccctttgagaagttaaaggagattctggtaaacaagaacaaaacgggcacttagctgatgatggttttacaccttgtgtggtttgtggctgtcctagtcaggcttagsattttaaaggtggagtcaaacaggggaaactttcctggggagagttgagacctgtgtactttaaacctaatgcaatcaccaaaaggaaatccagctaatctatggaaacaaatccactcatacttaacagtggattaaaggtatcttactggtaaacaccagtctaagggacaaagtatcactacaccgtgttaatgaagtattgaaatggaaggtcctactttcttgctaaggctcaactaaaatctttgaggcacataattggcaaaataggaaagtacacacaatttcataaaatatcttaa

SEQ ID NO: 255540 - DNA, 648 bp, Homo sapiens
aatgtctaccgtttaagccacctcatctttggtactttgttatagcagccctagcaaaccaataaagtatcagatcttcaccggtatatccagtgtcaaggaggagactcttgactctggaaggagtatatcagtcctttcattcatcttctctgctagaaagcccttctatggctgcctgacagatctccagggagagagagraacctaagttaggccccttgacactgggagaaagaggtcatcccgcttacttacatgtatcctgctgcacagtataatcacattctatgaagctaattataagacttgattaatttcataccctcctgagggatacattcagtaatcatacggctctgccaacctcttggggagaactgattcatttaaccatctctttttcatttctatgtcttcactgtataaatgtaaacagatattcagggaagaaaatgtgcttatgcttttaaataattgttgttcacagagttatagcattacatgagattccatgactctgtcttatacatcactcacatttttgggttaccaggtccctgctgatagatgaaagtactggaaaataaacataacagctcaataccagctatatactcatccagctaatggcaagcacataaaaaa

SEQ ID NO: 255541 - DNA, 595 bp, Homo sapiens
ctttcagtaccctaaaaatgtttaatttgcccatagagacatttccataaaagccgttttgttttattttacctcccagatargaagtttctcttagcaattaagagcaattccatgggtcatttttttgattgccaggcatcgtaatctaattattccagattttacattccgtgcatattatctgttatgattctaagaaaactttcatcagatgaagattttggaatagactcatgcaggagccgctcccattttctctacaggaggggcgcagggcagccatctggctgtaagtggtcctggaagctgcactcacatagcagcttacataagatcaaaccatgtcaacagttcacatcaaagagggggcagtggatggagattatgccccctttccctttcatccacatggccagtaccctgatctctggcagagtcacactttaaatcacttctactaggtaagagtctagcgttgttttctagttaccacacagaaatttaataacctgtgtattcctggttgaaactgaccaggtagtaatttttttactttctcacataacttagtttctcagtgaaatactgatat

SEQ ID NO: 255542 - DNA, 593 bp, Homo sapiens
gacctctttttaaaagatattcaagggttgggaattagaatggagtttgaaacttaaaaaaatacgaggattactaaaaatgtcataacaattgttgactcacaaaccaaatttcacttaaatttaatattgagccaaacagcaaataaatcagctttaagttaaaaattttttttcctttacttcctgccaagcaaacttttaaaattcagtatcccttccacagttacatttctgataaccatgaaraacaacgagttaaacttttgaatctggaatagaaatgtctcattccaattaagaaaataactacaacctttgaccttcccactagcctgatgggaaattcactggcaccattatgggtttagccgtccatgtgcaagtaaccactagagggcagccttatctcatatctgacatgcggcagaaaaatacctgaaatgcttctaatgttcctttaattatttttgtagtatctttgattttcctggatacttaataatcaacttcaaatggaactaaaagtattcctaaacagttcaaaagtccactttcacaaacaatgatatcacaaagactggtggtgagag

SEQ ID NO: 255543 - DNA, 304 bp, Homo sapiens
attaagggcctctcctaaatggcctttttgattgccttcttcccttttttaatttcctccttgtcctttttgattatctaccccacgaccctcagggctcctcaatgtaatacaattaaaataacatttttctgttagagggttttattttatgagctattaaccccctgcttgcctgaagtctggtttagtctccccgcatacccaccygcccctagacacagtggcgcgtctgcagccccacgggagacacatgcagacgaggctgtaggcggggcctacgcaaagcaaagctgaggaacta

SEQ ID NO: 255544 - DNA, 304 bp, Homo sapiens
attaagggcctctcctaaatggcctttttgattgccttcttcccttttttaatttcctccttgtcctttttgattatctaccccacgaccctcagggctcctcaatgtaatacaattaaaataacatttttctgttagagggttttattttatgagctattaaccccctgcttgcctgaagtctggtttagtctccccgcatacccacccgcccctagacacagtggcrcgtctgcagccccacgggagacacatgcagacgaggctgtaggcggggcctacgcaaagcaaagctgaggaacta

SEQ ID NO: 255545 - DNA, 546 bp, Homo sapiens
attttgttctcattaagtcgcagggttaagggctttaccctcaacgcccatggaagcaatgttaggttttcaccttggaaagttctctgaggccctaagtccattgacaaatatagcactaagatgtgttacagaaaattgcatctgaaagccagttgctttgctggcctcattcccacttggctctgtgttcttcaatgaacatagaacgcacagagaacaccagaggggcacacgtgttcatccctctgccttaatgcacacaaattatgatcatcccactgtctgatcagcagtggatctaaggtgggagggtgtgcagcttagatggggacagtcacaagccggttttactactagagctaggaggcttaatcttcttaatagcgattargttgatgccaccctaacattttctctggttatttcagggactgagaaggtgccagctcacatcacacatcctttctgatgatatgaatggagaagtctatgtcataatttaaggtgcattcttacacatcctgtgttctgattagagcaata

SEQ ID NO: 255546 - DNA, 643 bp, Homo sapiens
  misc_feature (1)...(643): n = A,T,C or G
nnnnnnnnnnnnnnnnnnnnnnnnnnnnngcccagccagcaagaccctgtctctacaaaaaactaaaaataaaaaacaaattagctgagcaagtcccagctacttgggaagctgaggcaggaggatctcctgagaccaagaggttgaggctgcagtgagccacgcgcatgccactacactcccgcttggccaacagagcgagtccccttctaaaaaaawtaataaagtaagaacgctgtacagtttccagtagactactttgtttaaatactttttttcacatagtgggaataacattcccctttcttacaatcagtttgttcttcaagcttagaagcctatggaggtagcatagttgtaaggtaaaaggaaaccttggtcaattgtaagaatgactatgttgcacttggctttcttcctatactttagagtggaagaaccactctgaaaaatgaagctcttcattttaaaagcatttaaactggggattgcctttacatcctggctccaccacatactagctagttgtaggaccctggacctcggttttcatctgtaaagtggggatagtagcaacacctacctcacaaagttgcagtaaagataaataaatgaacacttagaaagtgcttagagaagtgcc

SEQ ID NO: 255547 - DNA, 577 bp, Homo sapiens
ctctgaagcttaacagtcaaatttcccttcatgggaatttctgcctcaagtcacccaaaacatttattttttttaaaagaaacaatacctgtgctttccagataacaaggtggactaaaatactatctggtgtcacaactattcaggctcattttgcagtatgtgcacctctgtcttgtgtacctgtgagctgacactctggtctgataatatattctgcagctgtacatattaatttgtaagttgaacaatctctccgtgagggcagttaggaaaccaagattgaaattgctaatgtcgggtgacttcagctgtcgatgattatgtagtcaagtcttgactaaggtttccagaaccctggctaaaaatggaagttttgagacggtacaaaaatgaattcatacacttcactgatagtgaaactttttgaagaacagatgtcaagatgatttaagaggagctggaatttaacatcttaaaaaaaaacgtataggcaagttaggacagttcagttttcaagaaaaatycaacaaatgctaaagaagaagtaatttgggtgactgttattagagaaaaa

SEQ ID NO: 255548 - DNA, 616 bp, Homo sapiens
attcactgacagctgaccactttcagctttgcactgcctataccttttgataatcacaacagcctcatgaaaaaggtatccttacttccatcctacagatattgaaactgaggctcaagctaagtagcttgcctcaagtgaaacgactagttggtaggtgaaactgggcttgcaacctgggtctttctgactccagaggtcatcctctttgtattacagggcactaactcctggagatttatcaggaggtcctgatgaaagggctcactcctgccttgaggattttgtgatcagtctctgaggtagcacctgtactgcagaggtctccacaggcctttggttgctggtatgtgttgacactgtagtcatatgccctatagtcattggcttargcaaacacctgtgtggtagctaaagggtggtgggttttcctaggagtcaaaagttgtcccaagtcagcccctgggtctctcactgcattctcgagcactgtgtaaaatacatggtactaagcaagccttatttttcagacctttatcagcatattggttatgattaccattttggcaagtattatcagattatccatcaccatagggcactcctgaaagtagcc

SEQ ID NO: 255549 - DNA, 615 bp, Homo sapiens
aaaatcaatcttttttttttaatcccagtggcttcctgtgctattctagtaacttcctgggaaggtgagagaaatgcacagacattcccaaagtcactttggttactaataagtctcagagaagccctcatcacgaggttctgtccaagctgccacacactgtcctgaaccttccttctcagttttttatttattttttcccattctagaacagccagcaaatgatttcacacctttttgtttagctgctaaaagcaacacaataactcccctcagggctgcctctgtgggttccaaaaataaaatgggctcattttcatgctaagcattcaaaggctcataggaattctaatgaaaggcaaaggaaggaaagaaggaaggagaaaagaggggtcaggctagggggtgtcrccaaggaggttcagcttctgcctggagttataagccacccctgctggaaggcataggtagaaaataacatagtgcctaggctgcagattaaaaggagatctaatacaactcttaaactctccagccttatcttcttatcttctatcctcaaacccagggttattcttggaacacaaactattgttcaccaagaagagtggtagc

SEQ ID NO: 255550 - DNA, 518 bp, Homo sapiens
aaagtacaaatgattaattagtacacactgttgagtgaaaagcactaacaaaatcaagggaaaatatttatgactcccatagtaaagtttaaaaaacactttttaaactttcatatggaaccaaagtttggtgtttttaatattttgtccctatataatatttaaaattttaaagtttccacatttgttcaatttttacctacaaaattctaattattttaccgatttggctttaagtaatgagtcagattttrcaatgctgatagtagccacacaaactagtatttgatttcaggttttttttttttttgagacggtgtctcactctgccgcccaggctggactgcagtggcaggatctcggctcactgcaagctccgcctcccgagttcatgccattctcctgcctcagcctcccgagtagctgggactacaggcgcccgccaccatgcctggctaatttttttttgtatttttagtagagatggggtttcaccgtgttagccaggatggtctcgg

SEQ ID NO: 255551 - DNA, 575 bp, Homo sapiens
aacggatattttctacaaatactctttaagcaataattggctttttctttacacttaaatgactctgtgatttgggtttttctgtacaggttttcttaggatctgcaattctaatatgtgaccatacaactgaaaagtggaaaaactctatttccagatttattattgtcttaacactaaattttatggcatttcccagatatctggttgtattagtctgctcaggctgccataacaaaataccacaggttgatggcttaaagagcagacattaatttctcacaattctggagtataggaagtccaagatccaggtgttggcaaggtagggatctgcctaacttgtggcaggcagacaggtgagggctctctgccggatttrcagatggctgccatctcaccatgtcctcacacagtgcggggagggtatataacatgctctctgggatctcttgatgtctcttcttgtaaggacgctaatcctatcagattagagccccactcttactaccttatttaactttaattacctcctaaaatctccaaatgtagccataccaggggttagggtttca

SEQ ID NO: 255552 - DNA, 580 bp, Homo sapiens
tttttcttattaagccattgaagtgttatttacatacataaactggaaatttcactaaagaaatttgtaaggttaaagcatttagctaagaatgtgctctaagttttcactgaagggggaaaatatcaacaattcataatccccttttcttttaacaccatactttttttctcttttctttttyttttttttccttgaaacagagtcttgctttgttgcccaggctggagtgcagtggtgcaatcactgctcactgcaccctctgcctcccaggctcaggtgaccctcccacctcagcctcctgagtagctggaactacaggcacacgacaccatgtccggctaatttttgtattttttgtagagatggggtttcgccatgttgcccagtctggtctcaaactcctgagctcatgcaatccacctgcctcagcctcctaccatactttatttctaacaccatcactaagtctgcctcagctggggataataccatcactttctaaatgtagcacattttgctcctctttatttagtgttagatgatagttatgttgctattcccctagacataaaaaatg

SEQ ID NO: 255553 - DNA, 547 bp, Homo sapiens
tagctcttcttactaggctcacttaaacctgcctgagctttctctaacagtgatattacagagtaataattcctcagtgagcaaaagactttaggaatttggagtatattttattcttctgttattttctcttcttataacttgagtaaatttatttttcagaatgaaattgctcaggtcttgctctaagaacaaaaaatgacagtctgtgaagactgtctctctctccagggaaaaaaagactgtcaagtgtataataaggcaaagaaatgtaaaaggccaataccgtatgccctggccatgcaggatttttccagaaagagtctcctcacacaaataccaaattgtcagcttgaataacaacctttccatgagccctgaaggccccaggagaggtctgacctgacttaactacctacagacrtaacactgagaagttaaaacacaggagagtgcagaacagggaaacctgtgacaccaaactgagaagacaaagcttagtaaaaagctctgtaggagccggggacaggaaactatgccatgcttg

SEQ ID NO: 255554 - DNA, 582 bp, Homo sapiens
aatttccatctttaaaaggataaaactgaagatatttaaaatcatttgatctactagttttaaaatatttctttagctgaggtattctctaatcaagtgaaatcctacatagaaccacagataacaattaggccattctgctgaagtaaaaaatggagttccacttggtccacagtaaatataaaagcacatctgtgcctaaaaatcatttgaaagtcaccaatgtaattctactcccctgctatactgagactttcaagtgtagagacaggatatgtcttgtcaagagaagactatattttaaaatcagaggtaaagtcaaacctggaactcagatttcccaagtcttgatttcatgtcctttacagtcagcatgtgtagtaaactctggatctttccctgaatcttttccccctcctcagcttcatgtatccatcatataattattggaaaggtatrttaagtccacttacagggagagagcctggttatttgaacctaatcaaggtagtccctttacagttaactggttaaggtaaaccagacctaagccactgtataaatagcattccttgggccaac

SEQ ID NO: 255555 - DNA, 659 bp, Homo sapiens
tagcaaattgttaggggaatggtaagagtttctagggtgctagtagtattccatttctttatatgagtggtagttacatgagtggaatttcactttgtaacaatttattgaccagyatagatatgatttgtgtgcttttctgtatgcattttaacatttaattttaaagtttgtttcttaaattcctcattcttccccaacctgcctgaacacccaccatctcattgtgagtagatgattttggatgctacttcacagagaaaagagagggcattggtaggaatgcttcgactttctggctgcctgatctatcactctccctgccaaactcttctgcctctaaacctaatccagcttcctctccagggacagtggaagaactagacgatgcttgctcaaaaaaaaaaaaaaactgctctctctgtattcaaggttgcctccttgggaacttcatgccatgccctggtctcctcctcgcatcttttcccactgttttgtttttcccaatagcatctacacttatcaattaggaaaaacagactatggtcttaggtcttcctcttattctccttcccccatacagcttcatgaaagacctatctgtgtttgccttatctatttcattatcttacatttgctatcacatcaatgcaatctaa

SEQ ID NO: 255556 - DNA, 598 bp, Homo sapiens
tgtgatgttatggagtacaaagttagaattagcaacatgacctgaatttagaagcaggtgggatacttatacttttctcagtctgtgggcaccacaccattgaagtatatgtctaagattaatttatatttggttgtttgatttagcaaaacttgctgcctgttaaaaaagaaattaagacctgtcaacttaaagaatacattttgtgagttaagaactaaatgacagtataatttattacccaaagcagtttgcttctgaaaattaaagagttcaagctattaataattatgctgtgactgcaggcataaactgggaatgtcctggcaaatgaggatgtattgtcacctttctcagcctgcctgtgtgttgtttttaagcttcactctagtttatatattttaaatgtcataaaataccacatacttataagagaaaaggttctattcattgctgaagtggaagyttatcattaatttttatttatttatttttttttccagttttggaattcttattactttgaacccaagaaccactgataactagcacaatccagtgaaacagaggaagcagcagcttaatcaaaggaaaaata

SEQ ID NO: 255557 - DNA, 633 bp, Homo sapiens
tttgtacccatttttaatcctccaagaagacttaggatagcaggaaaccattgagagtcagaatgctttctacagatcttaggtgaacagaaactttcctcttcatgagcagtgaggtagagggtaattaaggcttcagagcattgcccgttatttccatcttcttcccttcctttaattctgctaaattcctttaatttgtttatcagtattcaagtatttttatccattgagctaaggtgtttcttaaactaaccctattttgttaaagtcttaattataatatattcatagtacatttaagtgagatagatgagtctctcatataatttagtggttagattagattagaattttctcccctcagaaaattaagaggaaataaaagtctgtagcaaatcacttggcaaaataatggctccttttgtaataggaatttttactctttygatttatctgttacataagttcaaatttttacatattttccaccttttttaaaaaagagtgatatgtagtcaatatcaatttgagcaacactgttgcatataaattgaaaaggactccaattttctaattccgtacctcagttgtgatcactgttggtattttggcatttatgtagacttcctt

SEQ ID NO: 255558 - DNA, 566 bp, Homo sapiens
tctacatcttcctccagcccctaaaattctcatctgacactttgtgacatgtgtaatggtgtcagcatctcttcaaatatagctcccttcacgttggaccctctgaggttggcttcttgaagatcacacccagacagatcacagttctctaaatcagtgcctgccagagttgctcctctgaagttacagttcttcaactttggatttttttaaggtagccactctcaggttaattcctgtcatctgacttccttccatatcagcacctttcagattagcaccttctaaattggctttaagagcagaaggatcctcaaaattacacagtttcagggatgctccttctgcattagaacagagcatcttgactccctggagatttgcacagtcaagcactgatccrgagagatcagctcgttcaagatttgcacagcaaagatttgcatgtgcaagactgcagcggcttaaactggcaattttgaagttaatgtatcgaaggtccaaacaagaaagatcagcaccactgaagttcaaaccctggcatcgcagttctgacttggttggag

SEQ ID NO: 255559 - DNA, 376 bp, Homo sapiens
gtggccacagtgtgtgacaagtgcttagttaagatggaaaaagcgttagatatatgggcagaaaacatgaataaaaatgtattctaactgatggcaatcaagttcaatactatccttgggttcaggcatctgctgggggtgttggaccatatcccctatggatgaggaaggctactatatttacatttcctgtggtgcaagcagaacccataaagattagcagagcttgagccttctcataggtaccctggwggcatttgccttctgggttagaggaccccagcatggaaggggcttagggtggttggtggtcagaaaacgttatgctggaagaaatcatctcgccttggatacagaatccttcattcagaacaaa

SEQ ID NO: 255560 - DNA, 635 bp, Homo sapiens
cagtcatgtcctaggccttcacagtcactcaccactcactcactgactcacccagagcaacttccactcctgcaggctccattcataataaatgccctatacagatgtaccattttttattgattatacatatttttactgtaccttttctatactgagtatgtttagatacacaaacacttatcattgtgctgcaattgcctacagtattcaraacatgctgtacaggtttgtagctctgaagcaataggggctagcctaggtgtttggtaggctataccatctaggctgtgtaagtaaactctacgatgttcacacaacaatgaagtcacctaacaatgtggttctcagaacacatccccgctgttaagcaacgcacgagtgtacttttattctcaaattgcagagaaggaaagtgaggttaggagcagttaagggatatgcagagtacaaaacgagtaggtggcagaggttaaacttgagtccagatcttctgaatcaacatccaatgctctttaccctttatcagaggttgtattttataattttaattagaaaaatatgaagcaccactattagggcagtgaaactaatattcatccatactgcataatcttgtgccaaaaacaattcct

SEQ ID NO: 255561 - DNA, 590 bp, Homo sapiens
tttatgttagtggttctcaaccttagctgcacatgagagatcacacagctcagatgaagctcatcagcatttcaaggggtcagatttaggcatcaggatttcttttcttttcttttcttttctttctttctttctttctttctttctttctttctttctttctttctttctttctttctttctttctttcttttttttttgaagcaaagaaggaaaaaatcttgccaagctttatttaggctrtaatgattacagataacacacatctaaccctatattccgtgcttcccatgcagtcccctgagcaggctcagctaccctttccctccagtctcacttcttgtcttcctccttcttgtccttcttgctgtccttggtggcctgggaggccagggagcccacagcatttcgaatggcttcattgttgggatccacacctgggaggttctctaggacactctgaaggaactcagggtcttgcatcacgtcgtaatcatcctcctccttggctggctcagatgtgtccatggctgagctggcatcaatgtctgctgattctgccaggccaaactctgctccctgcagggaca

SEQ ID NO: 255562 - DNA, 603 bp, Homo sapiens
ccaaaccacactttgaaaacagttggtttagaccaactttattatattttattattcttatcccctatatatctaatttttgtgaattttatctgtcacaggctaaaaaaaccccatgaaaatgtcctaccttttgttgatttttgttcttttgaggtgttttgctttatgtaattgtgattgtgtataatgtggtacatacatatccaagacaattttatcgtttatattttttttttagtggcttaaaacagtaataactggtttctttttctcacaaatstgcaatttgagcagagctcaggaggtaggaggagggcttgtctctgctccacacagcatcagctggggcagctcacctgagagttggaggatccattcccagtgtgcacactcacctggctggcaggctcatgctggctatcagctggtagtgcagatggggccaagtgtcagggcctcagttcctctccacatgggcctcttcatgtgggcttctccatgtagcccaggcttcctcacagcaatgtggctgatttcccagggggaatatcagaagaaagaaaatgttagtccattctgaattatgctattgctttgaat

SEQ ID NO: 255563 - DNA, 590 bp, Homo sapiens
gcccatcctcacgattcaattacctctcactgggtccctccaacaacgggggaattatgggaactacaatttgagatttgggtggggacacagccaaaccatatcaggtaggtacaatttatctagaggaaaatgaggcacagtgagataagtaacctgtccgagggctcacaacttgggggtggatctgagcatccaactcaagtggtcccacaccaaattctgttcccctaacaccggctgcgctgagagaggatgtttaagatcatctttccctgctttgcttactgttccctggggaccctcactcctaaccatgtcacacaggtagagatacctacagctttaacaagctggttgtttttcatcaacctcaaactgccttagtacatctaacctcacatacaagacaactctaggaagtgtgtttttggctctctgctcaccatctgaacttgctagtctatttgcagacagctagtaagcccggtacagtttgatgcagtgactttgaaagggagraaatggcaactgcaaaagctgagggctgccttgttccttcagtccttccttggcctttgtgctaccca

SEQ ID NO: 255564 - DNA, 522 bp, Homo sapiens
aggggggtgttatcctcgttttacagaggggaaactgaggtgccagtgatgtgactcattcagaatcccacagcacccccttgtggtgtggagctatggtcaagacttgctgtggaaaccagtggcttgcgtttcttgattttttttttctttttttgagacaggttctcactctgtcacccaggctggagtggaggggcttgatctcagctcactgcagtgtcaacttcccaagctcaggtgatcctcccatctcggcttcccgagtagttaggaccacaggagcatgacaccagcccagctaatttttgtattttttgtagagatagggtctcaccatgttggccaggttggtctcgaactcctgggctcaagcgatccatctgcctcatcttcccaaartgctggaattacaggcgtgagccaccatgcctggagaaatatttttgttttaaaaaatactgtatttatctttcaaaggtgatactttaaaaattcaacaagcgagaaagtaaagaaaag

SEQ ID NO: 255565 - DNA, 541 bp, Homo sapiens
atcattacttactacagagtcataaagaaaaaaattaggatatgaactaataccacaaaatattcaatagtatagttcaggtagtaaaaaagtkagagaatcattaaattgtaagcatactaattgtgcaacagaccaaaagtgcagatacagatggtagaaatcagcataaactcaagtcatcagtgaagactttccagagaatgtcatagtctgtagaagaggacctgcccctgggaagtaaagtcaggagaaaacagaacagagagggaatcacagtcacttattggagctgggatggaaggtcatgggttggccttgccttctgtttagcaaggtcagagtagcctccatcagcaaaagcagtagaactatcctgggcaagcccaggaaagttctcatagcaggtcaaagtagcatagcacatttcggaagcctggcaacgagggggaagagaaaagtgggaagggccctgagctgcttccttgaacacattgcatgacacatccatgcatcaaaaatacaagcttcctcaagcagc

SEQ ID NO: 255566 - DNA, 541 bp, Homo sapiens
atcattacttactacagagtcataaagaaaaaaattaggatatgaactaataccacaaaatattcaatagtatagttcaggtagtaaaaaagtgagagaatcattaaattgtaagcatactaattgtgcaacagaccaaaagtgcagatacagatggtagaaatcagcataaactcaagtcatcagtgaagactttccagagaatgtcatagtctgtagaagaggacctgcccctgggaagtaaagtcaggagaaaacagaacagagagggaatcacagtcacttattggagctgggatggaaggtcatgggttggccttgccttctgtttagcaaggkcagagtagcctccatcagcaaaagcagtagaactatcctgggcaagcccaggaaagttctcatagcaggtcaaagtagcatagcacatttcggaagcctggcaacgagggggaagagaaaagtgggaagggccctgagctgcttccttgaacacattgcatgacacatccatgcatcaaaaatacaagcttcctcaagcagc

SEQ ID NO: 255567 - DNA, 593 bp, Homo sapiens
catgggtaatgaggaaattttacaaaagcctctgctctgatgtgtaggatcctcttatgctcaatgtaatatctttaggtaaacgctgaagacaagaatcacctggcagtgtggtgataggagaggtgcctgctaaaaatgcagatctcttktccccttcctgaatcaaaatctcttgggttccaccctagcaaggatagttttaccaagtccccaccatgattctgatgctgatgtaaatgtgagaatcactagcctcagcctcatgggaagacaaagtgaggaagactattagccagggtggatgggttaactcacagtatggggagacagctgcctggatttgaatcttcacttcacctgtggttcactgtatgacttaatctgtcaaaacctcagttttcttatctctaaattggaaattgtcatcttggtacatacctcaccgcagttcctgtgaagactgaataaaattatacacacgaggtgctcagcacaggtcatggagtcagaggtcttgatatagtataggggctgctgtgtgcaaggtagttatgttttcttgaggagttatgggtaaaatgaatcaaatt

SEQ ID NO: 255568 - DNA, 528 bp, Homo sapiens
agattaaattctgcactgaaattcttcaagcttgagctctagccagaggtgaactttattttggaaaatctgagaaaataagctccattaattctgaggtgtggaaagaaagatcttgaaatacccctcacttctccagacacattatttaacctagcacattccttacagcagctgttccaaatcttttccactttccccaaaccctcctaagccgtatggagaaggcagatgctgggtgaccttccttgtccaagctcctcccatctccaaatgcccccatgtctactcccactcaatcataaatycttttaggacagcccactgtctttcctttacactccccttctcctagtccaaaacggagtgccctgttcataagaatggttcactaagagtttaaaaaggaatgattggggcaaaatcaacttaaacaacatggatcctagattttgctggtagtcagaccctgactagagtcagtttccttggaataatgaactaaggcaggaacacagcagagtgccc

SEQ ID NO: 255569 - DNA, 629 bp, Homo sapiens
tctcaaattcctgacccacagaaactgtgagatgataaatatttggttcaagctgctaagttttgagcataatttgttatgtggctataggtaattaatatagtaaacagagtataacaattaaatgtcatccttaattaatgcaattcaagctcacattgactattttggctgccatgttaccccaatgattcatgttgattttataatcaagtaatacttctcaatctttttctctcatgttccgccaagatttagcctattgttccagcttatcaaaatcctttgggagtttaattctctttcaaggtaattagttatccctattgctttgtgctgcttcatggaagcagcaatgacataaaaatgcaaggaattgggtagtattctcagatctgcagcgaatgagttgagtgacaatgaacaattctcttaatttccttcagcttccrtttcttaatgtgcaaactgagtataacaatgctgatttcatgaggctctgagagcagactaacctgacaccaattcctctccccaggactttccaggtgaaagggacactttccacctgcacagcatctactcattccccccttcctctagtaactgtcctattttcctttggggaa

SEQ ID NO: 255570 - DNA, 551 bp, Homo sapiens
gttgaggctcagcactgagttggtactggagtaattggataggctggatgactataagtggggtagcttattagagatgtactggtatgcatgattttaaactacctaggcttaaaaataggagggtgcacagagatgtttgaaagcagatggttagaactgtaggactcaactcttgaaaaggctcataagtcttagttcacgccagttcagttacataggatgagtaatatatttgtaaccaaaatgtgagctggagttaccttgcccctttggatttaggcaagaccaaatcataccctcaatctttgtcttgtggatgcccactgcctttttaaagatttttgtaaattctcaaaagactatgttttcatggtcacctgcctccaatgtcctgcctccactgacttcttgtcattggtttggccttaacagtttctctatctctgaccacccattgttgccactgaccctagtggaagygcagccacttcttgattccttatcaaagcaaccacaggtactaggcaggttgtgtgtagcagaactaa

SEQ ID NO: 255571 - DNA, 558 bp, Homo sapiens
tcatggtttagcataacaggagatgtattttaatacttcattcaaaacaagaagtgattatttaygaaaaaatacattttaaattccctttctcttaccagtgtatgaaagaacactgaactcctacagagagaattgcactggtaaagtgactgcaaagatatccacacacccctcagcacagattgcccagggctgcggcaacaacagccctaattcgccttttgcagagtattggaggggaaaatgcatgtttttttcacaattagttgacaaagagtacttgtttaaatatttgctcaatccggtgtataaaggaaggcagatataaagaaccaagcccaagtacagatcattttgcacagtgttagcttgtgacacaggacgggacccagaatgaagccaaaccccatctttcaacacatgagttaagttttatctcccctatgtggacgaattgaaagttgatgtcagatcacaatgaatatactttagagctcatttttatagtggtctgcagagtaagctgaatctaattctctttgtctttttccaaac

SEQ ID NO: 255572 - DNA, 591 bp, Homo sapiens
acttcattcaaaacaagaagtgattatttatgaaaaaatacattttaaattccctttctcttaccagtgtatgaaagaacactgaactcctacagagagaattgcactggtaaagtgactgcaaagatatccacacacccctcagcacagattgcccagggctgcggcaacaacagccctaattcgccttttgcagagtattggaggggaaaatgcatgtttttttcacaattagttgacaaagagtacttgtttaaatatttgctcaatccggtgtataaaggaaggcagatataaagaaccaagcccaagtacagatcattttgcacagtgttagcttgtgacacaggacgggacccagaatgaagccaaaccycatctttcaacacatgagttaagttttatctcccctatgtggacgaattgaaagttgatgtcagatcacaatgaatatactttagagctcatttttatagtggtctgcagagtaagctgaatctaattctctttgtctttttccaaactctgggacaataattctcaacaaatagtaaatcaatactatcggtgatcttaataatgttcggagtc

SEQ ID NO: 255573 - DNA, 591 bp, Homo sapiens
acttcattcaaaacaagaagtgattatttatgaaaaaatacattttaaattccctttctcttaccagtgtatgaaagaacactgaactcctacagagagaattgcactggtaaagtgactgcaaagatatccacacacccctcagcacagattgcccagggctgcggcaacaacagccctaattcgccttttgcagagtattggaggggaaaatgcatgtttttttcacaattagttgacaaagagtacttgtttaaatatttgctcaatccggtgtataaaggaaggcagatataaagaaccaagcccaagtacagatcattttgcacagtgttagcttgtgacacaggacgggacccagaatgaagccaaacccyatctttcaacacatgagttaagttttatctcccctatgtggacgaattgaaagttgatgtcagatcacaatgaatatactttagagctcatttttatagtggtctgcagagtaagctgaatctaattctctttgtctttttccaaactctgggacaataattctcaacaaatagtaaatcaatactatcggtgatcttaataatgttcggagtc

SEQ ID NO: 255574 - DNA, 426 bp, Homo sapiens
ttacaggggaaagcaaaggggtacaaaaaatgsccccccacgcccggggcccaggatttcagaggttccagagcttacgcggagccactcagtaaggcacactgtaggaggaaagtaggtcacttcttagcttgctctataaacaccctagattcaaactcatgtattcctcctccacagaaaatcatgtataccagtcatcataaactagtgcctcaagggagggatctgttcttccatagggttttataaaattgaatttggtcatgcattctgccttttgagccatagtctccaccactgcctactcaatttgcattacttgtttatgggccctatctaggccctagaaacatcaaatcaatttgcaaagcttgacctaatcaaatcttatgatatacctttgcctctgcaagctgcaagaaa
